United States Patent Application Publication US 2015/0240253 A1 - sequence listing, part 31

SEQ ID NO: 147342 - DNA, 337 bp, Zea Mays
ctaatattaatgatcatgctgatgtgctttgtatgaaatcattgtacacccatattaaatgctacggtgagctgattgcggttgcagaaacatgtggtatcattattatcaagtatctaagtataagctaatctatgtttcacatataccactagcaaatgtcaatacataaatattccaaccgcgatttcgataatcagacagctggcctatcaaggcggcgcctttgcgctaggagacacactcctacgaagcccaaacgccaaattgcccgcctagcagctgcatagccaggctaactgctccccaggtgctcggcacccaactagtacctagc

SEQ ID NO: 147343 - DNA, 659 bp, Zea Mays
tcggatggctcctccacgtccgctcgtcacagcgccgacaccttcgagcccgcgcccgccccagcctcaactcctcgcgcctctcttcacgctcaggcggcggcccacaccagcatccgggcaaccatcaccgacattctcgcgccagactccactcagtaccctcggtggcgcgactaggtcctgcagaccctccaccgttacgccctcgccgaccacgtcctctccacggtcgttgacccgacgaaggattggctcctgatggatgaggtggtgctttcttggatccatggcaccctcacggccgagcttcaggacatcgttcgagtgtcggacgatactgctcaccggatctggggtgctcttgaggctcggttcctcggcaactgccagactcagattctgtacctagagaccgctttccgtcagcttgctcagggcgatctctctgtggacgagtactgtcgtcagatgaagacgatggcggacactctccgcaccctcggggccccctcactgatgagagcatcgtgctcaacctcctacgcgacttgagccctcgcttcgatcgcgtgacgcccatccttacccgcatgaagctgtttcccacttttgcggaggccaagaacgatctgcttctcgaggagcttcgcctctct

SEQ ID NO: 147344 - DNA, 544 bp, Zea Mays
tgcccaccgctcaaggtgcagggcgctcatgggtgggagcagccggggtcaggcgggggcttcgcagcagggggcgccgcgctggccgggcacctgggcgggcaaggccgcgagaggagaggggctggacgcactctggggtgctgcggagcggcgacaacgtaacagcgaggtcagttcagcctggagcgcgcgcgcagctttgcaggggctcggacgaggaacgagcgggggctttgggcgccagcactcggcaccaggggctgccatggctgaagtgtagaggaagaagaaaagcctgtagaagaggggagaaggagatgatttgtcacctgcgcatgaagaacaacggagcaggcacgcaaggaagagggtgacgacggggctgctcctctagcgacacgaggaagatgacgaggcggctcctccaaccatggcgacacaacacatagaggagaaagggcgtaggttgctgctgtgcgagaaggaagagggagggggtgaggttgctgtgcgcagacggttttgcgcgaatccgagaaaa

SEQ ID NO: 147345 - DNA, 1244 bp, Zea Mays
accgaggtggaaaataatagtcttactgcagacttcaccatagaagaagttaagcaggcgatcttccaaatggaacataacaaagcgcctggccccgatggttttccagcggaattctatcaggtattctgggagacaattaaaggagatttgatggctctatttaatgatttcaataaagattctctaccgttgcatagtcttaattttgggacgattatcctcatcccaaaattggctgaggcaataaggatagaacaatatagacccatatgcttattgaacgtgagctttaaaatcttcacaaaagctgccacgaatagactgataaacatagctcataaagtcatcagtccgacccaaaccgcttttcttccgggacgcaatattatggaaggggtagtggtactccacgaaaccatccatgaaatgcacaggaaaaagctaagtggggttgtgttcaagattgactttgaaaaggcgtatgataaaattcgctggtcgtttgtgagacagacgttaagaatgaaaggtttttcggaaagatggtgtgattggattaataggtttactcagaaaggccatgttaatattaaactgaacggacagttaggcaataatttccaaaccaaaaagggactacgacagggtgatcctctctcgccagttttattcaatatagtagtagacatgcttgctattttaataaacagggcaaagagagaaggtcagattagtggagtagtaccccacttggtggatgacgggctttctgtccttcagtatgcagatgacactattctttttatggatcatgattacgagaaggcttgtaatctcaagctcatcctatgtgcttttgaacaattatcaggccttaagatcaacttccataaaagtgaaattttctgctttggcgaggccaaagatagtgaacatttgtactcccagcttttcgggtgtaagacagggacttatccattcagatatttaggcataccgatgcacgttaggaagcttagtaatgctgattggtctaccctgctcgaacgcatagaaaagaaattgggtagctggaagggcaagcatctatcttatggaggacgtctggtccttattaattcggtcctttcgagccttcctttgtatatgttgtctttctttgaaatacctagggaggttttaaaaaaggtggattatctaaggtctagattcttttggcagtctgatcaacaaaagaaaaa

SEQ ID NO: 147346 - DNA, 708 bp, Zea Mays
tgagagcatcgtagacggtgagactagagatggagttcacaagctaaagtccttcagagtcataattggttatgtgtctcgtatgttgtggccggagaaaaggctgactatcctcacgcaaggcagtagccctttgtccgatgtcaagatatccaagcgtgagggtggaggagtcgtggtcgagcatgccatgttggagatagccatggtcaatatagcagtcgagatattcgcacatgaagccacgtgcacaaagaagcaccattgtgattatgaagacatgttgaggcagttgtcatggaaggggcgatgctaaggtcaacataatcagggttgtcgatggcatagacagaaggcgacgatgcaattgagatagatggggtggggatgccaaagtttgcttgaaccaagatgtggactaagtttgctagacccaacaacatgtcaaggatgaaacgacatgttagtgttgctaatactaggtgtacaagatagagggacccaaccatcatgtgagatactagcaaagaacgaagttcttaatgatggttatggtacataaacgatagagtagaatgtgtcgacacggcccatggttattggagtagacgaagaaggtggagaagaaacaacagcgtttaagatgtggttgtgctggatgatgaagaagctatgtggaggtggaaatgtctaactcgaaggtgagaa

SEQ ID NO: 147347 - DNA, 364 bp, Zea Mays
tcgttttataatttccaaagacttatgagaaattaatactttagttatattgatatggcctaggaccaacttggcccagtaaacggctcagtctggcctgtaggccgtggcgccggcatggtaaggactaaggaggacctagagcctaggtggctaggaggtctatctcctgtagtcctgtactacccctgtccctaagtcagtccctatatatagaggccccatgtacccttgcaacttaaggagaagtagatcaaagggacaaagggttagcccatcttttcttcccctgacttgggcgttgtcctactggtcactcttcctgtcctctcatttctccccaaatccccctccctaatctggg

SEQ ID NO: 147348 - DNA, 1065 bp, Zea Mays
cggaaattttatcattagaggttgtttacccgtccacgtgtcctcccaaaatctaatctgcttcccatctttaagaataaaggaaccaagaccaaagaattggtctttaactttcagtagcccagaccaaaaatgagagtcaccaggttttctacctacctttgacaaggtacaagatttgaggtatttgttcctaagtaaattctgccatagaccgtcctcattaatcaatttaaataaccatttaccaagcaaacacttattttgaacctctatgttctgaatacctagacccccttggtcttttggttgacaaagaatatcccaacgtgcaagtctatactttttttatgatgatctccttgccagaagaacctagagcgatagtagtttattttttccagtacacccttaggcacttcaaaaaaagacaacataaacataactaagcttgtgagaacagaataaatcaagactaaccggccacctaccgacataagttttcccttccagctgctcaatttcttttcaaactttatctctatggttttccaatcactattacttaactttctataatgcactgggatccccaagtatctgaaaggaaagccgccttttggcatctaaatagagagagatagagtgtttcttcctcctcagtcaaaccaaaaccaaaaagctcacttttatgataatttatctttaaccctgaaacttgttcgaaagttatcaataagagctttaaatttgccgcttttgctaagtcatgttgcaaaaaaaggacggtgtcatccgcatattgcagaatggataaacctccatccactaaatgcgggatgagtccttcgaattgaccctcctcttttgctctatttaccaaaatagcaagcatgtctgcaactatattgaataaaataggagaaagagggtccccctggcgtaaacctttataagtctggaaacttgcaccaatatggtcattcattttaatgccaacatgaccacctgttgtgacttaattaatccaggaacaccacttttcggaaaaacctttcatacgta

SEQ ID NO: 147349 - DNA, 449 bp, Zea Mays
ggtgttggtgcaaaagatcctaagacacatatcactctgcgcagaggaccgcgggttgaatctctaaacctataaggggttttctgcaaggtggatacgcgaaagggtatcggccgagcacggccgttagatccgcaatcgtcggtccagattagaccgaggtacacttgaacccgagatcgcccacatacgttggatcccaatcctacggtccacggcacactatccatccccttcccccacggccgcacgattatttatcaatggctacgattgatgaaccgaacggaggcctcaagatctaatcctagccgttcacgggcagatcgacggctggtagtgttttccccaatccacagctagcgacggcggcgccgcccacgattcacggcgaacctcgccggtgaaatcccaatcaagtgttccagtgccctaaactccatcccgac

SEQ ID NO: 147350 - DNA, 469 bp, Zea Mays
ctaacattgtgatacaaagtcaaagattataccattgagatcaatagcatccaactttttctccatgcatagaattgccaaactatttaatcttccttcaatcattgcaggccttaaatagttccccaataatttcaattttaaaaagtctctcaaccaatataaccatcgtgggtatagtaaataatgtttgataagcaattgagatattaggataacaatctaaataagacaggatgacagtgcgatgctctttgcgtatttgtgtctaaagtagataaactataaagcagataaactatagggaaaatgctagtgtccagcagcttaggaccccactgtttttaggggccatgtggaacggccctcggcggcatccgcatctcctgtcggagtaaggagaaagggagtggggctggctctgtgctccgtttagggatggaggccacggcggagacaaatatttata

SEQ ID NO: 147351 - DNA, 634 bp, Zea Mays
ctagaagaggaagaaaaaggaaattgacatgtctacctagctgacaggcatgacacaagtgatcaaaagaaccccgactacaagagatgatagaactgctagacaacttcgacatcacatcacgcccgagatggctaaggtggcggtgccaagtgatggaggcagcagcggtcaaagcatgcggggtggaggtcgatgaagaggaggcaggcaggcaggcgaagggtgtagagcggcccggagttgtcacaacgcgcgggaagtgtcctggtagcaagatccttcacatacaagcaaaagagatcaaactccatagaacaagagttatcagtagtaaattgacgaatagaaaggagtctgaatgatgttgggggcaacaagaacgttgttgaggcgaaaggagccgggaaggaccgtatcacctattgaggtgacgtggttgaccgactcatccgatgacgatgaagggagagagggatgaggaggatgagtggcagataaagtaccggcgtcaggggtggtgtggtaggaagcatcggagtcagccacctagtccgagaccgaggtgggcagagcgagagtcatcgtgctgaaggacccatcaagagactgtgtgtcccaccagccacccaag

SEQ ID NO: 147352 - DNA, 415 bp, Zea Mays
gccactggatctagaatccacggcaatcgctcgctccacacatcattaaatcccggccgactaactcgagatcgacggtcccagacaaacgcgcccgaaccgatacttggttttcaatcagagtcgcgcatagagcatccaacggtccacggtgcatcttccctagccctcgccgagtaacagcggtgcccgagctcccacggcggagagccaccggaagaacatcaatccgatgcaccgagcaccaattcctccaatctagataatctacacgttgtcatgaatggcccgagcacgtggacagaacccaactaaagtaaagcgtgcgcgcgagccctggccacggcgcacggcggttccaccactccggcgagcaatcgccaggtgacgcgtgccttttattgaacgattctag

SEQ ID NO: 147353 - DNA, 335 bp, Zea Mays
ttgatgattactatgcaaagaactagtagtctgttatgcgttgaatctttggaacataagtgttgtgccttgctagttgcaattgcaactggcattgctaggttttaactcttttctatggtgcttataaatgtgaagtttctgcagcagtcagtgttcctttgtcttgctggtacatgcaatcaactatacttgcatcctcaccattcaaactttgaaggtgcatctgtagaccattcaatacattttcccaacaaaacttggttctgagacagcaaggaacttttcctcgtcgtaatgcttggtagaagactttctgatacttttcctcaatt

SEQ ID NO: 147354 - DNA, 493 bp, Zea Mays
gccctgcgtccgcgatgctcgccacgtccgccgctccccggtccccgacgctcgcttccccggccatcgtggtggagcccccctcccaccctgtgttgatggcaaagttgtacgtgcaggtggtgccgccccccggatctaaacaggaacactgagtagttcatgtaccccgaggtctggaccgcctacatcatcttcttttgctggatcctcgctctctccgtctttgggtgcgcccccaacattggcatggatgctcgttaaccttggccaatttgcagtacgtacaatggcattctctcgctccttgcttgtcttactgtctgccatgttacttgctccccttgctatcgttggttcgttcgtgtgcagaggctggaatggggtttcagctgttcctattaatgttagcatgaggagcatcttactgaagcggctccatgtttggtcgtctacatcatgagggattgagggctaagttctgatgcttgtg

SEQ ID NO: 147355 - DNA, 957 bp, Zea Mays
gcggttatgagcgcgtggtcgagcacgtcgttgtggagcgggctgctccgtcggggaactacccgatcttgacgaagaccaactaccatgactgggcggccctcatgcgcgtgatgctgcaggcgaggaacctgtgggacgcggtgagtgaaggcacgacgacttacgtcgacgaccggaacgctttggagatactctccaaggcggttccgccggagctgatgggagccgtggctgggaaggcaacggcgcaggatgcgtggaagatgcttcgactgcgcaacgtcggagtcgaccgcgtcaggaaggcgaaggcgagcacactgaagagggatttcgacgccctcaagttcaacgacggcgaaagcgtggatgatttcggtgtacggatcacacgcatcacgggtgaactggcggtgcttggtgatgaatacaccgaggaggaagttgttaggaagtttctgcaggccctgccatctcggtttgatcagatagcggcttcaattgagacgctacttgacttgagcgagatgtctgttgatgagctaatcgggcgtttgaaggcagctgaggaacgactcgcccaggagcgcgcagtggccctgccccgactaaatctcacagaggatgaattaattgccaagataacttcacgtctgaagattgcaggtgataaaccatcaggttttggtgggagctcgtctgtgtcaggaaattttcgtggccgaggacgcgggcgcggaagaaacggtgggagacgcggtggccgcaacggcggccgtggaggaaagacggtcgcgaacgacgaatgtcgttattgcggaaatactggacactgggcgcgggactgcaggaagaagaagcgcgatgagcaatcccatgccgtgcatactgaagaggtggacgaagccttgttactggcgagaaccagcgtcatcgacttacaagagaaccttg

SEQ ID NO: 147356 - DNA, 492 bp, Zea Mays
ctgagagctgtctcattgaatcactaggttgccggttcgaagcagactttctgcatttgtggggaaggcttgcggcttgcctcagtttatcctttctttaggccccactcatgcaggagccgccggcactaggtctaccatttttgcatatatatctgttgaatgagtgacagtgaaggtggagactgctttttattcaaagggggtgtggaggtgactagcacagtagcaatggtggaagaccaccgattgggtggggctgtatggtgtggtgatgtaccatcaaaatggttagcaagggaatgggcggcaaacgtggatctggtctggtgagggtggggcagggccatctcactggagatagagaggaggcaattgcaggcaggagatgcgtgacaatactaaaggagggagggacgatggccaattgtggatatgttcactggcaagccatgctggtaccagggatggtgatggcaaggttgtggtggc

SEQ ID NO: 147357 - DNA, 330 bp, Zea Mays
gcctctgatgatcaagtttgacttctctatccttccttgacaaggttgatcttgtccttttccggccttggtctcattgagtcggggtcagtgtatatcatcgaagttgggggaatatggttaagatagatataggtgagatagactacatgatgttggtccaaaacttgtttgatgttaggtggggatagatatgctcattaggacaagatgagtctctagaataagataaaatcttttaagattagttagatctattaggctaagatagaatcttttcaagataagatgagtctattaagataagaaagaatctttcaagacaagatg

SEQ ID NO: 147358 - DNA, 311 bp, Zea Mays
aaaagaagatagttatggaggtaactgcataatataatgcattaatccattaaattaaacaagacaagaggctaaagagggagagaagaaaagaggaacaaaaggtaagattgttgtaaggtaagaggaaaacaggaacagatgaaggtaagaggggagaagaaaagaggaacaactagctacttaatataatagatagattatgctagttgcataatccattatattaaacaagcagaaacatggcaaaacatgttaaagttcagttaagcacaccactgaaaaattcagttaagtcagttaacaagcag

SEQ ID NO: 147359 - DNA, 631 bp, Zea Mays
ctttgctgctaaggatgggagtgtcgctcgctttgggaaggttggtgagtgcagtggtttgacaccttcagagaaaccttcacccactcccaagcttatcaaaatcacccctcctaagcctatcacccctatgagagatggtgtgattgaggagcctgtgagagcccctcctcagaaacaagtgtggcttccaaaacctaaccatctcaggaacacacttgacacccttcccgacatctctagtgatccccttcctagagcccctcagccatccaaaaagaaagccccctcccacaaacaaaatccacccaagagagaggtgaggtaccattgtaagtattgtgagagggatgggcatctggcttctttttgctttaggaggaagagagatgagcggcgggtttctgagtcgagcaggaaggacatgaaccgcccctctcatggtgttcatgctcaacctgttcagagacgtcctgcgaggcctagaggtgctttgcctcttgctgctaggccccagggagtgagaccacgtggtggtcatgcccgacggggtgctggtcgtgtgccatatggccaaggaccccgtgacagaggctttggttcttacttccccagcggaccacagtttcct

SEQ ID NO: 147360 - DNA, 513 bp, Zea Mays
tgatgttgagtagcatgcaaactagcaccaggatagccacccattgatgggtaagcactttgattatatgttggatatccagatggtgggtaaccactatgtgaagagtacataggtgaaggatatggatatgatcctaatgggggtggagccatagatccatgttgtgcatacggatatggatatgcaactggaggcgcaaatacatatgatccagttgaatgtactggaggatagacagtcggaggataacatcctttgtcagcatgatgattgtcccttccacctcccatgttctgtcaccgagattattgtttgaagaatattggtaagtaaaaagtatacatactcataatgaggtaataattaatataaggagtaattgtgattatacccttctctgaccttgcaattgtgattttacccctcgttttcaactttgttattttacccctctattttgaaaatgaagacgctgtttgcccctcacccttaacatcgttagtgaaaatc

SEQ ID NO: 147361 - DNA, 756 bp, Zea Mays
gtggtcagaaatttctctcgtcaaagcttgaaccgttgtcaaaggatactttgactcccactcggtagtaaccaagatacggtcaagagtctcaaaggtgggtacacttctagagttagcccaagtgaatttccgatttgacaatcccaattcccggagatccaagctatcaatgactgcattaaaaaggaaaggccatctatcattgtagttgtcattatttttttcatgttggtttctaatgatattgaaatcaccaccaacaataagaggtaggttttctttggcacaagtttgcaccagttcagccagaaaagattccttgaattcatcttgtgcagccccatagaccgccaccagaacccaactaaagccatcatccttgtttcgtagatggaacttcacatagaagtcacccacatcaatactaccgatgtcaaaaacttccagattaacacctagtaggatgcctccggacctaccatgaggtttcgaccagtgccataagaagtcccgaccagcacaaatattattcaaagtactttgtgtgaaatcatgttttcctatttcgagtaacgcaatgaaatctagcttctcttctttactagtatcggaaatgaacctgaatttagccaagtcaccaagacctctgctattccaaaaaattcctttcattttgtacaccttttatgtttcttaacaaactttatttttgtgctacctttgcttcttgaggagccttttgatttatttttc

SEQ ID NO: 147362 - DNA, 583 bp, Zea Mays
ttcaatttttctatgtgactacacaagacacataagaaatgatattctaaaatacttgcacttaaaagataagtgttaccatcctttggctttcctccatgttgtaggccttgatttttcgcatatgatatatcttcacttcctacaacatataatatcttcctcgagatgatatgagtttaagacatagcaatttgaaaaataaccttgggtcaatcatgtatatagatcattgaagattgatagtttgagttgataagaattgaatggactctctcaagcatcccaaggcttcatatcatctccttctcctgcaaagcttgtcaatcatattttggtacccatcgcttgatgggtccatcatggttagtcaacaaagatctaggaacccaaaagtcctttgtgttagcactaggtaaactcattacctttctagcacaagttgcaattttgggttgcctagttacatgagaatcaattgacaagttaggagtgggataatcaccaatgggacaatccttgcattgatgtcccttcttccggcatgtgtagcataggcgtttttcaagttttgaaactttct

SEQ ID NO: 147363 - DNA, 635 bp, Zea Mays
gtgcggcggacgtgaacaccttcaacgacctggtgctcgggctgtgcgggctcgggcgcgtgcgagaggcagccaggctggtggacaggatgatgacgcggggatgcatgccaagtgcggtgacatatgggttcctcctgcaggggctgtgccgaacaaggcaggccgatgaggcgtgcgcgttgctcgagaggttgccagaggtgaacgtggtgatgcttaacacggtgatccgtggatgtctgacggaggggaagctggccagggcgacagagttgtatgagatgatgggttcaaaaggatgcccgcctgatgtgcacacatacaatattttgatgcatggcctttgcaagcttgggagatttggttcagcagtgcggatgcttgataagatggaggagaacggttgtgcaccaaatatcgtgacctactctaccttgctacattcattttgcaggaatggcatgtgggatgacgcaagaacgatgctggatcagatgttagccaagggctttagtatgaactcccaaggatacaatggtatcatatatgccttatgcaaggatggcaagcttgatcaagcgacaaggcttgtccaagagatgaagagtcaaggtgcaagccggatatttgca

SEQ ID NO: 147364 - DNA, 1007 bp, Zea Mays
ctcacattatcacaatacataatggtcgccgaagaaacggagatgtgaagttcttgtagcagttgttgtaaccagcatactcggcgatggcatgggtgatgacacagtactttgctttgacactagagcgagagacagtcgtctagcgttttgaggactaagagaatattatctcctaggtagatacagtggtcgaaggtagaataccgggaatcaggatagccagcccaatctgcatctctataagcagtcaaggattgaatcgggccagtaccaatgtgaaggttataggacagtgtgctcttggcatatcgggggatatgcttgatcaacatgagatggggctcacggggatcatacataaagagacgtacttgctatacaacatatgccaagtcgggatgagtgagcataagatactgtaaagcgccgacgaggctccggtatgtgatcggatcagcagcaggcgtgtcgtcagtggaagagagatcgataggagtgtcaacaagagttgatgtagtgtgacactcggccatacctacccgctgtaggaggtcaatggcatactaccgctaggaaaggaagatgtcgttagtggagcgtgtgacgaagatgccaaggaagtgatgagagcacctaggtccgtcatgtctaactcgatgtggagatgcatggtgaagtgctacaacagccgtgtcgagtatgcgatcaggacgatgtcatcaacatagagaagcatgtaggcaacattgtctccatctttgtaaacaaagagggacgtgtcggaggctgaagcgatgaactcgaagcggtgtatgtatgtgtcaaagcactggaaccattcccaagagcctgcttcggttcatagagggaattctgcaactgacaaacatgattaggaccaaaggagtcaataaagccagacagctgctgacaatagaccatctcctcgaggtggccatgaaggaacacattcttgacgttcaactgttagatgggccaggcac

SEQ ID NO: 147365 - DNA, 1038 bp, Zea Mays
ggacagcaccatagcggcaatggagggccaccaccctcgatctcgcggagggccatggctgggtcgtggcgtgcctctccgatgggcgcaaggtctggtagaagcctccaagatatctacatgtttggaaactgccgcggggtcgtcctgattcctcgctacgcccacctcatcgccgtgaatctcacttctcgtgtggacagccctgttggcctcttcattcttggtaagaaatccactacatacttcatcctcatctaggaatcacgtggcacatgcccctttcaaatcagaacaccgtagcgtcgggcgtggagctcgctgaagtacagaggaggagccgtcgtcgtcgatacctgcatatccggaccacatagagcaagcatggggccgaggtgatttactgtgccctcggaattgcactcgtatgcttctcggatggggagctgggcggcgttccgtgcgtggtgggtggtcaacagaccggttgccggactggcgccgctgggggatggccctgtgccgctgtgccggtcgcctggggagggagatgatacgtaagccatggagtggtaaacggacggctgggattcggtcgggggtgtagttcggtgggatccgatatccaccgttggatcggtaatggatgggcaaggggtcgcggaccggtgatccatccgtgaacggtcgagattaaaacgtcgacaccgttttgggtagatcgcttccacaccgttgatcatcacgtctaggggcgagtcaaaacagtaccaccggtcttcacaaggaagaagatgcactgggatcgtagatgtgtggatggatggcccagattgaagcaacatgtacccttttgagttatttaatcacagccgtcgatctctggttgtgtggctcaggttatgtactcgagtccgatctaatctaggccaccgaatcgtgatcgtgcggatgtcgtttggccgtaccccttcgacctctgcatttttgcagaagagccccttctctttctgtgaatcaacccgccgtccaactcgg

SEQ ID NO: 147366 - DNA, 513 bp, Zea Mays
ttcgaccacaccgaggtcaccgcgaggggaagcactagctaccctcgcgtgcgacactccgcgcaaaagtcgcctaagggtgcagccggagtagcacaacaagtgcgcaaattagaagtcttttccaaaagactctccgtgcaaaagtcgcctaagggtgcagccggaataataggcgcgcaaaatcgaagtcttttccaaaagactctccgtgcaaaagtcgcctaagggtgcagccggaataataggcgcgcaaaatcgaagtcttttccaaaagactctccatgcaaaagtcgcctaagggcgcagctggaataataggcacgcaaaatcgaagtcttttccaaaaagactctccatgcagaagtcgcccacgggcgcggccggatcaacgaaggcgcgcagccttatcatacaaatagcagttacatacacatcaagggcatcatatattacattggctcaaccttcaggatgatacccatctccctgtagttgaacagcattatcctc

SEQ ID NO: 147367 - DNA, 879 bp, Zea Mays
ggttgaggcactgacgcgctgggcccacgggtcagcggtgtggtgagggcgcggaacgcgctggtcgctagatctcagaccaacggttctagttccatggaccacacggatcgttatccgcacacccgggccattcgatcaagactggacggttatgatcgggcactaggggctttgtcttctctgatcagccaggggcgaccctattcgcggtcgtggcggcgtagtcgctggaggtgaggcagaccaaggtttctaggggcgctaggggtagtctgggtagccagggaggttggggaggactaagtgagcactatggcgggatcaggatagcaagaaaggggatgaggtgaccgaacgatggagggggggggggggggtcctcggcggaccgtggaatacttcggcgagcaatcgtgagcgactaagtgcaagacaggggaaattaggggcgaggttaggtcggttaccttgagagaaggatcagggactcacgaacggtgtctggggcacggcgagggcacgagttgacagcggcgaagctgcgacagagaactggtgagcgcggaccaagcaaaccagagggggaggggcgaaccgaggggtgtcccgggttgcgggtgacaaggcggagcttaccgaggcaacagacacaacgagggctcgacgacgaccgtagaatgggcgcgagaccacgacgagcagcgacagacctccttgggtgtgtcggtgtttagagtccgactgcacacccagggataaccttgcaatgcttttgggtaggacgatgttgttgactgtagctcgatgtttcgtgctaggggcacgagagagagagagagaaacgattttctgcaggttcgggccactttgagaggt

SEQ ID NO: 147368 - DNA, 407 bp, Zea Mays
ggaaaaatacaacctctgtatgaaaaaaatgtgtggagtgccatgcttgcgtacattcctcgcgcgaggtttctccctggcgcgtgcatttttatccacacacacaccatttgcactcgtggtggaggtattccagggctggtgccatgttgatcaagatctcgtgctggtggtacaacgtctgcatgggggccaacatgttgaacgttgctcgatctaggctatcgttgcccaaggagtcaccatcagatctcacccttgtcgtagcaccactcttgcaagtggatcatgttgccattgctagaaatgtgattcttttgttaggttgtggaagaagcaagaattgaaaccttctcatactccttcaccatgttatcacggataccttaagattgtgttttcttctt

SEQ ID NO: 147369 - DNA, 539 bp, Zea Mays
attttttatagaccgaataggacgaaggaagtattctttttagatcagaggaggttctactactttattgttatgggtgcatctactctcttctttcaccataacctaaaattacacttccatatgccattttttatcttctttcaccataacctagaattgcactttcatatgccattttgtatggagcgaaggaaagtaattatttagaggaggatctactagtttattattatgggtgcaaatgcaattattactctcttctttcaccatgacgtaaaattatacttcgatacaccaatccgaccacgacctcaactttatttaaatgtgagaatccaaatgtcccatctaagctaggacgacccatgcattacttccaaccgaacaaatatcatatttatatatggttttggcttgtacttccaaatccacatatagagaattattgcgtcgactactttcctaagtctgctaagctcgtctccctgtaggaataagaacatcatttgcgtggcgtttggttcacatcaacgtaa

SEQ ID NO: 147370 - DNA, 519 bp, Zea Mays
gggagcgtgaggtgggacagggaagcgggaagcgcacaggtggtgggggcagaccacctccagtcgagcaaagggaggagaaggaatggggaattggggataccggccttgaggtagtaggggaagctgggctgggggcatggatcacacggcgagctgggggcatggtgaggcgggggggcgtcggggtgggggcacgcccttgctgtgcgggcatcgcggcgtcgcggagaggggcacgggcatcgcggtgtcgcggcgtcgcggaggggcacaggcatcacggcgtcgcgggggcgggtggactcctttcttcgcccggcgtcggcgtcagcgtgatcctcgtatggggggaagaaggggattcgtggaggccaccctcgcagatgcgcgggacgtagacggggccacgcacggcatgccatggatgtcgcgatgaggtggagatggatgtcgctgggatgcaatcgaggcgagggatctgcgcgggagggcgaggtccgcggagattccaccttc

SEQ ID NO: 147371 - DNA, 628 bp, Zea Mays
cgacatgctgattttgaaaatagagaccattatcatgggcgtcgtcatagaaatgacccagaccatattgcccgagtcaagttggatattcctaaatttactgggaaagaaagtgcggatgaatatcttaattgggctgagcaatgtgatcaaattttcagagttcacaattttttagatcaacactgagtgaacttggcctcagtcgagttttctggttatgctcctacttggtggaatcaactgcaagaacatcaacttagattgggactaagacatattaatacatgggaagagatgaagcgagtgatgaagaggcgatttgttccttccagctatcaacgtgatcttcaaaaccgattgcaattattgaagcaaggaaagaaatttgttgatgaaaattttaaggagatggagttgctgttagtgctgtctggaatcagagaagatcccgagtcaatcatggcaagatttttaggcagactcaatgaagatatttccagatttgtcgagatgttcccataccgtaccttgcaagatctagttgatcaagcaatgcgtacagagagaaaaattcaacaagagtcacgtggaaaatcttatgcaagtcattataatgcagtcccat

SEQ ID NO: 147372 - DNA, 283 bp, Zea Mays
cccgaaccaagtcatccccgacaacattctcgggggctgggcacgtgtcaacaccatccttggggtccaagttctctgcggtagccacctctaaggctgatgggccctcagttacttccataggaccaggacgatccaagtcagtctcccgaccctcgagatcgcgctttaaggtcgacgaggcacgggatgacctcaacccagcatcaagcacatcatcccaaacctccatcacaccatcacctgctggctccgataacaaatcttctggaaccatatcctc

SEQ ID NO: 147373 - DNA, 635 bp, Zea Mays
aggagcggaatcggcgtatttttgagggcaagcaagcatcgacacaagtggtctttcatctggccaaacaagaaatggcgttgagacgagctgcagttgggcatccatgtgtagtgtaatgtcttctcttttttggattgtgtttgagtgtttttcgttatatgtaatagcaactttttaagactcttgtttcccttctctccttaaatgaaatagcagagctcctgcactaagttttcaaaaaaaaaaacactttcatacaagtgggttgcctccaaggcagtttctatacttacaagttagaaaatatcctcatatgggtactaaggagctgcagcttgggttgcaagatgagcacgagtgcataattggctatgatacagtctggaaaggaaaagaaaaggctttggctgaattgtatgattcatgccaagagagttttcagctgttgtacaattggaggtcaggggtcacgaaggttttcggtagaccatggcttggcagacagcagactactactagcaacaaaatcagtcattaaatcgatccgatcggttcacatcccgcgagataatccatggctgggtgctagggtttacggcttcctccattcgcacgcacccctgggcgctgcg

SEQ ID NO: 147374 - DNA, 492 bp, Zea Mays
cgtgatctagagaaatggattttgttcacgtttcccatgagtatgttgagcgcttttacaccccgctggactggcccaaaccacgcttgtgtctggtaagggctttgccggagattattgttggccagttgtgcagtgagcaattggctgccaatagttttgccgggactctgtattgctactgctaggaaggcttaacttgtgattggttgggtgcatatgggtttatccaggctttggtgttcaattcctcttccagtctttctcatttcatttgtctctctcggttcctctcatcgtcgcagcttcctctcccagctgccccaccttggatctagggcatcatggctacctgtgttcaccagagttggtgcccattatgtttaagctagggatgcctaggctgccggtgtttatcttgatgttctacaatggcacaataaattgatctattccctcaagaatctctcatactacttgttaggatctgat

SEQ ID NO: 147375 - DNA, 871 bp, Zea Mays
gtttatatagagctgatagtgagtgtaatttttgatcaaaagtttgcccaataaaaaccatagaaataaaatgctaatatcagacaatatcatatgattatatagagttgatagtgagtgttattttgatcaaaagcagcatgtttaaagatatgtcattacaaaagatgagcttaacagaactgctgctacgttgcttgcaaacagtcatatgtttatacatactgcaaaagagttttggttgcgagaagccaaattttgttgttctcgtaagtagaaccacaaccgatctatttccattgaacaatagatgcaaggtctcaaaagagtagctatgtagaaggtatctaattgttcttcatctttggtctttttgcaaagactgaaagttggtcagcaccatgtgtttcttcctgtaaaagaaggagcaatataggttaattaaaaatattaagtacatatattgatatctatatgggtattatcggatgtgttgaaaagtagttaccttgtcggagtcatcaattgcattgaaatttctcttgtatgatactctgacgttgtcaaagcaactataacatatcagattaaaagatgttataacaaaacattgtatattttctggatgatatgaaaagaaagatataaaaagtagacccactaacctagtctgatcaatctccataagttgtaattcatgtggtgatgctgcttctgaaccagaggtcttacatagcaatgtacatgttagttttgtttttgcggattaagatttataattgagatgttttgatagaaagcagtacctgtatatcttgtgtctttggctctattggtactaggggtggtagctttggaagttgagatgagc

SEQ ID NO: 147376 - DNA, 278 bp, Zea Mays
tttaaatatctaaaatttagcatttgcgaagaactataaaattctagaaactcgataatatatgtatatatttttctttcgtcgagttcgttctagatctcatgtccttttcgcggtgtcgttaaaacatcactcctcgcaatcggcgtgtcgctcgcgtctactcctatctacccttcttgcctcgtctcgatgcgcaatgcccatatgctgtgcctgcaaccgcctttttccctcacccattcctttcgctgtaatcctagacccatgtgtcaact

SEQ ID NO: 147377 - DNA, 271 bp, Zea Mays
tctcaatgtagatcaccattaaatcgttaagccaataatcacccattttgttgcgcaactcagttttgataattttcatggtagaaaaagccctttcaaccatggccgttgctactgggagtaacaatgctaactcaatgagccgatagaccaaaggaaaatacagtatccctgccaatttcaaccaaagaagtttccaatcgagtttcatatacttcacaagtgcatctttgctatgagttatgactttatgttttaaacttgatctttg

SEQ ID NO: 147378 - DNA, 939 bp, Zea Mays
tatccagtcctgtgaacacattaaagcctccaaaatttcaggagtaagcctgctgcgatgctcactaagaatccgcccactagtgctaaaagctaactctgatgcaactgtgctgaccggaatagccaatatgtcacgtgctatctttctaagtgtaggataacgggttccagccaccttccaccagtctaggatctggaagttctcagttgaaaaatgaaccaaatcatcctccaagtatctatctagctcagttttaactcttgtcatcgctggccttcgactagcaacatgtgcactaattgttgacaacaaactagtgtcaagtagaggagttgatgactctgttgtatcttcaccctcttccatttcatagtacttcatcaaatcacataaagactctttcacttcatcaacttttagcacacactgatcactattttgacctatcaaagtctcaaagaacccaaggagataatcaaccttaaacctaggatctaaaatagttgctattcccattggtccttgaatatccttccaatatttttcaaatttttctatcatcttttttgacatctcttctatgataggatttccacattcagacactgtgtaattttcaccttagcctcacaaattttaaggagttgaatatttgcagtcacataatctgttctagagaagaccttggtaatctcattaaacatcttgagtctatcaaccacttgtctcgcaaaatcccactcttccttatttggtgcacaatcataaagtttttcaacacgagtggcacggttaaaaataggctcatatggaatagcaatagagagcatcttgtatgtagagttccacctagttttgcaatcaagtcctagcttgtgtaccaaagagactttgacaaacttagccatctcttcaaatttttctactcttttaggt

SEQ ID NO: 147379 - DNA, 398 bp, Zea Mays
aataggaacattcctattaagtggagaggtcagaatgaggggcatacccaaaattgttcagaatgataggtttaatttggaactgtcagggtctgggtaaagaagtgaaaagtgagttccttcgagatattattaggagagagagaattgattttattggtttgcaagaaaccaacaagaaaaactttgatgactcttggttgaacttcattggtggtaacagaaattttgtttgggtctggtctccccctaatggtaggtctggaggcttattggtagggtttgatgctgacatctttgatgttagagagaaagaattgggagaatttatgattcgtattctggtgattcaaaaggaatcaggatttatttggaattttattaatgtttatggggct

SEQ ID NO: 147380 - DNA, 358 bp, Zea Mays
tctaaactgaagcttggaaatcaaaatttcgttttaaattaaaactaagataaaactgaaatttaaaagaaaatagaaaaaagaaccaagaggcacttgggctggttcttcttttccctttggcccatttcattctttcccttggatggccatatcttttctttttaccgcacttccagctccacatgaacgacatgctaacttatggctgacatcagctacatattttatttgaaacaatgtcgctcgggtctgataggatccatagttcagcttcactcagtgtccacgcatgacgccgcagatccacttgtcagcttcgctcatccatcgcgcacaagagaaacgccgctgtctg

SEQ ID NO: 147381 - DNA, 277 bp, Zea Mays
ggtcgctcttggcgtagccgatgacggccccgtcctcgtcctcctgcgaggcgccgaggcccgcgcaggtgagtgagagcaccgccgagtccatggcggcgcacggtagggtttagccgcctggccggtgcgcgcagttgaagctgaccacggtcggacggatgcggagcgaaggcgacggaggggaagttagaaggatagatgcgcaacggaggatcggagcagagagtgacccgagtggggaacagggagaggcagcgagatcggttgctgggtg

SEQ ID NO: 147382 - DNA, 278 bp, Zea Mays
gtcacttggtttcgcgcaggtgtagaggtaagcgatggacaaggacgtgccagtggaggagtgacgtaaaggtgggggagtagaggagcagtgatgcgcaggtaggggagagcagaggagcagcggcgtgcaggcggaggagagcaaaggagcggcgacacagcttggtgagaacgaggatttcctatgcctatggtggtggtagcctggtagggcatcattggatgttataacatttagataggctagtgggctgcctccctttctgtgccgagtgg

SEQ ID NO: 147383 - DNA, 1250 bp, Zea Mays
aaagaagccaacatctcctagcaaagttgcacctgaagaagagatggataggtgtttcttcaatctggaggatacaattatcgcaggtgtaggagtctaaaggcattgcgcgacgtctgagaatggagcgagtattcaatctatttttgagcagcagccagaagaagactttgtgcttgggctgacatttagacttatataaccaaacaaatagagggagcgtttgacgggtgccagtcaagtgagcataaactgtctgagaggaaaaccgagtggaggaggcactgcatctccaaatatcattgtgatcaagcaactgaatattaccaagggtgtcctgaagtgagagaagttgctcgaacgcttcagcagagagggggatatggaacatttcattcggggaagctaatcgagcttgatggatgttaatttctttgacagaggcaaaagaccagagctccgggaacttttgagataaacattgcccattccatcgatcatgccagagaagcgtagatttaccatttccaatttgcacttgggcaatttccttaaaagaatcatggattttgagaatatctttccaccaaaacgagccaactggtttagttgagggtagagaattgctgtaatgagtgtcccagataatgttaacccatgggatgttgactctattaaagaatttgtggaggcacttcataaggagagctttattctgccacttaaggttgatgactccaagacccccttgaatttttggcctgcaaacagatttccaagcaacttggggaggttttttgcatttatatctgcccctctccagagacaatgccgtcgaagtttatcaatctgtttgatcacagttattgggagcttcagggtgcacatgtaataggttggaagagaagaaaataccgcattgaccatttgtagtctgccagcctgagatagaaaaatagaggttgaagctagtcttctttcaatcttctgaatgagaggaaggaaagcttccaagttgggtttttaagccccaaaggaagacccagatacgtgaagggcaaagccccgaccttgcagtggaatgtatttgctagcaaagccattttttgctccgaaacattgatggggtaaatgttagatttgttataattcacatgaagcactgtagagtcagcaaaagaattaagcattgctttaagaaagaagagctgtctagggcatgcttccagaattagaattgtatcatctgc

SEQ ID NO: 147384 - DNA, 343 bp, Zea Mays
ctggaaagaatatgggataagatgttttggtgagacaccacagcaagcattcctgcttgtccgaatcattgtgttagactttcgtgatagaatgcatggtttccgaatcattaggatggagtttgtaacatgatggacagtcaggctttatgcctgtgcgtgagctgcattttgagccgtgcacgttataagtaatgctggagtgaccaatttagtggatgtaaaggccggtgccgcagtctttgttagatagtagtactcatgacttcgaagcatcctaaggcgtcttgttcttttgtttggtaacggacccaatgtctctgatgggtatggtagcacaatc

SEQ ID NO: 147385 - DNA, 1018 bp, Zea Mays
aattaacttgatgtgcattcatttagtttgagttatgcatgagttttaagagaaatagataaagtaaagaagaagaaaataaaaagaaatagaaaaagagaagcagcccctttccccctttcagcctactcacggcccggctcctagcctgcgccgttgcaccatcaccctcggcacacgtgccctcctcggcccaaccacctcgcacgaccagcagcgctctcgtgctggcccagcgtgacctgttcccccgcgcgccctaggcccagccgccgcgccactcgctcccagcatgcaccgcgtcccccacgtcgtagcttcttaggcaaaccccctgccccagacgcacatttgagtgccggccccgctcacccctctcccttgcacaaacgcagcaaccgtgtccgttcttgccctcgcgcaatcgctatccaccgcgacgcgtgcctcgccgtcacgtctaggttcctcgcctcaacacgtccatagtgccaatgtcgccggacccgaacgtctgcgctgcgatctgctggagacgtcgtcgttcgcgcactcgccgtatccgctgaggtgagcgatggtttcatcttgcacccctctcatcatggtctatcctcttcgtgctgtgcgcagccatggcggagctcgcctttggcctgctcgccttcagcctctgcgcagcatcgtagccgaccggccatccctgcaccccttgcgcggctagctccttcaaccaaggtccctgctgctatagtgctatggcggttttctcttccctgcgttcgtgaaaaggagcggacgagcagatgtcgtgcgtgcggtttcattggagaagagagagaaaaccaccccactgcatgcccccatgcgaccacggttgtgcagtgtgcgcgcgtctcacgcatggaattgcctgggccccacaagcatggcgtgagtcatagcctccactatttcctgcatgaaacaaccacccctcataatggatccaggatgtcctgtggtagctcctcgtgtg

SEQ ID NO: 147386 - DNA, 784 bp, Zea Mays
acaggcacaatggttgcatctcatttaaatccactgtcatgtgggaccaagtctaccagcaatggctcacggcgtagcgtcgcgcccatgaacaaggcttggtataggaaaagtgaatttaggtttagcttcttgattggtaatcaattgcaagtaccgtatatgtagtttccctctttctatctccatcattactggtagacttgttccacaatcaacatgacatccagaccaagagccttttattttcataaaatgactctaattctgaaaaggatggataaatatgggtggaggataatcttacatcaaaatagaaactgtccattgtttattattttctgtattctagcaactctatgaataaaagtgagcataatgtaacaaccaatggcatagctactgagctagagaaagtaggcatgccggcaaaaatattaattacatcagtgtacagaaaggcatacagaacatcttttattagacagtggacatgatgtgtccttaacagaagaaaggcaattgaattcaaattgaggggcctcatccttccacttatgaaaagttagctcatctagtcattttatggctgcacaatgccatataaagcccttggtttctcctctgacacaaaactataggatcactaccggaaataatcgaacaaaactcccaccagatactctgatctcgtcgaaaatttctactgagatataaactctatcccaacaaatcaactcattattctactaaataaccagaattgaagtcatctgaagtctgt

SEQ ID NO: 147387 - DNA, 481 bp, Zea Mays
tggtgacctgccagcggcagcgccgatatgatcaaacctgccccaccggccggtcgcccgtccccctcgcggccaaccgcgccccgccgggcgccggccgatcccagccctgttccttactaaaccgacggttgccgcgcgcccactccacctcaaaccgtctgcttctgctcaggcacgtccgcgccccacgcccatcggctcccactctctcccaccaactttgaagcactcacttcactcgcgcttgcttcagcttcacccacgccaacgcaggcaagtacgcgaccattcccccctcgccaagcgcgcgggaagaaccaaccaaccagaaccatggccatggccacggccggcgccgtcatcgcggcatgcatcctggcgctgctggccccgccgccggcgcgcgcggcgggcggcgggcggtgcgcgggtgagtccttctccgcgaaccgcgcctacgcggcgtgcaacgacctgc

SEQ ID NO: 147388 - DNA, 684 bp, Zea Mays
tggggcactgggagaccgggtccactcgctagtacttaatcctccggcctccttttcgctgtgtcactgcatcgtggggccatcctgtcggatcggtcttcttcactccacgcgggctgctcgggatcgtgcgggttgattgagtctgtggctgagctccagttccgcgcacctgaagtcgattatcccgggggaatctctgccgtgtggggcccacggtcagggtggtcttcgactcggtctgttgcgacatccgcgccgtctcctcggcgttggtttcaacagaaatggcgaaaaactcgcccggatcctcatccattctgccgtgtccttggggaggtggactccgcctgcggggggggggggggcataaaacccgcagcgacctcttgcctcgcctctctgattccctagtcgagccatcatcctccccctttgcgaattttgaggaagagacgccgccgccatggaaattgttttccgtcttcgcttaaggcgcaagctcgggtcagtgggcttccttggggtacgacggtgatcattgtggcgctcgcgggtggaagaagcctttggtgctgccccaatttctcaccagcaccaacaattgccacggaaccacacttcgtcgtggcctggggactgcaccgcataaccaccggtaagattgcccccattgagttcgcc

SEQ ID NO: 147389 - DNA, 754 bp, Zea Mays
cgatttgggaagtaagtgcatggtggttgcgagttggagattagtggtttacagttcatatgatttggtcaaagtgcgaatatacgcgtaaatacgtatgtttataaaaaatgttgtagtgtatgttgtgtctcggattgtgataataatgggctagtcgacgtgtatgttatttagcgggctatgtcgttgctctagttagccgaattgttagacggctttggttaagctcgtgatcatgatgattggcttgttgtagtctaaatgtgcatggttatggttgccgatgaaaggtagtagtgttcatgtgatgtctaagttaaaatgcaaattagtgtgtgaagggcgcatcgataaacatatatgtaccgagtaagattattgtggtagatgtgttgttaattgtgaatggaaattctaggcacgaaataacttagataaaaagttagtaagtctacttgtgggtcctaatttgattgttttaactctaacaaatggtaaagtgttagaatggtttaagtctctagaacgcggcaattcttgaagtaattaggagctgaatttttattagttgcagttttgggctgcacgcactatttttgtcgtgctgtatgtttaatagactaaattatgttttctgtagaaaagtcatatagaaaagttgtagataactttattatcttacttgtgttaaaatctgacagccataagtctgatcgtttagaagttacgctttttacaaattcggtaactg

SEQ ID NO: 147390 - DNA, 889 bp, Zea Mays
gccagctcagcaatggtgggagtcctatcagtatggatgaccccaaggtgcacccgagatcacctggaaggaattctgtgataatttcaggtcctatcacatccctgaaggattggtggaactgaaacaggaagagttcggggcattgaagcaggggacaatgatggtgggagaatatcgtgatagattcgtccagctgtcacgatatgctccgaatgaagttgctaacgatgctaacaagcaatgtcgttttctgaaaggactttatgatggactctagttgcaactgatgacaaacacttatcccaactttgaagagctagtgaatcgcgctattgtgattgacaataagcgtagggaaatggaagccaggaagaggagacttcaaggacaagcttcaggaagcaacacccgtcagcgtgcttacccccagcaaggttttcagcagaggaaccagggtccacccaggcaatggaattagggtcagtacccacagcggaacccgaactagccgtgccctcaattttagcaacagaatggcagttagcaacgtcctcagcagcagccacagcaggctagcaaccagacatctcatcaaggaccatccaacaatgcttcgacgaagagagaaacacctaacaatttcaatgtgtgtttcagctgtggagagcctggacactatgctaataactgtccaaaaaagcagaatcggcagattccgcagaaccagaatgtcaatcagaaaccttatgccaggccacccaacagtggaagggtgaatcacgtgtccacggatacagcccaggatgcaccggaagttatgctgggtacgttcagtgtcaactcccactctgctactgttcttttcgattctggcgcatcgcattct

SEQ ID NO: 147391 - DNA, 506 bp, Zea Mays
gacggctgtcatgggagttcatccggttggtgacggtagtcatctgcgcagacagcttagtgcccaagtctgtcatgttggccatctccctgatcaggaaatcgagcttctcggaggcgttcatggctgcaggatcggaaacagagccggccatgggcaggcgatgctcctggtggaatcaatttgatgtggattgggggacgaaccaggaaatcgacaccacacagagctgaacccgagtgaaatggactcaatggactatggggaaggtggaaccagaggaggtcgatctccagtcgaggtgatcgaagtagatcgccctctctgggagatctattcttcttcgatgtcccctattacaaactatggtgctttatatagctagcacctctttctcttaaggaaaccttacttaaggaaatatactaacagggaaataaactagatcatatctcttaattgagggaaacactctcatttattcttaagcaatctgctagtatagg

SEQ ID NO: 147392 - DNA, 332 bp, Zea Mays
tggaaaatggcgcagggacagcggtcccaatggcggttgatgatgattctttctttgatgatgatgctgatagtaaaagtgaggataaaggttttgataggaacaacgaagatggtctcaacaggaaggaaaatgctagtgatcagccccttaacaagctggctggtggggataataccgggcacaaatcagttgctctcggggaagtcactaccattgcgggtcagccgatagatggggtgttagctgctggttctttgggggtcggtcaggagctacctgctgatccattggagtccagcatggacgggaatgttgttgatgatgagaag

SEQ ID NO: 147393 - DNA, 429 bp, Zea Mays
gggaagctgggagcttggggcgcgcacagagaacaccatggcgcgcgattagcaggaaaagagaggaggaacggtcgagctggagaagcaagggaggggtgcgaccacgcgatgcaggaagccgagggcaggggaatgcgcggtggctacagccgagcaggcaagctgcgcgctgtaccagggagcaggggtgccgtggccatggggagagagaagctaggtcagggagagccgcggtgaaggaaaaccgagctggagtacgagcgcgtaggggagctcgcgggcccgacgaaatccgagcaaagaggagactccggccctggatggagctcggcgtggccaggcgagcaggagatcagggaaccgcgacctccatggccgagcagagaactagggcgcgacggctgaagagaaatgaagggaggagag

SEQ ID NO: 147394 - DNA, 2041 bp, Zea Mays
gcccgactttatgaagggaaagaaccaattcagttctttgtcatatttcaaagttttcaactattcaaggtttgcttcaagttatcagtcaaaatcctagacctattctaaaaaatctcttacttcattgtgatgttctatttattttctctttatctgaattttcaatatagggtggacttagctctggatacaagaactttgttgttgaaaatgatattgtggatgacacttactctgaaggtgggattgccctattccggattcagggttcaggatcagaaaacatgcaagcacttcaggtagatccggtaagtttgtggtcatactttggtttgtcaagatatttgtgagaacattggtataatcttcataaatgagcttcttaatcttgctcatctttttgttagctggcttcgtccttaaactcgtcctattgttacattctacataatggaaacacagtgttcacatggattggcaatgttacgacctcattggatcatgacttggttgagagacaactagatgtaattaaggtatgaatattctttctcataggggtgaatatattcatacttatgcagatttcctcatgattaacacattagtaatttggtatcgatgtaaaattttgactaaaactctctgcaaaggttgtccatgtttctaataaaaaatagtctccgttatacacgaagcaatgctcaacaacacttttgttctttcacatattagtatgtgctctaatggcttaacaaagcagaagacatacatgtgagagttaatgatttgatttctatgtttgatgatataagtctgatagttaccgatggctactagtattgggccaacatattcttggtcttgttgtaatttatatttttcttagtaattaagtaaaagaaaattagccaagcacatggatggagtgcaaatctacatgactgatgtttacttggtttagtttttttgttacaaatgtgtattatattgtagatgtatatcctattgagagcctttactatgttctagttgtgctacatattggtgcacttgtgttagttagattgtatgatggcaaaaaatgaataggtgttcctctggactcagatttagtataactaaagattggatgtttgtaccttgttataatatcactattgatgctgaatcaaccaacacagtggtagggctagattgcctaaggctgcacatggcctagatatgtaaccaagttaggtctaaacggcaaggttgatcagcatgtcgacgagactgatttaatactagttattcgtctaaaaaacccatgaacgccacctataaaacccattgggaagacatgcatgactggggtcccaacgaatctcatcgagtgacgcttgacaacaaggggttagaagaggtaataagtagtaggttgatttccaatcgattgtgtagttggatacctaaatcgtccatgatcttgcaatatatataaaggggtggtcgtaggaaatctcccaatacataatctacaagttttccacgagaacatagaattttggatcggaattatgagaactggacttgaacagggaacatcagaacttccaacgccaactcctgacacccgagagcctcgcaagttagaacatctaacatcttagcctcccaagtggatgtacctcctctgagcctttttgctatcaacagtcaccctccttgtcataattggctcgtatgcttttttatcataatggtaggagctctgcctttcacttaagaagaaataaaatttcatttcacttgtatgttattcatccattttctacatatttgaattcaatatgcttttcctttaccttaacttttctttgtgcttctattttttattgtacagccagaattgccttccaggtcactaaaggaggggagagaaaccgaccaattttgggaagtactgggcggtaaatccaagtatccaaaccaaaaagttgaaagagaaaatgaaaatgacccccatcttttctcatgcatcatatccaaaggtaac

SEQ ID NO: 147395 - DNA, 461 bp, Zea Mays
gcaggaaagctgtaccaactcattgatggtctgcacggccacagatgagcgcgcggcaaaataaaaaacacaggagcctgcatgcacgcagacgccgaacagattggggagaaagggatcacgcgaaaatatgcgggaggggaggaggcggatgtgggatgcaatttttttgggggcgatgagggagctattggagcaaggaaaatcattttcttcctaatatctgttttaaggttggtttacatcttcttttggagttgcttttactctctgagcacagctagaaaaataaattatatttacgggataaattttataattggggtttccctttttgttgattagagatatttactatttgatatgatatattaagagcttagatatatgtgcctgccaaccgacttcctagaagtggcaacaaatgatggacaaattggttcctcaatgctctatttttg

SEQ ID NO: 147396 - DNA, 775 bp, Zea Mays
cttggtaagttatcctcgactcagtgaacaatcctagtggactgcgggttgattcagttgtttctcggggtctcttacgcaaaaagcccaggccgaaggggtatcaaggtattctggctgcacgatcctggatgagtggcacggattaaatcaagcgtcgtctgaaccggtacgcagcgcggtccgtccgaccaacggtctacgacatagattcaattaccccgaactcagccatatctgcccgatcagagccaacagctcagacttaaataactgcgatggaatcctagacacacgattcagatcggatggatctgtgtaactggccgaaccggtactctgggttctaatcccgaccggcgcttctagatccagcggtccgtcctcatcttcttccgccgcccaaagccagccggcgtcagagtcctgccgcggcggcgccctcatcggaaaaacttagacccggtgttcgagcgaccaattccccccattaacgagtcttatacgtggcggaaagtatagcaaaaccacatggggtttactcaccagcgatcggcgcttcgaggtaccccaatcgtggagatcggcggtccggtggaggaggaagaagtccgttgaggaattctggcaccccgactagccacaccaacacaaacgtcccaccgactcacttcggctcccccgacgaccctcctcgatccacccttgaagttgcgccagcagtgtgggtcagaatcgacgtcgacggcaactctggcagcgtgttggcttcgat

SEQ ID NO: 147397 - DNA, 290 bp, Zea Mays
ctggttgctctccggtcacttaacgaaagacatcataccatgtattctatgttttgatggtcgtcacactaagggcattagaccatacactaagatagaagttggtggtaacaatggtaacattcaaatgcctagtacacatgaaacgatctatggtcgtcagaccttgagctttggtctaatggtgacgtgttggatggtccgacaaccttgcaaaatgcacaagaatggttccaacggctagttggccattaggatcctataagtagagattatgtgggcttgcagtg

SEQ ID NO: 147398 - DNA, 891 bp, Zea Mays
ccagcagaggcagaatgcaaaggtgccacagacagcacgatttttgatcacatacgcaaaaagtccaaagacttccccactctgatgctatcaaaatccatggattgctcatatgaacctcttatactgaagaagatgaagatatcaagggaccagtttggagtaaagcatggttgtctgcatgcgggtgaggccaccacaatggattttgatcctgttgagcctagggtctctccaaccaatactgctgagaagttccgcgggatcctgggtagaagttcagaaaggagtcgcatgctgtttggaaaaatggatagcccgtttgagaagagcgagatgctgggcacgacgccagctgaaagttctcttcggttcgcgggtggaaaagacagctcactggagaagaacaagaccctgatcagaactccagctgaaaactctctccaaattgcagcacgtggaaaggagagcaaggtgagcaaggtgctgacaaatctagataaaagccctcttgggtttgcgggtggaaaggagagcaagatgagcaatgtaccgagcacttcagctgaaaactctctccagtttgcagctaggcgtgtcagatcatctgagaagagcaagatgctgacaactccatatgaaagctctcaagcgtttttgggcgaaaaggacagcccatcggagaaaagcaaaatccttattaatagtccagttgagtatcctttcaagaaaggaagtccaggtgaaaatcctttcaaaacatgtagtccagttgaaaactccctcaaatttgcagctcaacgtgacagcccatctgagaagaggaaatcctgcatcagcaatccccttccgcccttccagcaggctgttcaatgcacaaagcaagtagga

SEQ ID NO: 147399 - DNA, 581 bp, Zea Mays
agagaaccattgctatggagtaaatattcatattcattgttattaagattggagtttctactgaatttgcatggcagattgtctcactgttggcgtccagatatatcaaagtggtctgtattttttgtgttgactgtgcaagatatgtgctactttgcgtagacgggactggtggtgggcagtcgcattgcatctgttcggactgttgcaatccatactccatatagacaaaatactgtagaggtcgtagcaagctgcagcgaacatgctctttctaactgtattctgttatgttctgaaaatcatactacctctgcaagtaatgtaattaatctggggcacattgatagacctgatttgcttaatatttgatgaaagatgcaaattggcacaggtttgcagcaggacttgctttcttgcaatattgtgctttgctaggttttggttacgctgggattggacagcatctgaattggagggtatcgtgctaaggttatctccaacagatcttctattttatctcttatcttctattctaaattcatctctacaaacagcgttagggggtgtttggtttctag

SEQ ID NO: 147400 - DNA, 638 bp, Zea Mays
gaagaaccagtggcgacaagagcagtggagggggcaacagggtggtgtaccatgttgatttcctcgaggaggagttcattgcggacgacggcgaaggaggggaacgggcgcccgcgccggagatggacaccgatgtccttgtagcgctcgttaagcccacgaagcacgttgaggaccaaggtgcggtcagtgacgtgctcgttgaggtcagcgaggtcgtcggccatcttcttgaagcgcttgcaatactcggtgatggagaggtctccttgagcaaaggtgcgaaattgggcgtcgaggtggagggcgcgggtctcctggttgccgaggaaatggtcctcgatggcgagccaggcctcacgggcggatgcacggtggtcgatcacggcgtcggcgaggtcagcggagactgtgctgtatagccatgacttgacgacggcgtccatctgagtccagtcagcaagggctgagatggagtcgctgcggacgtggtctagaagcgagtacttggtgacggcgaggaggaattgctcgcgccaacgggggtagttgccagcggtgtcgaggaccgtcggcaccaggctgcgtgcgttctgcacggagactgcctgggcgtggagattgaggacagcagcggc

SEQ ID NO: 147401 - DNA, 1111 bp, Zea Mays
ggagctaagcatgcagtactaaaagctacagtaaaacaagagaggtcgcaccataaacgccgcaaaaagtgccggcgcggtgcctactgatgttgtcctttttgtgtagatcacatgattattcgtgttgctacttgttaacacagttggacgctaatgtggtgcacaggaattactggctccctacagatgatgctatgcaaaaaaggagaacataaagctcagttattcctgtgccagcgcaattactgcacaccaggtacgtactgaaagatcataaaacgctgggagatcaaaagttcaaaatcgagcccttaaacgttgaattagcgttaaaaattcaacaagacagcgagaagtgtaggaaacataagcaggttagcagaaacataggcagatcggcagacacccttccccagatgcaaatgcctactgagaaaaataaccgaaagaaacgttgggagctgtacctagttaaatttgcaagctagacaatcaaatgaaaggattctgtcaggtcggttacgcaggaagacacttcgttggcagttcagtacttcagtaacagatacttgcaacaagaaaacatacgggatttttcaagcccgaaggctgatcgtatatggagtgcagtcggtctatgaattcaatatgcacgactactcgtttcataagacatggagtacaagtaagggttctcatgctattaaatcaagcattcattttgaagcagttcaaatcatgtgaggcaaggactgctggtcctgcgtggtacatctcagcacctctaattaaatgaatgctaccgtaaatcttcaaaaatgttatataagattgcagcatccaaacctaaaatgtcctgtaaatgtccaacaatttgacaggtacacatctacctaaagagtgcagtacaatgcaatttccaaaccttaatttcagcggaagaaacaaaaaaaaaaaggactggggcccaacaggcaggaccgaaaaccaaaccgagatctcttctggagttttctggtaccagaactggcaacctaatatagtttcaggaatagaaagaagatgagatttgactacaatagattatcttatcagatccagcttttcc

SEQ ID NO: 147402 - DNA, 353 bp, Zea Mays
gttgtcgtacgaatgagcgcagatctgtgcgtgaaagagaaattagggttgggtccggtacgtgcagcgatgagagagaggcaggccgagatctaggatctaatatgtgttcataggcggctgcgtgggcaagtactggcggtgtactgtaccatacgctgtgccattccaaaaaagcagtatttaccacttggatttaactttcactacttgtcactgtcctcctccgtcctcttcaaacaactttcaaactctctttctcctgacaaggactgctctcttgctgtgcattagacagtgaccttcaaactaacatgctttttttatttgatttaaatacatctatggccctg

SEQ ID NO: 147403 - DNA, 500 bp, Zea Mays
ctttccaccagtatctggttttgaggtccaggtacatcttggtagttcctgggtggatggagtaggccgagtcgtgagcttccttgagtaggacttctcgggcctccccttttggtacacacagacggtgcttgaaccaaaggactccttggtcatctgccctgaggtccgggagttgttccttgtgggatttctccacaagttttgctgtctctgagtctagacgttgagctttgcatatgaggtcttccagcactggtttgacttcgagactatcgttgtttcccaaacatgcatttagttgcgctgattctttcttccaatcttctaaaaagttggttccttttattccgaatggttttcgactgagggcgtcggctaccacgttgtccttcccggggtgatagtgaatttctaggtcgtaatccttgatcagctctaaccatcttcgctgatggaggttgagatctggttgagtgattatatacttcagactcttg

SEQ ID NO: 147404 - DNA, 315 bp, Zea Mays
ccgatcaagtgtgttcatgtgtttgatagcagctgttcaaagacataacgaatgtttggttggctatgcgaaagggaaagagagagattggctttaattaaggccatattcaacccaaagaacgcataatatcagtatagactttgtgaaactgcaaaacgttgggtaacggggcctcgacgtcaacaccatatatggctaaccggtcactgccacatctccgcgaaaaactaacagggtcgtatggaagggaggatgccactgccacatctccgcgaaaaaggaggcagcaagcgcagcaataggaccaatgag

SEQ ID NO: 147405 - DNA, 283 bp, Zea Mays
ctggtagtgagcagggcgaaccagcatggccatggcaaccgcggcggcggaaaactgaggagcacgaacgcggagaagcgtggaaggctcggaggcgaaagggcggagcagttaggaaagaatgcgaaagcaaaaccactgcgtgcggaaaaccctacttcaagagatggctcctcgcacactccggaaaaatccgcctggcgcatacctagcgcccgagcaactcagtcgctgacagagggacccggacccgcaagtcacgtggctgaggcgctggtctcca

SEQ ID NO: 147406 - DNA, 579 bp, Zea Mays
agaacgtgtccgtttgcacgtgtttcattaagaggaaaaaaggcgaccattacaaagtggccaactatatcggaataacaagagtagcgtatgcctaatactttgcttgtacgtggcaagacaccatcctgtgcgtttgccagactacattttgcaaactttacacgacgtcccttagacccaaggcgctcatcaatctcagaagtgttgccaagtcagtgaacccctctagtgcactacctcgtcacagatgggtgctggcaactgtctgtgaaccaaacaccctgctgttcctctctttccacatggtccaggacaccagtaggatgagtgagtcgaagtccttgcacaggtcacttggcagcagagcacaagcctgtatccaccactctgccactgatggtgcacttaattcaagcaaaccctgaaggccgataggacaacaatctaaaccagacctccgtggtgaccacacactcccgaagaagatcaagggtcccattggttgatgatgttttaaacagctctctcctagtaactaaactttcctgtttgatttatgaccatatatatttgtcc

SEQ ID NO: 147407 - DNA, 370 bp, Zea Mays
gtttcacgcaatttgaatggatttgtacaggctgcgcttaacactcccgattcagggaaggagaagagactgacctgaatctcatagaagacgacagtgagtagcatgagaatggttccgcccacgacgaaccccatctgcgcgtcgagctcgtctatcatcccgggccggtaatcaaagctggcgatgtgcgcaaggaggtcgtgcgtattgatagccagcaacctggcgacatcagccattaagttgttagctgttaatctttctgagccaagacttcttcgagaaactaatctggaaacatcagctcacgactccgacacgaaccactgggtggaaattcatcaccgttgtggcaaagtattttcta

SEQ ID NO: 147408 - DNA, 466 bp, Zea Mays
cagttattgtatagtaaataatatccgataagcaacaaatatattgggatagcaatccatcctcctaacaaactcaaaaatatattggtataataaataatatccgtttctatcatatattcctattggactttgtgtgcggtggggcccctgggagatgggggcccaggtcggccgcccctcccgccctgcctcaggcacgaccctaggcatgcctagtgcagtggtgagagatgtcttactgagtcaccaggtcgcgggtttgaagcggcttctccgtatttacagtggaaggcttgccttagtttatccttttcagaccccacacatgtggagactccggcactggtctacctttttatgtaagtagtgaagaggagtggaggagcagctgtcagtctgtcaccgtttttttcgttctcccgctccatatgcctctccgctctcccttgccggcgcaactctg

SEQ ID NO: 147409 - DNA, 472 bp, Zea Mays
ctgctgtaggcacaaccaactccatggttgctgttgttactccaagcctgaagccccacccgacgaggcccctgcccacgacgagctagcccctgcatgcggcccccagggcagctgtcgtcgccgtcagccctatcctccgttgagctaccacagacaagcccgccccgccgtgtgtgccccctacgtgatccggtttttgtgttgctgcaattcatgcacggagccaaggagagaggagaaaccgttcgtgcgtgatattgaagaagaaaccgtagtggccccacctgcagtttttttattattactttttatttcctttccccacgatgaagtatgcacgtagttgaatggctcaccactcacgtagaaaaagatttgtgcaggattggttgcggccacgattttgtggtactccttgtggtttcggctcagccaactaaaatacgctacctcttcttaaatacgcgaa

SEQ ID NO: 147410 - DNA, 642 bp, Zea Mays
agcggtgcagtgtgatattacgaacccctgcagattaaaataaaaaaaactgcagcgaatacagctttagattgaactaaaaaaacgtagcggttgcggtgctttaacacgaagcgaacactccctagagtgcacgtcacgtagattatttactatatattatttgtttactttgagctccttgtatctcagtgcgtggatggcgatggcacgccattttgtttcagcttccagcgcgccatctttctttcagcatgccaattgccagccatgttgatgcagtcggtaggggcgctgggcagattccgccgaagactgccagccatgctgatgcagtgggtacgaagacaagtagacaactcatctgtggaccagtttgaaagagcgagccgcacatatacggacataccacatggcgcatggctgtcaacaccaatcatttcgatctttggatctctcaacagccctcaaaaccaaccaacggcctaatatcggactcggtgccacagcatccgtttgcagactataaaaattaacgctctgttgattctgaacattttctttgacggctttctgccagtgttcaatccagatgattcttcgccggaccaaatttctcaattgtattaccgtatttttatt

SEQ ID NO: 147411 - DNA, 321 bp, Zea Mays
caataccaagagacaagaaattgccgaaagatagcgacttaacaatagaagaggaaagggtctcaaaagacaggaagatcatggacatgtaaactgaaatgtctaagtaggcagtagaaatttagaggcaagtatttgaaacaagagtattgaagaatctaggagtacgagcatgtcaatattaagggaataaagatagttaaagggtagcaacttaatgacaaaggtgggaagagtcccaacagacaaaaggttatggtcaggagcatctacaaagctgtcgcaagcacaagattgagatcagatctaatagattgagag

SEQ ID NO: 147412 - DNA, 305 bp, Zea Mays
tgagggggagttgcgaagtctttttgagggtgaggagctgaggataatgctgtttaactatagggagatgggaatcattctgaaggttgaaccaatgtaaggtgtgatgccctcgctgtacgtgtgtaactatagtttatatgatgaggctgtgcgccttcgcgcattcggctatgtccataggggcgttgcacacttggtctagcacgtttattatgtcggtctggctgcgcctgtagtcggtctttgcgtggacagtttctcgatgtagacttttgcacggatgtaatgtgccttcgattttg

SEQ ID NO: 147413 - DNA, 633 bp, Zea Mays
cagaaaaaaaatcacaagcccacatatgttgcttcaattttgacaccaccttaattttcctcaatatgtttattgcttccagcacacatcacttgccatgtcacaactccaactatattcactgtaactttttcatatttttcaggcatttgcataatagtacatttcattgcagttaactaaatcttccatattcaaactttagagaaccttgccacttaggtctgcacacaaaaatttatcaacaatatgatttgtacataaaagaaaaaagttccctgccaactgtaaacgactgcaaaagtcacagaggccaatttgaaagaactttggaaaaccggttggaaagagtgaaagtctgtatttattattgtgtccacacttcttcatatatctttatatgatattacatttgtgaccaactcaataaaaatcactcaatagataaaaatatgtacaaataactcgctcattttgtacaattcaattgcttataattttgttacaacttcatatacctttctttaatggtacatctatgatccataaatgaagacatatcgaacaactcattagtttaatctgtatatttgatccataggctcaagaaaggagtcatgcacatttgagaag

SEQ ID NO: 147414 - DNA, 976 bp, Zea Mays
gacaacgcaccgcttccctcgccgaggaacgggagtgtgccatgggccaggcattgaccactcagttggccaatgcccagtgtcttctccacggctgcgacacaccaccacctcccgttgcacccaccccggagggtggggtcctcgagtccccccatacctctgggctccacgccgacaccatcgccgcactccacgcccaagccgttggggtccacaacatccggtccgtcgtgttggacctataggtgtacattcgggccgcccggcacaagcccgaaaaggcccgtattgtttgaattttgagctagcgcggcccgtttgaatttcgggccgtgtcgggctggcccacgggcctagcctttggcccacgggcctagccctcggcccacgacccggcacgtaattgcttaaacgtccagggctcatttcgagcggcccgaaattataaaagcccgaaattcaatttttcgcccaaaaatcacattagggcccgaaattcagtttttggcccgaaattcacatcaaggcctataattcacatcagagcccagaattcaaaacaaatttaataaagcaaataaaagataagacaaataaatttgaccaaaagcaaacttaatatttgtattaagcttctagagctatgcaatgactacctcgtttacaaatcattttgttagaaaaaaaaaagagtataatcagctctatacaaagttcgtaagttcagttcattatctaatgttcataacaaaagtaaaattacatcacatactctaattcaaagctacaaaaaacttctaactagcattatctctagttttgtgttctttataaagtacatgaaagtgtggaataaagtgtgattttaataaatatatgggccttttcgtgcctctatatgggccattccgtgcctgccttaaacgggtcgtgctcgtgcccgcccatgggccgcgacctcggcccaaacccg

SEQ ID NO: 147415 - DNA, 619 bp, Zea Mays
acggacctggatcacccgtttcgtgccctttctgtccttccacaaggtttgcaatgaccttatcctcaaggtcacaaagagcctcgcttcgcaccgacaccaccactgctctcgtcaactctagctctagtggcaacacacatctagttccctccgctcctgcttcaggacgggggtgttcgtcctcacgctcgtctgtcgctctagcgcaccttcttgcactgtccagctcatctctctacaactcgtggacatgttgcatctctctatgacccagaccgtccccaggtggtgccccacaatgctcaccatagccccaatcggctctcctcacaatgcccgacgtggggtgccctatcgatagtcatccctcagccccgacgatctcctcatagagctagacgtctttctcgatactgaccccatgtctccctctagatagccacctctatttttcccctgcaggtttgtcgcctccaccgctcctgcctgtggccccagtgccccagcgaatccacttgcggcctcggcgctccaagtggccccgaccatgccccaagttgtgctattgttcctagttatgtggtgtgcgataccgccatctcccatcaggtctccc

SEQ ID NO: 147416 - DNA, 475 bp, Zea Mays
gagaaattgcagacccaattgtttcagcagcttgaaccagaactcccttgagaaaacacaagatactaaaagatggtccaaggtttcagcttcttggtcgcataaaaggtatttggatgggtggtcaagacctcttttagcaagcctgtcagcagttcatcacctcttgtgagttgcaagacagaggaaaaatttgcacttttgtggggcccagttttttcacaccctacggtagtggccaaaagaagttgatcctgcaaaaagaccctcatatgcagatttagctgaataaataccatctaaggctatgctaaacacatgtttgttttctatttcttgcttcagcactacttcagataggagatcccacaactgaatatattccactaatactccaacaaataaggctcccttgatgtctgagatccatcttctattcagtaaggcctcttggactgttctccatttagcaatc

SEQ ID NO: 147417 - DNA, 1157 bp, Zea Mays
ttgagttataaatcaatagtataagaatatgtatcaatttagcgattctagttatatagtatatcatttgaaagattaaactatgtataaaatatagagacgttattttgaggatagaacactaacggtcatatatgatttttaacatggtaatcggagatgctacttagactcaagaattcagtcaatcataattatgtgactaaactctttagcagcatattttctagtttgttatattgttatcgagaagcttaacaagatgaaccatggcttatggaaaggcaaagattttagccgtggtgtcagcacgtctaaaatatcacattaatggagcatcactagcgccacaagcaccacaagctatgataaaggtacaacaggataacacatatgtcatcatcaccaactctacctataaaacaactgtatgcaactgataaacaagtgcttgcacaccttctctcattcgtggtaaaagatgtcatgacacaggtgacgataagcaccactgcgatgacaacatggcacattataaagggaatatttttctctataatatggcatgctccatcaacacacaaattaccctaatcaatctaaagaaaggctataagttcatcacagaatatgcgacaaacgctcgagcgcttgccaatgtggtgatctttgctgacaaatcatttgaagatgaagaactcatctcctatattctttatagccttgacgagtagtttagctccattatgatgaccctagtgatatagtaagagttgctcacaatgggagaggtctactcctaacttcttgcataagagcaaaggaacacatttctccatggtggtgatcagggtatctttgtgaactcggtaagatgtggttgttgggagtagcgtggacatggttgtgtcgctccatgcagtcacataggctggtcacaaggacatgagttcaatagcaatttgatgcatccacaatcttaggctcacgataacaactcgaataaaatcgacatcgatatcaagcccaaatgtcagttatgctataagagagaacatattgttctcaattgttggcacatgtttggtgataactttgttctaaatgagtgatacgactaatctgctacatcttatgtagtagattccagaactggt

SEQ ID NO: 147418 - DNA, 378 bp, Zea Mays
cgctgcgtgcaccatgaaccacagggtaggctattgttattccattttttgctgtgtagatggcgatgtatgggaatatctgtgaggagcagtagaaggctcgttcaaatgtttaatcagcacccactactgcggaagaaggtttattccaatatttctttctctttgtaactgtagcactcacatagtgaactcttggtcttccatttatctattgatgagaacttttgtgtgttattcttcatgctgatttggtacaagacagtttgtacaatatgacatattcaactgctcgatgcaattaggagtacagtctacagcagcctgcagctctagtcataatcaacaacaccgtggatgcacaaaggattgaagcca

SEQ ID NO: 147419 - DNA, 800 bp, Zea Mays
cccgccgtcatgaattgattgtccccaatcaagagcctctggaaaccgagtcttcaacacatcaatatcttcccaagtagtagcatcatctggtagctcggaccaggccacctgaacttgtaccacaggcttgtgaccccgccgaactaaacgacgatccagcaaccgaacaggatgaacatcccggccagacaggtcgaccaactgagagatgtcagaaaaaactggtgtatacttgggtgtaaatggtttaagctaagacacatgaaacaccggatgaaccaaagccgtagaaggtaaatccagcttataagcaactgatccaatacgttgcagcactttgaagggaccaaagaatttaaaagcaatcttgggatgagctcggttgaccactgaactctgaacatagggttgcaattttagaagtacactatcccccacctgaaagtcccgatccagtctgaacttatcagcttgatgcttcatgcgattctgagcagcagctaagcgagtcttcaacaactccgaataagccagcctctcttggagcaaatcctgaacagattgatcagtgtctcctaacagatgaggagctgcagctaagactggatcataaccatataaggctttaaacggagagcagcccaaactagtgtgatatgcagaattgtaccaaaactcagcaagagccagccatttcttccatttggtaggattgtcatggatagaacaacgcaaatacatttcaagacattgattaaccctttcagactgtccatcagtctgaggatgataggctg

SEQ ID NO: 147420 - DNA, 534 bp, Zea Mays
ggaggaggaggagcgggagctcgagtgcgcagtgtgcctgggtgcaatggtgcacggagacgcggcgctacggctgcccccgtgcatgcatgtcttccaccggggctgcgtcgacgtgtggctaagggagcactcgacgtgcccagtctgccgcgccgaggtggtcgtcagaccggcggccagcgagggctgtggccagaagggccaggaaggcggcccgtcgcgcgcgtccatgtcgatggcatggacatcacagggaaggctggtagacgacgcggagagggacctagaggcgcagctgtagcgtgtatgacagaggtacatgataggagtagctttatgttgctattgttgtgtttttgggattttggttacgaaaagtgagttagtaataatttggaagatttggctgaaatttgtaggatataaatgtatatgtagtgtagtattctacctaaggggtatcgcatattcacatataccattttttgtgagaataaatctctactatgtttaagcgtaagtttagttgtg

SEQ ID NO: 147421 - DNA, 344 bp, Zea Mays
atctcaagttcattcaacccatcagtagagcgctagcgcgtttcagaaaaagttcctaagactacgacgacaaggcatcgatcttatcatgcatataaaagcatcacaagcatgttcacggaacctatcggttaacttgatcgacacattacccctgttctttgcctttccaattttatcgcacaacaagaatcatccccatttgccaacgacaccaataatacctaccgacctagggtttaccacccgagcacagttacatgccgcacattagtttctaacatgattctcgcataactcgtaattcaactactcactaaccataaatcacgcacgacgactac

SEQ ID NO: 147422 - DNA, 839 bp, Zea Mays
gccttgtctatttcctagcacaatttcttcttctcttctgggtcatgcttgttctccttttgtcgtgatcttaaaatggtgcctctttttttattacatccaatctgaatgaggttctgagcaaaccaggtgttctcctcttttgatcggcaagcactgtactagctgagatctacatcaaaatgctatgttgtactttattttatgtcaatcatatgtttcttttggcatccacttggtcccttgttcccaaccatacaagatttcagattttattatttaagtgccagttttatgcaatccctttcccaaccatacattgattgctctcccagtggtgaggattgtatctaagttcggtggacttattttccttacttttacatccaaaattgaatgacttctcaacaaagctattttgcctgcccaaccattccttgtcttgaagatatctttttagtcatattttgatttattgtagatgtaatgcttatctatggatgagtgctataatggttcctattagggtttagggttaccgaagggattgcatcccatctgattataccaaaaccgaatattgtttctgagcaaatccatccatattgtcaaagaaccaaaccaatgatttactccattttgattaaccaaattgatgtaattatattcatcgctttcttggtggcaacattattatagaatcggaatcgccttgtctatttcctagcacaatttttttcttcttctcttttgggtcatgcttgttctccttttgccgtgatcttaaggggatgacttaaatgtgctccttctgattataccaaaactgaatctggtta

SEQ ID NO: 147423 - DNA, 316 bp, Zea Mays
ctgaccatagaaggagtctataacatttcccccctcctcaacaaacagctcgtccgcgagctgtactgcaggaaactgacgcttgaagtcatccagctgctcccatgaggcgtcagtagcaggccgaccaacccaatgcactaggacttcccagactccacgattcagcctggctttagtaaccttgttaggtgtagggacaattctgccatgaagaatatctggtaaaggaacaacagccgctggcgggggtccttcaaacttcttaagcagtgaaacatgaaacacatcatgaatcttggcacgtggaggaagt

SEQ ID NO: 147424 - DNA, 379 bp, Zea Mays
cggcgatgctctagctcacttttgcggtggacggaggaaggaagaagacgcgactcggatcgttgatccggtgatgggcggaccagattagtggaacacaacactttggccaggggcaatggagtccgtagatcatctagcgaacggatgagatggggttctagtgtatctgttcgctcattttgatcgagccgtagattctaggctcgatggtccggatcgggtgggtgcgcaccgttggatgacgatctggcggccttagtttagtaccggttcggttagggaaagatttaatctgagccctaggtttctaatcggacggctagagtttacccgtaccccttcgccatggctagttttcaaaagagtccccgcagaa

SEQ ID NO: 147425 - DNA, 520 bp, Zea Mays
gaaggatgttacttcagctgctccgagtgagcccgcaccgaagaggagaaaagtaaaggttcttactcaccgatcgcgctacattgaaccagccacagtgcccgaatttggcggtgagacctcttcggctactgaagccaaataacctacgcttacgcagaagattgaagagctggctgcaatgccgaaggcatcatcggccaaattaggtgagccgaaggccgataatattgaagagatagaggttgaaagaacaaagatattagaagttataagcctttcggcagaagtgacagtgccgaaggcacaaaaagatcttacagcgacccccaagaggaaaaggatggtcaacgtactagatgtgctggagacgataaagacttcaagctctactccagggaaaactgccgaagcttcaaaaacgcagactgagacaaaactaaccgaagccgaagctgcaaagagccaggccgagaccgaagctgggccttcagagcctgccaaggagaaatccttggaa

SEQ ID NO: 147426 - DNA, 1101 bp, Zea Mays
ggcgtgcagcaacagtggtggcgcccggaggacctgcaggagacatagttggcagccctatgggaaggggcgccgggttaggaaatccatctaggaagttgaagtccgcagcagtgggagtggaggtatgctcggcaaagggaaaaacggactcgtcaaaaagaacatgacgggagatgatgattctattggtggtaggatcaagacatcggtatcccttgtggtgagcagaataaccaaggaagatgcagagggcagagcgcggggcaagtttgtggggagcagtggccgacaaattggggtaacacttacagccaaaaacacgcagatgatcgtacgacggggcactgccaaagagagcaaagtgcggagtggaaaactgcagtgtcttggttggcaagatgtttaggaggagagttgcagtgtgcaacgcttcagcccaatatgaaggaggcatgcttgcctgaaatagaagagagcgaataatatcgttagtggtacgaataatccgctcggcgcgaccgttctgcgaggacgtgtagggacatgacatgcgaaagtgaatgccatgtgtgaggaagaaggtgcgcatgctggagttgtcgaactcccggccgttatcactctggatggccttgatgcgtgcgctgaactgggtggacacataggcgaaaaagttagacagggtggaaaacgtgtcagatttaagccttaaaggaaacgtccagaggtgatgagagcagtcatcaagaacaactaagtaatatttgtaaccagagacactaacaataggagaggtccataagtcacaatgaataagatcaaagttgttggacgctcgagacattgaagaattaaaaggaagacgaacatgtcgtcctagctgacatgcatggcacaaagactccaagcttttattacaaccagggatagccgaagtgagtttggagagtgcctcgcgaccagggtggccgaggcgacgatgccacagagaggtagatgtggagctggcaacaagggagtgagccacgggcagcttcagtgggtaaagcggcccggagctattgcacctgatgatcacgttccgcgagagaagatcct

SEQ ID NO: 147427 - DNA, 685 bp, Zea Mays
atggacacgacccccggcccgcaacgaaacgacccggcctcttcctcgccatccctcctccctccgttcgatgctactagtaggtttggtggtgagcagctagtcctcgactgttgcttgcttctctgtacgcgctaggcggtacagtacagctacctacactgcacaagcaaggcgtcaggcatgtcggtgttggtgtttggtggtcggtgaagagtctgctgggctgtgaaccaatggagctctagcgtgcgtggtccgttaaaaaaatagtcaaatgggcgaagttatgccgctataatttataaagataaaaaatatcgtaaaaatagtagaattctgtacgtattaaacccaagttgatgatagcgcatcgccggtctgcggctctggcctgatcctgatcttgcgcctcattcctcgttgacttgttgctatcgcaacttggcgcaggtaaacgaggccaaagcatacactatagtaacagtagttgcagagggagagagagagagagtggccagcagtagttagggcgtcttatcaattacttgctccgtggcgaaacgcaatgcacatgccgcagccaaggctcttccagtagtcttgtctgacctcaacaataacaaaacatgatgatgatgatatcatactctagcaaggaaaagaagctcttgctgccacgctg

SEQ ID NO: 147428 - DNA, 635 bp, Zea Mays
cttttagtttatgtggcaggttgattgaggaacgacgacgaagtctaacaccagaacatgtggagatgctgtccctggccaaggattgggagcaagcagctgttcggcagcaacactgcgttgagaacaaagatcttgaagagctaatggaaaatatgtatcttgatgcacaagaaggatcgacttgtgttggtggtggagatggacatgatcactaaaagagctaggttgtactcttttttcctttagggttttgtccccatgtagttgaaatggggttttacctaaaggtttttaacgaggcaaccaatctaaatagctctttataaagcatggtgatctattttttgatgtctcatctcatgtatggctgattgtctgattttgtatggctggtggtgtaatgcttgtatacttgtatggcaatggcactatggctgattgtctgattgtatggctggtggtgtaatgcttgtatacttgtatggcaatggcactatggctgattgtctgattgtatggctggtggtgtaatgcttgtatacttgtatggcaatggcactatggctgattgtctgattgtatggctggtggtgtaatgatgtattagtgtattgtatggttgtatattgtgg

SEQ ID NO: 147429 - DNA, 2190 bp, Zea Mays
cacgcagggagggagcacagagagatttgcgcgcgcagggagcagccgcgcacgcacaaatagatttgccgcgcgcgcacagtggaagaagcccaaaacgcgcgcctaaaccctaaagcccaaaacgcgcaggtctgcaaaccctagaggataaggcgacgcccagggaggataaggcgtcgcccagacgcctactacgcctaggcggacgccatacacagttttctctgggcggcgccgacgcctaggacatttctccgcctggacgcctaggcgtcgcctaggcgacgccttttaaaccatggaatttacaatttcctgaacccacaaaggttgcacttcactgacagcttgtaagcacatcaaatgaccaaccctggaaagtgcatctgccaccacattatcctttccctgcttgtacaccactttaaactgtaaccccatcaatttagtcattgccttgcgttgcaattcaaagtggagcacctgatctcccagaaaactgaggcactgatggccagtccttatttcaaactcagctctttgtaaacaagacctccatctatctactgccataatgagagccaagaattccttctcatatatagatagactagtcagttacccgtttgttactgcagtttctatattcagaatatttacaatatctattctttgttgaacacagatggttgtgagctccggtggttagaacctgggcgtgagaagagggagggcgatggttcgaacctcaacaccgcgctcatttttagacttttatttcatttcgctcactgcgctcgatggaggagacgactcacgaaggggaaactcccatttaaatttaaatatagtagagatgtttattcttacttccaagggccttgctcaaatatgccagtggtctaccttgctgcattaagactgtccctaaacccacatcacacgcatcagtttcaaccacaaaggacagtgtgaaatctggcaaagctagaacaggtgtggttgtcattgcccttttgagagtttcaaatgcaagatgtgcctcctctccccagtggaacttccctttctgcagcgatcttgtaaggggtttggcaatagtaccatagcccttaacaaactatctgtagcaacatgttaaacccaggaagcccctaagagctgtcaccgtagtgggttgaggccattgcagcatggctgctgttttcagtgggtcagtagccatcccttcaaatgaaataatatgatccagataaatgagttcttgctttcccaagacagtaagacacacttctttaagaaaaactggtgttgcctcaaagtagtgaacacaagtctaagatgctccaaatgtttatgccagtttggactataaactagaatatcatccaaaaataccatcacaaacttccttaggaaaggtgccaacaccatatttattgcacatcgaaaagttgcaggggcattagtaagcccaaagggcattaccttgaattgatagtgtcctttgtgagttttaaaagcaatcttgtgctcatctgcctcacccatcctgatctggtggtaccctgcagttagatctagacttgaaaaatatttggttccaaccagttcatcaataatctcatccaccaaagacataggaaacctatttttgattgtcagatcattcagtttcctgtaatcaatacaaaacctccaggaaccatttttcttttgcattagcaatactggtgaggccaaaggtcttacactgggtactaccagccctgatttcaataatcagccacctgtttttctacctcagtttgtgatagggagaatatctatagggtcgagagtttactagaatggcaccagggatgagtgggatatggtgatcaaatgatctgggaggtggtaggcagtaggaacagaaaacacatcctgaaattcttccaacaactggtgcatctccatggtactgtcaggcacaaactcagtctcagttatattctccatcaaagcaaaagcccacacatcatttcccttcatactcttctcaatctgcaacacagaaatctccttcacctccttcaccctcataccatctcccattaaccgacattgagctcacgcgtaaccttcacagggcctaagttgttggggaaggaagtagtgtgtgtgtgagtaggtgttttattgagc

SEQ ID NO: 147430 - DNA, 287 bp, Zea Mays
aagcttttagaatatcgaccaacatcttatccagggggaaccgaattccagctttcatgaagcttctgaaaattaccacttcgtcagcttcgggaagaggaacattattctcccctccggccctcacgattgaaatgtcacgaaagtatctgcctctcatcgcttcgatctgcctttgtttaatagtcgactttccgaaaacaacatggctcggtctccatgaccgatcttcgacatcttcatttccactttctacgtcaaaactctcactatcgctggagttttca

SEQ ID NO: 147431 - DNA, 459 bp, Zea Mays
tgaagcctgtggaatctatccatgcatccatcacaaaagactggaacaaacaccgccctctctgctgcactgatcgtcctgcaccttctaccactgatgctctcgtcccgacctcgcttttccctacacacaaccctagtcaaatttcccacatgtgacctaattaaccaaacccaccaagcacatcatgcaagctcatttctcactgcaaccacacactagtcgatcgacctcactcatcgaagctaataatgcatgtctgcacccccacaccttttttgtgttgatttcattcatgactcaacgaaatttaacaatgataaaatcaaggaagcttagcgcattgtcatactccggtagcctggttcatatgaactagcactgctacatccagagagaaggtggtacatgacacttgctggtttttgcagaaaagttactccgacacatatagcgatc

SEQ ID NO: 147432 - DNA, 638 bp, Zea Mays
ggaagcttgcgcctgctgtgagctcgcgattgggatgagagagatgagtcgccgcgggtgattcacgtggtcaccagtgctgtgtccccgaaaaccggttggggagctccgcctggttcccgtgaaggagttcgtagcattgattggatgggagctccttctgtgcctctgtgattgctcgtcggtgaagcgcctccgccgcgggtccgccgttcgccgtgggcagaactgcctacaccgcctgcgatggtatgagtatttctgttagatttggcgtgttcccttgtgcgcgtagaacctggtaattgaggaatggcatagtcacgggcctgattgatctcgccgtcgacgtttgttcctcggcggcgcgtcgtgctgtgggaggagagtgaggcgatgggggagatggggtcggagccgtccgatctgctactaacggctctcatcagatctgtgggtaccggttgggtgttaatccctggtcgttggatcataatcgagcacagcgttcattaggtagatccaaaccattgatcctcaatcctgtggtgattattccgtaccggttcataaaaggtcgtgggtcaatccgatccgtagaactctaatcggatggctggcaatggccgatacccctt

SEQ ID NO: 147433 - DNA, 477 bp, Zea Mays
tcaatggggttgcgcttcttcatttttcataattgttggtggaactattctgctcatccataggtaagtgctaaacattctctcttttagtgacaatatttatgctttggtaaactttatatctgatatattaatattgttattacaatgtagattgcttctgactccgtgtgctaattttccccagagctatgtttctccatttttcataattgtggtagaactatttctgcctgagctattagttggaacatctttttaccatgacaaatattgtcgcctagcacattcccatcaaagaaattcaacatagtagtccacagtctgagttctgcaaaatcaagtaaaggatatgaatagggtatttcctcttagattttctagcgtttttcagattcaaacacacacacaaatgaaattttgtcatttggaaaaactgacttgtctattgtttaaattgtctatatgcatgaagag

SEQ ID NO: 147434 - DNA, 414 bp, Zea Mays
agaaaaggctgttccaagttgtgctgtcagactagtgaattctgactgtcgaccagagtggctaactctgaatttctgtctgttgagtcaactttggggccttacagaaactatcatatgtgattaggaaccaaattggtgtaagcaaagttggagagctagtattcatgagcaagttttattatgagggcctcgcttgctgtcacataaatttaggagataatggtgctcaaactgcctctgtcaaaaggagaaatcagatggggactgttgactggaattcgaagttcagaccagaaaaaaagccaccagtgtaatatagttgatttttgggcaccataactttggatttatgaagtttgagtctaagaaccctatagtaactttgaagatctttgattagtgaacaagttc

SEQ ID NO: 147435 - DNA, 902 bp, Zea Mays
  misc_feature (1)..(44): n is a, c, g, or t
nnnnnnnnnnnnnnnnnnnnnnnnnnnnnnnnnnnnnnnnnnnnctaatctagagattcgtcctgtggactgaaagccttttgcagtatcttgttaatcaatgaagaagggggtgggcattgaacttgttgtcctggaggtctcttggctgctctttttaaagctttctttcctcctttgaatcatatgagtgtgaagcctaacatcactacacctttaaagtgggagtttcatcgtgcgttgggccaggccatggcactattaaatgggtcgtgccttgggcccgctaggcacaacccatttggccatctatagtcaatagtctagtactcctccctcatcatcgtacctgatctcgtgagtgtggaaaaagatgagagaaaacacttcatcttgtttgaccccacaccacacagtcacatacctcgccatccgcactcacctaatctatgtgtttggatcgtgtttgaataactatcccatttaagcaatgtctacctatatgatatatagaaaccgtagcgatgcactggcaactaactatgaattagtcatgcaggagctcattcagcaaatggcgaatgtgcagtacaccgagaacatgacagaggaacaggttgatgctatggcaggaagtgagactttgcggcagcaagcttcactgttcggagcaacaagaaactataaggttgaagggacattcatctatctcagcagcatatttggatcaaacaattgtcttaccaaaaaatgtaattcttacgcaggtgttgagtaagtccacaaacaggctaagggattcgttgcttccaaaagatgagcccaaacttgcagttcctatgttactgcttattgcccagcatcgatccaagtaagatttttattaacttggtggggccatt

SEQ ID NO: 147436 - DNA, 313 bp, Zea Mays
tgcagatatatagatatatatgtaggtaattacgctacttataggtttaaaactaatgtttgttctatcggttactctaggttagtttgcaattatgccagtaacagtaagacatagccccaactatttactataaggatactgtgcgcattgttgtgggacacgtagaaatagagctgttgcattataagtttgtcttacatatttttgcaacgatttggtcaaaatcgggaaaggtaaagaatggcagaattaaagctactattagaatattaggttgaattatatgatgatgaaacaacaaacaaatata

SEQ ID NO: 147437 - DNA, 615 bp, Zea Mays
gccgcagcttgtcaaagaccagggttaagtctttcactagggtcgaccctctcttagtcttgaccacgatgtcatcaacgtatacctctaccccgtccctaattaggtcaccaaaagtcttactcatcgcccgtacaaatgttggtaaggcgtttttcagaccgtaaggcattacaacataacagtaaagcccatccaccgttacaaaagcggtatgcttcctatcttgcctagacatctggatctaatggaaaccagagtaagcatctaggaaggataggaggtcgcacccagaggtagaatccacgatttgatctatttgtggaagtggacatgggtccttgggataggccttattgaggttggtgtagtcgatgcacatctgaagcttcccattagccttgggaacgatgattggattggccaaccatactgggtgatggacctcttcgatgaagccagcgtccagcagcttccggacctcctcacggatgaaatcctgccgctcaatggactgtctccgaggcttctaactcaccggtttggcatcagggtggatcttcagatggtgctcgatcacctccctagggatctcaggcatctgcgacggttccc

SEQ ID NO: 147438 - DNA, 369 bp, Zea Mays
tgcgtacaaagcattgactcttggatcctgcatacaaagcatcaaaggagtcatccaactgggtgtggtagttctcaccattgaaaagattgtcaaaatacctctacgacctctttttgatgtcttgttctttcaccaagggttgatacatctcatccttaatgcatttaacttggttgaggtccctcatcttcctttcctgaatcctagccatcttatagacatccttctccccttcctttgtacttagtcttcggcaaagatcatcataggctcgaccctttgcctcactcacagctcgctttgcagtcttctttgccaccttatacctctctatgttgaccgcactcctgtcatagaacaagctcc

SEQ ID NO: 147439 - DNA, 675 bp, Zea Mays
ctcgatctacataatgtattttagtggatgagaaatttatatcagcatatttggcctaacatcacccaatgtggaccatattatagttctagtaacttaaaatccttaattactttgtttgataaataaagtattttatgcacactccgctcataaacctagttaagattataagcaataaagacaatcttataccccaaacttcaacctctctatatgaaaggattgtggacctcataacttaagcttgaaaatgaactaggtgtcaggccttagaatatcagtagatactagtacataaaaaggggaacaaaaggtgacacagtcttatccataatggcataaataaagtcattcttttattagatgcacatgtttttggtggtcctgcactcctgtttatctctctaaaaaacttgaagtgtcataacaagatgcaaaagtagtactagtggcagagcttctcataggatgaaaggagcatgaccacccctgaacctgtgtaaactatatagttgcagccattttgcttgataaaaattaaaagttagccttgttatttaatgattagcccctgctgaatttagggtaactgaatgtgtggtaatatttctctctttttccccgatgtgtaggagagcacatgctgaacatttgtgacattttattcatcca

SEQ ID NO: 147440 - DNA, 532 bp, Zea Mays
aggggttttaaaaaggcctaaatacacacctcaacgggctgaagaatttgtatttttcttcccagtagtttatcacgtgcaggtgcagctgcttcgaggtccccaaagccaaaatggcttttcgctacggtttgggtcaaatctgcgtgcactaacttcgtgttacaatggcccacactctacacacacgtgctcatgcagagtagatggatatggatcctatgaacaaataaaatgcaacttggacgattgtattcctacagggggggtaagtcatcagacgcctgcacaaatcacatatactatctctgcagcatgcagaccattgttgcattgtagctcgctcgcaagtcgcaacagagcagatcacacaaaaccttgctcaaatatttgttgtttttcaactaaaacatgacaaataaaaatgatcggagcaagtaccatgttacttactcccccgttctaggataggtctccatctcatatttcaagcagccaatcatcggctgcatccgtagctgtttagactgct

SEQ ID NO: 147441 - DNA, 700 bp, Zea Mays
cagctatatgaggactaaactccgtcgatttgactacaatatcatcaatgtagacttccacagtgtttcctaacaactcatggaagatcagattcatagccctctgataagtagcaccagcatttttaagaccgaatgtcatgacaatccattcaaataaaccaataaagcctggacatataaaggccgttttagacgcatcctcttcggccataaaaatctggttatatccggcattaccatcaagaaagctaataattctatttcctgatgcattattgattaatgtgtcggctatgggcatgggatattcatctttatgagttgctctatttaaattacgaaaatcaatgcataccctaagcttacctgactccttcttctctaccggcacaatattggagacccactctgcgtatctgcaaggtctaataaaattagcttctagcagccggtggatttcgtccttgattcgtgggagaagatctggatgaaatgttctagctttttgcttgaaaggtctgaaaccagacttaataggcagccgatgttcgacaatctctcggcttagtccagtcatttcagtgtaattccaagcaaaacaatctgaatattccttcaatagaccgatcatctcatttctagaatcagtctccagggtcttgtttacaaaagtcgaccttggagttttaccatctcc

SEQ ID NO: 147442 - DNA, 812 bp, Zea Mays
gagccaccgagaaagcagtgcgcgactccaccgcgcagaccgtcggaggcgaggaagatggcaggagatgcaggaccttcaagcgtcgtccgcgagagtgcgttactctggccgatgcttactcggtcgaactatgcggagtgggccatgttgatgagatgtaactatgaagccttggagatctgggaggtcatcgagcccggcggcgtcggcgtaaagcgagcgcatgacaggcaggcgatgggtgctctcctgagatcggtgccaaaggagatgtggagactactcggtgaaaagagtacagtcaaggaggcttgggaggcggtgaaaagcatgcgagtcggcgcagatcgcgtgaaggatgccaatgcccagcgcctgttgatggacttcgagaacatcatcttcaacgatggcgagaccgtcgacgacttcgcgatgcgtatcagcggcatggcgtcggatctgcgctcgatgggggaaatagtcgaggacgccaaggtagtgaagaagatgctgcgagttctccccaagagatatgctcagattgcgatttcaatcgagacgttactcgatctgaaatcgctgacattggaggagctcgtcggccgtctaaggatggccgaggaccgcatggagatggagtctgtcaccgagaagactggaaaactcatgttgacggaggaagaatgggtgtccaagaatcgccaccgtctcctgccagagccatcttcgacaggtggaggcgagaagaggaacgggtttaacccggccaagcacaagggtgtcgcgcgtgatggcggtgggcgtgg

SEQ ID NO: 147443 - DNA, 1240 bp, Zea Mays
aaccaacaaaatttgaactaaaaaactcagtttgtacatagagaaatgaaaaagacaaatctagttaaggggtagattgaaccaactcaaaggattggaggggtaaaatgaactaaaaaacactttagggggtcatgtgaacaatgtacataagtgaggggggtaatttggactttttttccttctacaaaatacatggataatatggggtttcgagtaaaatgacacccttgatccaaaggcttgattttatcttctccagcaaatagttagccttgttaatgtcaaagaatgggaattcaagaagtccaatccgcatggatagctggtagcctggtactccatccgttccaaattggaaatcagttgtaggtacatagtttttgctatgtggtaaaagctacggatctagaaaagccaaaaaaacttacaatttagaacggagggagtaatgaataaggaaaccagcataacagaaatggtagtagtaacttaaataaaacaagaaaactcaaaattaccgggttaaaatgttaaccatggctcgaaatgcagcaacctgcaaaacagcaatgttgcagccattaatacccttaccatcaaatagtaagtggaaatatatacaacggagtatattctgttacaaatatgtatgtctagaaaattgtgtaaaataattatgcacaagaagagcttgtaacaaccaacaacctgaagggtctcaccgccatcaccaataagatgaagcaacatgttaagtattggttgcagaaattgtaataatgcagtagattcgacgtttttcaaactatttatggcctgcaaaagtctcatcccaaaatcagtcagtgtatagcactggtatctactgcgaagtaccacatggaacattacgcaaaagtgatacaagaaaccaattgtttgagaaaaaaaattacaaaggaaatttagtaaccatctttcataaagaaaattggggttaggaaaaaaggtaggttccactgtcttagtgtcttctacaacttgaatatatttggctacttctcgaaatataagcacagaagacaaaacatctgctaaccacaaaagcaaaatctctagcttctgtgttaatcatgaaagcaaaaaaaaacacacacacacacacacacaatggtccacattattatgaatagcaatatgcattatggggcaactagccccaagatatatacggtgcaggaggagtacaaatatacag

SEQ ID NO: 147444 - DNA, 637 bp, Zea Mays
cgagttcacggcatcacgcatggcgacatgcaggcacagtgaggccaggtgcacgacacgaacaaggaacggacatgagcatgatgaacttctcacctcggaatggagcacacgtgtaggaggatggggacaacagactcgacgggctctagcaaggatagtggttctggatccatgacggtggtcggagcaggcggagatgtcgcaggggaggctggatgacagaggtcggagacgccgggcgagcagggctaccccgcacaggagcatccgcaacggaccacttttcccgcgagaccccaggcggccgcgacaacgatcgagaagagaacgtgccgaggctgcatcgggtgccggcgtggagtatgtggcaacggcggagaggagggggaaagggactcgacgaggctgtgtatagactccaagagcacgggatgcgcggtgtttattaataaacagggtgatgaccaaatcttaacaacttcccctggaatcccaacgaatccaacggatatggcggcaatacaggccactggcagcatgcaagccacccatggcggaagaagagggcccagtcccaggagccccacctgattagccggctgtgaaattggcaacgttggtttctcgcggccgg

SEQ ID NO: 147445 - DNA, 452 bp, Zea Mays
gcatcgttatgcagtcgttaaccgccgccaatatcacagatacgaacgtggacgagcggctgtaaatgagaatttgtttcctcccgtaactgtgcctttatttacgcgaacgtggggcacgtctttccttatctcaaaccggtggatatttaaatgttgcatggtttacgctatcatgttacacagcgttatgcagtcgtaagcggtgtacacatggtaatatttgttcccgtgattcgtggcccaaaagattccttctatgcatgatttatgcatatttctacatatatttatgcatgcgtatatcgcatgtcacgtttcatccaggattcgtggctatcatatgcatggctgacgcatgctcgcgtacagtgggtcgaccgcgacctggttggcgtcctggctggggcttcccccactaacggaagcccagggcttccattacctcttcc

SEQ ID NO: 147446 - DNA, 342 bp, Zea Mays
cgagctccagccaccgcggctaactcaccccagccaccccttgcccacgccagctgctcggatagcttcgctagagacccgtgaagcttcccaaaccctcacactgagcgcaaccccactagagacgccagaccaccctcgccggacttcctccgctcaccagagagtgtggaccaggtaagccactacaccatgttcaaattcctcgtgcgcacagcctctacgccacctggtaaagcttcccgagccaaccaattaaattttatcgtcgtatttaggccggactcctcgccgtctatgagctcttccaccctcgcgcgcccatctccgactgccatcagc

SEQ ID NO: 147447 - DNA, 284 bp, Zea Mays
ggggcacactacttcaccaaattggacctccgctcggggtatcatcaagtacgggtacatcccgaggatgtggagaaaacagcttttctactcatcatggtcacttcgaatttctggttatgccatttggactgtccaatgctccctcaacatttcaaagcttgatgaatgaagtcctagggccattcctgtggcggtttgtgctcgtattttttgatgatatactgatttttagtactacttggaccgagcatttacgccatgttgcagcagtcttggacacc

SEQ ID NO: 147448 - DNA, 1350 bp, Zea Mays
atctaaaacaatgcatgtagtattaagaaggaagaacctaattgttaggtgcacatcaaactaatgtggactcatcatcttacactaatatcaaccaaaaaacacaaagagaaggtcagctattccgagcaaaaccatgggatgacaattataacaaaatcttaaagctatgaatggttctcagatatagaatacaaacctaaattgtcctttcacacaagccacaaaccaaatattttccccatgtatacgtacacaacgttgcaggctcactacccattggtatatttttatactgatataagtacttgctattctctcttgcttttccttttttttcattcactgatggaagtctgaaccaaaatctacatgcattggtggaatggaaatgtgacctccactttcgtaagtccgagcgggcttacaatagaccgctaatcagctcatgtcatgacaatttgttagaggttacttaaccgcactttggtccagcctaatatatatacaagcaaaacacaagaagtgggcttttgcaagataagagtagggggtggatgaatgcaagcagctagttgtcaggcaccaactttctatactcttgatagaaatctctatctaaacgagagcaagggacaatcaaacacatgtaaatatagaaactaaaattgatgaaaccacatgaaaacattgctttggccgcaatttcaaactgaacctattttgtaaaggaaatcaaacgcctaatctccaacaaactatcaacaccaagaaagaaacccagtagataatagctacagataaataatagctataggtaaacctaagaacaccaagagaggttcactaagactaaccatggtatgagcagttgcagtacccgccgaagaacttgcgatatacctaggatgaagacagaacaattattttttaatcctaccaaacagatagcaccccacctgacatgaggttacatgacatgttctcaccaatcactgttttcattacccaataaatctgccaatggatctatcagcgcccagatttcctaccaaatcggatgcctaccatcggtgagagacatgcgagcccaacaaagccatgtccagaagggaaagcaactgttggcttgtcttactgttgagttgatggttcagaattattcctcgaaatagtggattagtggttgtgattagtgtgccttggaggcagaatggtgccatcatttactaccaaaatgagcagggaaagtaagaggactgcaacagatgaatctggtaattctgaacttgtgtgggtgggggctcaccaggctcagactcggacctaaggtagatgcggcagcaagcg

SEQ ID NO: 147449 - DNA, 639 bp, Zea Mays
catacacagagagatatggcacgagacaggacgatcaagaagtcaaacgacgtaaaaacggcatttgacaggcaaatagtgacataggatgattggaattcgacttgaggcatgaaacgatatgggattgagccgatacttcacaaataggtttatataggtcaatatgagtgaagtgtgtgcttggtttaaatttaggcgaagaattagggttttgggcactcggctcggaaacgatcgcgcaaaacgggaattttggtgaaatttaagcctgggatctcggattggcgtgaaatttggcaagtaggttactggaagtgtggtgaaggtgcctgaaaaatttgggttcaattggagcaagtttggctggtttgggcatttcaccgagcatgtggcgtgcggggagctagggttttaggaatatggccatttgaggtgggaatgccctcccgaaggagctaaaagtttgcagggatacacaagggaggaacatgaactcattccatcaattggattcacaggaattcacagatttggaagatttgcacaagggtggtgttcactgcctaactgacacagaaaagagagagagagggaggacagagggctgctcaccgcaggggaacagaaggggtgcgc

SEQ ID NO: 147450 - DNA, 741 bp, Zea Mays
ttagtttcctattgcagctgtatttttactttctgcaaatgatgcaaggcagaccttgcttgtgctggtgttcatttcaataacacatttgcccgctgcctttttgattgctaacataatgagcactgtgactgtgaggttgtaattgttgaatttgtacacttggaggtaattagtgtgcagaggcggcatctgatctgcagtggcaggggaatcccaagtcctcggttccttctgacttctaatgtgctgtatggccctggctagcctaggttaccttctggttggcatttctgttatttaattttcttattaagttcaaatactaatggcaccctctgtttcggggccttcactatcacatcctctctcttctacacagaacaaggctagaaatgcatgccgcattgcaataaggtggacgctctccaaagggtttaaatggtccatcagctttccagcaactaaagactgcttcagttggtacgcagaatggtggtttaactaaaggaaagaagagatatagaagggtttaaatggtccatcagcttcctagcaacatcagattactactttacatggctgtcagtagactatctacctcttacatctgtcatatataagctgtacagtctacactcattgcatagttaatcattcattattatagtgtgcctttcaaatttgtgatttcttaatattgataaaacttgctaaaccaacaaggttagagtgtctttt

SEQ ID NO: 147451 - DNA, 389 bp, Zea Mays
gattgctctaatcacacaagccagttaacaagtagtggcaggagtgttgattcactggaagtaagctaaacctaaagctgcattaaaatgatcacattaaacttattcacatagccaacaaagccattaaaccccaataaactggcagtttctttgcacaccaattaaactggcagttttcttgcacacctctggatgactcaggctttatctatgtttttcataatcataaatactggatgtctaggaatgctttccttggagtaaatgtaaaaaacaaattgctagtacttcaaagacacaactaaaccactgtgatgcatcaatgctactttgtggtagaattattctgaattccaatgtttatacttctaaatgggcttgattgg

SEQ ID NO: 147452 - DNA, 626 bp, Zea Mays
tctggctacgctccaagctcctcgtcgtactcaacgacgccgcctctctcgagcacacgcctgcgtccatctcacgtacgacgacacgtctctttttcctagcgccgcgaggcgagtggcaccttcactgatacagcgacacgactctgctactcagcgttgcaaggcgatagttcgctcccgttggccgcgtctcccacacgcactacgcgtcccgagatgaagggacgcttcgacggccggatgctggcgtgcaagcaaggcaacgacgactgtagaggcccgcatgcgagcgaggctccgaccgcccgatgcgtgggagacaaggtcgcgactgtttttccgactgctcacacgcgtgggagatgaacactgcgacgaaggcccatggcggcactggagcgaggcgagggtggctactggctatcgtgcggagcaggtaaacccaaccgcaatccaccttttcggaaatgaaattgggcgatggagggcggctccatgttctactactccgcaccccaaactcgaatccacctggttgtctcctaggtcatcatgtctgctctatccccgtctagctgcagtcgttgctgccccgggcgacgacgtcctgttctcgtccatgt

SEQ ID NO: 147453 - DNA, 700 bp, Zea Mays
agacagtctataagcaggcgaaagtgaataccaaagcccatgtaaaaatgcaatactttcagcccaaacatcagacaagagcccaccgctgcgaggccctatgctacgttcccaaacgctggcgctgcctggcaggctggctggctcggtgcctcccctgagttccatctcctgtcatgccgccgccgcagtagagctaacgagccacgggtagcatgcgccgcggcctgcgtcgcgggttgggcatcctcctcgtcccgctcccgcacgcacccagccgcctgccgccgatctctctcgcggctctcctcccccgacgcttcaatggcttctcccgccactccttctgcagcttccccgtcggggagcgcgccgtcgagcagttctcagacgacgaatacgaccacgagtacgaggacctccgggttcgtgctacatccagctcagcaggcacacggatgatacctcgatgtgacctgcatcggaattcttttgttttctttgtttgttcggcgcctcggaatgatttcttactacacgtgcagccgtcgtcatcggtggcgaacatcgacgagtggaggtggaagctgagcatgctgcagcgcaacgcggaggaacaggagatcatctccagggaccggagggaccgccgggattatgaccagatagccaacctcgccaagaggatgggactctacag

SEQ ID NO: 147454 - DNA, 366 bp, Zea Mays
gacattatagatctactacatgtgccggcataagcatcactaacaccatattgttttttgctgaagtaatggctcaacaaacatggattacgcacgtgttccatgtagcataggtattggctggttagaggtccccagaaggttagatgggtctacttcgtcttcaccatgcaaaatgcgatgggcatcagtcgtcacaaagactgggcaatctaaagaggttgtgtattttttggcccacaagagaagcattgcaaatcaggatgggtaccagccatcgcatgcataaacaaagcagcgaatttgtgaggactaaccctgtgcaattgcactgtgcctcgggcgcttcgcttcgtggcatctcgc

SEQ ID NO: 147455 - DNA, 402 bp, Zea Mays
ggtccaagagaatgggccggacttccgcaacagtttgaagaagggcagcgccttctcagccagccttgaaatgaagcaactaagggcggctaatgacctcgtaagcttttggacgtccttgatatgggccggaggtctcatcgcctcaattgctttgatcttctctgggtttgcttcaatgccccggtgcgaaaccaggaaccccagcaactttcctgcggagacaccaaagacgcacttgtccgggttcagcttcgtgcgtgttgcccatagcttgtcgaagaccagggtcaagtcttccactagggtcgaccctctcttagtcttaaccacgatgtcatcgatgtatacctctactttgtccctgatcaggtccccgaaagtcttactcatcgcccgcac

SEQ ID NO: 147456 - DNA, 1103 bp, Zea Mays
ctggacaactggtcaactggataaagcaaattgatctctaactgcataatagcacgagatgaaaaatattttgttggccatctgttgattatcattatcaattttaactacttaaaagcacaatgtgagaaatgttttaacttagcttcgtaatggaaatggtttgtgggaatgcattgtacttctacattctgttaattaccggtgttcatagatgccatgaatgcactttagatgcagtatcacaatgattgactgcatgccctttcccggtagtgggaacttcagcggtattgcatttctcactgttaaggtcagtttataagccagtttttctttcttttttttaaaaaaaaataagattctttttcatttggggacaccaacttattacatgttcaacattcctattccataaccagacatcgatctgacttgttaacagacctgggttaggaacgtagtatggtcttctatatgatgttagatgcttcagcggttcagccttgaatctgtatggtcctaacttcaattttaattgcacataaatacataatcatagaaatgaattgaaatatctgcaatgactgctgcctcgtaatttttatcatagagctttaccaaactattcatttcactatcgctatgtttcaaaggtatctgtgttgtctgacagactattcttgttcagactgatgctgccaaatagagagcattaaccatggatgtgtaagcatatacgtccttctgtgctacccctctcattcttttaatcatgggcagtgacattcttgatatccatttcagaggaggatcttatcctaaaacccagccttacaaacggaaccataaaaaagaagattttgcatcaaagttgataatagggattaataggacatgttggaaatataccatgggacgtaacaagtacgtatgttggaaatctactatggggtataatagctgacgatatgaaaaagctcttctctgattgcaaaatgtttgttcatccgatctggaactgacaagaagatagacgaaccaaacggttgtgtggatgttgatttttttcctgatggcacatctcttgatgttcatcttat

SEQ ID NO: 147457 - DNA, 921 bp, Zea Mays
agcagatcgcctacctagggcatgtcatttcagcacaaggagttgcaaccgatcccaacaaggttacaccagtgtcttcctggccgacaccaactaattgcaaagagctcaggggatttctagggctggcaggttattaccgtaagttcgtgaaacattttgcagtgatagccaaaccactcactaatcttttaaagaaacacacactgtttgtttggacagcagaccatgagaattcctttcagaccctgaagaaggcattggcctcatcgcccgtcttgcaactacctaacttttcattgccctttgccatcgagacggatgcatccagctcaggaatcggtgcggtactcagtcaacaaggtcacccactcgccttaatcattaaagcattgggcatcaagaacaaaggtctttcaacatacgaaaaggaatacctcgctatcctgatggttgtggaccagtggcggtcatacgtttagcatgctgagttcctcatttatacagaccatcatagcctatcccatctgtccgagcagaaattgcacaccccttggcagcagaaggtcttcactagacttttggggctccagtacaaagttgtctacaaaaaagggcttgagaatggagccgcatatgctctttcccgccgtccccatgacaccttggattgcaaccttatctcgtacaacaacccacagtggctcacagagatggtcgcagggtatcagcaggattcccaggctaagcgcttgttgtctgagctggcattgcaccagtcgtcctctactccttatcaactgcaaaatggggttatcagatacaaggggagaatctgattgggcaccaatacttctctgcagctcaaggtacttcaggcctttcactccagtgaaatcggtggtcactcgggattccctg

SEQ ID NO: 147458 - DNA, 416 bp, Zea Mays
cagagattcgcggccatccgcgataatcaatcagcacaaatcgacggccctggttttctgttccttcaatcaccttcctaagtcgacgccaacctaccatcgacggcgaggatggaggtccttaaatatgtccaaagcgaggctgccacaccaatccccatcctccactaacgaaccaatatcttacaggtactctgcatgtgtgtgaagccgtctccgcctccaccaccctcggtatggacaatcgattcctcttcatctccctctcgttgcgtcgtctcctgttgcgatgtggatcgtcgatgcgaatggaatgcggtgtgtggtgtaattctggtggtttttgtgacctacgagtcatctccttaattccaatctggtatttattagtatgggtgaattgtcatggatttgtg

SEQ ID NO: 147459 - DNA, 752 bp, Zea Mays
ttcataacaccgaaccccaaggactcatatgcaaaaatgcagccacgaaggggtatgactaagttctggctattcgatcagaaaccgacggccaggattagatcgcagttctcatagatggatacgataagctcaccatggggtctatattggatggttcacgttttatgaagcctgatctaattttgcccctccgattagatctcaacgacccgagtcccacccaagtgaacgggtacacacttcaattttgtgcgttgatgatagatcagacagtgcacgacaccgagacgaagggggaagtccgcttttaatcctagacgtccatccccagatggacggcagtcgcaccatcttccccctctcgccagcacccgagctccacatcggtgctttgaatcccgcgacggagcactgccggtgagatgccccaaccacccaatcggatgcaattacactatgtgcacaccaatgtgaattacatggagaggcccttaccgtctctggtggtgtaagtagcaatgcctcgatagcccgaggatccgcggcgacggtgcaccaacggcgagaaatcgacggtcacccccgccacaagcacgcgtgatttcaccggggacgcacaggcccagacctcgcgatgcccttcccccgaactaatcctgcgccaaacacggcacgacgagcaagagatggtggcggcggcgcacactgcacccacgacgatgagtcactaaaggtggtcgggatcctcg

SEQ ID NO: 147460 - DNA, 720 bp, Zea Mays
caaaaattacggcataaaaatcgcgcgtgttcgatcatgcacaggttctggcttgggcggattttagcgtaaaacatgaaacaaaacagcataaatgaatacaaaatttagcgtaaatcgtagatctgtttcgaaacggcgtatgcggaccgaaaattacggcgtaaaaatctcgtgtgtcccatcgtaatcgggttctgactcggacagattttagcgtaaatgattacgaattttagcgtaaatcatatatctattttgtaacggcgaatgtggcccgaaaattatggcgtgaaaatcgtgtgcgtcagatcgtgggcgggttctggctcgggtggatatttgcgtaaaatgtgaaccaaaacagggtaaatgtgtacgaattttagcataaattgtagatctgtttcataatgacgaatgtggcccaaaaattacggtgtaaaaatcgtgcgtgtccgatcgtgcgcgggttctggctcgagcagatttttgcgtaaaacgtaaaccaaaacagcgtaaataaatgtgaattttagcataaatcgtcgcgcagacctttaatagttctcaatgtattagctaggcaagagaagccaaacaacatacaaatatgtatcctaaagtaatgaaccaaggatctattatgcatcctttagtcaaggcacaacatactgccaactctaactataaaagattaattcacgaattcagataaat

SEQ ID NO: 147461 - DNA, 294 bp, Zea Mays
cctttcctctctctctatgtgtatatatattggttgaattaagattccttcaattcaccaatacaacaactgttcaggtaccttgagaacaaccggttgtctggacccattcccaaggctctgctaagtcgaagcattattttcaagttcagtttctttcttgatcaataatatcttcagtttatttcttgatctgatatcatctctgctaatacgtaaacaaattttcagctactctgggaacgtgtaccttggaacagcagggaagcaaaagaagaagcatgtcatcatcat

SEQ ID NO: 147462 - DNA, 739 bp, Zea Mays
ttgctgggcctcttgagcgtcgacgtggttgactcgtgctctgccctggtactgggtcctgctctgctgactgttggaaggaggtgccttggaggtaggtgccgagggaatcttggggccattcaccgagttggagtaggtaggtccaggtgccttcaactgggggcagttattcttgaagtgactggggtctccgcagtgccaacaggcatttgctggcggctggttgcttgcaacagagggggcctgaagggagctctgactctgctggctgtaacgtgatggagtgggtccagctagtctattgaagcttggtcccctgggtgggagcctgaaggatcgagttctctggtgacgatcttgctgctgagctcggagaacctggaatttcctcttgaggtgccctttttcttcctcttttgccctttccacttggatggctttgttggagaggtgagagaagttgaggaagtcttggctggcgaggatggtcttaagctcgggtcttagccctttcagaaaacaggccatcttcctggacttggtgctgacatcgtcaggcgcataatgggccaactctgtgaacttgtgcacatactcactgacagttcttccaccttgagttagttcccggaactcgtcttcctttagttgaactatcccctggggtacatggtgctcacggaaggttgtttcgaattctgcccaggtagcatctctgacggcctcactgaaggtg

SEQ ID NO: 147463 - DNA, 653 bp, Zea Mays
aaataggtgaaggtgataatgatacaggctgtagcctacatactagtttttcaacctaaattggaccacacaggtactcggtgctccccatggatgttgaatgacatagaagccatgagtggcaggcaagttgtaatgcagggtattattgccagaactgcagacagaaccttgattggagtgtgatgatactgaaaatcagctgcttgcacattggaaacatgatgacatatctgaattacctgaaactgacaggtttgcacaagtccttgttgttttgtgcactctttctgtcagctgatcagtaactctgacgatcaaaaccagacctcatcctgtccaatgtctcctgcaaaaattaatatcctctacgtcgatctgaagatcgtttggttagcttgataggggagatacgtcgaggtttagcccaatctcaagattggttgcgtagcttgacaggttgatgttctgcgtttacggccatgaattcatgatcctttttgatggtccgcgatgccaaaggaggacactgcttctgaagatcgcttaaacaagatagctatgacaaactgcaatttcggcagttgaattcttttcagctcttcgattcttgcctcaggaaccaacgaaactgaactggtaaacagagcgcg

SEQ ID NO: 147464 - DNA, 571 bp, Zea Mays
ccaatctcatttggtattcttgctagcaaacaagctctaaaaggtggacttgttcagtttgaagtagatttgacagagatgaattcttctcctatttaaatttgaataggagattaatctccctcgatctaccccgaacttaacaagcactcacatggctagctatatgcatgcagaaaagcagagaccgagacggcccattgagaccgatcggtgacaaaaaggggagacgagcgaatccaaactaataattcggaaaaggcaggactaataatgaagcagcatgatgcaggggcgaccgaggactaagcatggaatggaacggggcggcctcgccaccacgcctcgccgtcgccgtccgccaatggtggcccgacagcatgcacggagatggtacgtgcagatcgcgagctgagagcctcccagccatccgtcctgctgcactagctagtcgctgctagctagctagggcggacactacgctagctaggcagcaagggggcaagcaaaacgccaaaacctgtctgcatcgtgagatatcgggatacatggctgtgtcggacggacgaaa

SEQ ID NO: 147465 - DNA, 707 bp, Zea Mays
ccacatcgaagcagcatctatagaatagcccaatgaagccatccggacctggcgccttttcagcttgcaaccccataaccaccttcttgatttcattatcctcaatcgcaatgtctaaatctgataaatcaaatggcaaataacccaaattatcccaacgaacagccctctgtctcactccacttgttcctagtactgtatcaaaatgatggtgagcctcgtgcagtttatctcgttggctggtcaatattgattcatcatgaactagagatctaatgtagttttttcttcttctgttgttggccatcaaatggaagaatttattattcgcgtcccccaggcgcatccaggttagcctggaatgttgtcttgcaattgtcttttgaatggaggcaaggccaagaattttggatttaagccatttcctgaattccaattcgtcactggtgagctgcctagcttcctgagccttctccagtagagttaacactatctgaatgattgccaattgcacggtgacactaccgactgtttttctcctccacgcgcttagtgccttggctgtgcgctgcatcttcacatgcaacaccagaattgcatcagcagaattgacatcagtgttccaagcgtgctgcactacctccttaaaaccatcgatttttgtccagaaggactcaaatctaaaacccctaaagaaggagaatgaa

SEQ ID NO: 147466 - DNA, 498 bp, Zea Mays
aagccattacattacatagcatactgctaccacaagttcatcacacccgagtgctacctagggtacccccgaactctttttctaaagtgtccccaaattccttgagaaggtcatcaaggctggccagggacatgtcctcggtgtcagactggttcctaggagggttctcttcctgctgctcagtctgacatccttggcttttggtcttcttgcggatttttcttgcgggggcgagcttcttcagtttcttgtcgtagtccattttgagggtgcggtaagcttcacgggtattggtctcttcgccttcagctattgagaggctctcttgaagggacgctttttcttctgaaagttccctgactttctgctccaggctttccacccgggaggttagggaggtgcagtggagggcgaggtcgtcatattggttatcaagggtgtgaaggtatccagccatgtagacaatggtgggatcattctccataggatctcctcctg

SEQ ID NO: 147467 - DNA, 515 bp, Zea Mays
gtggagagtgccgactcttcgatacctcgggaaaaattggaggagtcttctaaaccttgctttactttccgcacttaattcaagcactttacattgtgtatttgtttaacaagtattggaagtattgtcctagcattgttgtatttctagtattattatcttagtgctagttgttggggtgaagttaggctcttgcttagctcttgattaggttttaattagtgttgacttttagaaaagcccaattcaccccccctcttgggcatcgtgatcctttcagaagtcttgcacagatcctacgctgctagggactataggtggactcatgtggcctggcttgagttcacatgatatgcatcatgttttcttcattttctccatcacgtcattaatagccttttgtaccctttcatcaatagtctcttcaagtgtccttttcgacttctcgtgtttcctatatgacgccgcatactctggaaacgcctctctccaggtaatcttagaaaagattcccc

SEQ ID NO: 147468 - DNA, 396 bp, Zea Mays
gccggttcaatatagcgtggccggtgggtaaggaccttcagctttttgcccttcggcgcaggctcgtctggagtggccgaagcagcagttttcctcttctttccctgacctcgcagtggatagcggtagtcgaggtagacgaaaccaatggcatcaaaaactctattcaatctctttttccctggcctccgaaggctgtggataatgcattgtcttccaccttggaatatgatccaagaagttcatcactggtaacttcgatgcattttagccagtcatcgtttggttcatcgaatttatccccatatctgaatgtgtacttcagctagaccagttcaccttcactagattcggtgatggtctccttcagcatttcccagctctctataagtggcc

SEQ ID NO: 147469 - DNA, 671 bp, Zea Mays
ggacttaacaactgaccatgcaacagtgccgtctgttcgtttcttggggatcctgatgttgtgtttcaacctggtgccgtatggatgtgtatctggatgggattcaggcgaaggagcaacagtatcctgatgcagtacacgatcagcaggcaaggtggtcccagcaggcacctcggcggaaggcaactgaggtgaagcagatgacccaggcacatgttctgttggtgtaaatgtgccagtatcagcaggctgaccagatgtagccaaggaggaagattcgtcgagccttcttgtagcagaggtggtcgcatttagcgcaggcgctggcgctgcaacctgtagccattcttgagactcaggcagggatgaggtggctggattttctgcatgaacaatgttagcaggcaacgacatatgcacatgatcataattcacatcagtactactaatgtccgactgcaatttgcgcaatgtggaggaacaatcggaatgggattggacaagatgagaagctgctgagcgtgcaaaaggaaaaatattttcatcaaaaacaacatcccgagaaatatagatgcgaccagattctatgtcaaggcacttataccctttgtgaagcgaactgtatccaagaaaaacacattctttggagcgaaaagcaagtttgcgattat

SEQ ID NO: 147470 - DNA, 336 bp, Zea Mays
gaggattagatgttaggggatgggaaaaagggggatcagtgcctgtgggcactgaaaatctaattacagtgtgaaaagttgtctgttgttgctccgctctccatgtgctagcatctgccataatgcagagtcatgacctggcttgtgcttggtgagccgggggccggcaaaaccgctgcagcctcagccggcactggccgccaaatggtgtcacggacctgctgcagcgtcattgtcggttgaaggtgttgccctcgacaggtaatctctaactgcatttcacagagatgtatgttaatgaggttttactggcaagcatctttcgctacgattatg

SEQ ID NO: 147471 - DNA, 379 bp, Zea Mays
cttcgttactgctttatatgttggggaaaaaaatcctttgcagatattatgataacaagttctgttctagatgacgcttgtagtggtttctgtttgcttttactgtatggtgtttttaggaggtggaacatagctattgctgccagggaggtagccaagaatatcacatagttttgaagtcaagcttacctcattaatcttgtaccaagaaaaggctaggcatgtttcttaggtcctgccatggagattgtggtcacttctctgttctctattcaaccattttctcttttgacatgcacaactctttacaaacgtagactgacgtaagtatcttatctttgtattgggatgtaaaaaggagcaatgccatgatcttcat

SEQ ID NO: 147472 - DNA, 578 bp, Zea Mays
ttccactatgctagagtaacgaatagttcgtcgttgtcggagacataagagagccacctggtcctgttgcacgccggttgcacttgcacgccccagagccagagagcacagagaagagagaggacagagcaggcagcgagcggcccaactggaacgcgccgcgccatccaccctcgccaactcccagccgcgcggatctctcttcccgactcccgagtcccgagcggcccacgcgcacccagatagacagagccacctcacccccacttcgccctccactcccggtctcccgcaccgtgtccgtgccgacacccaaggcccgccaggaaagcgaaagagagcgtcagtcacgcacgcaccgatggcggacgtgtcgccgctactgccgccggggaagccaccggccaccacggcgcggttcgcgcggtgcgcgtcgagcgcgaacgacgagctccgcagcttccgcgcctgcctggcctggctctgcgtggaccactactcctccccgcgcgtggcggccgtgggctcctgggcggtcttcctcctcctcgccgtcgccgcgcccgcggccgtccgcc

SEQ ID NO: 147473 - DNA, 991 bp, Zea Mays
aacaaattaaactcaattagaacctacgcatggcatcaaccgaactaatgtagtcattaccacaatcaaatgggcaagggaacatcaccacaaagaggatggacctttcctagttgtggcttgctctcacacttcacaaactcctggctatacttgttatgctttgaccttttacatctaagcctcactaatgactccaacatggacacttatgatagcgggtgagtggcattgacacgtacctaggccatccaatgccaccgttgaaagagctgctcacacgtgacctgatcacgaagaaggagtgctagtggagggaggagcatggaggggatgttagttgtgcgaaatgccaaagcgggaaaccatgatgaccggagttgtagcctgtcatctcgaccagttccaaagtgagtatcaccatcgtggggaggagacatcagccgtggggagagggaaagccaacgagggtagtagaaccactgtaaccatcgctaggaactccaaagcgacgagcgctagtgcgggaacgtgtgtggaggggatgtagccgtggtaaaggtcatcacggggagcagggatgacataaatgaagtttggagtcgtggtcgactgtcgtgactagatccaaagcttctacctctgatacagggtggggatggccattgcagatagcgtggaagtcgatgatgtagagcgaggccacgactgatctttgagagcagcgttggagtgacatagacgaaacgagactagaggagggaagatcgatggcttggggagtggcgtcgtagagcgccaataggggtcgacatctacttcaatttgactcaaatgaggaacattttgatgttgacgatgggtttcgtctgtaaatggatcgaagccatcgtacgtgtaactgtgtaagtgacatcgtggacaaaattactccataaaaatatcaacatatatgaatgctacactaaaaaactaagcaagcgatggttcc

SEQ ID NO: 147474 - DNA, 926 bp, Zea Mays
ttatggattcatcttaccccaataagcatatttatcccgcactagtgtaaccaccatgatctaatccaaagtaattagatcttatctagtccaaactagttataccaatctgatctagatcccatctaatctaacatgatataatccaaattgagttacttaaataagttacataatgttggcgacataaattaggccctaattctataaacatatcttaccctaaattaataccttggactaactcgtccgtaagcaacaacctaacctacatcataggttgcctaatccagatatcccaaaaaaggtaaaactatgtttaaacctaactacctcatgtaccctagctatcctaactatatgcccttagccatatgtcctcaactcggatggcaactccaggatcgagggccaaagaagaccaaccacgtcaagggaggataagcaccaactcaagtcttcaaagggcaaaacggaatcaccagatgagtcaagatccaccatccataatggaatctttctttgccctaatccttattaccgcaaccttctctacttctgcctaatagctaaacatagtgtacccatgtgttcgtaatcatttccttatttaatgacttaaaaaaagtatatagaaaacatttgtgcttaaaaccactcgggaaaaaaaactcgaaactaaactgcaactaaacatttggctttctataacccttttcttacaaatctcgaggacgagatttctgttaagggggtaggatttgtaaagcctaaaattggtagaagaaaaaacatagaataaataaataaatatatttaagattaagtgactcttggtaaaagagaatacattatttccctaaatgagtaaggtaatattagttttagataacttgaaagttgatcccatacttaaaagtaatttc

SEQ ID NO: 147475 - DNA, 314 bp, Zea Mays
agaggaggacgtcgagctggggactggagaaacgacgccgaccggaggtcaactcggaggccggagggcctctaccacgcgctgctgcgctgatgtccatggcagaggcgagtgctggctgaggagggagatgagggagtgagcgctcgtacaggaaaggaaaaagatctggcgacgagatgagcacaccgtgcaggaaaatcagcaccgcacacaggataaactcaacacccatgggcggcggcttggagatgaagacacagagaggatagagctggagaaaaatatcctatggatatgaggacgacgacgat

SEQ ID NO: 147476 - DNA, 318 bp, Zea Mays
atacacagcggcactgtagcccatgttgctaattatatgttgtatatcactattatattgcatcggtataacgtatttgtgagcacttcaattattccggtccaaaattatcgaaacagcagttcaacaggttcttaacggccagtgaaccagcgaactgacgatctcccagttcgatgtttggtccggtcctaataactatggtttgttgtgggctatattggacctagggctccgactcgtaggtatagaaagctagaccggatctgccagcactaacaagggttaccaaagctagcgcgtggtcagaaaacacct

SEQ ID NO: 147477 - DNA, 563 bp, Zea Mays
gtcatttgcaacttggtccccatcagccgcatcaactcctgctagaacgtcgacatgaacaccgtgtcccggtcggagaccatggactgtggaacactgtggaggcggacaatgtcgttgaagaaagcctgggcgatagattcagcggagtacgggtgtgccaatggaatgaaatgacagtacttgctgaacctatccaccacggtgaggattaccgacttgccgcgaacccgtggaaacgcctccacaaagtctagcacgacatcagtccacacgccctggggaaccggcagcgaaaggagacccgtcgggcgctggtgcttggacttgtagcattggcagacttcacacgtacgaacccgttcctgcacaacttgcttcatgttaggaaaatggaagtcacggcgcaaccggtggagcgtccgctgtactccttcgtgtccgtcctcatgtatggcccccacgatctcttgtagcagcgggaagtcggtcggggatgtacaaccaccctgaaaattgcaccatgccgtccacaagcgcctagggagccggtcgggtacccg

SEQ ID NO: 147478 - DNA, 368 bp, Zea Mays
tttggtaaaacgacaggggttcttatgaataattcctcgacaaaggggtatgcacaaatcggggccgtctgatctggttccagtggttcgaattagatcaataatttaaagtgaatcaatatactatgctagtcgttggatcagagatcaaccatctagacgtttaagacgcccgatcaacccttgtccatccatccccatatcgacgactgagaagagccctgactgaactggtactgggatctaatcccaagcgttccccgcaagatcaacgactcaggattcacctttcctcccgatctaatcttagccgctggatcgaaatccaacggactaaccacattcttcctcctctggtcgtctacgcg

SEQ ID NO: 147479 - DNA, 644 bp, Zea Mays
cccataggaagtcgataagggcgccttcttgcttgtcggagagtgctgcaccgattcggacaagcttggaagggtcggcatcgtcaatctagacatccttagtttcttcagtggatttgaatgtgctggaatcggccttgggagcatatggttcggccttggagttagcaccccttcgtagctctgctaattctctcacggtggcttgtgctgaggcgagctcgcagctagcttgctcacatgcgtaggccgcttggaaggaagcgaacaccgtaatgaccccatggggaccgggcatcttcaccttaaggtatgtgtagttgggaatggacatgaacttgacgtagcccgacgtccctaatatggcattgtaggtccctaggaagtccattgcctcgaactgtagctgctcaatgcaaaaattataggggtctctaaacataactggcagaacaatctgcccgagtgggtgggcgccgtggccaggcgtgatgccgtgaatcggcaaggttctagggcgcaacacggagcgtgcgatccccaaggcataaaaagtctcaacatacatgatgttcacaccgctcccttgtccatgaggactatggagagacacttcaggccgacgattgtctcaatgacaaggg

SEQ ID NO: 147480 - DNA, 836 bp, Zea Mays
ggcaaatcgactacgctattctcttagggtgagtataatacagttcgacactcctgcgcagtgccagtgagttggttgctcacgtagcatcctattctgcaggtctatgcttctgtactgtatctacagctaccagattactttaggatcatgcttcgagggcgagaagttgagcgtcatcacattgcctctgacttgatatatcctgaacgcatcagttatagaccacaaagttgcggaataataagagaggtttgacttggtttatcttttcttcctggcctaaccaatgtaacttgttggtttactctttgctgtctggattaagggtttcatactcttgttcttgtttctcctttttttgtgtgtgtgtgtgtgcatgcactatctttggttggctggctcaggctgaggttcttacaacaattgggttcttaaagggtgccccaaccattagcgtgcacggattcaacatctatcacaaaaaccgccttatcttggtgagcttcctgaccccttccttgcgttgattcactttgttttaagggtgcattgcatagtgcatacacatagagacaagattgacatggttatctctgtctaaaatgtactgcagccattccatagagtgctgagtaccgcgagcagcaaaggcagaagcgtctctggagtgttggaggtagacttcatcaagcccacccatgacaaacaggactttgagaagtcgcagctgtttcagcggctgatgaaccgcctcaaggagatgactaacgagtactggtaagttccaggttcttgatgatattatctatctaattcctcccgatttcccgaac

SEQ ID NO: 147481 - DNA, 622 bp, Zea Mays
gaccatcccgcatccatcggattctcgatctacggtcacggttggatgcagtcgaaacggtatgaggatctaatccaatccgtccaaaacgcatccaacggccaggcgtctttctcccctacccagccgcacagccggcggcgcgcgagtacaggcgcggcggcgccatgtccggtgaagttcgatttggtgatacagtgcacaaaaacccaattaaagactgctacacgatgcctaggggatggcgaatacactaagacgtacctcactggtagggacgaagcacagaggcccgaccgcggcgcgaggcggacggtcgcggagagcaaagtccggggataaattccgaggcgctggagcgtgactcgacccaagcaaggcgtcgaccacccaacctaggtccgggcgaaccccactggacacttgccgcgaggacagttgcgctaggctcgcgattccggtgcggcggcgaaactcactcacggcgcggtggcaatgcggtgtatgactcggggagtgggatacgggggaggaaaggggccagcgcacgcaccatatagactagcgagtccgcgccgagggagaagaaatcgggatagtggttggaacggcgcccgggaag

SEQ ID NO: 147482 - DNA, 632 bp, Zea Mays
tatgaccgttagtgagtatcaggatcgtttcacccaactttctcgatacgcaccggaagaagtggatactgatgaaaagcgtcaatagcgtttcttggaagggttgattggaccgctaaaatttcagctgcaaagtcataccttccccaacttccagactctgctgaacaaggcaattggccttgagagcaaaagaagagaactatctgaccataaaaggaagatgcaaggtcagtctagcagaaatattcactagaacaactcgtagggttctcagtttcgctctggaaatcagggtggaaacaactatcaaatgcaacgctctagacaataaggtcagagaagcaatcaaactcaaaatcagtagaggaacaactctaagaccaaccaaaggtctagtggtaattcgcagactcgctaaggtagcgccgtgaacacacagaccaaaagcaacaacaacgcaccagtccaacccagtggttgtttcaagtgcggcgaacttggccattatgctaacaactgcccaaggcacaatcaatagacaccccagaataacaacagttagagaactgaccagaacacccccgctcgtggatctgcacagaacaaaacgccgcagaaccagaatagag

SEQ ID NO: 147483 - DNA, 576 bp, Zea Mays
aattattccacactagtgtaacaaccatgatctaatccaaagtaattagatattatctactaatatccgatctaatctagatcctatctaatctaatacgatctaatctaatgtggtctacttaatcagactagtgatactggtaagaagagattagaccctacaagccaggtgttaacttaacttagtatagtaaaccaactcagtcacatacgtgagagctatcccaaccaatagagtcatgatgaattacataatctgtctatccccacctaacatcaaataaacctttgacctacatcatgtagtctatctcatccaaatctatcttagccatattctcccaactctgatgatacacactgacctcgaatcaatgaaaccaagaccgaagaagaaaagatcaacatgaacaaggaaggagagaagtcagattcgatcttcaaaggcattaccacccaacaaggagttctttataaccctaaactttcttaccccaggctattcttaccctaacctatccatctccaataacataataataagaagctagatacctatactctcctaatcatc

SEQ ID NO: 147484 - DNA, 484 bp, Zea Mays
atgaggagattcaaagtcaagggcaaattgttccctcgctttattggaccattcaaagtttttaggtgagtcggagagatggcctatcaactcgagctactacataatctatctgatgtacataatgtatttcatgtgtcttaacttaagaagtgtctccgtgcccctaaggaatagctaccaatggatgagttcagtgttcagggtgatttgacttacacggagtaccctgtcaagattttttatacattgactcgagttacgagaaataaggtgataaaagatgagcaaagtacaatggagctatcatggagaagatgaagctgcttgggagagagaagaagagcttcgcatagattttccccatcttttccctagaccttcttaaatctcgaggacgagattcttgttaaggggggtaggatttgtaatacccaactttgtaaactatattaaggagagaattctcttacgtatttttgcc

SEQ ID NO: 147485 - DNA, 883 bp, Zea Mays
gcttcgccaaactggtatccaaagtcttggctaatcgtttagcactgcaccttcaaaatccggtgggcctttgtcaagggtcgcttcattcatgacaactacatgttggttcagcactctatcaaggcccttcacaggaagaagatcgctagcctgtttctaaagctagatattacaaaagcttttgactcagtgtcctgggcctttctcttagaagtgttatctcatcttggcttcgggcccaggtggtgcggccttgtgtccaatatgttatccacttcttccacacaagtgttattgaacggaactccgggcgattatattcgacaccggagggggctgcgccaaggcgaccccttatctcctatgcttttcataatcgtgatggatgtgcttagtagcttattcaagcatgctgaggacagaggattgctgcatgacttggccatcagaaacgtgaaatctaggctctccatttacacagatgatatggttctttttgtgaagcctgcagaagatcttgtttgtgtcaaaatgatcctggattgctttggagaggcctcgggtttagttgtgaatttgcaaaaaagttgtgctatccctattagttgtgatgctcagactgttcaggacagctgtaacattttgcagtgcactctggcttcttttccatgcaactatttggggctgcctgtttctgataagaagttggggagaagggacctcttgcagtgggtggacaagatagctaactggctgcccggttggaaggctccacttctaaaccttgccggcaggacaaccttggtccggttcatgctctcagcaatccccgtatatcttttcatcgccatgaatgttcccaagtgggttatttgtgcta

SEQ ID NO: 147486 - DNA, 287 bp, Zea Mays
gctcgacatccccgtgacaatcctacgccacctctcgttcataccgagaatccagcgtctattcatgaacgaggaatctgcgaaatagatgacatgtcacaaaaatggcaaacaatacaatcctgacaagatggtgcatgcatacgatgatgaagcatggaaacactttgaagtcattcaccgtgagaaagctgaataggcttgtaatgtacgtgttgcgctggccatagatgggttcaatccctatggaatgattgttgccccgtacacatgtgggcccgtgtttg

SEQ ID NO: 147487 - DNA, 421 bp, Zea Mays
tacaaaccctaaaccataacgaaaacaagctgaaaactgttgctatgctaagcagcaccgtaccaatatctctggaccggtccttgttgtgaaggttgtaacatggtagcatcatggccagatagatatctaaatccttttcacgagagcttggtacgtgaaaccttgatagtactgtactagtacgtacagtgttacattattcctggaccacttgaaggggtgccttgcgattgggcagcgcgtacacgtccggatctgagtgagaagtgggtgggggaagatgccgttgcttctgttcttatgtgggacacacacacacttggcctgctgccattgttgaccttgctgcagtgaatccctaaaggcaaatcgtaatgctgctactgaactggtcgtttttacttgtcgtgatgctgca

SEQ ID NO: 147488 - DNA, 971 bp, Zea Mays
aatccaagaagatccacaagaaatgtaacccatccatacagaaacatgttcagagagaaagatgacaagaagcaaagtccaagagtagcactaaataattttcttaattgcatcaacaagaaaagctcataatcagcacaacaagaaatcccagtctctttcttaagcgccagtgaccagacaacaaaccaatactctccatgtctgtaaagcaagttcattgcatggaatttaaccttcttcatcatccactagggctaagagagattgaagaaagctaatcaggtgcttcatcaggtaattttctgccatcacatcaatcaactaagcagaagtgttatttataattgcatcttttttcgagtacagtctgtttgaactttatgttcctatgcaactttgagtttcatctcctaaattttggacgcatcaacatttttctcaacaggagatgctctacgagagttcaagcttataattgccaatgtatgactttacaagccaagtaagcactacatctatacacaacattatgaacataaaacaaggtcactgcaacttttagatgaattattccacgtttcatgcactagataaagttgtgcttttgttggttagttggtcttggaaataacatgtagctgccggtgaactttgggattacttctgggattgttgcttaaaaggaattcaatgattgataaccaaatgcatatttctttaatcaacttcctaaggggaacgaataaaaaaaatcatcaaacttaggaggaacttatgtggcactgtaaattagaagtagggacataaatttgagtcaaacaggactaaagctatgaggcacaaagtttcaagatagctaatgagtgagcaggactttcactgttctgttgaaagaagaactagcagcatgctgaccacttttatcttttctccgctgcagctactaaacaggacatctcagttgtgaa

SEQ ID NO: 147489 - DNA, 746 bp, Zea Mays
aaacattaaaccccaaaccctaaccctcaaatcaaaacccgaaatctcgaatcccaaaagcctaatctctaaaccccgagccccaaaccctaaagcctgaacattgaaccccaaaccctaatttgtgaaccctatacctcgaaccctaaaacaaagacccgaccaccaaaacacaaaactctaaaccccaaactccaaaccctaaaaagtaaagtaaggctgttttggcctcgcgtgagctacaacacatgttttcatggccgaacaaccaatttagtgtccaaaccatagtacactagtgtccgaaccattgtacacgcatttggccccggaggccggtaaggctatttttggcctcccgcgacacatgttttcatcgtcgaacaacaatttcattcctcccgtccaccacccatgttttggccactgaaacaggtaaggatgtttttagcatccagtgagctatagcacactaaacctcgaaccccaaaatcctaaaccccgagacccaaaccctaaaccatgaatccggaaccccgaaccctaaaactaaaacccaacccccaaaacacaaaacctcaaatcctaaactccaaatcctaaactccatatcctaaacaccaaacttcaaatcctaaaactcaaattgaaatcctaaacctcgaaccccaaaagcctaaactctaaacacagagccccaaaccctaaagcccgaaccctgaaccctgaaccctaaattgtgaacc

SEQ ID NO: 147490 - DNA, 483 bp, Zea Mays
ggaagcagcagcctgtggcaaggtgtacggttgcccagacccagagtgtaagaacagcaacactcgtcgtcacagcaggatcatggagaagaaagacaaggcgaagctagtcttgcatagtggtcgtactggtacgcacaagtgcaaagttgctgctgctgatgaccctttcaaaaccatcgaagcgacaggcatcaacggcatcggcggagctgtggatgacccttacaatctcaggggctggaggttcccagctggaagcagaagcaccgtcctcccgcgtctcgccacaaggccgccggcgcaacagccacctcaaggaacagtggctatggctgccgccaataatcctgtgactggtcgtcatttctcagctggcagcaacaccttcactggctggtcactccctccaactaccagcagcatccttccggcagtccccttgcacaatcaagaacagaatctactggaacagatagcagc

SEQ ID NO: 147491 - DNA, 473 bp, Zea Mays
aagagttgcgagcttgaagtagattggatggcgatgtttgccacctcttcctcttcttcggagctagaactttcttcattggagttccattcttcaccaatgtgggcttggccatatttcttcttcttgaaatatcccttgttcttgcccccttcttgaacttatcctttttgtactccttcttggcttcttgttcctttttgtttggacaatccgctatgaaatgaccggtttggccacattcataacatgtcctcttctttccttttcgttgatacttatcatttttcctcacaaacttcttgaaggttttgataaacatagtcgtgttttcatcacttgaactatcttcatcacttgatgtttcgaccactttctttgtcttgtgatctttgttcttcttggaggaatcttgttcatttgagatcaaggcatgattgtctcttgtcttgattggggcttcttcggactca

SEQ ID NO: 147492 - DNA, 454 bp, Zea Mays
ttttaagggggataggtttgtaacgccccgaatttttgagttgaattttttcttttcttcactcgccaaattcgggcgttaccctttccttttcccttttcccctcgctaaaccttaatcttttccaaagttatagcgggttttggctttagatctcgtgtaaagcaaaaccctaaaatgctttattttgtttgtcgcaccatgccgagctatgcatttattttgtttggttgagattgtggaaatcactcatctaaaattgaagaaaaggaaaaccttttcctctctcccctcccttggcgcgcgcggcccagccggcctttccccccccttcccgcgtgggccccgcggcggcccagccgcgccccccctcccccgccgtgggccgccccagccggcccagccgcgcctccctccccctttgggcccaagcggcccagccgcccccttcccc

SEQ ID NO: 147493 - DNA, 619 bp, Zea Mays
aagagatgaagtaagcatgctgaatgtcagaacaaacaccttggtacaaaagaggtaccatcgatgagcggtgtgtgcatagaaattttcaaaccaaaaaaaatggaagggggcagctgtatggtacataaatgtatctacaatatgcacatttgtacacaaatgagatatgaagtaggtgagctgcgctacgacaaagctgctagcagcatctaagacctcatggtaaacaacatttcgactacaggagccataggaatcgtcatcattttcgatcataattctaagcccctccctagatgtcgcacgcgaaacagcaacatagagctggccatatgtaaatactggtttctttaggtagaggcaatagtggaaagcgtctgtccttggcttttatttattgtcactggtaggatgcataataggaattgtgtcctctgcaaagtgaaaggccattttacgttcgttgtgttcagcgcaatccgtggaatcaatacctcatcgccaatcctggatcatgtgagtattatgcatcgcagaacacgctgacctagctgggaaataagcagccttgtcccattacagaggcccatagtttggttcagattgcgaagcagca

SEQ ID NO: 147494 - DNA, 410 bp, Zea Mays
attcaaggcaacttgaattactctccacatatatttagcaatggggcactgaaaaaacaggtgatcgatagattcatccaccccacagaaacaacaattcaaagaaccaatccaactccttttcttcaggttgtccttagtaagaattttatttcttaccactaaccagaagaaaaccttgattttatgaggcaatttagatttccacaaaaacttatatggaatcaaaatttgatcttccattttctttttgtacaaagaattaattgagaagcctttttttccagaatccacacaattttatcctcttgatcagatagtattacctggttacaacaatttatcaattcatcgaataacaacctcaaattacccacaatccttcttctgaaagtaagagactcaaaatt

SEQ ID NO: 147495 - DNA, 311 bp, Zea Mays
cgactggctcacaggtcacctcgcccgccgcaccaagaacttgcgcagttaacttcacagccgctcaattttacagcgcagagcaggaagcatcagctgcacgcctctcgccttgcttgccgccttcgctcctctcttccctagctcgtgctagcccttcttggcaagaaacggtttgctatggccgttcttgcgctcaggcttggtttcgtggctccgcctcatcctaggaccagcagcggcaggttcgccttctcccccccgtcctcccgcgccgtcgccaacgcgggggtagctgcaggaccctcgcg

SEQ ID NO: 147496 - DNA, 428 bp, Zea Mays
aatttagttaccaaataaaaaagagaacaagctcagagtagcgagtgtcatctccacaaagttcagaagatcgcaccggacctaccagtgctaatgcatttcatcacagcttgttatacccttgttagttaatcttgatggtacggtttatatgctcagatagggcttgctgtctagccggtgtggtactagtcttgctagcgaatgtggcggagtaataatgtgtcaccactcgtcaccgtgctttatacttattcatcacagcttgttatacccttgttaattaatcttgatggcacgatttatatgctcagataggacttgttgtctgaacggtgtggtactagtcttgctagtgaatgtggcgaagtgatactgtgtctgtgtgtcagcactcgccagagcttattgaaatgactttgaaattt

SEQ ID NO: 147497 - DNA, 366 bp, Zea Mays
gattgagggggataacgaacacaggccaacatgtgtatgggacaaccattagtccataaggattgaacccatctgtggcaagcgcaacacgtacattacgagcctcttcggctttcacatggtgaacggaatcaaagtgggtccatgcttcaccatcggatgcatgtatcatcttgtcgggattgtatcgtttgccatttttgtgccatgtcatctgtttcgcggattcctcggtcatgtatagccgctggatcctaggtatgaacggaaggtgccgtaggattttcatggggatgtcaagctgcctcttctggccatcagtagagtctacctccatgaacctagaggatttacactttggacagt

SEQ ID NO: 147498 - DNA, 548 bp, Zea Mays
caagggtattgaaacaagagcaaggagggtgtgaacagaccagtagagagctggccacgacgagctcacacacggcggtattcttgactgatttgggggaaactctaaattagagctctgtggttgacaatctgaggcacgggctggtgcgttgggtgtgtgattacttagcgaagctcactggtgcggcaatttataggttccatcggtggtggcggctaattttgagatggcgcgctggtggccagagggaggggcgatcactagcgcaagagatgcgtggctttcgccttggcatcaccaccagcgatgagcggacttgctaaggcgattcactgcgacgtggtagagcaccaaggcacatggcacccaagcggaaggcggccaactctggcgaggttatctcgaccggccataaggcaggggggtacggcgcccagggcgaaacagtgtcccgagctcatccccagcaccagatttttcatccgaggatggttatctgcgtttaactgggcgcgaatctgggcgcgagagcaccggcggcgagg

SEQ ID NO: 147499 - DNA, 608 bp, Zea Mays
atctttagatggtgatatgtgcatgatatatgtgcaattgtggtagaggttttttaaagctgcaattgccttttatgaaggggctaatcttgaaccagagaaccaaaaatatctcagcacctagtactatttcttgtccaaagaacatggcttccattagagtggatagggtcatgctttgatgctctactcattaatcctttcttttttccactattaaacaatagggatgctgttgaggagggaatgaagtcgcaagccaaacctaaccagtcttccaccgcagccaggagtcttttcggcccaaatttgatgtgatgatgacgtgacaaatgattgagtgttttgcaccagaatccaaaacagttgcaacacaatttgtattttagggaaagtgttaaactgtaatttgacaaattgtgatgttttgccacgtttgatgatgtaggtctggggcttcacgaccagtaggttaagcgcataggacagatgcactgtttggtgctggtttagcatatctactaatagcgaaatatctctgcaccatgagctctcgaacctggccactacacgtcgttccaaaatcaggacctttggatggatcttaa

SEQ ID NO: 147500 - DNA, 452 bp, Zea Mays
attatggacagaagttgcataccgcgcctcatcaaacacctttttgtactcttccacagatccaatctgcctaatctccagtaaggactgcatagcctgtgaatactcctccgacccaaacttcagcatcacagcttcacaaaaattcctcccatgaacatggaccatactgaattttaaaaatctgaaaccacctcttagcattcccctccatgttcaacgatgctgacatcacccaaactgactcaggcactcgatacaaagtgaagtaatccacacactgatcaatccaaatacgaggttccgccccttcaaatttaggaaatggcatacgttgtattggaagttgccctccttcaaaatcctcaacccgccgccctccagtctctctcggacgacccaaaggcacccccgcatacctgcgctgcggacctggaggagcaagaggcgga

SEQ ID NO: 147501 - DNA, 511 bp, Zea Mays
cgcggagctttcggcgaggaacattacaacaaccgccccgatggggtgagccaactggggggggatcctctctgctataaaccaatgcggtagggtcgcctaggccatatcgacccaccccaatcgcaccaggagcaatagccgagagccacttcgacgcagagtgtgaaacgagagtgagagcaggccgccggcatgggaaatcggaaccgcgacaagtctgggcttgggactcggctttgggggatcatcgcacctcgtagaaggcgtgctcctcattgattcgggcgaagttcactggagccctgtgtaatttctcgtcgtcgagcctaatccaccacagatccgctcttccaagtggattgcccgcctgcgcgcatcatcctcggtaaggtttcctcacccgcattcgcttttatttccgcatcgtgtagagctgtttgggttagaggttggggcgctaggaccgtagactcgcctcatcggtgaagtcctccgccgtggtagtctt

SEQ ID NO: 147502 - DNA, 1278 bp, Zea Mays
caatcatttcttgtaataagagtgccactgctcctttatgtcatgcttgtcaattaggacatcatgttcgtcttcctgttcatacatccacctccagggctactaaaatttttcagttaatacattgtgatttgtagacctcccctttgactagtgtctctagtcataaatactatcttgccattttagacgattactcccattttctgtggacattccctttgcgcctcaaatccgacaccttttctgccctcactactttctttgcctatgtacgcacccagttcgagatcaccatccagggtattcagtgcgacaacggtcgtgagttcgacaacctacatgcctacacatttttctcctcgcacgacattcaccttcatatgtcatgcccctacacctccgcccagaatggcaaagctgaacgcattatacgatccataaacaatgtcgttcgttcccttcttttccatgctagtgttcgcccgtctttttggccgcagctctaggcactgtcacctatctcataaacatcctacctaccaaaaccctcaactattccacgcctcacttctatctatttggtaaacatccttcatatgagcatctccgtgtttttggttgcacttgttatcccaacctgtcagccacagccccccacaaactttcccctcgctccaccctctacgtttttctcgggtattcccctcaccacaagggctacctttgtctcgatcatcaatccaatcacataatcatcttgtgccacgtggtctttgatgaagcctcttttcccttttccgaggcttcttcccctcccacgtgtgttgtccttgatttcctggacacggtctcagttccttttgaactatcaccggtttttcttcttctccaggtactgctgcaacaaagaatcgttcacctggcgaaccacctgtggctgccccggactactcaccacagtcccttggacagtcgcgtgagcttcagcgggcttcctcaccttcaccaacagccccggcgtctcctgctgctagaccagcagctacggtgcctcatgctgctggaccaacagccctggcgctccctgatgctctagggacccgtgtcgtgcagccggctccaccagcagctaccccggttgcccccagtgcgatcaccctcgaccatttctatggacaggtgtattctcgccgttgacttcctatcgcagcgtctccttcaccagcagcccaagcgtatgatgttgctgggccatcagccccagcgccccctgat

SEQ ID NO: 147503 - DNA, 792 bp, Zea Mays
gtcacgttaactgagggttaaaaatgataggaaaaccctgcatgatgaatcctgacaaaacatgattcatcaatctaaaagattttcttttcttgttcgtgcactgtggacagttgtgctagtggcgctggttcgtatgcgctgctaaacatcacatttctatactctgcagctcgcaaggtcgcgatcacatttttttatatatattcatcaaccaggtgcttcaggatcagatttaaacagtaggtacatgttcgttgtccccattcagtcgggaacggtcccctgagtgttatatattctgcagatcgttcggggtttgggaattcgaatagtatgggtagaaggacttcatataatttgtggtccctcagatctaattaagatactgccgtcgactgacaacccatcgggaagctgcagactgaagccgtttaaacggatctaatgattttgtgtactgttaagctgtcagtccttagctgctgaccagctgtgattttgatttgaaaaggctgtccttgtcagttttcatacaaaacactattttagcgctagactagacggagtagattttgaagtaggccactgatgaggatagcttaacgacagaactgactgcatgcttgtttaagctgccacacgagcaatgcctgcaaatcaatattcagtgatgcaaacaattaatgtactctgcactgtctgggttcagagtgcaaaactgctgcttttgaccgtgcgaaattcaccaggttttcgtcgctgccttcaccaaaaggaagcaagtctgcc

SEQ ID NO: 147504 - DNA, 542 bp, Zea Mays
ggcatatgtgcgaaatcctagggaaagtaagcctatgccgtgtgcttgggtcttccctgcagggtgtaaaattggttcaaatcactgagcttaccaggtgttaagctgcttgatctcgcactaacaatcgtcgtatgaaccaacgttaacatgctttagtctcgtgctttcaataccacatgtttgcttggtacatattacccaaggaagtagctggcaagggtaggtgctggaatagtggaaagttgatggtggagtcgtgctactttcttgggcgagtttggtttgattaagtagttgacagacacaaagtcagatcgaggatctggttttggaaattagatggtaggtacaactcagatctgatatctgggttttaaagtagttgataggtgcaaatctagaacgattagtgctaataattgaatttgagctaaaatatgaaagtaaggattgatttctagtaagctcccgcttttggacgaccaatccagcaaaaggcctttgcataccccttggaatcgggtttagtaaccctgtcg

SEQ ID NO: 147505 - DNA, 614 bp, Zea Mays
cagcagttgtgcagtgccaggcactgagggaaaaggtagtcaagggcggtcttgtcgtgatgactaataatcgtccaaaccaaccaactctccgtacgtgacggcagcggcgagaaatccctctctcccaacccaacatcagccagagcaatcagtaataaataaacaaaacaaaacaaaaaatagtcgcagcactagaagaagtagcaagccaaacgagcccacttccacccgcacgcaaagcacgtgcgcatggcgagaagcgacagggctggcgaggccactatctattctgaagcggcgagaaggcagagcacagcacacccgtgcggccggccggagcccggagctgtagcaggcatacggatacggctagggcaagatccggaacaggtggacgcacagggacaggcaggggtcaggtcatgctcccagtctctctcatgcaaggtgtggcgcaacgcgcaagtgcaactcggcgggagacagtctggaagctagcgcatggcgaggcggcgggacaggacaaggggggatcgagggaggccgacgaactgctcttgctaatagtcagtcaggatggtatgagcacacaacaagcaacaacaaatcgg

SEQ ID NO: 147506 - DNA, 591 bp, Zea Mays
ctactttgcttaatgttgttggatcgtcatgtaagcgaaaggacaaacttcgagaaaatcatcaagacaaagtgagaaaagccattggcaaaggagagctaggtattggaactgggttaaatcaagagctttctcttcaaagaccaggtgatacgcgttggggttctcattacaggacactagtgggcctgtcaaaaatgtttcaatctgtggttaaagtccttgaatatgttgaagaagatggctcggatgatagcaagagacgtcaggctaacggtcttctaaaatatttccaatctttcaattttgttttctatctacacataatgatgatgatattagcattaacaaataacttgtcaaaaaccttacagaggaaagacaaggatattatcaatgctatttcaaatgtggcctcaaccaaacgggaaatagaaaatcttagaacttcagatggatggaatgcacttctcaataaggtatgttgcttttgtgagaagcatgacattatagtgattgaaatggataaggactacgtgaatccaaaaaaggcacgacaaaggacaggtattagcaatgagcatcattata

SEQ ID NO: 147507 - DNA, 492 bp, Zea Mays
aaaggagagcaatgctggtgttgatacagttcatgaggggtaattcatatttctactttgttttgcttcgtcaaaactggcttacccggcttaacactgatagctgcgcgaagtagttttaggtaacgcagtaatttcatagaaaatctgtcaagggccttagagtctaggaaaggggtcctcggctacgtaggtcgtaccctcggtccgtcttctccggtgaggttttacccctcttccgaaggcttgagagtggtagggatgagggaggagatagctgtgttattacttatttctcacaggagccggctacaaggctttatagcctgagttgcaacagaaagcagaaactaatctcctatgatttaggatctccactaaaggaaaactaatctctataatttaggatttctactaatctctttcctcttctagccggccttccttctctagaggtggcggctgtatgccctgtggattccttccttctag

SEQ ID NO: 147508 - DNA, 628 bp, Zea Mays
cattaacgatcgcatataggacatgcgtaggttcgtgaaatcggtgagttttgacagcccgatgcgtgcagagcagaggagattgaaggcagcaaatgagaagagagcatatgatgcaagggaatgggaggcggctagagccgagaaacagatgttggataatcttgctgatcgtctcaagagaagtgagtgagaaaaatgacatgatagttttgtttgtacaatttatttatcctgactttacaaacttatttgtctcattacatttgcagagattggatgtgtcgtaaactatattacagatgaggcacgtgcaagatacgttgagaaaaaaatgacgacggtggagctgatggaggaggaggaggacgacacatcaaggttgagtgagcttatcgctctcactgatagaagattacatggggaagaggaggacgacacatcaaggttgagtgagctcatcacactagctgaggcaggattacatgctcaagaggaggaggacgagtttatgtctcaggccgccgaagaggtagaggccgcttattacaagcagaagtgtgatgaggctgaggatgaggatcagctattctcccaagctgcagatgaagcagaagccaattattac

SEQ ID NO: 147509 - DNA, 450 bp, Zea Mays
cacggttgcaagtaagttgacctgaattttcctgtcttcttaattttcaccatataggacatcgattaatttggtgttttaaacagtgcatgctcaaagtgatctaaaaatacttatctttcactcacaaattttgagtttcttttgtgtgcttatcccagaacctcttaggtgctatttcattgcggagaatcaaagagatggacgatggaaacaagagcatggttgaacttccctccaaaactgttttggcttgttatattgatctttctgcagaggagcgtgaatactatgattagattgaataggaagggacgaacaaaatgcaggaattcggtgacagagattcgattttgggtaattactcaaccgttctttatttcattctgaggctccgccagctatgtgatgatgttgcattgtgtcctttagacatgaaagcattgtttc

SEQ ID NO: 147510 - DNA, 834 bp, Zea Mays
tgacaaggcaactactttttgcttttgagaggaccaggtcactgggtttgaccccaagaaaaataaaatacctgaggtactcttcctgtgtactaaatcaccagagcaatcactgtctgtgtatcctagcagagatagttcacaatttccccctttcttgagttttatcccatagttcagtgttcctgctatatacctcacaattcttttaattgctgtccagtgctctttgttaggaccttccatgaacctgctcacaagtccaacaacaaaggataagtcaggtcttgtgttcactaggtatctcagactaccaatcacactcctgtatctagtaacatccttttcagtccctttcttagcagcagtgagttttattctttgttccataggagtattagtggggttgcaaccagtcatgtgacacaactcaagaatctttgctgcatatgaactttgacagattaatatctcaccctccttctgtgtaacttccatgcccaagtagtaactcagcaaaccaaggtcactcatgttgaaagtgtgcatcatctgcctcttgaattcttctatttttactactgatggtccacagattatgagatcatcaacatatactcccaccacaacttctcctgctgcattcttcttgagtttaaacacccacttcagtcctatgactttctgtccatttggcagttctgaccaactccatgtcttgttagcttctattgcttgtaattttgagttcatagctactctccaattcggatctactaaagcactttcaacagacactggttcatcaacagcaagcatacacatcagactgta

SEQ ID NO: 147511 - DNA, 374 bp, Zea Mays
catcatgacctttaatttgggttgttcatgtccaggaaataattgagagtttcaaccaaacagcaaaatccacaaggaatctatcacttaaccacacggcgatgatggattactcgccgccgcccgtcgtcgaggacgacgacagccccaagctaggccccaacttcacgatgcgccagtttaatcatcatccttgtactgtttgcatccaactcttgtttgagtatatgttcatgtactctatcgatcgatctgtaagactgtaatccttaataataataaagtgaaatggaagttctttttcgtccattgttctttatagcacaagccacaagcaactaaccccaggcctatctgctagcttttgcttacaa

SEQ ID NO: 147512 - DNA, 373 bp, Zea Mays
aatccctcttcgcaagacgatccgctgtccaaattctattttggatggctaaccaactgaagaatttacatttcggtggcgcccataccttccaaatgatccagttcatatttgtaagctcagagccgaggaattgggcaaggtatgctgattttgccgaatactgtcggtcttctgagagtttccaactaatagagtcgcaaatacccggttgcaaggatattctttgcaaaattgaccaaagcctacaatactccacaatgtgttgctctgtcacctcagcagaaagcaggttgaggtccctaatccaagtatgatttcacagcgcttcactcaaagatctgttctttcttcggggcacattgaaaatgag

SEQ ID NO: 147513 - DNA, 781 bp, Zea Mays
ggaaattgggatttgagttctgccatcggcgtaattaccaccgacgagaggggagaagcgctcgggattctacgggtgatcgtggacgctcgctaggatcgtcggtggcctcgcgacggtggtttggcggctggtgatttcgaaattcgtcgccagagtgcacgctactctgcctgtccgccgtgcgccgtggtcggggtcaccgtcatccaccagcgaggtaagagtaccttccgtaggtctgccatgttccttgctccgcatagcagagttttggccagtgttggctcgcctgggcgtagtcagggaccttgttcatggcgccgccgcccaggttggtcgagaggatgggaagcccctggctgttaaatcggccattaaattcacggcgaacatacctctgtttgaagtccggtcagtggctgggtccgtacggggggtcctcggcgtgcgtgctcgcctagaaagcgccgcggtgcgaacctgctgactcagccgtgtcgcgtgcgtagagaggaagacgatacggtagccgtcgatctcgtaggtaacggctcagattagatctgggttgtaatggaatctggtcgttggttcttcttaggacggttggattagaatgaggtgtaccctttcacggcatgtaatctctaccatcgatctatctgcgggcggccacgatttcatcgcgccacgctcggttctggaccattggatcgggatccagtgatcctggtttcataccgattcataatagcttcgctctaatcctatccgtctg

SEQ ID NO: 147514 - DNA, 683 bp, Zea Mays
aaactgcccctccactgtcattcagagtctctctgaaattgtttttccatgcactatacgggtaggtgaaagtagtggttttgattttatttatgtttctcaactatagttattatacatacttcctccgtattaaaacagtcgacgttctgtttttgataataaacttattttggagattcaaattttattattattttctataaatctaatcaaatctgagaaactttggccggtcatattatatcgatgattattttagaacggagggagtatatgatatgcgcagaatttatcaaaaaagtttgctatttgagcccagcagtgaattgttctgttagtaaatggtagtactgtgtagcgagttttttttttcgttcagtttgtgtcctttgttacgcttgcatagtcactaataattgtgaatttttttttgtaatgaaaggatttaattgattcacaattactacatgatcgagctggtacaataaaagtgaattcacttcctgcttcaacctaaacacaaagctgaatatctggttttcttcttcttcttattttaggatctctggagcaataaacatatacggcctcggtctcagctattcttcagcaacatcatcgtctgcgatatttaacctcctgccagctgtggctttctttctggctgttcttttggggtg

SEQ ID NO: 147515 - DNA, 588 bp, Zea Mays
gtttttcttcattaggaaaagaacacccgggttttttcataccttttatttttataatgctctgtgatttctaaggggtgaaaacataaataaatgtgggggcaatcttgtactaataactggattgatctatgttgctatgaagccctaatatcagtggcggacacaggaagagaattcatgggggctaagaagactacatgacaaaatcaagcaacatcgtaaaaaactagtgttgcatagaattcaagttttatatcaatacacgatataagtttaaagaagaaatttatataacaaaagaaccaaacataccactaagttcttgatgatcgaatcgaaatcgtgtgtaccttgttgattgccgatcttctttaagggcaggggcgccagtaaaggggtggggtaggcgacgtctatagccgagagccagggcttgctggttcaccaagctcgtcggtcgccgggatgggtcgcatcgttgcgacgagcgagatctgtcttgtcaggcaggccgatgtcgtgatgacgatgtggcgggggttggaggtgttatgaatcaatacgacccaaagcagatcaaacaca

SEQ ID NO: 147516 - DNA, 567 bp, Zea Mays
atggtcgatccaatccaaccatagaagactacttgtattatattaatacaaagtccagacaaatttcctccacgtgttttgtgtacaattttatgtgcagtaggaaaatcccttggaacgaaatgcgtgcgtacgaattccaggatgcagctgacggtgtacgactcctgttatcacgttttcccgttgcctgggatagtgaaataagcggcagtactcgttagtcgtgactttggtaaaagcggcatgcataattgcatataagtacgtagagatgatgcataggagtagagatgatgggaggagcattcattcgccaggaatgcacaaggcacattgcactgaaaagtagagccacaaaaggagagcttgtatagctgtttatagatgtcatgcactcgtagagtacgcctttttcagacacaggtcatttctcttctttccttacatcgtgcgtacgcacatacagtagatacgtactgccagtatactgcccctatactgtcttgataggtcctgtctctgctgatgcgccatacagtagaatacgtactacgtacgcacaga

SEQ ID NO: 147517 - DNA, 716 bp, Zea Mays
ggaactcaccggaggggagaacgacgtcggcgcttcgcgaattgtgctcaggggagaggaggagagggatggccggggctggtgcgaggaaggaggggctcggggcaagctttttataggcgcgcgggggaagggggggcggtggagctccctgactccggcgagcttcccagtgccgccataaatggcgcacagcgctgccgaggggacgccacggcgaggtggtaccggcgaggacgctggtcaaggggaggaggacggagcggtgccaaacttccctgtgcggcaggatggcagaggggaggacggaggcgacggccggaggtgacttcggtgaggggacggcggacggacgacgaagcagctgacctgtggggtcgcttggtcagagggagcgagtgcgcgagagagagagcggctgacgggtggggacgccttgtcagcgagagcgagggcgaggagcgggctggcgcgcgcgcgcggaggcaggccgcagttgggccgaaagcggggagcgcgggcgcgtgggaaagggggggtcgcgggcttgggccggaattcggtccagcaggggggagagagcttttcccctttttctttttactttctaatttctatttcccattttgcccctttttcttttgaaaaaagatattttgtggatactctaagtgtttagaaaatagaatctaagtgaggtgcttgtgatcaaacaa

SEQ ID NO: 147518 - DNA, 709 bp, Zea Mays
atcacgggaactccctccccctcggtcagggagacagccagatgttcgcactccaagttggactgaatccccctcagacctggaggtggctgaggccggggctctgcttgccgaggttggattgttgaaggagaagggtctgactgccgaggctgtgatcgccgattttgtttttaagaacattcagtcactgaaagacagagcgtacctagcttatttatatcgtggcctcactgattcgacccgggttaccaacagaaggattcctgttgtggatctagtaagccggcttgagatgatacttagaggcaaggtgtcgaatatcggtgctcctgttgcatattcagcctggaatctgtctccttccaaggcttccatcagtttcgtgtcaaatcctcctgctggtgacagtggcttgggccttagagtgcgaccttctcccgaagaggttgaggttttggttgcttcacttggtgaagtccccgttgacgagaggcaggttcattttgagatgcctttgaatcctagtgacacagaaataagtgtcatgttggacatgttggctgaggattcctatgattcggtccttgctgaaacactagttgtagcacccatcctagagtctggaaaaactttggacattcagaggtctgatagtatccgcccgaagcatcctcgccgaaccaatcatccaacttctcctactaag

SEQ ID NO: 147519 - DNA, 567 bp, Zea Mays
tgaagatgtgaatacctcgccgtgggtggcacggctatttaaaggcgcggtggtccgactaacgatccacggccgcggattacaccgttcgtgcatggttaccacgtaaagaagggacacagtgagggaggagcgaggcatggatgacacagcggcggaaatgaccgagccacggcggccgccggtgaattatctccgactaggctcaggctaggtccgcgaggtcgcgacacgtccaaagttacctccctgcgaatatccacggcgtgccaggcatgaatcacggcaatcggcgcgaatccgggcgtgcggatcgccagcggcaagggggactgaaccctgggatatttcagtgcactgtaccattggaagcttcatcagttgttctgaccgagaatcttcaaaggcatttttcttgaatttttgcatgacaacttgctaatctgtttgtagaaaacttgtagtcctatatacaaactaaaattctgctacagagatcatgctcagttgcttactcctttgagcatgagtcaagcctaaagttcttcaaaactcactgacagtcca

SEQ ID NO: 147520 - DNA, 698 bp, Zea Mays
gtcctatcccacgtgctctctagggactagcggtccaccagttggatgtataggaatacctttcttcacatcattctaaccaagacgatgtactgcaccagtccaccgggtttgtcgactccactcactcgggtctggtgtgcaagcttaatcactccttatatgacctcaagcaggcacatgagcttggcacagtcgttttgcctcctacttggtctcccttgactttgttgacgccaagtagtacacgtccttgttcatcatttgacacgatgacaacaccatctacctcctgttctacgtcaacgacgacgtgctcacggtgtccagtgccgccctcattcagcatacgatcgcttccctaaagtgagagtccaagatgaaggacttgggccctctccacaacttcctaggggccaccatggagtgccaccccgagggcgtcttccttcaccagcagtagtgcaccatcaacgttctggagcgggctagcatgtccatccgtatgccttgatccatgtttgttgacacctagggaatggtccctgacgatgatgcctccccccagttggcaacatgacggcctaccaaagcttcactgggcctctctagtacctcaccttcacccgacctgagatcgcctataccgtcgagcaggtgttccctcacatgcacacctcacaagagctgcacctcac

SEQ ID NO: 147521 - DNA, 401 bp, Zea Mays
gtaatccctacttcgttcagattcgcaacaattttagctacatcaaattgtaaaaaggtttcgttggaaatctggttacctttagtagggaaatccaggttgcgccttgccttcaacatctcagctcgtttctgcgattgttgatcaggtgacgccacttctcctcttcgtttgcttcgacgtgatggaggtgaagcttctggaatagcatctaacttttcaaacctcagcgcaccttctattggcaccaccatttcctctgattccactgtttcaggctcaattagttgccttattttacttgcgaagtcatcctccatgtcctcctcgttttcctgaacaatttcctccatcacaacttcttgactcagattcgttacagcgtgtatctccttcgcaac

SEQ ID NO: 147522 - DNA, 348 bp, Zea Mays
gccacttggagatcgaaccacctggagcgccgtccgccggtgtagccgcccggccgcctgctgctcgccaagcctcagttccggcaagccacgcgccgcgcgagccgcttaggctccatcgagtgacctccctgttgcaccactgtcgtctagtcccgactacggcgagcagccatcgctgccagccatggccgccggcgagtctgcctggctgtccggagaccagcccctcctcatccctggtgtgcgcgaggaagactgagaaggacgccgtgcagttacagccatgtaggagaaaggtaattgtttgcgccgtgcgtgagatctaggagacaagaaattgcccct

SEQ ID NO: 147523 - DNA, 722 bp, Zea Mays
gccgaatcatccccggcaacaccctcgggggctgggtgagcgccaacaccatccttgagggccgagttctctgcagcagccacctctaaggctgaaggtccctcagtcacttccatgggagcagggcaatccaagtcagcttcctgaccctcaagaccgcgctccaaggttgatgaggcacgggacgctgcccgggatgaccccaacccggcatcgagcacatcagcacaaacatccatcgcgtcaccatctgtcggctctgataacatatcctctggaaccatatcttcaagagtttgatcaaagttcgccagagataattcttgtagaccaatgagggcagacaaagcaggagaaggaatgccactgctttccccactggctatgtagcgccgactgttcttccgaatccgagggatttcatcttcttcttcctcctcatcttcatcagcaacacggacagcacacccattggggtcagcgtcagataggtcacacccattgggatcagcttcagtaaattcaggcacgggcacttcctcagcagcaggagccgaaggaccagcatctcgatccaagctagacactcgccgaagacgtctcttcttctttttctgcccatcagcaggagaagcaggctgattggctcggcaagggcgtttcgggcgaacactgacaggcctctgaatatctaaggctttactagcttctaggagaggcgc

SEQ ID NO: 147524 - DNA, 291 bp, Zea Mays
aacaccgatagttggcacacctggtagggggtgtgtcgtcgatcaatgctaactccatggtcgtcatcttcaagagcaagatcaccttcagcccaggagctattttttgcttcgagaccatctcatgcgtagcggatgtagaggaaactttgcaccgcatagtgactctagccaagaagaaatcctcctcgagaattccacaggaagctagagtgaaaccgcgagccgtgtccccgctaacagcgcaacagtgcatggtcctacgcaagcctgggctcaggagtccccaga

SEQ ID NO: 147525 - DNA, 533 bp, Zea Mays
gtggcatcaatatctacagagaaatgtccaggccaatattattccttcaaatggtattcactaagtggtgtctagatcaatcatacaaatgatatccttcgagtggcacaagacttcaagtgatccacaaccttaagtgatcatcaactcaagagagcaactctctcctaaaataagttcatgcaagtggtgtcaaggattttatcatgcatatgatgtccatcaaaaacttattgagtattttcaagttggtataatattcacaagtacattttcccagagccttagaacaacccctttttatggtcattaatgacaaagggggagaagttggaacaaagatatgcaaatgtgcaagttggaacaaagatatggaaatatgcacaagagaaaattggacatgaactcagggggagctactgatcaattgcgttagaatgaatatgaatggatcaagagcaaagtataatggtatgagattttattgaacaagagatgcacacaagtagggggagcaagctcgtgaatatatg

SEQ ID NO: 147526 - DNA, 390 bp, Zea Mays
aaccaatttttgtgggtctttatctctctaaccagtgctcgaatcacctcaagtgttgtacaagatttgtagagtgtacatcaagaaagatatttcctgcagtaaccttgatccgattccaagggaaaaatgacgaaaatgggcgcccaaagtcgctctgccatcacctgcaacctgctggtgcagtctgacatgtccagagctctgctctataaatggcagcaccagccctcctcctcctctccacgccactttccccctcccctctggttcagcgcaggagcaccctctcctcccatggcaccgtctcttcgctgcttggccccctccatagatgaaccagccacgcaagcagccccatcgttttttctgtggctctctgttgttcac

SEQ ID NO: 147527 - DNA, 402 bp, Zea Mays
ttcacatttttccgagtcgccaagaccacgaacattccacgacaacacagacagactcttgacgctactcatttttaggacacacagacaccatcatgctaaagcacacagacactgggacaactaagaagcaaagcccgatgaacgcacagagcaggctgaaaacaaaagaaccgaacacagacccccacgggacacacagagaggtgcagaccgacgtgcccactgcaccatgagcaacaaaggtgcagactatcattccttggcgagcggcaccaccccaacagcattcgcagctgagcaccccaatcctgccgcgcgaacaagcctgcgaagagctggtatcgagatcggcgccattgaacgactgagcaaaccttttttctggacttcccccttcac

SEQ ID NO: 147528 - DNA, 741 bp, Zea Mays
cgagcaagtctacgaggcaaggtgaacgaccaagtccccgctgagtaagtctatgaggcagggcgaccgaccaagttctcgtcgagcaagtctgcaaggtgaggcgaacaaccaggtccccatcgagcaagttgagctggtcgggtggccgaccaagcccccgccgagcaagtctacgaggcgggatgatcgaccaagcacccgtcgagcaagtctgtgtggcggggtgaactaccaagtccccgtcgagcaagctgagctagcgaggcggccgaccaagcccctatcgagaaagtctataaggtgaggcgaccgaccaagcctcggtcgagcgattctacgaggcgaagcgaatgagcaagtctccaccgagcagatccgcaaggaaggaacccggaccgatgctatcgacccacgacagccgcaacaagacacaacatcaccaaacaatggctagcccataccaatagtaccaaaagacgtaagacaaacacgatagaacaccctcgagtgtgtcgaccgatatgacctcacctactcgcgggaccgatcaactccagtcacggaggccttagaaccaaagtctctacagtgacccatattccagaaaggatgagataataccccatacctggcgtatacctacgcgtgcttgatagtgacgcaaggggtatgatggaagatgaatatgtatcaaacacgaccttgaaccttaccataagctcactttgcggaacctgc

SEQ ID NO: 147529 - DNA, 677 bp, Zea Mays
gcacaacgttccgatatttgatatcactggcagcaggtttaaacttaaaaatgcagatgatggacgtagtgaccgcatacttgtatgggtcattggattcggaaatctatatgaaggtcccggatgggctgagagttccggatgccaagtcaaatcgcaacatgtacatcattaagttgcaaagggcgctgtatgggcttaaacaatctgggcggatgtggtacaatcggctcagtgaattcctcctgaagaagggatacgtaaataatccagattctccttgtgtattcattagaaaatcccagaagggtttttgcatagtttcggtctatgttgatgacttgaatatcattggatatgctgaggatattgaggaggccagcgcctacctcaagatagagtttgaaatgaaagactcgggagaaaccaagtttttcttgggcctgcagatcgagcatctcccagaaggaatatttgtacaccagtcgacctattgtaaaagggtccttgagagatttaatatgattaaagctcaccctttaaagaccccgatggtcgtgagatcccttgaaatggataccgacccatttagaccaaagagtgatgatgagaaatcgttgggacctgaagttccttaccttagcattattggagcactgatgtaccttgcgaattgc

SEQ ID NO: 147530 - DNA, 741 bp, Zea Mays
cccgacgccgacgccgacgccattttctccgcttcgcctgctcagcggcgccagccacccgtcgcacgcgagagcttcggaagcgcgtgcgctgctggatcggctgcgacacggctgccactggcattggcgttgcgctgctgcttttatttatatacacaaaggggaatttaagcgcagcgcagcgcggttggtcaatactatacgatcaagggaagcgtaccgacgatcagacgactaattgctgcaaataaattactgactaatcgtggcctgagcaggagatgatggccactcgcgctgcacgatttcgtcaataaacaacagcggaagtactgccaaatggaaaagctagtggaaacaccgaaagctctacctttgccgcctacgcatttcctactgtcgccgggaggaagaagaaaaaaaaaaacctgcgcagaatcaatcgtcgagaattcggaattcacaagggccaagaagaagaatctgcgtacgccctagcaagtgctacgtgcaaaaccattcatgcatcttcttaactggccaaaaaaaaaagccatgtgctgcaactcccaactccaagcaaacatggcaccgtggaggacaaataatgcgagtggaggtggaaatggtctcacctttttttttttttgccctccactttgaagccactgttcttctcatcgcctgcgcgcgagaaacttcgtctcccacctacctttcccgggcacctgattcccc

SEQ ID NO: 147531 - DNA, 971 bp, Zea Mays
agtatccaaatccaacggtgagctcatatggcatcatggatttgtatgttccaaatgctgcttatgcctttcaagctttcagatcatgcatgcacatgtgtggagcagaaaccggtttgctggcatttgtgcgcataacatggttgcaacttgcaaacggaggtttgtcgcatccacttatatcaattccaggttaattatcccgttcagagagggagggaaaacgtaatgcttttgtgaaacttcctcgtgctttctggcgcagttgtgcatgccagcttctgaaaaggtgttagctcagtccatgtaagtgagtcaattctagttggctactatttttcttataaccgtgaaagaatttaggtgctgctgatgcagaatgaaaaaaaaactccctactcttagaatcctaaagtgtagtgagcttaatgctgaattagatttgagtaatgcagacggtacgattctccattagttaggagaaaggtgccaccagcatatatggtccaaaaagattgggacccaaccccactgaattagccaagttggttcagtttgaaaacgagtttagttcaaatatcaccaagaacatagttgataaaaaaatcccttcatagagttgatcgactaggaccatttagatccggtgttgtagacacaagaagaactggctgtcattttccacttcgatgctagcatatacaaaacttaagtttaaaggggagaaaaaaaaaaagacagtcagccaaactgcagaataggcagacactgaggctctatcgaccgagtctatcctaatccatcagaacgctcacgatgtcttaatctttaagatcctaatgacatggtcgcgggatcggaaaggctaaagcggagattctacgtctctgggatagcaatgcagaatcggctctggcgcactggcctcaggcaaataaatgcagtctccgtccgcacgcagtgaggcggac

SEQ ID NO: 147532 - DNA, 431 bp, Zea Mays
attgagagggaagatataaaagaaattattcaacgccccatctggtctcgcttcggcatcaggaggccagccaccgctcttgggaacgatatagaggcatgccggagaagcttcaacactgtgtgtacttttattagcacaagagaccttgttcaagaacacatcgcctacagagtatggccgcttgtgaatgaatgggagatgccaaaggaggctgctgttgggtctagtcagggcggcttggtctatttaaaatatctttcagatatagaggtgagtttgatgagccaaacaatgaatggttaagcagtattgaggcaaccagtgacgaattgcttggggcctacacaagggccgaagatcatgcaatggcattggcattcgaaggctgaggcaaaaatagattgaatagagtttttgacgtcattggt

SEQ ID NO: 147533 - DNA, 359 bp, Zea Mays
gatggagaaaatgtaagatgatcatgtgtgtgtcgctgcaaaggagacttggtacgtcggtggggagatcatggttggccgcagccccagcaatgagcatcgacaagacctcgccgagactcccagctacctcggtatgtgatgccaatcatctcctcgctcgacacatgaacaatgagatgattatgtgcgtcgatgcagagacttgtgtagatggccacagccccaggtttgctgccaacaacgacgacgagtttctaggtctcctccctgcctagagtcaccacgtgcgctccgtctacacggccaccaataacgacaccgaccatcgacgtttccacgctggccctatttgcctg

SEQ ID NO: 147534 - DNA, 643 bp, Zea Mays
aaccgcacgacctccccttcacggaagcagttgacgtcacggggcttcgtgctgccgaattccccagatattctgggggttcaaccgaaccgccaagcccgacaacactgtgagttgcttcctgtatcctgtcccaaatttccctaggaattacgcttcttttattggggctatgtttttgcttgcttacttctttcttccgtaggattggtggtgcagagtctttgcttcgggctgggtttttccgcttcctatatgggagacgaattaaagtagtcagtcgtgctccattttgttgcccgttatgttttgcattgtccggaattccttaatcatgtatgagtaggtttaaagtagggtttatggcagaccatgttgttagttggtttgccatttcatgaactctagatgggataaacaacagagtttgatcatctgatgatcttctgcaggggcttgaaattggccttaaaggctccaagcgagccccaatgccaggaatggaaggaagagtggcaaaggatttgaagaaagctcctgcctccttggaggaaaacaatgcttccgtgatgaggatcctggcagagggcatgccttgactgggaagaaaaggaaggaccggaggggttccatggatgacaac

SEQ ID NO: 147535 - DNA, 406 bp, Zea Mays
ttgacgatcttatttgtgtcaaaatgatcctggattgctttggagaggcctcgggcttagttgtgaatttgcgaaaaagttgtgctatccctctcagttgtgatgatcaaactgttcaggacagttgtaacattttgcagtgcaacccggcttcttttccatgcaactatttggggctgcctatttctgataagaagttggggaggagggaccttttgcagtgggttgacaagatagctaaccggctgcccggttggaaggctccactactaaaccttgctggcagggcagccttggtccggttcgtgctctctgcaatccccatatatcctttcatcgccatgaatgttcccaagtgggttatcagtgctattgacaaaattcggcgaggtttcttgtggaaggg

SEQ ID NO: 147536 - DNA, 402 bp, Zea Mays
catccgtgaaatgtctgaaatgtagcggcagcaaatccgtgcactggtagaccagaagcgtctgtctcctgcccagaaattgaagggcctgaccacgacttaatcagtgcatgcattcagacgtttgggtcacatcagcagcgacattgtatattcgcctacctagtcagtacaagcagcgcctacccatgctccccaagtttcacacttcattgcggcaccatatttttttcgcagcacatacatacatacacacatctggaatatgcaagtacaatgtataatgtgtttttaaaaacttttaaactagttcacctcgccttttaaatagtctggcattactcttgaccacgaaaggaaaaactgggatgtatatacatacaaatagtaagtgtgaacttt

SEQ ID NO: 147537 - DNA, 595 bp, Zea Mays
tttatatttcttaacgcattgaccattacttactaacatatttacttttcttctagttattgtagaaaactgcaagttatcttgttaaactttcactctagtggacagtacatgagaattttgatatatagtagctttgtcatattgtaatctccgctgtttggatagcttctctaaaaattgtacctgggcactatacttgggccattaaatcttatctttcaaacatttatggcactgcaccatatttggttttgtagtcgtaaatgctgttccagtctggcacaaagacaaaacaaaggaacgttcagacaaaaaaattgtggctgtagttagttggactataatgaagttacaatatacagttcatagtgttagaatgtaatacgtgtgtgcagttactgtaatgggcctaggcccacctaactccttattaatacaattcccaaccttggttatggttagggtttcatttgctccaacatggtatctagctaggctcctctctctattcctctcccggctgccatcttctagccgctgtttctccaccactgtccactgacatggcccgccccaccccccctggttccac

SEQ ID NO: 147538 - DNA, 515 bp, Zea Mays
gaagagttcgatgcacccacagaacacgtccggtgcgtccatggcagctagtcgttgagcttctagccattaccaatcgttggagattgagtgtccggtgagccactaggcatgtctgatgctttatggcctttctccaatacggctgcattcctcgctgagttccctattcggtgtgggaattggtgcttcattggacccgtccagtgcacacctgcttgtcccgtgcgtctgattgcagttgcccttctttgacatagtgttgtgctattaagtgcccttctcaacattgcaccgagcatgttcgatgtcactatgcaacatccgatttattctgtttcttcgtattgagttattgcaccaaccagtttaacccaaaagcttaagttgatggagagatgaacaattcacttgtattgcaacacttcccctcacatggaggcttcctgaggtctcagatgtggaacaggagtgagcaactattacttcattgaattgctctaatcgggattggg

SEQ ID NO: 147539 - DNA, 384 bp, Zea Mays
gaaattgaaagggaaatagagattcatcaaaagttacatctctagaaatatagactcttccagaatcaggatccagacacttaaaccctttatgaaatggactgtatcctaagaaggtgcattgcttggagcgaaattggagtttatgggtgttgtagggtcgtagattgggccaacaagcacatccgaaaacacgaagagaggaataatctggttgctggttgaacagacgaaagaggggtgtgtcatatgatagtaaccgactgggcgttctatttatcaaatgtgtggcggaaagaaaagcatcaggccaaaattttagcggcatgttggcatgagcaaggagagctagaccaacctcaacgatatggcgatgcttgcgtt

SEQ ID NO: 147540 - DNA, 534 bp, Zea Mays
ctctggaatgctatagcaaagtaaaagccctatatatggtgaacaattttgatgtggactgccaggtctgtccttgtgtggaaattggagaagaatggagataaagacaggcctgcagtcgactgaagcagatcagggagagtgagtgtctgctgcagaaaaatcttctcccactatggactccagctgtttgcaagtgagttgggatagggataacttggtctcagggaggggttgataccttggaatatgccttggtgcccatgggtgagttggagaaggagtgaagctaatctgttgctgactgtgctgtgtgtctgtttgtgtgttggcacacatgcagtgaactaagccatgtgtttccctgtgtttgtagcctttgtggagctggggaaggctgtccacgtgcttttgtgcatgtagtactggtcttcaagctcacttttcctatggacatgtggagatcaaaagggtttatctccttgttctttttctttgcaaactaggtccagagaagtgtatctcggttttctc

SEQ ID NO: 147541 - DNA, 430 bp, Zea Mays
ccggatcgggttagttaatgtgcaagaatgtgtctcctttgtttttggtgaaccattctagtactaaaacccacaagtgccaaactattggttaaattggccaagtaatctgaccccactaaagattttgcataaatcataagtatacaatctcgtgcaaaaaactccttccacaacaattaaaaaggttcggcaaaagaaggaaatcaagaggatcaatcaataagacaacaaggaaactaattatcagctttgacgagtacgtgcaaagacatatatttttgctttagtgagaatacagaagccaaggaattctgttaggtcgaatggggggataagaaattataccttcttgttccatgcttttcgattgtgagcacatgtgcttcgacttcagcaacatagaatgggcgtcagatcctgtgttgcc

SEQ ID NO: 147542 - DNA, 577 bp, Zea Mays
caccggtggcaagctagcagcactcctagatcggggccttctccccctggtacgatgtcgacccttcctggtgtgaatcatcgactgtccaggcccgtcctcagcagcagcatgtcgaccatgatccatgggaggggagaccctccgccaaaccagcctccgcttagagaacggaactgaaacctccactggttgactgcctaagcgctcccacacaggacaatgggcgacgagtggaagcaggtctggactgccagacagaaccttggtcacgtcgtgcccacgatcggcgccagggcaatcagcagcacggtggcctggccgtcggcaacgcaagcagcaggacggacgtcggcacgcagccgcacgatgggacatcgccaagcagttgaaacacctcccccggagatcctgcgggaccggtcgatggggaaggggagggcgggggcgctcagccagacaacgacgacgacgggaccacctagtctccaatttaatccagccctctacgtctgatggcggcgaggtcccttggagacgacggtcaccatggtagttcttcaacctcatgatcggg

SEQ ID NO: 147543 - DNA, 382 bp, Zea Mays
ggaaggttgtatggaacagcaaagacgggccaacatgagtaggacgttgcagttagattgaaaggcgagaaaccatttgttgccaagccgaagcggacattccacacttcatcagcaaagctggaatcaaaagcatctagtgccttccatgcatctgtatcagctaggtgtgccatgacatttggattctcacgtaccccttctttgtgccacctcatgtgtctggttgtattcttggagatgaacaaacgtttcaaccgaggtataagaggcatgtaacgaagctgcttatgtgcaatcttcatcgtcacggtcaaaccatcgtcgttttcaacctcaacgaatctacgctcaccacatacagtacacttcttctcactcg

SEQ ID NO: 147544 - DNA, 303 bp, Zea Mays
tatgcatctcggatgttttaccagcgggctgcaggaagaaatccagctctttgatggtgccgttgacgagtcaggtgtcttaaagagatcggtgattgctgtgaggatgggtacttctatggatttgaagttcaaggtaggttcagaggcatccttacctgtggagcattgctgttccttcaaggcgaaccaacatgggtgcgttagtcaagagattaagactgatcgtgcgttggtttcagtaaatgtcacgtggtcaactttgcctttagttagactatagattaggcagttctttttttt

SEQ ID NO: 147545 - DNA, 503 bp, Zea Mays
cacggtaggcagcgacttggcggcgaagtggattgacggcgaaggcatttgcggctccaaccggtccttctcccacgctaatcccacgacgacatgcggtactccttgctgatgacccgagggcccccaaatggagccaaggacgccctcagcccgctccctgcgtgcggcctaatccgcgcacaccctctctctctctctcccccaatagtgagctttggcgcatggggcgatgctgttggcttggactacgggtgatcgatggagggggtgaggtggtcgcggcggtcaggctttcatcccccatgcccatctccgtcgctccactcatcagtcgtgcctctgctcgtccccacacgaacccatctccgtcgctccactcatcagtcctagccgaggcaccggacataggagggagagcgagcaggggctggtggcagctggcttggctaggctccggcggaggagaggcaccgctggagcgatcgaggcatgagtgggac

SEQ ID NO: 147546 - DNA, 620 bp, Zea Mays
ttttagccagctaactattagatctagtacattcaaacggggcctaagtaaatatgcacagttacaggaacttacatggagtacagcagtctctgtcacaatatcctgagaagacagtacatcaactacaggaaatcgagctgaagttgaagttacttctttgccaatacatgacatatcaaagtcatatacgttttcccaaaatggcaagctagttccacctttcccgaagccagcaccaagctaaagggtggatcaggcacgagttgtcaaacagcagaaaatacaggacagaatacaagcaactgaggacttacaatcattgcagtatctggaagaatagcaccaccaggttttagaaaatgatcacgtgcatatatgacagaacttagcatggattcgtacagcaggcaatatcccatccattcactcactaacaggtcaaagccattttgtgggacttgtattttctggtttagctcttcagcctttgtatgtacaacacttataacttgagcactaccttgcttctgttctgcttccacgttctcatcatacaacataccattattctttgcaacctgcatcatgcagtacctataagttactcatggagtcat

SEQ ID NO: 147547 - DNA, 655 bp, Zea Mays
ttttgaagtctagaagtttgttccccagatgcgtgaatcagcataatatgagcagtaaaaaattgctttatgctggtgacagagctgcaagcaaagcaactggtgtaacatgccaagtgaaaacaaattgaccgtacagacatacaccaaaactaatagattcgcctcatgcatagaactagacgaatggaaatggtaaaataatgataagaagccatggcataatagcaaaccattgagcatacaatatgattcatcattcattacaataaagcatttcctaaacaaattgggcaacctgcataacatggttctgtctccaactttagacaccttgacagcattgaatttcagataggtccagagtggcagaatctatagcaccataccacgtatcatgtatttattaaaacataaataatcaaactcatggaagtgaactaatatctaataaacttctctctgtagaattgtgttcctagacccacttcgatatttaatgccaacatagataatcattgtaccagaaagggctgctccttacctttgccaacataattcactgcatgtaacacagatttgttgtcatcataattagcagaggagtcaccctctgaatttggtgaatctatcacttcggatgttaaatcctgaa

SEQ ID NO: 147548 - DNA, 720 bp, Zea Mays
ggacaaatatatatggtcataaatcaaacaggaaagtttagttactaggagagagctgtttaaaacatcatcaaccaatgggactcttgatcttcttcgggagtgtgtggtcaccatggaggtctggtttagattgctgtcctatcggccttcagggtttgcttgaattaagtgcaccatcagtggcagagtggtggatacaggcttgtgctctgctgccaagtgacctgtgcaaggacttcgactcactcatcctactggtgtcctggaccatgtggaaagagaggaacaatagggtgtttggttcacagacagttgccagcacccatctgtgacgaggtagtgcaccagaggggttcactgacttggcaacacttctgagattgatgagcgccttgggtctaagggacgtcgtgtaaagtttgcaaaatgtagtctggcaaacgcacaggatggtgtcttgccacgtgcaagcaaagtattaggcatacgctactcttgttattccgatatagttggccactttgtaatggtcgccttttttcctcttaatgaaacacgtgcaaacggacacgttcttgaaaaaaaatgggactcttggcatatgttagagcatttcccagagcaaacccttcgactaagtggtggaattgacaggggaaccctactggcctattgcggtacaatattgggtatagaaagggtgatacagagggaaaa

SEQ ID NO: 147549 - DNA, 860 bp, Zea Mays
cacatgctatagacacatatcacctccaagaactccctgtcggtgcaacaaggactcattcagtggtcacaatggccgccggaattggcaaattgggaagatcttaccagcctcaagcaagcttttccttttgcgcctgcttgtggacaagcaggccttcaagaatgggagaatgttagtactgctgaaccagtcgcacagcaagaggatgaaggacaacagcagcattccaatgagcgtgttgccaggcccaaaataggagctcgtacgagaagacccaacattcatgtctgtggtcctgaatggtgtgtgtcagtgcttgaaaacactttcaggccgagttctgagcccatgtaatggagagtatttagcctaaagagagtgtgaggaaaagatcatcatgtaacagaacagaaattctatccctctaagttgtcctcatgatgtatctttctgttcctctattcttctacttcctcacgtctccttttgctcctcagatccctactcctcctaacacaaagatttttagtaaaatccactcgacagggagggagggcattggccacggagagggagaccattgaaacagcagtgaaaggaaaatggaccctagccttgcgctagtgaaattttggtggtttaaatgacaatactaaccaatgggactaatttgtttgctagaatatttgttttaagttctacggatgcaagtgattgacttggggaacaaaacctcaaaggagcattcaagggaacaagaaaagaacttgaagaccaaccaaaggacctaagacatcaaaagaaagatggtggcgacaacagacgaagataggatgacggccaggcaaaatgaacgc

SEQ ID NO: 147550 - DNA, 723 bp, Zea Mays
caaacagtatccacatccgttacccgcgggtaatggatatccgcggatatatctgtttgcccactacatatacaacatatttaaatccaacaaattcaaatatgatatcatatttgtcaagcaaatttaaatatgataaaaacatacaaccatacagaatttgtccagcaaatgaaaactgatacatgtattaaggcatacagcgagcaatataaaattgtctcgcagggactgaggggaggtggtgggcgcagggtgcagccgcgcagtgactgaggagaggtggctggtgcgcagccggtagcagggactgtggtggcggactggagggcgcagcacaacacctggtagcagcggcggtaggagccggagtatcagactgcagcgggagtctgggagaggagagatagagtgggcgacgacggtaggagtggaagaagagagatggagagggtctggagcaagagcgactgagcgagggcttcgctggaagcctagaacggtggaacctaggcttgtggcctgttggacgggagtacatgatattttaacggatatttgggtatttgggtatggatactgatttttcatacccgttttaaaaatatccacggatatcaagtgctacccgtatccgtatccatgggtacagactcgtacccaaaaccgtacccaacgggttttttatccgcgggtacgcggataaatcacatccattgccat

SEQ ID NO: 147551 - DNA, 491 bp, Zea Mays
ccgctcaaggagcggccacctgccacacacagctacaacctaaggagaagagggcataccaatctggtatcggagatgccgggcaacgatgacaacactgccagcgaagtcgcatctgctgcggcgccaaacaccaccagcgcagccctggagcagaagctggacaccatgacgaaggcccttgcagatctcgccaccagggtgttcaatctggcgctacatgtgacagaaatcgatgggcgcacgactcccatagtgtccgctgcccgcaaccatccagggtttccttacggtctcccaggttatggcggcattccagagacataggcgccatcgacctctaccaggccaccaccagctatagctccaccatcatccaacccattaccaatccaccaaatcccatgccccactcgccgtcacctctttcatcctttccaccatacataccacagtagccattacaccatatcccaacccatcccaccccg

SEQ ID NO: 147552 - DNA, 711 bp, Zea Mays
caaaccttcaaccctgcagggatctggtacatctcaaaatatgattcacaattatccatccatactcttgcttcctctccatcaaagaatgggaactccaatttgggcaaccagttcttcctcccttgcatgtccatcgctgaatcatttctagcatccatacccaaactgctactcccatcctccacggctgtaggaattctaggaggtacccgagtatttcttagctggatcggaggaggcccaatcaatccatcaccagttgccttcatccctccaattgcgcttgatactgtggtcgccaatcgattttggtcctgagaaacttgagccagcgacttcatagacaggtccatcttcgtctgcaggtattgaatcaacttctctccctccatttgtctcttctccatctctgtcagttttgttgacagcgcgttgaatccatccatcttcttagatagttccatcagtgtcgcggatgaggcatcccaagcttgctggaacttctcggccagacgcttctcaacgtcgtccatcgccgagacgagttgtcgcgcctgcgaggtttgacgactgggcgccgtggcttcgaatcaacttgacgacccacagaatccttcgtccccgagccggaacgaggacccctccgcggcagtcagtgccgcggattggctttgataccaatttgtcacaaccggaggtaggaagtcc

SEQ ID NO: 147553 - DNA, 506 bp, Zea Mays
gaaatgctctatggcagtctacctgggagaaagccgatactatctgaaccatccttctttccaagtcacttttaccggataccgctttccagatacttgccagaatgttgcccgaacagccctccgacaactatgccagaactacaacaaggtgatctttgaaactccccttcgctactttccacccagcaacaagaatacccccacctggaggaaaagacttcaggccctgtcaggaggagatcctattgaggatgatcccaccatcgtctacatggctggataccttcacacccttgataaccaatatgatgacctcaccctccactgcacccacctaacctcccgagtggaaagcctggagcaaaaagtcagggaactttcaagggaaaaggcgtccctccaagagagcctcgcaacagcagaaggcgaggaaaccaatacccgtgaggcctaccgcaccctaaagatggattacgacaagaaactgaagaagctcgcccccg

SEQ ID NO: 147554 - DNA, 465 bp, Zea Mays
agcaacgacatagcccgctaaataacatacacgtcggtttgcctgtcactacatacattacaacatctttataaacacacatattcacaagtattttcgcacattgaccaatctatatgaatcgtaaaccactgatccccaaatcgcaatcaccatgcatttacttcccaaatcacgagcgcatacatgtttatcatacgagccgagtatttcaataattattctaaaacactaactccattacacacttgtatcacaaacctacttgacttacttgaagtgtctacttgaaattgtgagcacaatcatacactctatgcgaggcataatttaatgaacacataatgtgcatcgactcgacttgacttataaatatagagaaagcgatgactactttggcatgtcaccacctctctacacaagccaatccaatattaactatacggattgaaactttattttgca

SEQ ID NO: 147555 - DNA, 486 bp, Zea Mays
gggtacccctaattatggtccccgacaaaagatgacataaatcacatctgccatgcatgccaacttggtcgacatgcacgtttgccttttagttcatctagctcccgcgctattcataattttgatataatccattgtgatttatggacatctcccattgttagtgtgtcgggatacaaatattatctcgttattcttgatgattgctcccactacatttggacttttccgctctgcctcaaatccgagacatttttcgctctttctaacttttttgcgtttgttcgcacgcagtttgggaccaccatcaagagcgtccagtgcgacaacggctgcgaattcgataattctcaggcccgcacgttctttctctcccatggtgttaccctccgcatgtcatgtccatatacatctcaacaaaatgggaaagcagaacgctctcttcgcaccctgaacaacatcctgcgctcccttttgtttcaggca

SEQ ID NO: 147556 - DNA, 1370 bp, Zea Mays
ggttgatcgcagcagatcggagcttgctatatgctctacttgttgctgtcactggaactgtatggtggtaaccggacatcgctgtttttggcttggtctatatgtgtagatcagataatagatattgtgacctgcagttcatcacattaaggatttagcttctgaatatgtttagcactgtcaatttctcaatgacctgacctcctgcagtgactgtgcttactatttgactgaatgcgttattgatgatctgtacatccgaagccctatgatagcatatctgttgatgatgtgtcacaactcacaactgtaatacccatccacacttttcttcgtgtggatttgttcaacctgtttgagaactttgcatgggaaggaacatgacgataaagtgtgtgacggaatcaggagtttagtttggagctgagcattgcttatcagaaattgctatttcagataggtctagctgtgggaatcagagaggttgtgtcctggggtgtgcggcactgcaaatgagatttcatcacgttacggatatctgggctatcctagttcttctgtttagctctggaatcacttcaacaccatcaatgacctgagcttcctggagtgactgtgctcatgtgccatcaatagcttttaacttgtgtatatttaaagtattatgatgtccatttttcatgtgaagctagcatattttggtggtacatggcatatgtaatagcttttcacaattttatctgcatgggctttgttgtccccatctgagaactatatgtggcttatagctgtgagcagaaatgcagtaaaacatgtgatgggtttgttgacactattcttgcacgtcgatttgaatgatgtggcagtttttgaagctgttgagattagtgtcataggttggaaattgatcatggtcgcatatgtgcaagtggatggaatgatgagattatcatggtagtttattattattatttttctcgagcgcgcaggaggactgcacatcattatatcaagaagaagaaaaaaggtccaatccaaaatagacctatacaaaatccaccaaccataggtggtaacctagaatgctaaagggctatttcaaaggtgactagacaaaacgaccaggcctaaactcctcctgagttaaggccacagacttttcaggcctgcagccccagctaagcaccacaacttggcataccccctgatgtcttgagtaaccctagagatgtccagggaagtcctgtcaaagacacaggtgtttctgtgtttccacaaccaccaggccactaggatcactgctgaattgaaacctttcttttgtgcctttagtgctgtcatttctgacctatgccaccaggctagaaaac

SEQ ID NO: 147557 - DNA, 548 bp, Zea Mays
gacgtacgcgttgcggtgtcttgtgtggtagacgaccgtggtgccgcgaattgctcgccggagtcattgactccgcggattgccgccctccgccgtggatagaactcctgctcacgtaacgcgtggtaagtgccctctcatcctgtgtgccataatctcctctgcgcgtagctcgcttccagtggggcttggggctccgggggcgccgacttcgagatctccggcaaggtcaccgccgcctatggggtctgcgccgccatggaatgatcgtagggatgaagaagagcctgtagccgtcgatctgtgattgggcgcgcatgattagatctgggggggaactgaatcctaaccgttggatccagctggaacggccgagattagatcccaggtactggttcggccagaagtaatccaagccgttgatcgatggatggaggggccaagggtgatcctggcgttttagaatccagggcattgatctcagatccaagggctcatattacataccgtttcatttaaagcacgatctaatccgggccgcccgattt

SEQ ID NO: 147558 - DNA, 479 bp, Zea Mays
ccgagagatatatatctgacctgtaaaaatatctaggcatttgtagcccttatgaagatttttgtaaccaaggaaggcataatgagtagatcaggattggagtttatgggagttgagttgcaggcacaaccaaaaacccgaaggttggaataatctggtgtggctccggggtgtcataggctatgcgttaggacgaagtccgatttatgatttgggtggctgtgatgaaggcttgttcccaatatttgagtggcatggaggtagtagctagaagagcaaggcccacctcaacaatgtgctgatgttttctttctgcaacaccattccgttgatgtgtatgtgggtaggacacaatgggtaatgccgatggtgcgaaaaagaattgaggcgctcatattcgtcacccaatcagtttgcttggcaatgactttacgatcaaacattcgttcgacatagcactgaaattctttaaagaatgt

SEQ ID NO: 147559 - DNA, 272 bp, Zea Mays
gcttgggatcttgtgtagacgtggcttgatctcggacgatgatcccggacccaagggcctgggttgcgtacaggtataggcgctggcagatctaatcgtggacgtaggtctaaatccaacggctgatcgcggccgataccccttcagcctggcatatttacgcatgaaaccctctggtcctaagaaaataacccgccatcctagtaccctgcgctctgtgtctacagatttttaccccatgacccctgtacttttcggtaattgaggcccag

SEQ ID NO: 147560 - DNA, 728 bp, Zea Mays
gcgagatatgcgacgatgatttaattataatgagatccactcccaaccctccgattcaaatctcacgacccacaaaccgaccctgaaccggtattccatgttcttatcacagtcgttcatttatggatctacgatccatggccataacccccatccctggcggtcgaacgcggcggtgcgtccatcagtcgcagaggcgccatgaccggacatccttaacattgcacccgattgctcaaacttcaattcgaaagttgttgaatgtataggagactatgtggagtaagattaggggcacattaccgagatgtggagtgcggagacctcaatctgtggtggcgtgtggctttgcggcgaaggcgaagcgccgatgccggtgtagagaagacgacgccagtgtagggattagacagaacaaaatgaaagacatgacgatatgggtagagaagacgacgctggtgttcaacaccgtgtcgttcttgacgatgatgtgaaacgcccacgctacgagcaggcagatgagctgtgatgacaaggttgaagacgacgagtagtcatagagcgctttccaaaaaccttattcaccctctcccggcacaaggttgttgagggtgacaattccgaagacatgctctctcgtttgtctatgcacgctgacggtaaggatgaagtcggcgcagcaggcacgaagatgcgagactaggcccaataattctaacacatactag

SEQ ID NO: 147561 - DNA, 506 bp, Zea Mays
attaataatgacacaccttttgatcgattactccaacaaaaaccggagtactcttctcttcgtatctttggttgtgcctgttggcccaaccttcgaccctataatcgtcataaacttgaacttcgttccaagcagtgtgtctttattggttatagtaaccttcacaaaggctacaagtgccttgatattaaatctggtcgagtatatatttctagagatgtaatatatgatgaagaagtttttcccttctctactgctcattccaacgctggtgcccgtcttcgtgcagaaattgcacttcttccacctggccttgtaccttctcttgagacggaacatatagttgatcacatgtttgattccattaaccaaactactaatggtgagcatgcagcatatgatcacagggggagctccttgcctcccagcacgagaactgaagaagatctggtgtccactcctgttgacactgcaggagaagatatcacctctgctgtcgttgcggc

SEQ ID NO: 147562 - DNA, 508 bp, Zea Mays
tgaaatttttcaagacttcccctatcatctcattcagaggaagtcgcagtcctgctctgaaaaagctcttgaaaaccactacctcatcattcttcggtgttggggtggtctcttctctagcaaatcggacaagtttcctttcagcttccccaaagtagcccatcttcatcatcatgggcatgtcagcttcagacacaatagatttctcaaaatctcgatagctaagttttgttgggatcaaaatactataatcttcctcatcctcttcaatattttcttcttcagcaatggtatgttcagcttcggcaacatgagtaccttcgtcagtagttccctctgtcacaactagacctgattgtttcatgacttcggaagttggtgctgtctcggtgacctcggtctcttctccctcacgagtcacccttgcagtcgaacgcactctggccatctaatggattttttgtggttttaacgaagtcgatgtttgcttttgcagttttgatgaagc

SEQ ID NO: 147563 - DNA, 582 bp, Zea Mays
gccgcagcgaccattttggcccaccagagctttctcaccacgtagcctgcttcactggtgtctctgccctgtgggtcctccctgtcatccattcacgggtgctgtcatgttcctaccgcgtggcgccgacaccccgcccccacactgtcagccagcgtctcccacgcactctctgtccggccccacttgccagcctgtatcgcgtgcgccggtgtcgctgtgtccctgggtcatgttgtcagaagcttcctcttcgttgttacgactgtgccgaaatctccggcgcacggatcgtccgcgcggtgtgggtttgttgaccggactttctctcagtcgcctataagaacgacagttacccctccgcgttcatattctacccgagccatgtctgcaaaactcgcagaatccgccgccaccgtgcgccgtctctgcggagatcccgtcccggcgagctcacctctgtgtcccccgtctcgtacccattccaccgcctaccggtagtacacgggcgcgggaagccgcacgtacctcgacaaggaccggacggccgaggaatccgacgttcacgcacttcgccgccac

SEQ ID NO: 147564 - DNA, 424 bp, Zea Mays
ttccacagagaagtcaaaccccatcagtttgctaagccagtgttgttgcggtggagttactagagcttgatccagcaggaatttcagactggcatgatctgtgcggaccacgaatgggcgcccccataaatacggtctccagtgtcgaatggccttggataacccaattaattccctttcataagctgcgagtttcacatgacgatctgccagtttctgactataataagccactggatgtccttcctgttggagcacgacaccaatccctgtgccagaagcatcacattccaccacaaaaggaacaacgaagtccggaaggcggaggactggagccgtctgaagagcttgtttcaaacgttgaaaggcagctatagcagcttcggaccagtggaactgttggcggcgaagaagagtagtgagg

SEQ ID NO: 147565 - DNA, 333 bp, Zea Mays
caaaaattaggaggtaaacacaaatagaaatacaacatacacctcagtatgcttaatcttaaagtgggcaaatccatttcacgaccttaccacaaagattgggtgtgtaggggcaaagaccctgcaatcactggatgcaaattgaggtccccattcagtgatagacctgtagcatcctctagcacaaacccctgtaaggactagaagaaacataaattaattggcaagtaggccaaatatcgagaacctcaactatcctgaatcactaatttctaggatgattgttgggtcatgcagattacaattcttagaatagagcaaacaaccctattt

SEQ ID NO: 147566 - DNA, 329 bp, Zea Mays
aaacctgtgagagtgagtactttccggcctctagaaggccagaaaggaatgaccagtcctatgagcctcatagggcatgtattaacgcgccgcaaaacccaaaccaatgggggaggaaaacaacataccaacatccaaacaacctcacccatattggatcaaagagccagtggtctcccaccagctgccatcgatatagtaagagaggaaatagctggggcgttccgagataagctcggagttagtatagtccctagggggcagtcatatcggagaccttatggtagccattttgaccgtctcccatacccacaggggaccagaatacc

SEQ ID NO: 147567 - DNA, 360 bp, Zea Mays
ctagtgcctagaatgttgtgtgttatctagacgttttgtgatgaatgcagttagttctatcaagtcgggaaacaaatggaggaatcaatattccacaacttgagctaccagacacattgaaataatagacttacacaccattgacaaattgttgacaatgcacacatacattcaacaacatccacttacaacctacgacattgacaaaagcacacaaagacctagttcatgactcatgagacaacacacgagctagatacacaaataacgatatacaaaccacatgcaaacgttaacacatggttcaacaaaatttgttagagaatgatgctagagagggttatgtgccgtgtaaatgac

SEQ ID NO: 147568 - DNA, 2008 bp, Zea Mays
gcaaatgctgcttttgatttttatgattagatagattatatgcatggtggtgtaagcttatttattaaattggatgtatgtccctggctgttttgttaaatctgtgataggcttaggctgatcatatacttctaaatttatcacctgttttgaatgcattccaagcaaaatagttgatgtccctggatcctgtacctattggtgtagttttgttttaattgatttggtgctttcagtctttgcttcgccaatgtttctgtaattgattgccctgggaagtgctgtagtaaaagcacgactccaattccaaattacagagaattccagacaagagggtctgccctggtctgatctataaatcgctatgttcttatcttcagtaatcatctattttcttaggtgcctcatattattgagaactcatggtcccagttcttttggcattaatagattgatgagttattttattggatgacgtcaaatttcctttgcctcactgtccaggttaaatggcctctgattattgacttgaaaactggcatgtgtgtgttttttcattttgtttctttataatctgcaccaactaacctgctttgaatagtttgtttgtgattctactgtttacgtgagtttgactggttagagaatttaaatgtatcaaaaaaatagttcaaccctgcattatacaaaattatgtggaaccataaaaggatttggtcgtgttgcatgatttgcatgatagcaaggctatattcactctaatcaggtttataattcctagaagcaaatatagagagttgctagatgttaaatgtcggttccttttttagttttttaagctcttatttctcctaaacataggtcaggcaacattatatgaagtagcattactgaattctcacacataatgcaaaggccttgtttgatgtgtctgttacatccatagttggcaatgggaagactgtgaagttctggactgatcgttggctctttggtcaaactgttgctgaatgctgcccatccttaattaaatcaattcctaaaaagggccttaaagcaacgaacagtagcagagggaatcacagactgcaagtgggtttctgatataagaggagcactgtccgtgcaagttctactggaatacttgcagctctggaatttggttgaggggtgtcggtgttttaaacccgccggttctaaccaactagtaaatttgtgctgcgtgctcttatcccggatggttgatgaaagaagacacacaaggtttatcctggttcgggcaagagaaggccctacatccagcggggggaggagacttatattatcttgcatctaagtgctcgtagtaggggatacaagcaagtcgagagagggagtgagtcctaagtctctgagtatgattgaggcgagtgccaatatcaggagtggagtgaggagtgaacggtgaagtgttgtccttgacctccttatagaaggccccgggctcttccttttatagctgcaaggaggaggcccaggggtacaggtgttgctatgctattgctgtggtaggaggaggtgtgtccgagccctgtagcggtatggccggcgggatggccctcgtccttgatgtcgtctttggtcaggagaaggacgcccgatccctgtagcctgtcctttgactaggtagagagccgaggccgggtttgggagcatgggcgtctgcccgagctcgtcctgtacaggggtgcgaatgagacgtttccgagggtgtcgagtcggagtggttgaaacagagctcggcatggtgaaaaagtgtgtggtaatctggtccggatgtcattctggatggtggaaagtggattggacactggtcttgttgtttctgtagccttcctgtcttcagcgggagagcaggtggcatttaatgcgcgtgcttccctgttggggcagttggccgaggtcaagctcgggcgaggcgaagatttcttccgaggccgaggccgtgattagacgttgcatgtagtca

SEQ ID NO: 147569 - DNA, 1196 bp, Zea Mays
gctcaacgccttggacggcccgatacctccggagctcggccgcaacatggcgcgcctcgagtacgtcgacctctgccacaaccacctgcgcggcgagatcccggcgccgctgtacaacgtgtcgtcgctggcgagcctcgacgtggggcagaacgcgctgcacggaggcatccctgccgggatccacgtgcagctccctcggctgcggtatctggccttgttcgagaaccatttcagcggggcgatccctcccaccatctccaacctcacccagctcgtagagctcgagctgtcagagaaccggttcagcggcctcgtgcctcgcgatcttgggaggctgcaggatctgtggaaactgctgctggacgacaacatgctcgaagcgggggacaaaatggaggggtgggaattcatggagtcgttggccaactgcagcaagctaaatcttttcggtctgggtggcaacgatttcaccggagatcttcctgcttcggttgctaagctctcgacaacacttgagtggctttacctagaaaaccttgcgatctccgggagcatcccctcggagatcggaaacctggtcggcctgaaagtacttgttctgacggatactgacatctcaggagcaattcctgatagcatcgggaggatggagaacctggttgagctacacctggacaacaatagcctgtcggggccggtaccgtcatcggtggggaatctcaccaagctcatgaagctatcggcgagcggcaacagcctgggaggatcaatcccgaggaatctcggaaagctcaccgacctcaccagccttgatctttcaagcaaccacctgaacggctcgatccctgaagaaacattccagctgcagtctctttcgctgctcctggacttgtcacacaactccctctccggaccactccctcccaacgtcggaaggctggccaacctcaacacgctgagactgtcaggaaaccagctgtccggccagctaccggcaggcatcagagactgcgtggttctggaggagctcctgctggacagcaactcgttccagggaagcatacctgaggctctaggcgacatcaagggcctccgcgtgctgaacctgaccatgaacgggttctccggtgcgatccccgacgcccttggtagcatacgcagcatgcagcagctgtacgtagcgcgcaacagcc

SEQ ID NO: 147570 - DNA, 445 bp, Zea Mays
ccaaaaacaacgacttagaaggctgtcaccagaaggaagctagcagaattaatcgtagacataaagccttcatgaaaaggaaaatacacaaaaccatgcatgaccatttctagctaagtctgagtttattacaggggggaatcacaaaccccggcgggttgcagctaaccacgccacacctagagtcgcaaactttttaggggagagttttacatcatctgccatccaggtaggataatatgcatcagaaaaaacatcaacagttaaaagttccgaaggtggaagtctaccagaagaacaacaaaacgcaaacaccatctgagacattaacatttttaactacagatgcgtctgtctaccggtctccatccaaaatttctattgaaaatttctttaaccagtcttcggatttgcaagcttccttcctgtagggtccttccttccg

SEQ ID NO: 147571 - DNA, 312 bp, Zea Mays
aagaatagctgtctagggcaagcttccaaaatcagcagtgtgtcatccgcgtattggactatcggaaaatcttgaccacaattctctggcaatggtaacttgagcaggtcttgccgccgcgctttatttatgatgctctgaagtagatctgccgcgagaacaaaaagaagaggcgagaggggatcaccctgcctgaccccacgcttgcagtgaaaggttttcccagggacaccattaagaagaactgaagacgtgccagaccgaagaatatccctaatccagcttatccatctgggcccgaagccattgtgc

SEQ ID NO: 147572 - DNA, 279 bp, Zea Mays
ccgggtataccaagcacggggcgcctgtttgagtacatagagagacttgtttaggcgacaaaacccaatctggatgagtggaatcaacaaaaccagctggctggctgcaatatattgtctcggacaatgtgccatgcagaaaaccattcttcacatccaactgatgaataggccaatctcgggaaaaagcgagagacagaactgtacgaactgtagctggtttgacgatagggctgaaggtctcatcatagtcaatgcctagtcgctgagtgaatccac

SEQ ID NO: 147573 - DNA, 391 bp, Zea Mays
gggaaatagagttgcaggtaaagcttccaccacatattcattcggtatcaaacattctttgcccaactcatgttctttcattcatatttatcttgtaaaggcctcagatttctttgtttttggcgcttaatgtcaaagggggagaaattaataggccaaagcaaaaacaaaaggaccgcacgaccaccctattttgaaaaccttttaatcttccaatttggtatttctgcttctgcatttgcaaaaaccctcttgacagctaagaggagaatacctatttatgccaaaaaaagggagaacttattcaggtggagcttttatttggctaaaggaaaagcattatctgttaaacttggaaaatgcttttgaaaattctattcttacaccttag

SEQ ID NO: 147574 - DNA, 2074 bp, Zea Mays
ttgtaaacagattcattttgtccctgtattacaatatttagcaaattaaataaactaaaatttttacagtttgtttaacctgtaaacagatttaaatatcgtttttgcaccagatttgtttcctcattaattcaaaggtccatatacactaaaattatttttcccttaattcaaagagacttagttctcttgtgtttttttgggaaaacaaagatgtctaaaattttgcactttgttgccaggactgttttgtagtcttagtgctttgttgtaatcagattcatcttgtccttatattatagccgttagcaaagtaattcaaataaaattttgcagtttgtttgcaatctgtaaacagttttaacatcatttttttgctctaaatatgttctctcattagttcaaaggtcaatgtgcactgaatatgttttaccttaattcaaggagattatgttcttctttatttttgggaaaacaaagattatctcagatttgaccttcatccgttttccatgcttctatatacaattgtgctttggaaaaatttgggagcccttaaaaccaaactaacccacttcggccaatgtttttttttcttattttagtttttaggtgaaatgaacaagcttgtatgctttaaccatgctatttcattgatgttggctaaccactccataaagtcagcttaatgtcctttgcgtccaaactgaaaaatgtttgcttgctaattggtgccttggcgctagctagaaaagtgggggatgcctgtgatatacattgctcaatttgatgatcctgtttcaaaattcttaaaccattatgtatatcaacttccatttagcattgatgctaccctctcttggtagtatatgaatactagcaggataaatgaactggaattttgcagacaatgttttcctttttttggtttgttttaagacgaggtgaacacacatgtatgtatgttgtaaccatgcgacaagtttctaacaaaacatatcattaatgtagtctaactgctcatatgttagcttgttgatgtcatttgcgtccaacaaaaaagaaaaaaacttgcttcttcggaaaatatctcatgaatgtaggctaagcactccataatatcaactttgctgacctttcatatgcaaaagaaaaaaacccgcttacttgctaattgatggcttggcgctagctagaaaggtggaatgcctgtgatagacattgttcagttttccgattttatttcagtatacttaatgcattatgtatatcaatatccaattttgaaactatctttttggatggaatctttgtcttcgtgtgtccgcttggaaaaaaatagggaccttttttgatctcttgctttagcatcataggtagttccagagaagcaactgcttgcctcctcggctccatgatgcaatgtaggcctctccttcacatatttccatcccaccaagctcgcttggtcagatgaacatgtcaagtgttttttatgtagtagctaattgtcactaactttttgtaaaaccagcggagctttaaagagttacatattcttatcaaacatgtaactctctacgaattatgtttctttctttacatattcgtttatttttcctaaatcacatctatttccttttttgtttatatagtacatagttgaccaaccttacaaaagagactacttacacagacatcatatttgtacttcattgtctaatgattggtaatattattgaaattttacctttcatttcacaggcttaaacaagaaccagtgcacatcaaagattccacacgccaaaaagatcaccataaatgatatatacaaaaaacatgaaaccaattgagatttggcccttgaatgcagtgtcacatcttttcttattggtcctgccattttacaactaaacataattctctcgtatgttcttaaccctctagccatgttctgaccgctaaaaccatttgatgcactgtaacttatgatagttttagatgatgacccacttagatatggaacgaagattctacatatgttgtcgtttgtaaactagatacaatgcatgca

SEQ ID NO: 147575 - DNA, 297 bp, Zea Mays
ctccttgcgcgtgacgcgcccacgactcctcgtcgtcctcttgtgatctggtccccatctcgctgccgcctcctcccgacttaccaaactccaacacgccatgcgaccatgcgctcatgcatagcatagatatagctgtagccaagctgcccaagcacgagcaccactcgtcttctccgaccttccagctctagctctgatccgagccgaaacagccatccaagacgcccgcggccgccgtgagcgggtgaccctctgcgctgcgctgcgtcaccacccaaatggatgacatcgcca

SEQ ID NO: 147576 - DNA, 798 bp, Zea Mays
gaagctttgccctttgtaaatgaaaatttgaattttgtttggcagacacatccaagactatgcattacaggtgcaagtagagtttcagaagaaactacatgatatggtagagagcacaatgctggaggtacacatacatacctttgagtttgctttgatggtttaatctcccgttacattttggtatctagtacttacaacttgtccctccttaaggctccataataataaaacgtggtgttttttttttaactttcaaaagcagtatgatctcataatgaacccctaaattttatcaccacatttattggaaatagcttctaaaaattctcatcatgtgactatgtgtacattgagatacgcctttttttcgttttggcacgcacatgacaagagatctctcattccccaattcaatgcgttgtgtgcttgctgtgccatagattcgcagaagcctgctcgagaaccatgtgatgagtctccacgagcttgagcagcggcagtcgtcgtaccgtggcagcgacgacgcaggagcatgacgccatgaccgtcttctggtcgaggcttcaatgcctgtttctatgtggtgttgctttttttttcgcatgtaaatttgagttggtagtatagctccagaaccttgtgataagaatctgtgtgtgatgctgcagagtcaccttttgcagtacgtactggaatttcacactccacatgtaattatgcaaactctatagcttaccaactgttaacttgaatgggcaatgttgatgtctaaacttggggaaagaaggatgccaa

SEQ ID NO: 147577 - DNA, 643 bp, Zea Mays
ctcagatccccctcgcgctttcgtcgcccgtcgtgatccactgtcacaaaagccaaggacctccctcaacggtgccagaaccaccacgactcccagatccacatctacgtctgccttaaatccctctggcgtccctccggcgcgatgcggccaaccgcgcggcctccccatcctcaacgcctagccccaatgcactgcacccccgcatcatccaccccctccctctcatcaagcctttttctcgaccgcgatagtgacggcgacaagccgacaagcacgacccccctctgcctcgccacgtgtggcctcctccaccgcctggtttggagttttcccatccttgacggcccggttcgaaccccgatcaactatcctccagatcggatcatggcgacgacgcaagagcgagatgtggcgcagccctaacgacggaggaggcgacgtggagtaactatgtggtggcggagcgcaaagtcgacgaagactctctctgccgccttctcacggtaaggccctgcactctcttccttcccctctcctatccccgcttgtggaggcggtcagggcggccaagcagagacgcggtcagggcatggtcacgacatgcatcagagacacggtcagggcgcagttaggcgatcag

SEQ ID NO: 147578 - DNA, 804 bp, Zea Mays
gtgcgttagactagtatggtggcatgcgtcggaccatatgacacaactatttgagttatgtttctttctatagggtcatcgaaccctttaaatagtggccttattggatcaatgagttgagtctgctgacctctgctaagtgaccatagggggtttcgcggacatcaaactgatccgacaatgagtgtcataccatacgctcgcaatagtaattcaaatggctagttctggcacagtacatatacaattactgttgtgtctcatcggaccatgcaatatggtcatacgggtgtacgttagacgatttgatgctcacgaattttgcctagagttactatatataatggctagttgtccagttggtggttataattacctcactaaccaaccatactagtgctcctacctaatttaatagctaaagcaacccatattgagtgtcagaaagagccattgcctagtgagagacttaagagttgaaattctcttggtttggagcctcattagtatataagagagtaatgagtgtgcacccattaatcttattgagcttggtacgtagagtcaagtgagagtttaatactcttgatgatcgacatcacttagacagtttagtggtgatcaagagtgcggtgaacactgatagagtttgtgggtgacccaactcaagacttatacatgatcatgagcggctcactgtgggcggcaaagaaccagcttgtaaagagcacttagtctttatttggaacaagggggagtgacacccgggtgctctaataacgagaattagtggagagtgctgac

SEQ ID NO: 147579 - DNA, 567 bp, Zea Mays
ccgaaccatccttctttccaagtcactttcaccggataccgcttcctagatacttgccagaatgttgcccgaaaagccctccgacaactatgccagggctacagcagagtaatctttgaaacccccctccgctacttcccacccagcaacaaagatacccccacctagaggaaaagacttcatgccctgtcaggaggagaccctatcgaggatgaacccaccatcgtctacatggctggatacctccacaccctcgataaccaatatgatgacctagcctcccactgcactcacctaaactcccggatggaaagcctggagcaacaagtcagggaacttacaaaggagaaggtgtcccttcaagagagcctcgagatagcagaaggcgaggaaaccaacacccgtgaggcctactgcactctgaagatggattacgacaagaagctgaagaagctcgcccccgcaagaaaaatctgcaagaagaccaaaagccaaggatgtcagactgagcagaaggaagaagcccctccagccctacctcctaccagaatagggaactcgtccgac

SEQ ID NO: 147580 - DNA, 467 bp, Zea Mays
caaccaaagacatggcttggacaacgttttgatcctttctttgcaagagaagagaaagctcatttgtgatacggaggatttgtaacatcaacttcatcataaacacaaagctgaaacactccattttcccaacaaagccacctgcacctgatggattacgctcatcttggtgcacaatttctaaaacttctatcactgattcccacattgactcaatacggagcaaagtcttgtaatgagatccccatcttgtatctccaggtcttgacaatgatgtttcttgttgtttgcctctctttgatgaaatttctccactctctaactttgataagagattcaaacgatgcttatgttgtaatatatcctttcttttgcaagaaataatccatgatcacttaccatctcaactaatgctttcttcaatgattctgatgttgtgtccttgacatgcttgatgcccaaaaatc

SEQ ID NO: 147581 - DNA, 583 bp, Zea Mays
gtacgcgtgcgatggctatgtcgtttggtaaatcgtagcgagatattgggtcttaattacagtggaagcagtgaatctgttcgatttgaagtcaccgttcgcttgcttgcgccttgcatggatctatggggtacctaagttttccttacttgctacgaagtttagggaacatgaccgatctgtgcttcgtagtttctcagcctgcagtcaattgaattatcaaaggagatttaagatgtcccgtcgtttgtcaaacgatgaggctctgcaaattctggtatagaacatggtggttctattttttttgaaccagggttttctatttgttagtcaaccatcaattactgttcatgaatcatggaacatccatgcacacgaaagttcatgaatcatgaagtatccatgcacacgaaagtagatgtctagtgcagggtcagtgctcacagcttattggaagaatatacaatattttttttgtaaagttggcaacttggcattattgaaggcatttgcgttaggttagagttgctcggttggtcacatttcagttatggtactttcccccatgtggactatctttctg

SEQ ID NO: 147582 - DNA, 1883 bp, Zea Mays
cactatcgacccaggtggaaaaacagcagacaatccatgtaatagcacccaggaacgttgatatggaatgatcatccacttttgggaccaatgcaccttcatcggactattagctgccaaccaatccataccaatgatcatatcatatgaagccagatccaaaactctcaagtcagtgtcaaacacgcagtgttgaacggaccatctagcgccaactagctggcaagaacacttcaaacgattgccatccgctacctgaaccagcactgacttggccatatcagttacacctgataacctcgatgccacccgggatgcaatgaatgaatgagaactacctgaatcgatcagcatcaccacttcaatgccttgaatcagtccccgcaacttcagagtatggttcaactccaatcctttaacagcagcaatggagatggccaaacattcagtctctatgatctgatcctcgaccacaacatcctcaggaatggtgtcttcatccccttcatataattcccagagttcctgtagagcatgtaactggactgtgggaggacacttatgatcacgcgaccacttctccgcacaacgctggcacaaccctttagctcgacgataagcgcgcaaggcagcaagtttgtcatccaagacacgagcacgatgttgttcagccggctttgtttcttcgatcacagctccagtcttgtcgggtcgtgctgtcaagaaaggaggcactgaagatttgccatacccctttcctgacgacgcccattctggacgtcgatgctccaaacgtcggtctgacgtggccacctcttcctgcagcaaggcgagagcgcaagcagaatccaaggaagaaggccgttgaagaataatagcagcacgaatgtctgaacgaagaccatccacaaaacgttgcacaaaatagagaggatccacaggtcgcccgtacgacaccaacttgtctactaatgaagaaaactgatctacatattcagttactgtgccatgttgacgaatgcgaaacaattgtctaataaacaactcatgctcatcttttccaaaacgctctaaaagcacgcggcaaaaaacaggccaactagataagtgtgaatgttcgtccagagatgaaaaccaccgagcagcccccccaacaaaatgcatcgacgctaccctgatccataggtgcggttctacttcatacatgtcaaagtagtcatggctgcgacggatccataatttggggttttcgccatcaaacacaggaaaattcaacttaggcaaacgaccacgcatcgcgccccccatggttggatatgacagatcgcccacatgctgatggaattccgaagtatgcacagctggagaacgaggcaatgatgaacacatacccttgaccggggtatggaggagggtggtgaccgacccaaaaccatcctcccggtggctcgattcgacgcggtgcccatggggcctgttggctggaactccggcaggttgttgctcgacagccggtggagaaggagcgaggatgcccgccatagcggacgaattgtccactacagcacgctcccaatttttggagatcttgcccacctcgagtcgcaggtcatccatcatcccttccatgttcatccgccaatcttccagcacaccagtggcttgttctagagcccccacgcagcggtcttgtccagtggtgaactccgagaaggtcgcgttccaacgcgactcctgctcggccactctgcgatcccacttggagtcatgttcagagaaacgccgcgacaactcatccaggatgagttgagtgtctggattcatgagaacacgtcggaggcgagcacgggtaaagtaatgctgctggtcgccgcgatccagcg

SEQ ID NO: 147583 - DNA, 389 bp, Zea Mays
ctcagcagagggtcgcactctaaggcccaaattgctgtcagtcacgggtggattggacacaaaaagggtgaaatctttgggaggaggaaggttccaagccgagtatgcaacgggagcaccaacatttgaaactttacccctgaggatcatctcaagtcggcttaccaagtcaacagaaggaattctcctatcggtaacccgggttgagtcggctagcccttgatacagatatgccggataggccctgtcttttagcggctgaatgttcttgaaaacaaaatctgttaccacagcttcagcagtcagacctctctctttcagtaatccgacttcagtaagcaacatgcctgcctcggccacttcctgattcgtgggagactcagtccaac

SEQ ID NO: 147584 - DNA, 438 bp, Zea Mays
caccggagactgactggagaagtaacccgtacggacggtcctttcaacttcaatcctgctctcggtcggtctcgatggatcgatctttgttttctgctctcgatgttgtgtcgacgtgtgtgtgtgtgtgggtaagggcgtggcagtttttcgtaggacccggcgtttccgcctgggcgtgtgctgccctgcttagtcggtgcaagaaacaaagagaggggcgggcgggcggctacggttggctaggtgatgggagacagccaccgctcacccattttccagcgaatctgcagtcccaggatgacacgttgacatacgtgagcatcactaaagaaaaaataagctatgttcctgcaatgtaacaacgaagtggctgtagtttagtggtgagaattccacgttgtggccgtggagacctgggctcgaatcccagcagcc

SEQ ID NO: 147585 - DNA, 559 bp, Zea Mays
ctcctgcctcaacagatgccgttgtcagcaatgagtctgaaaagggggctatcgcgtctgcctctgtcaccgatggattgaacaaggaactcagaggtgagggctattcgtgagcgcttgtgtaggtcggtcgtcctctatagccgagcaccctccccacaggatgctatggacgaagagagatgatccattagcgattttgttcgagctggacatcataaccgagatcgaagagtgggcggtggtccaataaaaatggatgtcatgatgactctctagaatgaagctcttgccatggtccaggtacaatccctcgaccccctgcctctttgcccgttgactccttctgagctctttcgttcctcaggccctgaagaagaggagccaggggaagtctaccttcctccgttgttagagagaggtatggggttgtcttaccgagaaggaggcctagcatcgggaggcattgaagatgttgaagatggctcatcgtgttgccggcgacgctcgggacgcagcaataaccgctcttagacgcgtccataacgtagagaggagg

SEQ ID NO: 147586 - DNA, 283 bp, Zea Mays
aatctggaaactttttatctctgtcgcctgtgatgttctcaaactgtcatttcggcatgatctaccttcttcgtggtactcgaggtagcctcgtgtccagccttcttctgttccagttgactttaccggtttcagaactccagggcgtccatttacctcggctttgcatgatgtagtcttacaggtgtcattcactcctcactggagaggattttgcatgatcacatggcatctgattggcatgcactgcatttttattgtattaaattgctttgctgtgtgc

SEQ ID NO: 147587 - DNA, 390 bp, Zea Mays
gtttaatgcaacaacgtcagcacgatctacctccctagtaatctcgtgcaacaccatcacatgaagcatataaaggtcaacctccagtttatccaagagtatgtcgttgttgacaatgcccacgtccgaccacctcccagtttaccaatatccaccaagggccttctatctacggtgttctcagagttttgttccagtctcatcgtttgtaatggctatagttgcaactacaaggaatgttatagattgtgttacactaatataatagaccttggtccaacactccaacccatgtacaactctatatatataggggtgcatgcccaaattagggcttgggtttcactatcagactatcaaataataattctaagattcctagatcgttcc

SEQ ID NO: 147588 - DNA, 678 bp, Zea Mays
attgggacttccactaagacattgaccccttctcgatcgattatgcctcaacgatcgtcgatgagtccgatgcatattcgttgtttgttgcgtgagttgcttgcctcctacatgcccctttgtactctcctcctcggaagatgattgggactgtgatgaggcatacatcgactccactgaggaggaagtctcctctgaggagatcggaggagttggtagagatgtggctgcgtaacagcagctccaccaacgaggagcctgaggaggacctcgactgagatttcagcgacgatactagtgtggagagcttccttgacgtcgctgccgccaatgacggtggtgacaaggaggaactagagcgtaagcgtaggaggttgatcagatacctctgccttttatagataagatttcttatatagggtccccttgtagtcctgctccttctcgatgaaataaataaaacttttggtcaatctgttctatttgtgcttccctgtgcttgatatattttggccaatctacctgtgatgttcatgttccctgttcttgatgcatttgaatgacctcctcaccattcccattattattagaatgtttcggtagcgtcctattagcccatgaaaaacccccatcttcgtcatctctcctatggcgacggtactcttagctgactgtcat

SEQ ID NO: 147589 - DNA, 372 bp, Zea Mays
ctcgaccttcgaaggccaaggtcattgcatcatcttcggcccttgtgtaggccccaagcaattcgtcactagttgcctcaatactgctcaaccactcatcatttggctcatcaaactcgcctctatatctgaaggtatattttagatagaccaggccaccctgactagacccggcagcagcttcctttggcatctcccactcactcacgagcggccatactctgtaggcgatgtgttcttgaaccaaatctcttgtgccaataaaagtgcacacaatgttgaagcttctctggcatgcttctatatcattaccaagagcaatggctagcctcctgatgccgaagcgagaccaaatggggcgctgaatgatcc

SEQ ID NO: 147590 - DNA, 469 bp, Zea Mays
tgaggaagagaggaagctgcacactgacgcaggcggaggaggacccagtcgcccacttggtagatcacctggcgatgtccggcgtcgtagtggcgcttctgaacctgttgtgcctgctctagccgagagcgaatgtcagcgaggaactcgtcgcactccgctatgctccgggcgacagcagcgaccctcgtgtcgcctggctcgtacgatcggattgacggtggatcgcgaccgtagacgacacggaacggcgtgtcgtgcagggacgtctggtaggcggtattgaagacgaactccgcccacagaagccaacgtagccattgtcgcggcctgtcacctgtaaggcagcggaggtacataatgatgacccggttagccacctcggactgtccatccgactgagggtggaatgccgtagtcatgtggagcttggtccccatcagacgcatgagctcgcgccagaatgttg

SEQ ID NO: 147591 - DNA, 446 bp, Zea Mays
agttcctccaacatgaatggatccaaacggctcattagctgaagatgcctaaactttttggtacattttgacacaaccttagtcgctgtatacccaaaaagaaatgaattcaactcaatgtagtgctgaggaagtctttgtgctcgacagaacacgcacataaggagtctacactaacctgtagcaatcaagcaccttggtacacattgaagttttaactaaaatttcttttgtatatttgcttccaagagagttcatgtgtcttccggcaggaaagttgagaggaaattcatgattagtatttccgtatgggacaactacaaaaattttcaggtctccctgtattttactcttgcaatcctctcgtccatgcctacctaccacctctccatcttccctctagcggcttgggcaaggaaacgtattggcaagatccgtcgctcctt

SEQ ID NO: 147592 - DNA, 337 bp, Zea Mays
ggcgaacgtgccaggaccgttggattgtgcgtgtgcgggcgagatttagggtggcttaccgattcgcttgcaacgttggatcgacgatggatggataggattagagctccatttcattaaatcttggtcgtcgatctccgatcgggcggtgggtatcgtgtaccgcttcagtgaagattagatctaatctgcgccctagaattctaatcgaacggcccacgttagtccataccccttcgcgggtcagatttattaaagagaccctggaccttttggaaatagaacccgccatccagagcacagcgctctgagtctcgggttatttgttaaacagccc

SEQ ID NO: 147593 - DNA, 699 bp, Zea Mays
gccgaatcctccactccttggcccaagtctcatctggggcggcccatgcaccgcgtcaccgactagtggggccaggtggccagcctcctaacgccttgggtcgcgggactgcctgagttcgtggccgacccgtgggcccaccttgctattggctcttgcatggctgaccgcatctccccgctgagtcgtggggcccaacggtcgggttcttcctcttgctcagttcgttggaggattacaacaaccccttgatcccgtcgtaacaacctggaccgaatctttcgccttttgaccgagctgcaagtatatagactacgtgaccatcgttccttatccgtcttgcccaaagcatcgccatgtgcggggacccgagagagcgcagagaaggtgatgtgtgtaagcatgcaaccgcgggtgattcctgccagggctgccggtctgaccccggtgactgtcagagaggaagcggagtgcatggggaagtcgtgcgggggaagcttcaagcacaagatcgattggagcgccggtgatttctcaccggaggtgtgattcggtcgcggatgcctgcgtcgtgaccagcctcattgtggtactcgctgccggtaagccatccctctgcgtattcgccttaatcccatctccctatttctggtattggtgttcagatttgggacacttgcgctccggctggccgtgcgc

SEQ ID NO: 147594 - DNA, 301 bp, Zea Mays
tgggagtgatctttagtgatttgcatagagtttttgcatctagtgatactagtgatcatattgagatgcgagaatcttattactcttggtggttgttgccacctatatggcttcgagatagcggaggatcattgaaagatttttgtgattgttgttgactccgatcatcatattgtaaggggttttgtggtcaaccccacgtgagattcgcaaacatcctagtgatatcatggcttgctggagtgccttgttagagtaatgcttacgccaccctttataggcttggcttgttatacgaatt

SEQ ID NO: 147595 - DNA, 1439 bp, Zea Mays
gcacgcggcaaggcgttgctcggttccgtgtgcccagctagaggggtggcggccgacgcagctttgttggtgttgtggcagccggcgtgtcgatgcctctcttgaggggtttgtgtgagatgccaacgcagcggcgacagtggaggttgcatgctttgccttggggtcctagcctggcaatgtgttgggagagatcttgggcgaaagacttgacgacaatgatgcctgtgggcgccgcttcccatgttgagggtgtcgcattccccagcactatctgtgaaacccgtggccgcgcggcgcgtcgccgtcgacgtgagcgatcacggtgatcaccgaagagaactagaggacgcaaggtaagtggttggatttgtttttgtctattatttctttcgtgaaaagcaagtctgcagtttacctcaccttaaacgatctagtcacgcaggccaacatggccaggccgacacggccaccatcacacaccaacggcccacacggcccaccacacccagcaattcaaaaaatgaaaaatactacttcctcccgcgtccactctcgacgcctgcatccatcacgcgcgcaccacagtgctgtcatcttccccaccttcaagagttgcattaggggtatgcagtgatcaaattgcctcattggtggtagatgtgtaggaacattaaacaattcagcaaactcttgcagcagcaaactgaatatcagcctcattaacttgactgccagaatcagcagtggattccactagcaccatggcccaaatatcatgtccagcaagccatttctgcacttgaagtgctgatacctcctgaatggttgaacccgggtggacatcatccccatataaggtcacctcctgtccaccatcttgaaactgcagaaccttgtgtacccaatcacattccatagggctatgttgcatcaaccaatcataacccaatatagcatcaaaagcttttaaatgcaatactctcatgtcagtatgatagaaatgaccatgagaccaccattcaacatttctaaccatagagttgcaaatcattttgtgtccactggccaccttcacttgtacagttgggcactcttccacctgcaactgtaattgtttagtcatgtgttcactgatgaaagtggaggaactgcctgaatccaccaacattagcatcacttgtttgcccacaatagacctcaccctcatactgtaaatactgtcagaacctgatagggcctgaaaggacagatgacagcatacctctctttgttcatcttcttgttccaacgtctgtaaaacttcatcagccaacacctctggttcctcctcatccaccacaacatttaactgaacttgccctcttttggcacatttgagaatgtgaccaggctcaaatttctctccacatgcataacaaagtgaaagggaaatgtgc

SEQ ID NO: 147596 - DNA, 413 bp, Zea Mays
tgttttgactaagtaacagaaacacttgttcgagatgtgtaacatggtataccagagtggcactatacatcggcacatcatctatgaacactaccacgtatttccgcaaccaatggagacaagacatggttcatgaagtcctgaaaggtggtaggggctcatgttaggcaaagacattcatgcgtttggaatgttgttttatactcatctccctccttgatcctaaactggtgataaccttagcgatgatcaagtttagagaaaatggttgcaccactgagttcatagatgatttcatcaaatataggcatggggtaacggttcttgacagtgtacgtgttaagacgcctatagtccacacataccctccactccccgtttttttctttaccaataataccagtgaggcaaat

SEQ ID NO: 147597 - DNA, 621 bp, Zea Mays
ttatttttgacacttcgcagtggcattactagtgagagagctgttggccaggttatctgatcacattgacttgagttgtgggtcacttgaaacaggggcagtagctcccaggcacatttttgtcaaggttcatagcaagttgagtccatcactcctaacagcagcgggtacctccaaattttagtgtattcagctacacatttgtacaggctgtctaatgatgcatttaattacttataccttattgctgttatagctttgtatgaaccaaaaccaatacacaaacctatttctttttcttagtttgagctgctacagtttttttttttggcatagaccaagttctctgcccatctgcacattctagcttcagtggacaagggtgaactcttgaattgttaagtaatattctatgtctatggtgtaatatgttatttttctctttctaagttgtatggttcatttaaaatgttacaatatgtgctgcattagttgggtatgcacacaggcttaatgtattttctttttggatgctcctgtcctagctttggctgagttttgtatcactaatattctgctagttatgaaaaactcactgagtaggctggtgctacgtattta

SEQ ID NO: 147598 - DNA, 832 bp, Zea Mays
ggccgtagtagcaagcttgtggtgcagcgcctggacagagtgcataggggccgtaggcatggcccaagccttcgtgacctcgtcttgaaacccaggaagtttgatccagaaattctcgaaacggaacggacgcggtcggcggggcccagcaagactagagagaagtagaggacagtgatctgagattgaggtggctagtgcttgtagaccatgagaatcaaaggagagatcccagctttcattacaaaagactctatccagcttgaccaaagtaggccgacgacgctcattgctccaagtgaaatttcggttttgaaggcggatttcacgaagctcacaaaaatttaacgttgtccgaaatagactcatttgacgaaggtttaagttccgattgttcttatcccgagcacggtaaatgaggttaaaatcaccaaggactaaccacttctggccatccggaggcttgaggcgacgcagctcacgaaggaatgtcagtttttggttgcggcgtgtaggtccgtacaccacggtaatcaggaaagaggccccggaggtcttgattgtaaccgtagccgagaccgagaaacgcttgatagtaatgtcggtgaggtcaataaatgtgtcgttccagagtagtaggatcccacccttggtcccattagctggtttgtaagcgaagctgttcagcttgtggcctcccaaaaacgcagcaagcatggcatcaatatttgcaagttcaacgtattggtaaatgtttggtgtagtgcgagcataatcgagaaccaaactgaaattctgattcccaaacttttcgagtaccgaaaatattctt

SEQ ID NO: 147599 - DNA, 439 bp, Zea Mays
gccggcgcgcgcctcctgcgccatttcagcaactggctctttccgtcgtcgcagggatgacctcatcagcaaggcggtggtttgctcattcgatgggaacaaccatgaggttgacatcctttcggcaggagacatgctgcggcagaagtttgatcttcgccatggtcagtatcaactcgttaagcattacccagagcagttttttatagtctttcctgatgcaagaacaaaacaatgggcacttgatagaagatcggtttcatatcgtgggcgagagtttcatttcggtgactggtccgaggagagctatgctagaaagacaagctgggagtttagagttaaggttcgggttgaagggatccctgtccactgctggggtgaagaggtggcatccagggccttgggcagatgttgcaccattcactatgtccaggagcgc

SEQ ID NO: 147600 - DNA, 746 bp, Zea Mays
cgccaacatctgagaccaccgccaaccatcagcagaggagcggcagcaagtgccaccacgagtccgtcacccagaaggtgtatgcggcagagcctttcggctcgttggacccctcgtggttgaaaatcccaatcgcgttcgaccgacgcgatcacctaggcagggtcctgcatcccggaacctagtcccttgtcgtcgaggcaatcgtcggcccgaagcgtctctccaaagtcctcatggatggggtgagcggtctcaacatcatgtatgttgatactttcgatgccttggggattgcacgccccgcgctacgccccaacaccgcgccgattcacgacatcatgcccgggcacgacactcgcccgctcgggcggatcattccatctgttacgttctgagacccctctaatttccgcaccgagcagatgcagttcgaggtgatgaacttccctggagccgacttgcaggctggatcggacgctcctaaggctggttccgatacattcaaatccgcaacgttttcgcttgtcgacgacgctcctaagggtcccaatcgacgacgctgacccctccaagcacgttcgaattggggcaacactccccgacaaacaagaaagcacccttgtcgatttccttcgggctaatcgcgacgttttcgcttgtaagcccgcggatatgccggggatccctagggaggtcgccgaacactccctgaatatccaacctatggccaggccagtcaccca

SEQ ID NO: 147601 - DNA, 658 bp, Zea Mays
caagtggtaactgaggatccatatggttcaattccatatgttgtaggacgtacaacctcaggggtatatactgggtcctccatggcgatggactcctgattcaaagtgtcaccctgtagtgctctacgttttctgctgcactctttgttagcatctttccgtcttggtgtcttattatacaacctaaggcgtacatgtctagactccctctcgacgggggtcatgtttttgtaccgctcactaaagtaggcggcccttttcatagtatgcttaggtatgttatcaacagtttcatgcacacaacctggaataaggcatgtctatgtttaacgatttgaaacctgcagtttttttgcatatttagccaagcgaacaatcatgtacctggtgtcagaaggtctttacttgtgacaatgttgtttgcctggaatgtctcattcctatgcaaccaatcgctgtcatcatatgcatccagatttacttgttcatctccacctacatttagcattttagcataagtaaagagttaacataatagatagtgcaaatgtgacaaaaaaattgtgattgttatacctgcaatgtcttgtgttgacaaatttgtgaaatcaatggtgctacagtcatctggaaagctaaccacctcacatgcctggtc

SEQ ID NO: 147602 - DNA, 383 bp, Zea Mays
caataaatctgtgccttttaaaaaagagaacttttgaactcaaaatttttccaagagatgcatgttaaaaattgtttcaataccttgttaaaacagacaataagtggaagcggttactatgagagtgttaacactagataaaaagctagagttgagttatggccctcttgataagttgtaacttgtaaggtaatgatgatgaagggtacaactataatttccgcacactacctattcctgttgtctgttcagggggaagcaaagtggcaaaagaggatcatatttaactccacataatttgaagcagacgttcccacaagttttaagggattaaagtgggccaggtcaattcaaatagaaaccatttctttctttcgttttcg

SEQ ID NO: 147603 - DNA, 768 bp, Zea Mays
atgttgtttgaactgttacactaataattctttgctaattcttaggttggagactttgggttgtcaaggatcaagcgcaacactcaggtttctggtggtgtctgtggcactcttccatggatggcaccagagctactgaatggcagcagcaacaaagtctctgagaaagcaagtttttttttccgaccatactcctgatagctctttgcatatggaaccagtggcgcgggctcctcaggccagcctcctctctcatccaactgcaggtaaatttggcttagtcgttttgattggagagaagtggatttatgtccgagcgagaggacaggggcgaggggcacgctaggagacctagccggtccagcagcttcggcggccaccgtggaggcggagtcggtggcgcaggcaagggcggcgcgggctcctcaggccagcctcctctctcatccaaccgcaggtaaataactgcccctgattacagcgacaaaaaaccgcaactgcagacaaataagctacactgatgcaacgacagtcaccgtagcatgtttaattttaatacaggaccttgttttttctcatctcttttttcctgtgtgcttcagtgttcagtgtatgcagcccctgattacaacaatttatcagaggttggattctgattgccctctgcctctgcctcgcatgattggttgatctcgccagggttgatagggttttgatgagaactttggatcttgattgcagcattagaaagcctggcaatggccacgg

SEQ ID NO: 147604 - DNA, 440 bp, Zea Mays
tttgatgggcaactagttcttgctttctttctttctaattccccgtgtaaagaacttccatggttctatgaaattgtactgcgctggagcctggaatagagtgttcttatctgttgggtgaataagtgaatgtgtatactttgttgttatctttggtgttacgataatattatgaatgttttagtaattccttgatgaatgtgtttactttgctgtcatctttttgtgatgattgtgttattaatgacacagaactgtttagttgtttatgtgaagtgtaaacatccaaactgcacaccccaagatggatatgcatgcccaatcttctattaggtgaactcttggtagtaattctgacttgtgtgtactttactgtgatggtatctatcatttcatcatctaccttaagttttttacatcgtagctaaaatggaagtata

SEQ ID NO: 147605 - DNA, 425 bp, Zea Mays
caacctttcggaaaaatggtcgggttcgtggatgaagcaatggttttttgttaagaatgatttgagtgtgagggaggatgtgaaggatgtaatctagcgccccattcgatcgcgctttggcattagaagaccttcgatcacaggtagtaataaagctcaagcatgtctgatggccttcaacacagtgtgcatctatattggtactagagatttagtccaggagcacatagctttcaaggtttggccacttgttaattattgggagatgtcgaaggaaaccgctgttggttccagtgaaggcgacctggtttatttgaaatatacataccgctacagaagtcagtttcgggagccaaatgacgaatggctcaaggctattgaggcgaccgctgatggtttgttgggggtttatacaaaggctgaag

SEQ ID NO: 147606 - DNA, 516 bp, Zea Mays
tgtagttggctccatatattttcccttacaagcttgagatgttttgagtccggatgaactgatccttgtttcaaagttgtagtctgcccgctccggcgccatggctgcggcctccgaccgtggtgaggtcgacactgcacggcccttccggtccgtcaaggaggccgtagccgtgttcggacaccgcatacttgtcggcaacaaccattccagtcacagcagcactgcggccgccgccattgccagcccaagcgctagtgccaatgccactggcgttgctgccaccccgagtgccaagcatgaagcaagcagtagcagcagcaccatgaccttctctcccacaccaatggccgagagcgaggcggagattatacctgccactgtgcccttgtactcggcgccatcctcgccgccatctctcgcgtcgtcaccttcgccggtcaagccgtgcagcggtcaccgcggcgacgagtcagccggtggtctggtgatcgtgcgctcaatccagaagctgga

SEQ ID NO: 147607 - DNA, 508 bp, Zea Mays
gatgggatcatagtttgaagtgttttttcaatcttatctgcatctgatggttccttaccgcagaaacgcaagcgagcacagatcttatgaacatcatggttgtaatcaccaatagacttatagtcttgcagacgaatatgggtccattcatgattcgcctctggtaagattacaaccttttgctgctcatatctgtttttaagagataaccataatacatttggctcttcttccatcacatattctgctttcagatcaggatggaggtgatgtcttataatgtacaaagcgttgtacttataagcatcatgcagtgggtcaaccctctcgttgggagggagtaatgcactcagaatattctttgaggctaagctgatcttgatatccaacgcccaggtaggatagttgtgaccatcaagagcaagttcttcgaactcgcgggccatgatcctacacaagcaaccagagaattttgttaagaaatcatcatgggtgtgttgtacacaac

SEQ ID NO: 147608 - DNA, 476 bp, Zea Mays
ggacaatggaatacacgaacaaatatttggtgctgcaagcggcagcttttctggtgtctctctgttcattataaagaaattacatgcagtcatatatggttataaattaactgagacaatcacggcatgcccaagatcggttgttgccatcccaacagcctagacatgccgcctgccatacttagccactaatcaatacaaactaccaaatatagttagcgggtgctcagggtttattctaacaatctcctcctaagcccttgagcaactactataatttcttcatgccgatcccatcgcggagtccttgaaacctgcttcgtccgagcgcctttgtcaggagatcacccagctgaaattcagtaccaatgaactcgacgtcgatcagcttcctgtcgcagcattcccggataaaatggaacttgatatctatgtgtttactccggccatggtgcatagggttcttcatcaaggca

SEQ ID NO: 147609 - DNA, 278 bp, Zea Mays
gtccagtttataacacacatgctacatagttgtccctcacatgttcgcccttgacatgatgaccataacaacacagttagagcaaatataataagagcctataagaacaagtttaataatatagtcaacagctgacggtctttacaacctagtttttaactcatgtatataatggttagctcttcactattaatgaatgacccacttacctctgtcacaatatttattggttcttgtgtcgaagccagttttaaatttacattctatttttgctcgct

SEQ ID NO: 147610 - DNA, 344 bp, Zea Mays
tcttgatcaccacgtaattctcaccgattggacacgatcatagaataccacacaagcataccagacaagcacatgcatagcatacacatatacatctatattagaacagtataccaatcaatgaaaacacaagatgaaaatattgtaaaactaacctatgcatcgctacgatcacgtggataggtcgttcactcaaaacggagctacggttgaaaatgtatgattttcctaagattttcctttataagataaatcaaaggaacactataaactttatcatataaactattttagagaatattcagattagattaatgagatttaaacttgaacaagtgaaaact

SEQ ID NO: 147611 - DNA, 379 bp, Zea Mays
ttgtcacctgggtgccagaccaggtagagagctagagacgattgagcacttggattgttttggttaactgttgcagcggtacagatcaagagttgattccagtgttcggtgcgctggtgatgcacctctgcaccggctttggccccgaggcgctaccggttgggatacggtggaccgtggacgagagggatccggggtgcctgtatggagatctggttgaactgtcgtgctagggattcttcagtttcattgtacatccactgctaggcgaggcacgatgtcgacgtgctggcgtgctgctacggaaggtgttagatatatgcaacaatctgatattccatactaccttaaccatgtggaggtaaggatagattttcta

SEQ ID NO: 147612 - DNA, 2064 bp, Zea Mays
gtgctatactctctgatcttttctttaaggccaacaattgaaagctcctttgtccaatgggccagaagtgtctttggagcaacaatgagcaccctcttgactagacgagaatgaaacagtccagccaaaaatgcagcaacctgcagcggaaataaggttgcatgattacattaatggatttcttagctaaatgaacaggtggcaaaggaggtgaaatcatgaacagatccataatatgaagccaactgggaaacgactagcttatagagccaacaaaagaggtctatgcttctatctgaaagaaactgatttcagattcataagtaaatacagaaggaaaaaatacagaacaatgtgggtgtgcatgttcacacttatatagatcattacaataacaaaaaactatccatcggaaagtaaacaaaagcctctcctgcccctacactaattaagtaaacaagccccaataaacagttacaaccctgagttaaaagaagggcaccaactactatgggcacacagcaaagtagcgtaagtagtaacactaaaacctctgtaagccttaatacaatcgggaaaggctcaagaaaagggcaagctgagcatagcaaacctgcatcgtcttgccaagacccatgtcatcccctaggattcctcctgttcccctgcagtgcagaacccagagccatcggaggccctcgcgctggtgggcgaaaagcatcttgaatatctttcctgggagcttgtatggcttggatgttgcagcagttccagttggatccatcttgaagtcctctgtcttctcccatccaacatcctcagcattgttctccacagctccaaggttctccttctcctgacccagctcatcgtcgctgacaccatggttcctgaatgttggggtgttgggtggtctccttgtgaatcccttgcttcttagctgcttaacagcataatctgttcttgttccttggtcctcctcgcagtcgtcataatcagaatcggaataagaatcaacaaaggatgaggcctttgataccctatttagcctcccaacatccttggtggtccctttgttcttccccttgccacggacgtcatcacaggcataatgggtacaggctgaggagactaaatcagtttcgatcttgacctcggagcgtctggtgggagccctagcttcatcagagctagaaatttgaaggggtgaggaggcaccggcgtgagcatccacatcatctgggctatggtcatctaggtcgtcgtccacggtgatggcgcacggcaaaggggtgagctgttgtgtcctggacctcgcggcggtgctgggcttctggacggatagagagtcaaatcgtgtggtgaggtcgtctaggatgtcgagtatgctttcaccgtcgtcctggttgtcccactccgcctcctcttcatccactcgctgagtggcggtggtggtggtggcaagcttgcataggcggcggcggccggcgagcttgaccttctcgacttgttcttcggcggcggcttttgcaaaggaagaaattagaaccattaagtagattgaagggcgaggaaaaacaatgaagcaagaagagacgggcgtacagtacctgggggcggaggcggtggcggattggggctagggttagggttttgggtggggcgctggaggctgcgggtgaagcggaggaggtggtcgttgaggccgttcggcgtaggggcggcggcagggagatggcgatccttggggacggcggtgacgggttcatcgatgtcgtcgtcgtcgagatcgccgcagaggtcgaagggagggggagacgccatctagccgcggagacgcccaagaggcaagaggcaaggggacggaatcgaatcgaggatgcgcagtggggatgggtgctcttcctcgtcggttcacacctctctcacttgccgaggagaggaaggagaggcagcagcgagcgtgtgtgactctctagtctctacgactctacctccaccaacattgcggttgtagttgcagttcccaggaaagaagcgcggagggggacgagcgaatgggat

SEQ ID NO: 147613 - DNA, 783 bp, Zea Mays
tgattcacaagatgaatttaatggttgtgcccattcaagttgaagacatcctattcaacattgatggaaaagaaaaaatggatgttttggatacgacaaagattgtcaaaacaagctcacaccaagaacaagaaaaagaggtgctaggtttaagctctaatatcaattaagacttgagatgattcatcaagtgaagatgaaacccaacatccactagtttggcagaaccacagagaagggggagatggggggagtagaaggaaccttgagatgacgagctcatctcctcaatggtgcaggtctgctggagcttgggaaggggtagggtggagactggagactgcagctggtgaaccttgagacaaccgccgcaggtggagactgcagcaggcgagcagggaaggggcagggtggtgtagccgttgatgatgtagccgccggtgagctataggtctgaaggggcagccattggtgagctgtaggtctgaaggggtagccaccgacgaccaattgtgaataagggcaagggctggaacagtcgggttggcaagagaggagagtaggagacgtagtgcactgtttggcggctaggtattacagagaagagtgggtagtctaaagtatactgtagtgggctaaaaatggcccaataacaaaaccctagccaagacgaccaggaaacagtaatcgggtgattagtcggacgaccaagacgaccagcctatctagtcgagtcgtccagctaatcgagcccaaatagccgaccagcccggacgacttgaa

SEQ ID NO: 147614 - DNA, 491 bp, Zea Mays
tggagcactatttggaagagggttgtgttgaacatgttgataggctcagccctgaatggagggtttggtataccaccaactcggttattgtggcatggttgttagcatccatgtatttgtctgtgagtaagatggttgaagccatgcgcactgctgcacaaatttggaagaccttgagcaatatgtattcaagaaaggggaatgtgatgatgatgatggaaatccaaagtaaggcagatgcagtgaaacagacagggagaccagtggaacaatatgctagtgaacttcagtacttgtggggtgaactagatcattacgctcctctacaaatggtttgtcctcaggatgcacaggttgtccacaagtggatagaggacaggagagtgactcactttctaaagaatctggatccagagtttgagagcaggagagctgccttttgtcaccaagagagtcttcctaccatggatgaggctgtgtcagcaatgatt

SEQ ID NO: 147615 - DNA, 1012 bp, Zea Mays
tctaaatggacttggaccacacttgccaccatgcttgttgcgcttggcatcatggcctttagagtccacaatcgcttactgttggggtttctaggtaggcggtgtagcaggggcagaaatgatagttggggagggtgcgagtccattggggcctgtggttgtggtgagcgccacggtgtgagctatcttcgtcatagccatctcctcgggctgtaggtcgtgcctcgtagaaatgtagggagggggttggtcctccgaagatgaaaactgagggcagtgaagtgctcgttgaagccacgaatgatgctggggatgagcgtgcattcagtgatgggcttgctgggctcgctgagcttgcagaggtcctatgtcatgcacttggagcgtcggtagtactcggagaccgtgatgtaaccttgggaggagcaaaattcttggttggcgaagagcacacatgtcatgcggttcccaaggaattatgaattgatggcgagctaggtggcgtgggtaccagcgccatgctcggagatagcgtcgccaaggtcattggaggtgctgtcggtgagccacgttcacatgacaaagtccatgcacgtccaattgggagattggggcgcgactgtggcagagagaacgtgctgctgcagggaaaacttgtcgacaatgaggaggaagaaatcctgccatctcgcaaggaaggcggagttgaggccgagggtgaggggcatgaggacacatatattttgcacgacaacttcctatgcatgtagattgaggagtgctgtcgcctcgtggtgaaaaagggccttgaggagaggggggtcgctggcgtgagtgccagtgttggtgacgatgttgtcgatggcatcatcatcgtcctgtttgggctcgactgtcgtgtgctcacgagtagcgaggttgagggtggcccgaaggcacgcgtcagccgcattgcgcttttgctgggcaagccttgctctcggcttcttgggcgttgtgacaaccctcccaa

SEQ ID NO: 147616 - DNA, 1028 bp, Zea Mays
gagagaaaactggagagacctaaacctagctggggtaccaagttggaatgagtgaaacccctaaccctaatccaggattggtatatattatatagaggagttaggtgggccaagtccattacaacgggggtaatcaggtaaatacaagagaaccctaacctaaccctaaacaggagtctaacacatatgggcaaggatgacctacggaggttatagaagtacgaccactatcagatatccttgcctaacaagaaaggcaaccaagctacaaagagtgcatgagctcaaggctgggcccaatatacccgtgaacctaaaagggcccagaaaaagcatctgtctaacagtgatatccagaatgagttagtttctctatatccatgatgttgtcacagtaacattgcagttctcaccatgtgctcttttgattttcatgcataagtacattgtacatatgcagaacttgtttatgtgaattattgtggatgtttggagactgccaggaccaactgcctgaatttcatgttgtcatgtcaagatgctttgtgcatctcgtgagttgttgaagtgcaaaaagttattagctttgctcttcatcttctgcaaccagaagcaagcccaacctcactagacaaaggcattttcttgaaaatatatgctacatcaagttgaaattagttgatgttttcgacctggaggtttgcactactggcaaatcattttgggttgttggaatgtcagcttttatcagctagtgtgcatactttttttctcgaatgcgcaggaggactgcaccattttataacttaagaagagaggatacatggtcatgagaagaccaaaaatacaaaagaaaagaaatacaaaagaaaaaactaaggactccttatggaggccagaaacgagcatacataaactggtccataggaacacagccaccaaccaggagagacaaagatgcctccatccctcaattagcaaggagagggggctgccaggtaggataatcccttggcaccagcagccac

SEQ ID NO: 147617 - DNA, 440 bp, Zea Mays
gagcaatctggctcctaggttatttgccatcgttcctaaaaggatttctaataagagaactgtcctcgaggctctaaccaacagaaaatggatatctgatataaagggtgccctgtctgttggagctttagtggattacctaaacctttgggagcttctatcagaaatagtgctgcagcctgaagtggaagataaacatgtatttagtattgctgcagatggcaaatattcagctaagttggcttatggaggtctttttgctggttcaatattctttggtcattaccatctagtttggaaaacctgggtacctccaaagtatcagtttttcctttggctggctgcaaataagagatgctggaccgctgataggcttgctaagagaggtttggatcacccagctaggtgtcccttatgtgattaggaagctaaaactcttg

SEQ ID NO: 147618 - DNA, 415 bp, Zea Mays
gggttatgtcgagcggctggagcgcgtcgtgccgctccgcgacggcgtggtgcacacggcgctcgacatcggatgcggggtgtgttgtactcgcatcgcatgaaagcttgccgattcagaaactactcgttggaagtctctctgttcacgtgtcgatgtgtgtccctgacaggtcgcgagctttggggactatctgctcaactatggcgtactgaccatgtccattgctccgagggatagatttgaaccgcaggtgcagctcgccttggagcgtggactgcctgcaatgatcggagcgcttgttgcccacaggctaccgtatccatcgaggtccttcgacatggtgcactgtgcggactgccgtgtcccatggactgctcatggtaggacatgcaagacgtcatgctattcctga

SEQ ID NO: 147619 - DNA, 418 bp, Zea Mays
cgcggcgcgtgcgtgcggccccgcgcgcgtgcccgcgtaatgcgcagtgccttggcacggccgttgtgccttcgtctacccccccccccccgtatcctatgcgcgctaatcacgttgtttatattaataagataggagtctcaatttggaaattggttacgttagttaatttgtatagctaatcgtctatctcattcaatgttaatctactaaaagtggtcacgtttacattagtgcatgtagctaatccttttgttaaccagttggaactagagcacgtaacgtctagttattcgcctacccgtaacgcgcctcgagcataagctttaaccctcgcgagacctttccccgtctctttctaaccattgtaaattcattatcgtatgtgatattctatgcatgtttaatctacttgttc

SEQ ID NO: 147620 - DNA, 763 bp, Zea Mays
accattctggattaaatcttcgacggtcacttccaatgtccctatatggatactcaaaattaggtggtggtctataaggtcctctagttaaatatcttctcctaatctcatcttgcttcttaggatttttagtgtactctgtaattctcttccgaccagctgggtcataaggcaattcatctaaatcaatttctctttgatattgggcagaagactttggaacgctagcagcaacattttcttgcttcaatctaaggatcgatcttgaagtatctgttgtattatcatctaaatctgatgatctatttcttttctgaaaataacgttccatgagatgccctagattattcaaagtttacatggaaaaaataagagtatcaaactcagaccaatttcaaacttaaagccctaatctagaatgagtctacgagagctgattagtagataaggtgatttaaacaattaaacagagggatcacacctgattttaggaaatcagaagcagctaggtggtactggcaagtggcaacagtcggcggcggaaggaagaaaataagcggcgtccgacgatgaaccagaaccaagaagttgaagcgacgaaaactggagaggagcgagactgcgagagggtgcggtcacctccggctgaaatactgaatttacttgggctgcataactagtggcctattaacctattaaattatatgaatgcacgtcggagtggccgagtgggcttagcttttgcagcccaaacaggactggc

SEQ ID NO: 147621 - DNA, 1095 bp, Zea Mays
ctttccttgctttattagcccacaggccggttacactgattttttttttctctcgcaaagtcacacacacggctgacgacgttcctgaacagcacacacgtcagcacagtctcttttggcagcccatgacgccacggtgagctctgcatcaggtctcccttggcctttggctgagaccggtcctctgatagttgacctcctaacggaaagtagccgagagccttgtttgtcaaatagtgcactggcagccaccccacccctgctgtgcctggtgctgagttgaacgaagcaagtggcgagtggtttgtgtgtgcgctgcgcaccaccagcgttcatcactggctaagccacatgcagacattccctttggttctgttatgacatttcctttttcatcagcatcacactgagcacatactacatacaacttgcagggatttgttcttttttttttttgcacggcatggttgattggttggttgtacagcattagaattgcgtccctgatatattacctacacgcgtggcggaaaccactgcacacgcactgacgcacactggtgttccggatactttggatggtggggttcagctactacagagatgacgaagggcggcgaccactgctttttatttgcagggttggttcctgtgtgctggatggagggagcagagaccaaactaactaacctgcctttgccgtaaaagcctccaataattgagggggggcatccaatccaatccaatccaacccctcttttcattcttttggccagccaaagcccatgacgagaggagcccctgccccaccacacacacacgctatgtacgatggctgatgagccgatcgccgtcactgtcgccacactcacctgtttattaacctctgctactgagtaatggctgtccttgtcgtcctgtcctgtcctgccaatcaagctaagggtagagatgcatacttggccggatagcgccaccgccggtcgtcgtcggccggtggtgcgtacctggccgagctaggccagtcatggtgcggctagctaccttaccggcctatcgcgagtagatcggcatgcacacgagaccttatcctgc

SEQ ID NO: 147622 - DNA, 953 bp, Zea Mays
tttgaagttatcacaggcaaatgatttcaaattatagtctgagaaacccatttgcttagagaacatagagaaacggaagaccctatcagataattgtaaaaccttgaaggcattcacataaccaccaataaccgattagagaatataacccacattttgaatagaaagccgaagtttgcatcttccaatcgataaatcaagatagaactctgacagatttttacccgagagacagttgattggaagtcccaaatcgaaccagatggaagcttagaggtgaagacttgattgagaatccggttttccaatggcctcatcaactgccgccatcttccttccacactcgtcgtcctcagttttatggatttggaattgctgtgtagccaaacaattcaatatggcctatgataaacctcaccactagtgaaattgttccactccatagtaactccattcacttttttagtgccaaataggctcaaaatcgcctagatgaggttagacttatatgccataaaacgaaatgtaaggaatcgctcaaaataggctcaaagtaacctcatcatgaaaactagtttgatcatcttggctcaaatcatcacatgaggttgctacatcaatcttaataatagggttaatagcctcatgtgtattgcaagataaaagttcattttcaacaagaagattatcatgatcaaatttaatcttagtatagtcttccttaatttttactagtctatgtttcaactccctatttgcttcatttaacttgtcatacttatccttagcatcttttaggaaggatgtaagctcatttacagtggatgataaagttttgttttcttctttcatttcatcactagctttcataactatgtcatatttggcatttaaaaattcattttcatctttcaacttatcacatttagcttttgacttcctaatgatttgag

SEQ ID NO: 147623 - DNA, 510 bp, Zea Mays
tagaagatgaggcatgaattttagctgaaatcagtgtcctatcaaaatacagagtgcaagattgagttaatgacacttccaatgctgattaaaactaatttatgttcctattttttccctttaaaaacaaatgtaggtctaactaacttgatggaatggactcattagtatatactgattactgagaagagttctccgtttaattaattttggctgtcaaaatcgttttctttgttcgacgcggtgctgccctgttggtcggcaacaccaaagtacaggctagatgggtgaggcatctttggaaggtgacattgatatttgcagcctgttgttgttgttgtaatgattgagacagatgtatttcagaccagttttagtggtccacaggtcaattcgtacttttcatagctagcgtgtccacttcttttaagggagattcaatacaattgttctaatactgttaggttttaaccatagctcatatgccattctgcatatcaactattgtat

SEQ ID NO: 147624 - DNA, 662 bp, Zea Mays
taaacttaatcgctttgctggcgaggaagtgatccgagagccgaaggaggatgaagttgttgtatttaaaagtttctttagggcggggcttcggtttcctctatatgatataataggagaggttttgaagaggtttgaaatatatcttcatcagctgacaccaaatgccattgtcaggttgagtgtttacatatgggctctccgaagccaaggcaaaagtgccaatgccgaaggtttctgccgagtgcaagagttgcattatcaaacaaaggccagagcagatgggattcataaaaactttggatgttataattttgcataccgaaaagaaaccaaggcctcggtgatcagctaccgcactaagtggccgaccgggtggacaagcgaatggttctacgtgaaagctgatgagaagaagagggaaaaaactcatgactttggttatgagttctctgaggttgagcttcgggatgacaaggccattatgcaatatgcaactcggctccacatgtcaggtggccaaagtcgaattcagagtggtggctgctgaaattagcactagagacttagtgcaggaatacctggcaaataaaacttttccaacctctagcggctagggcatgccgaagaagaaggaaggaggaaagaaatatgaacttgtt

SEQ ID NO: 147625 - DNA, 348 bp, Zea Mays
caccgaagcatctttcggctgctgcaaaggcgaatatagttgcctgcctccagaaccttttctggaaaccactggagcccggctgttgcgccgtgggccgtggcggcgtgcgacgacggagtgacggacagtgtcaccgtgatgatgagatagatcatggcctattcgatttaaagttgcaggacagcgtggtgtcgcccttggccggacccaggtctacatgtccgtgaagcccttgagttgagccgaggggcacgggaaccctctctcgctctctttcaccaaccagttcaccacccccatgtggccatgtggcgaggggatcgagcaggacaagcgtcgacagac

SEQ ID NO: 147626 - DNA, 689 bp, Zea Mays
tgtatgcatccaaagtcgctggattcgagatccacgaccaaaattccccacgctaagatcccatcctaggccgtccgatgagcgacccatgccacagattcaagtagcgaaggggcacgctaacgatttaatcactaccgtccaatgctgatctgacggtcttcacatcaccccgtgttgatttgcactctctcccaaccgctccagatctgaaggccatagatccttattccccgatacgactggcacaaggcagaggcgctggtcgccctgctggtgggttcgccggacacggcgcaaacatcgagggtcccgaccatatcccccaatccaatagccctacacaacgcccgcaatacaacgaaatgaattaggtactgcatacccaagatggaggcggcagtgaagcttggccacggcgcacggcgggtcggcgttgtctgccaacaccggcgagaaatcccagtgagcccggtggggctcctcgtccatagggaccatgagcgtattcctgaggtttcagcgaatatccctggccatacgctcaatctaaatgatggcccttcctccgtttggcccgcggctccatctctgctctcctctgtgtttctgtccctagcgacgatggcggcatcccccgttatggcgctcacggtatggcataggtgagatgggaagcgatactgtgg

SEQ ID NO: 147627 - DNA, 313 bp, Zea Mays
ccctttgtgcaattaaagaagtgtcctcagtgcaacctaacatgcctttgtgcaattaaagaagtgtcctcattgcaacctaaaacaaagaaatactgctatgaatttagtacatatacatatatatcagaacatattgtttcactggtgcatgtagaggtctctatggtatgttaaacaatttgacattgtatacagtaaccactcacacttccatgaggactccacaaagaactaaaactacttaaaagttaacaaactatccacgattaatgatgtatttcggtggacatggtttgggaatctagattaa

SEQ ID NO: 147628 - DNA, 1403 bp, Zea Mays
ttttggtccccggaggacggtaaggctattttggcctcccgcgacacatgtttttgtcgttgaacaacaatttgatgccacccgttcgccacccttgttttggccactaagacaggtaaggctgtttttggcctcgcgtgagctacaacacatgttttcatggccgaacaaccaatttagtgtccaaccatagtacactagtgttaaaaccatagtacacatttttgtccccggaggcctgtaaggctatttttggcgtcccgcgacacatgttttcttcgtcgaacaacaatttcatgcctcccgcccgccaaacatgttttggctactggcatgggaaaggttgtttttagcatctattgagctacatcacacaaaacacttaaatcctaaaccccgagccccaaaccctaaaccatgaacccgtaaccgcgaacccttagactaaaacccgacccccaaaacacaaaatcacaaatcccaaactccaaaccctaaacattaaaccccaaacgctaaccctcaaatcgaaacccgaaatctcgaatcccaaaagcctaagctctaaacctcgagccccaaacgctaaggcctgaacattgaaccccaaaccctaatttgtgaaccctatacctcgaaccctaaatcaaagacccgaccaccaaaacacaaaactccaaaccccaaacttcaaaccctaaaacacaaccctaaaaagtaatgtaaggctgtttttggcctcgcgtgagctacaacacacgttttcatggccgaacaaccaatttagtgtccaaaccatagtacactagtgtccgaaccattgtacacgcatttggccccggaggccggtaaggctatttttggcctcccgcgacacatgttttcgtcgtcgaacaacgatttcatgcctcccgcccaaactctaaacacagagccccaaaccctaaagcccgaaccctgaaccctgaaccctaaattgtgaaccctataccccaaaccctaaaacgaaaacccgaacaccaaaacacaactccaaacccaaaaacacaacactaaacagtaaagtaaggctgtttttggcctcgcttgagctacaacacacgttttcatggccgaacaaccaatttagtgtccaaaccatagtacactagtgtcactgtaaaccctaaactccaaaccccaaactccaaaccctaaaacacaaccctaaaaagtaaagtaaggctgttttgggcctcgcgtgagctacaacacaagttttcatggccgaacaaccaatttagtgtccaaaccatagtacactagtgtccgaaccattgtacacatttttggccttggaggccggtaaggctatttttggcctcccgcgacacatgttttcatcgtcgaacaacaatttcatg

SEQ ID NO: 147629 - DNA, 311 bp, Zea Mays
gttaatgttttaatgacctttggctaaagagggtctccaacagtagcccctcacggtattagttcgtttttcataacgagctcagaccgtgaaacaaacgacgacctcgtgtcgaaggtccgaaaacaccttcatttagctcattaacgaaaatgaattaatgaaagtatgccttcgtaaaaacctaccaagaaggacccacttgcagcgacaagccattttttaaaattttgggctcccatgtattttgtcagtattatgtataaagatgggttgagatctgcgtgcttcgaacacgacattcatttgct

SEQ ID NO: 147630 - DNA, 401 bp, Zea Mays
taaaagatcaattatcaaccttcattattcatgtaagaagacttgaggagtttaaagtttgtcatgaccttgcaagcctagcaataaaaatggttgaacttaagaggcatatagtgtttccgttagtttatcgcttaattgagttggcaatgctattaccggcagtgaccgcattagttgaaaaagtttttcggccatggagattattaaaaccgagttgcggaacaagatatccgatggttggcttattgatttaatggtggtgtatattgagagggagatattcaaaggaattgatcttgaatctattaaaaaggcatttcaaaagaagaaggataggaatatgcaactgccaaagtctcctagacgtaactaaaataattataattattggtatgtca

SEQ ID NO: 147631 - DNA, 729 bp, Zea Mays
tctcatcttaaaagattctatcctacactcatagatctatcttatctcaaaaggtcttaacttatcctaatgtatatagatccatcttatcttaagaggttttctcttatcttaataaattcatcttatcttgaaggattcatcttatcctaaccactttacttatctcatcttgatagatctaactaatctcaaaagattctatttcatcttatcttaataagcatacttatccaccctagtttaacaaccatgatctaatgcaaattaattagatcatatctagtcaaactagtcataccaatctaatctagatcccatctaacctaatatgatctaatctaaagtgagttacttaacggactagttgatactagtgaaatagattagaccctgctggccatgttttaacttaaattagtacatcataccaaaccacccatgaacaaataacttaccagcatatttatggtgaccatccctcctagatgttgccataatacacttatcttatgccaccagcctgttaaccatttgtccttacccacaagttatcctaactacatgaacctaattcggataaaaacttcaagaatgaagatcgaagatgttcgacctcatcaaatcaaggaaggataagattcaagatagatcttcaaaggaattaggattcacaatcttggatagaacctttcctcaccctaccctttcttaaccaaacctatctat

SEQ ID NO: 147632 - DNA, 482 bp, Zea Mays
caacgttccagttgatcctgacaggaaggttggcctgcagttcgcgtctctgccgatctgatgctattcgcctattcctcgggaaatcaagatacaagctccaaataaattgggtaatgattactagcaagcacacacttgacactagacgcctattcctcgggaaatcaagatacaagctccaaataaattgggtaatgattactagcaagcacacacttgacactagacgcacctcgtagtcacatgcagaaaattatgtttctccgcaactcagttttacagaactggaacctctcgtttacacctaagttgccatgtcatattgtaacgtttcgtgcattcgttctaaaatcgctactacttattaagactgtaagagtagtctgccatcattccatgttctgtcatttcgtgttctgtctttctcatttccccctccccgtaaaacccattctcattctcatttccacgtacagccc

SEQ ID NO: 147633 - DNA, 309 bp, Zea Mays
gagtcagcgacgtataggggaaacgaatcgccgcagccgcgtgggatgcgatcgccttctttcgcccaatcctgcgtgcgtgccgccgccgccgtggacgggcagacggctggacgcattcgccaggcgccagctcgttcggtctttcctctctgcctgaatcgccagatcgctatctcactgatcgccacgacggcacacagttctgttcctgaatcgctgctactgctagcctgctgctggacgcctgaactggacaggctgtgttccaaattccaatgtgagtttaccgctttccagagatcatct

SEQ ID NO: 147634 - DNA, 618 bp, Zea Mays
gtgatccgttcggaccaagccagcaacgacgagggcttcggcagatccaggacggcggcggctacggctttggttcggccaaccaaccatcgtcggcgtcctcctccagcagcttcttctctggtcttctccttccagacaacggaggagcagcttctccttctagggtccaggcgacagcgcgtatgcggtagagcatgagtgggcaacggccgatcagccgatggcgtttactacatcaacgatcaatctagataaggttgtttgattcatggtcagggaatgctaggtaacgtctctatcttggctatctctaggtgttccacaaccaaacacaccttagattaataacagaggatgagatatattgctgttggagacagcctacgcggagggaaaggggatgggaaccgctgcagccggtcttaaactagaggcctgtacctatgataaacaaattgcagtaccgtatccaaacaggacagcaaacgaatgaacaatgtagacaaattcgtgtgctatccggtcagaaatcactattctacatcaccgttttatcagagatagcaaacaaatgagcatacaaagggcaaacagggcaacaaaattcatcatatc

SEQ ID NO: 147635 - DNA, 426 bp, Zea Mays
ctccgatccatataatagacgaaaaggtgtgaatccggttgcccagcattcggtcgtgtttagggcccagaccacttcaggtagttggtcggcccatttacccttcttgtcgtcgagaagtcttttcttgatggcagtgaaaatcttgccgttggcgcgctcgacgacaccgttggattgcgggtggtataccaaggcgaagacaggcttggtgccgatggagaggcagaaatccctgaagtcctggctgtcaaactgtttgtcgttgtcgactgtgagcttagacgggactccgaatcggcaaacaatgttttgacagaagaacttttgggcggtcttcgacgttattgtggatactgccctggcctcgatccacttggtgaagtactcgacgacgacgaaggtgaatttgaggttcccttgagc

SEQ ID NO: 147636 - DNA, 1107 bp, Zea Mays
ctgctcgcggtgcggccgtgctgctggtgcactgtgcttcgttcgtcgcgttcagggaatttggggacgggagaacacctgcatcacgtgtttgactcgttgcctgtgctagtcgccacgttttctgttggattcagcttagtacgtgattttggagctcgtgccggatggttgacttgtgctttggcctttcggcttttggcagcgcgaccgagctttttggaagagtgagagaccgttttcctagttctgttgctatgaattatacgcaaagtggacagtatatacggcatacatacatgtttacgaaattctataagtaaggaatgggctatttcatacaaataattgagcctgcaggctgcagccatgatgaatatgttatttactgtcgtaatgttagctgaattttggtggtaacaaatggagctaccatgctaccttatctgcctttggagtgggtctatgcttattgctcgggcacacttgtgacttgtggaagaacataatcacagaaccctgtcggaatacatttcagaatgaataggtcaatggagtaagctttctagctgctacctgtatgaaattagatcaaacagaggacctgtcatgaagagtgatggtcccctgttatctcatgtactatattgcttgatgctgacgataggatgtaaattacttcaaccccatatttggatgatggttcaactggataagaataaccatttcatagaatagatacatcattgtcttcatctaactatctatctatctagccttttgaactgaaacctgctcatttgttgcatgacgaaattggaacaaaggaaggtggtcccactgaggaaaaacacgagagaaaaatcaacaaaccattttcacttttagggtggggggattagtgtggaagatttgagtcattgttaagtggtgaatgaggttttgattgcacaattaaactcgtctttcatttatatgtgctgcttactggaaggttggagaactgtgaacgggttactgtagttgggctgattatgttggagttactaatgatacccccttttgcattcatgactgaaattgcgctggaagtcacttttgcattgc

SEQ ID NO: 147637 - DNA, 295 bp, Zea Mays
ggcggagctggcgccgggatttccgggaaaggtcgcgctcgtaatccgcttggccccttcatcagacacgtttccgtcttcccttgtcctcggccgcaacggtgggcgacttccgcgcggcggccgctaatgtcggggatccggtcgaactgctgggcgcgagtttcggtctcagggctataaagcgtggagccccgcgaccctctcatcgaccataagcaagaagcacacaaaaccagcgccgagctgcatcggcaagtagaggcagagagaggaaaagcgtgatgcgtccgcc

SEQ ID NO: 147638 - DNA, 1000 bp, Zea Mays
catggcaatgatgtctagattcaggtcagctattaatgatctggcattaaaggaaatccaattgcatgcaggaaatatacttggtcaaatcagcatgctaatcctgtgttggtcaagctggacagagttttttgctcttctgattgggaggctattttcccaaatgtgttgcttcaaagttctgcttctcaggcttctgaccactgccccctactcttggggctccatgataattcatttgggaaaaacggttccactttgaagcattttggccaaaaattgatgggtttcttgatactgtacagtctgcctgggactctgtgggtagttcgccttgcccctttgtgaccttggatagaaagctcaaagagacctcaagaaggctgcacagctggagtgataagaaagtgggtcatgttgcctctcagttggcacttgcaaaggagctcctccataaatttgaaactgcccaagatcacataatgctttcaccggctgagaattggctcaaaaataagctcaagatgcaatccttgctgctggcctcctttaaaagaactatggacaggctgagatcaagaataagttggctgaaggaaggagatgctaataccaaatactttcatatgcatgcaaggcatagaaagaggaaaaatttggtgactaaacttaaggatggggataacatcttgaccagtcatcatgagaaagctggagtggttgaccttttttactcaaaacttattggtcatgaggttgaaagggatagatccatcaaccttgaagctctcgagcttccggtgcatgaccttgctgatctagagctacctgtttctgaactggaaatctgggaaaccatcaagaccataccttctgacaaggccacaggtcctgatggtttcactggaaggttctataaagtttgttggaatatcattaaacaagaggtgatgaatgttgtggcagctttatggaacagaaactccttaaatttgagcaa

SEQ ID NO: 147639 - DNA, 560 bp, Zea Mays
ggaaaaagggctggcgacggtgaagcttgtttcacggtggcggaagctgatttggggaaaaacggcgattctccggctagaggggctaatcgagggggagagtgggtgctatggcttcggtatgacctagtgcagctggccgggggctcaatttataggaggctctgacggcggccggtgaatttggggaggacgcgcggcggccggaaatggagaagaaggcgggcgcggtgaattcgtgtccagtggcatggcagttgttccggcgatcaacggggagcgagggtaagtcgtggcggtgcggtggaaagtgagagccacgcggcgcacggccgggaggcggcggttcaccggcgagcctatcgctccagccgcaaagcagaggggaagtaccggggaggttcaccggagtgccgtccagcgcatggcttttaccgagcggccatatctggtcaccggcgacgtgaatcgcaacggcggcggcgtgaatctcagcggagatcggtcgtcgacggtgagggactgtcgttctgatctgtccgagtcactgtaccatggcg

SEQ ID NO: 147640 - DNA, 804 bp, Zea Mays
tcttcgtccacgtccgagcccccgcgccccttttgagccccgcgccctgctcgcccacctcccctctcccatttgcgccctctgcccagctccctcgccctctctctcgctctgcccgcacgaaccgagagctccaccaccgcccaccgacgtccaccgcatgttccttggtcgccattgcccccgtgccccgcctagttccactgtgagctttgccttgccgtcagctactctggacacccttcggtgtgccctctccctccctgctgtgcccggtccacgctcaccggaacagttcttgcgcaatcggagccctgccaccgtcgacccgaggctccaccgcacccccgccgttctcgaagcatcccggagttcgcactcgaggtgagcaaccttcccatgcctttatttcgccaagtaccgcatcggagcccgcacaattgctcgccggagttagctgcgccgccacggaacctttttcaccgtggtctgcgttctctggcgcccccatgccagttctgcgcccatggttgtgttcactgtgacgtgttgaacgtgtctggccctttccctaagccaccagagccccgccgtggccggtctgctcgtctccggcaaactcccgccgcgggaccgagcggcgccaccgcgcccaagtccgccccctgctgttagatcctggtcgtccacccgagatcaggcggtttagacgcaacccgagcggatctgatcgtagccctccgatccagatccaaccgtctctcctctctccccctcacccgcgtctctgcccctgggcccggc

SEQ ID NO: 147641 - DNA, 419 bp, Zea Mays
gatggcgccgccgaagcgtgtcagaaggtgtttggtactgtctgcttcttcattggtacaagagatttaattcaagagcatatagcattcagagtatggccgcttgtagagaactgggaaatgccgaaggagaccatcaccaagtctagagaaggtgaactggtccggctgaagtatacattcagatatggggataaattcgataaaccaaacgatgactagctaaaatgcatcgaagttacaagtgatgagctgcttggagcttattccaagtcagaagataatgcactatctgtagccttcggaggtcagggaaaaaagagaataaacagagtttttgacgccatcggcttcgtctaccccgactaccactacccgctgtggggacaggggaagaagagaaaagctgctgctttggc

SEQ ID NO: 147642 - DNA, 274 bp, Zea Mays
atgcaaccaaacacctagctcttgcctgcagctagcctgtctatctcagcaacaacaataacaaagcttttattcccaagcaagctagggtagggtagagtcaaaaagcccaatataacccaccatttaaggtttggacacatagataactatttttcatgcactcatattcaagcttaaatctttagttcaccctttcaagtttttgtctttctctttccattgttatcacaccttaggatcccactacgcattggtgactatggacatgtac

SEQ ID NO: 147643 - DNA, 825 bp, Zea Mays
ggaaaatgaagcgcacgacaagtttattcctcacaacaataaacgacaagactcataaaacagacagaaacaacgataatactgaacataagcctctgttgtcggacgaccagcagctaagtgcactttttaagatctatctcgtaagcattgcgaagccaagcgatccttccttcttttgtctgcaagtttgccaaaacatctctatactttttctcaatcaatagatgagtggcaaacaaatgtagttggctgccttctggtgatccatcatccatgacttgttgcaactgctttttaatctcaagttgaactgggtcattgtcggaagaggtaatggacttgttagtggtcattgagcgcgactcaaaagcctccactagtcttctcatgtactcttccctcgaatcttttttcttctttggtttaggagaatcatggcgcatcttacgcttcccactagcatttgtgcaggggtcaggtgtgctgttttcacccccacctaaagtggcttcgaaatgatcatcagatgatgaattagcatcctcgacgccaggaaccagggttctttcatttgtgcagacaatgggtccaaacatagcctttagctcgtcctcattctctaggggggctgttttgaacataatacaacctggcattgcctgcaccaacatggtagttcctagtttgagatggccaatactattgttagtctagaaaataaatagatctacttacttcattttgcttggcccaccggtcatctggcacactgattgaaccagtatgagggtctcgaccaagacctgtagccctttcattaag

SEQ ID NO: 147644 - DNA, 548 bp, Zea Mays
ttcaagtaaaccaatccaccttgactggacccagcaacagtctcctttgacatctcccagttatccacaagaggtcataccctgtaggctatatgctcttgaaccaggtctcttgtgccaatgaaggcacaaacattattgaagaccttctggcatgcttcggtgtcattcccaagtgcagtagctggccttcggaggccgaagcgagaccagatggggcgttggataatcccctttatgtcttccctttcaatcagattattcttgacataaaaccattcctccatccaggccccaggccacctttttcgaaatgttggaacgagataacttacattagaacgaggaacgaagccataacaaccgaagttgttgtgatattgctctttgccagtggccttcgtctcatacagcagtttgtgcatgttgcagaagcattttgcactcggctccagcccttggcttttcacggcccaaacaaaaatactcattctgattatcgcttcaggagtgatttgatgaaggaagatttcaaatgtcttcaaaac

SEQ ID NO: 147645 - DNA, 1549 bp, Zea Mays
cttggaaattttgttagaatgacattcttcatggagatgcacgagtttggaaaattatcataattgacagatggccagccatttctttagctattgccatactattatacatgaagtttgggagttatccagctttctggctactaacttcccattttctacttacacttgacggagatttcttacaactttagcctaggcacacacacagctacttcatacccaccttggtgtaactaggcaggggtttggaaacttatggaacctttgaggcacctagagatcaagcactgcagaaataattaaggcatgcaatcaataacatgtattcaaagccttgtatccatttcatgcagtctattctaatttcgagataaactcaagcctcatacttgctacaattctaagatatgcatttgcattaaattaaccttataagaaagattgcataactttgaagagtctagaaaaaagccctaaacaacttacttcatttctgcttgggtgctggtgcagcgaatgttgttgctggcactgcaatactatttttcttgccctcagatgtgtgcttcctatgaaaccgtgtcgacaattgtggagaaatcgtcttggatggcacacgcattagtctgcgatgttgagtggttgcattttgaattttaaccaaaggagggcatgagatttccctggaagggtagatttttggcccctccggtattggaggccagggcatggatggcggtgatattggagagaagctaggagcactggatggaaggaaggcttgtaggagtggagacaacgtcaaacctataatctcgccgaaaattgaggtatttaggccaaggttccttgcactccagtttgttatgattctggctagctgttcgagcctgtagtttcctagatagatgctgtggtcaacgggggagatggaaacttgaactgtaactggtgttgcaaccgttgagccattcatattcgttaactcgacatataattcctgcatgtgcattcatacaatacataagcataagctgtgacttcatgtccattactacagaaaggaaaagaaaaatcaatgcacgggtgattctagtggatgagaggggatagagtcggtaacctcatctggtgtttgctctagtgtggatccaagctcaatcttcatctcctcaagaaccccccttatttcatgaatggtcgagttaaacgtgacattgaagagaggttctctcaagtcagcatgcggagcactatgcggaagcagtaccgtgatccctcctgggaaccctagaatctccaagcaaaacgtgtctccaaaaacagacggtgtcagagacagattcagctgctgtagcgtaagttttatcaaggacgctctcagtgcgtcgatggattctgtgctcatggaggtatttcttgggtctggaagaacaccaaacttcacataagtggtgtctgcatatacgtatggttgcatggaaactgaaacctgcacaattgttagccaatattcaggtgcctgtctcgttttgagtgcttgaga

SEQ ID NO: 147646 - DNA, 503 bp, Zea Mays
gaggaaatcaaggtgtcgcgccaccgtcctgaagacttcctcatcacgttcgtgcaccagcaccatcgtagcgcagctctggagttgggacgcttcggggtcgaccgcaccgacatcgacatccgcatcaagccatggcgcattctcccctatcgcgacctcatcgatctgcgataccacatctgcatctgcctagaggggatcccagcgcacgcctggaacgaaagcatcgccaagaggacggtcgcgagagcttgcaccgttgattatgttgaggcgaggtccctccgttgggatgactccagggcgctctacctctgggactggatgtacgacccatcggacataccaaaggtaacttggctcatgctcatagatggttcgacaacgatgtctgatggccatggcccaccgcgcggccgtaagggtctcaccttcagggtgcttgtccacctggacatcatcgagccgccgccggacgaatatggaaacgtgaaagtagc

SEQ ID NO: 147647 - DNA, 572 bp, Zea Mays
acagttggcctggttcccactattgtaacgaagagagccctcctgagatttgcctcttcccgtgccatgtcagcattgaactcaagaatacaagatgaccttgtcccccagctcatctctccttgatcatccggcctcggatcaggggactggctaatcatcggagctatggcttcatcagacgaggtcagtgacgcctgaccaggggcggcgacaggcttctttgaaccttttccgtgcttcgaccgtcttctctttcttttgttgcggaggcttctatgagactacccctcagcagccatcctaggggaatcctccatcttcgcaacaacctctggtgtgttgatcttaacccacaccaaacgtcgcctatgggggacagcacactccgaggttgctgacgaggccccgcgctgctccgagaggcgctgccacacagacccccttgcttgttgtttttccaatctctgccacactgtcttcttcctctacacttctcggcggcctagacacctgacagcctgatgtccagtcttgaaacacttgaaacagcgcgtgggtcgacggcagac

SEQ ID NO: 147648 - DNA, 319 bp, Zea Mays
cgaggtggacatggtagagcggaacagagacgaggagatgaagcggctgcagtcccagggcgttcacttcgacttcggcgtgctggtccggatcaaggagggcatggtagacctgtcgtccgcctgcatggagctcgccttgaaggagagccaggacgccagagagacgccgacgccgacgcgtgcgaagtgggcgagcagccacggcgatggagagtcgaggatgctgtggcgggtgttccagctggccttccgggtgtacaacttcgccggaggccaggacgagcgggcggacaggctgacgagcatcctggcgcac

SEQ ID NO: 147649 - DNA, 319 bp, Zea Mays
atataaccgtatacgtggactagagatggcaatgggtgaagacccgccgtgttttgctatcccagactcagccccgttagagtaaaaactccccgcttcaatacctgtacccgtgggcgggtacaattccacactcatacccagactcgccgggtattccatacctgatgggtacccatacctgcctagagtggtggagttgcgcctgtctgcccaaattagtttatggtgaaaggtgagcgccgagcggcaacatcaggccttccgtcttccatcttctaggtgtgggcgtgtcgtgtgtctgcgtgcggtttggtct

SEQ ID NO: 147650 - DNA, 717 bp, Zea Mays
gtctctactaattatttcatgtgatcaacactagttaaaagtggatgaatagaacaatgaacacataattaatctgtgcatcatgctgagtttttatttgattgtgcatttgtgcttaaaaaaatgtatcattaatagcatatcaatggatccatagaattcaaagtctaacttgaaaataaaaccatgaaaatagaggagagaaaggaaaattcaatgatttaaaaaaagaagagaataaaaatatatataacataatatattatttctacattaaggtttgaaattgtacatttactcaagggtgagactcatattcaaattcaaattggattcaaataattataaaagaaaacagaaaataaaacataaaagaaaaagtaaaggaagcttacctaggccggcttaccacatttcagcccaccagaaaccccctccgcgcggcccatgcagctattcctccatcgcgtgccgacgactgggccccatcgggcagtctctggccgtgcccctttcaccggtttactgccgtgtgggtcccgggcgcaagcctctttcgtccgcgcgtctggctcactggtgcgggggccctacttgtcatctcgtcgcgccttctgctggtcatagccgaacgaccgacgcgaatcctccgccgcggagttcgcgggcgtggacttctcaaccgattaatccttggggttatatagtcgtgcgtcg

SEQ ID NO: 147651 - DNA, 711 bp, Zea Mays
ggggaggaggaggagcggagggacgaggggagcaggcggcgcggggagaagagcctgcgcttgcgggcgaggcggcggtgccagtcgaggaggtggaagagcacgccgccgccgccgccgccggggaacggcggcggcttcttctccactatggcgaggctgctgctgctgctcataccgtctccgtctccgtgccaagtcggcctcccgtctccgtgccaggcccaggccgcgcaagctcgctcggggctccgtcctttaaccgacccgtgcttcgatccgggagctgaaaagtggtggtgtagatggcacgcgacggcggctggctcctcctccacctcggcacgcgccgcgaggacgaaggtccagggcagggaagcaaagcaacagagtcgagcgtgggcgtgtcggtggcgacccggtctgttcgcggaggggtagcagatgacaggtggggctctgtcggacttcgacttaagtgtgagtgtagcgcggaggagaagtggagaacgcgtcgcgaggaagcccaatgtgcacgggacgcgaagtggaggacgggggacggcacggcagcgggcttcaccgacgaggtgtaggagtaggagggacgttgtagacggatgtcagccttctccgctggaccgctgccgcttgcttggcctcctctgcaccgccggcagtggatggtcaaagctggcggagaattttgtg

SEQ ID NO: 147652 - DNA, 578 bp, Zea Mays
ctcctcgcagattactgttgtggaacgtacaattcctagattgcacaggcatctcgccattcgcctctgttcttattttttttaaaaaaaatagtttataattatgagaaaaaaaaaacaatgtcaatgtaaaaggacatacggaatatgcttatcccaaccctgagcttcgaaattttgtctaatagacctagaatttatagacgtagacatagatgagccaacaaatcacaagagtcaatgggtatttttagggagtgtaggcaatgatgaggtaagcaaaatttttaaaaatagcagaacactgcagccgttgaaaaaatcaataatattcagtttactcagtaacagtcaaatggtaccgtatgtactgtgcgtggagtatagattgtgcaagtagccgagacgaaagcgagcgaaatagggatcacttgtctgaaaccactcggataccttacgtgtcctttcgggcaccggcctgtgttttcgcttttcgggagtgcgtccatccaatacgctggccataggctatgaccagcagaacgagcactgctgtttctagaataatagagtgagat

SEQ ID NO: 147653 - DNA, 494 bp, Zea Mays
ggcatagacgcattgcctacctattttgcttaaattggtatgtgccaagtagcatatatttttgggtaagtagtactttcagtgtagagatgcttgcgtgccagttacctaaggtcgctacaagttatggaaccttccactagatggttgccaactggtttgcaaaggaaactgattcaccagagtagaaccttggccatacggaacaatctgcgtgttcttgcctccataagcatgcacagtttcaaatgtttggctcccattagttgccatcctttctgcgatattactagccaatacagatgttccgagttctttgtccatctcagatgccaacttattgtgttatggactgtttccatctccatccttgtcatctgaatcgagaactattatgtcacccttttctttttgttcggctggctccacagaatggttggtcgatttgccacctccgattttgctggctatcgcagaggagttttcagaggcgc

SEQ ID NO: 147654 - DNA, 699 bp, Zea Mays
gctaattttgcacagaagcccctagggtttggtttagggtttttcagggttccaattagggtttctggtatctcaggggtacaaaagtgattcaagcttatttttagggtcattttatgacttttaccctaaagtatttaggttttcttaacttgggtaaagttttacccctagaatccccatttagggttaagttccttaactagggttctagttgcaaaatacttaaaacaatacaacttgtttgaaatttttgcctagtgaatgcactctaggtgtgtcaaacatatgcaatgccaatgctcatgatgccatgctcaagttttagttatagtaacaccaggggtgttacacaaaaggtcaagatagatctataggtaacagatgggtagagggtttagtaggtagctatatgctagatgggattagttatgtaacctgttatgtaggtcaagttgttgagtatggccaagttgatttaagtcaccaatttagtcttaagtgaattacgagtatggccatatctttttttaccagcattaagaatcacccactaggttaaatcatattagattagatagggtctagattagattgggtatgactagattagactagtttaggctagatagatctactaaggtaggataaatattattaggatatgttagaattttttttgagataggatggatctat

SEQ ID NO: 147655 - DNA, 1382 bp, Zea Mays
tcagaatatcatcggaaaaaacaaggacgaacttgcgaatgaagggtttcaggatctcattcattaaggactaaaatgtttatggcgcattcatgaggctagaggacatcaccaaaaaatcgaagggcccttgctgagtgcgaaatgttgtcttgtcaatatcggccttatgcgtcctcaataagtgatacacgctgcgaaggtccagtttggcgaaaaactgcgaaccttgcagttcatccaccatcagaattgagtacttagcatcagtctttgcggtcagctccctgtagtcgacacagaacctacaggagccgtcagccttcttgaccaagagaacactgatgtgcactcccttatgatgccttgttgtaacatcacatcgcattgatgttcaatctcgtccttcaatatctagggatatcgatatggtcgtactgctataggggctgaaccgggcagcaacctgatgcggtggccctgtcgtctcggtggtgggagcccctgtggttccacaatgatgtccgcaaaagaggagagtagggcctgcagcagatcagtcgccgtgtctagtgctgcgcattgcgtccctggtgtgcccactccctgccatatgagatcctgaccattgtgccaaatctgcattgcgaggtctctgaagttccacaatattggtcctgagggctgaagccactgcacacctaaaatgatgtcaaatccagcaaggggtaatgtatatgctgtgagaacaaactatgtctgatcaatggagaactgaatgttgtggcaaatgccatcactgatcttgtcaccatttgcgaccttcactgatagacctggtcggctgaccacctgcagctgccacattctcttggttgaaagtgttggttgactcgaaatataccgggcaattaggggtgtgccatgaataatgacctgaagttgcctggtatttcccacagtgagtgcgtcgagtgaaattctcaattccgcagccacctcctcctcttcctctttatcatctaactccagaaagaagacccctttcgctgcacaattatggtcagcagtgtacttcttcgtgcagttatagcattcgccgctcacccctttcgcagccaattcttcttctgaagcttgatctggggtttggtgtcggcttctaggccagtgctggtgccacggattttggcggtgcaggcccaacactccctcccttgaaggatctctcctttgctgcttcattctcgcacctctcataagcccttgccagactcgtggctgtctgaagatgggtgggggcttggagctccacatctgcccgcagcggctctccaaaaattggaatgcccccatgcatatcatctgtttgctcggtggag

SEQ ID NO: 147656 - DNA, 594 bp, Zea Mays
acggaaggggacgcgcactttctaatctcgtacgttgaactaggatccaacggcccacgcgaaatcccagcccaatccgtagagcgcggcggcgccgccaccgcccatggtggcgagttcaccggaatctcccggaaccacgcatgggcgccctagaactaaggatttccatcgcacgggcaaccccaagccaccacggacataatgaaggcagtcacatcgcggataataccccggcatgccctgcccccgacccaacgcgacaccgcggcggagcatagattccggtgagtaattccaggggttcttgtaagctaacttcaattcaagttggtgcaacacgatgggggtatgaagtacaagcgagggataggatgtttaccacggttttcgctgcgccaagctttggccacggtgaggtgtggccacggtggctgcccaacccggtgaggaatcctcggttgattcgagcttcgctttatgccgcggcgatgcctattttgtccacgaggatgccacgaaagtggtagggcagtcgcacgcccccaatttgccacgtcggtgaagaacggctgcaacagaactccctttctc

SEQ ID NO: 147657 - DNA, 512 bp, Zea Mays
gttttccaacttccaaagccacttagctaaaagcgcctcattcatcttgtgaagatccaagaccccaagaccaccctgacctctcggagaacacaccatattccagtcagcaaggtgatatttcctttttgtatgaccaccttgccagagaaatctttttctaaagaggtcaattttcttcacaatgaacttgggagctttatacatcgagagcatgtataaagggacattggtaaggctgctattaatcaagactaaccgaccacccaaactaaggaattttccttgccaagcccccatctttttttcaactttctcaactgtgggtaaccacaaagacttgcaaagtttcttatcgtcaatcggaactcccaaatatttcattggaagacaattagaagggcaagtaaaaatatcagcataccagacttccttatcaacagcttcacctaaacagaaaatttcacttttatgaaaattgattttgagaccagacatctgttcaaataaac

SEQ ID NO: 147658 - DNA, 542 bp, Zea Mays
caaaaattcaagggggttttggagtcatcaacctttagtggcacaataaagctctccttatgaagtgcctccacaaattctgtaatagagtcaacatcccatgggttaacattatctgggacactcattacagcaattctctgccctcatctaagccagtcggctcgttttggtggaaagatattctcaaaatccatgattcttttaaggaaattgcccaagtgcaaattggaaatggtaaatctacgcttctctggcatgatcgatggaatgggcaatgtttatctcaaaagttcctggagctccggtcttttgcctctatcaaaaagattaccatccatcaagcttgattagcctcctcgaatgaaatgctccatatccccctctctgctgaagcgttcgagcaacttctctcacttcaggacacccttggtaatattcagttgcttgatcacaatgatatttggagatgcagtgcctcttccactcggttttcctcttagacggtttatactcacttgactggcacccgtcaaacgctc

SEQ ID NO: 147659 - DNA, 1057 bp, Zea Mays
gatgctcacgatcttgttgagaccatcaaccatggtttgaatggccactgaaggtgaggagatggttgccttcaggctctgcagctgttcatcgatgctggctttgttagagcgagggctggatggcacgctcgcggatctaaggtggcaagccatggtttgaatggaggttgaatctgtgtagcttcttttttcttgaaacggggagagaaggaaagctcctgcaacggtggtcatctgggctatggctttcctctttatatagcgaaagaagtggatgcaacagcacggctgaaccagcagacagcaagaatcgttctcatgtgtaaccgagtggtgaacttcaacagaagccaccaaacccgagaagcatcacaattcacaaagttagtttgattacaggctgtcatgtccgcaatatgggcggcaaactcgcatgcacggttgaggggcagtgagatgagtatcgtgatgagatgattgatcaacaggcaacttgccactgtaggaagctacaactagatgcctcttctcgcctccagctcctagttcccaggctagctgcaaatcacctgattccagcataatcacgtcaccacacggtggattattgaagatattggtagtcatgtactcatgtctctgctctccattgcttgtgcactagcagcgtaaatgttcgaccagcagacaacaagaatcatgctcatgtgtaaccaagtggtgaactgcaacagaagccaccaaacccaagaagcatcacagacttagcttgattaagaggctgtcatgtctgctatatgggcagcaaacttgcctgcacggttgaagggcggtaagatgagcacggatcctccagatcatgagatgattgattaactggcaactagtcactggatgcctttgcttgcctccagtcccaggttcccaagtagttgcatttaatcatccctacatccttatacaatataatcatgtgattacacggttgatctgtgaaaatagtggtagtcctgctgttatgtctcggctctttattgcttgttcactagcaatg

SEQ ID NO: 147660 - DNA, 383 bp, Zea Mays
aaggaaaccccttctaaccttgtcaattgctttgatcacccatctcgggacactcatggcaataaggagataaaccagaatggcaaagagcacaaaacgaaccaccgcagttctacctgccaagttaaggagggaggccttccaaaaagggaaacgatccgctatcttttcaacccaaatcatgagggtattctttgacagtttttgatggatttgggcagccccaaataggtgcagggaaaggttgcaacagcacattgcagcaaggaacaactttcctggacaacctgatcttcacaagcaatcggaatgaaataactctttctttgaagtgaaagatcttggagctcttcgatattttcttgggattgagattgattggt

SEQ ID NO: 147661 - DNA, 323 bp, Zea Mays
gggatccattgaatccacttgtggattaattctacctagggattaaatccatgccaggacctgcatgagcatgatcgtccgcagagattttctactagatacgtcgttgcccagttggatcttggatgtccctctcctcatgacgatcagacgatgccttttgagcgaggcggcagctccgttggaacgctccacgccaagggacaacttgacataggaatgataggattactgtgctagtctgctagtagacaatagacattgatccgtgcgatgcaatgcacgcgtgacaccccaatcacggtccactgtcccatcgcgct

SEQ ID NO: 147662 - DNA, 363 bp, Zea Mays
tcacccgcagtccaacggagttgtggaacgcgccaatggaaaaattttcacagctgtcaagaagatgctcctcgacgaaaaaagggcaggtaggccaatttgttacctgaggcggtctgggcgctaaacacgactgagtgcagggcgactgggttcacccctttccgccttctatatggatcggaggccatgaccccacaagaaataaaacatgggtccccgcgaacagtttcgtcagctatccccgatgtggacgaacccacttcgaaggatctcatcgatggagaccgagtcttcgctctacaggctctaaataaataccaagcccagacaaaagcatggcgcgaccacgcagtcatcccg

SEQ ID NO: 147663 - DNA, 519 bp, Zea Mays
accccatatctctagtggcaatccagtagcgcgccgcctctggccgtccgccgtcgtcgccctctccctcgtcctcgcccgtcgcacgtgttgtgtgatccaggtgactctgcttccctcccttcccatcgccatctctctctccgcactatggccctcgatttgattcgggtctgagcacttcatcccattccccgccccagatcacgcccaccgctgtcctgttcgccttccgccgtgccatcccatatccaccgtgctccccaccctccctactcctccccgttgggtgctgacctttttccctctcttacggaaatcatgcttcatctggtgatgttcttaatatggagcaacggataagcttatccgtgtgtcagtttctctaatatctaagtagggtttcccaccgtcccccgttacgtctagtatgccattagttttaggctgtgtctgatccattaatggcactgcaaccaagacgtgccatcgtccagtcgcaccatcacaagagccgac

SEQ ID NO: 147664 - DNA, 661 bp, Zea Mays
ccactcaatactgatcgctggctcccctgcctcaccaatggtaaaccacacctttggaaccagtattggattgtctcaatggagatcggtaaagacttttttatcctatatttagagaagatttcctgctctatactaattgtggcttgttgttccgttgctgtaacattggtaggtggacatgtgtcaaatcgaaaaccggttacagggctgcttctacagcggatgtagggattttttttccaaaattggatagggtcctcgatgaagtcacatcacctctgttttagaggtcgctctctagcaaaagcttaagaacatgttcggttggttcgctctttcgttagctactgtttggcttactgttgttctatagtcgtagttgcagcacaactagcaatggagctgtcgaacaacttctaactcttctctttgaattgcaaacaccttcacttgtaagtacaattttgtgatgtactaggagacttgtttttctcctcggatatggttgcaggtgaagaagatgatcatcgatgtcgccactttggcaattctaaaaaggctgagtgcgctggcccatgagtttccgctagtcagtgcggaaactagagatcatgatgcaatgttgtgcgacagtaggcgtacaacggtacaatagtgg

SEQ ID NO: 147665 - DNA, 464 bp, Zea Mays
ccggtctgtgatgattttatattgaactgttgcctttacttgcctatgatgatatgttttataatgatgatcaatcaagggagtatgacttgttgctttgttttccttgctcattttatgaattttgcctatgatgaaatatgtttgactgatgaccattcatgggaggttgacttactgctttgttttccttgctcttggttttcttcttgggtcaggcaaccaaacatactctattctttaatcagatttctccacctgccctatgttctcccatgtatggtcaaatgaggtgtttattcatacaaaactgaggcaatttattgtattactctcatgagttgatcaagtgattttaattgataataatttctgaggcaaactatagttcatacaattctggttatggtaagttgttacttctcttttcttctcaagtgattttactctcatgatcaagtgat

SEQ ID NO: 147666 - DNA, 373 bp, Zea Mays
gtcgagttgatgtaccagccagcctcaagagagaactagcgagaggaccatgtgggcaatcaccggtatgaccactggagtgaaagtgccatcgtaggccattccaggccgctaggtgaagcgacaaagaatacaacaagccttgtagcactccaggaacccatcggcatgaaacttgtgcttgaagatccactttccggtgataacattggaactaggtggaaaaggcactaagtctaagatgtcgttcgtcataccaacgcaaatgaggatcgacaagggcattgtggatggacatcaggacaggagacaagggcgatgaggacgtcgcaatgggaatcaaccggttcatgagctctcgaaagtcgtgatg

SEQ ID NO: 147667 - DNA, 1112 bp, Zea Mays
tagtgctccatcaccgaagcagaatacatatgaacatgtagctattgtgctcaattgctacgtgtaaaggcaaccatgatggattttttgtttgaattgaggaagcacctctcctatatgacatggggaacatcatgatgattgtaagcaacctagtccaacactgaagaaccaagcacattgatacaagcgtaacatcaatattgaaagtattggcaccaatgagtagtgagacgacatcttctgatgtattctctatgtcctaatgtataggtttggaacctaggttgcaaacctcatttgcgatagagatatcaacacttagtcaaaacctttgttgcatgtatgaacaatcagttatctacataggttttgattaagagaaaaatagaggtcatagtttaaagagaaattagatttcctaattcaccctctcttacgcatcaacgttccctactctagtgtttgccattgatagtcgtccgaagatccatataatatgctacagaatctcttaatttagcttgaatctagcatgcccatcaacctcacaacactaggcacacttgatccaaaccaaccgatatgtttaggccaccgtatgggaagacctgaagcatccacaattttgctctagaaccacatacataatatttttaaatcaatcacatagataggcactttgaatagagagtttacatcaaggttaaacgaaagagtatagaatacatcagaagaataaaataatatacttgttgaagcaattaagttcttacatcaagatcacgtagtggccaggtacaaaaatacataagcatctctataactaattcataatttataggacttgaatggctaataagtgcacatttgtgtctagtctacatacagaaaaggaacaccagcccaccattgtgctcatcaataattcccgagtgacacataggttagccaaaggagtggttaagtctaaacactaaggatgacatttggattatgtagtttcacttgacaactttagagtgtgctatacttgatgggttttctagtcgatagtattagagctatgctacaagcctacaaatgaactcaagctttctcattcttaatta

SEQ ID NO: 147668 - DNA, 527 bp, Zea Mays
gattatgatcggcagtgaaaagatcttcaccgtggatgagatcgtgagttggccccatacccacttgccctgcggccgatcctggtgacctcgctagagtttgccgcctgccactcggatgccacggggctcgaagatttaccacgtcgcagtgaactagaataagaagcgtgtccatcgcctgaagcattgcctcagtgaccgccacggtagctcgcgccagtgacttccccttctctccggctgccagcgtttccctttcaaattcggagccgccacccaaagtttctataatatgatgccccagctttctccgctaggttgttacgaagctagagcatcagccctcaccttcgattagccaccgtagcgccccaatttcgttcttcccccaaattggttctccgctccgccgttagcatcgcgccgtggccagccgcccacatgttgattcatgcttctctgcttggtgttctagcatcccttaagtctcctgttgctcgtagactcgattgattgaactagac

SEQ ID NO: 147669 - DNA, 397 bp, Zea Mays
ctaggtcttacaaatagtagtaacggatatgtatgtttgtgtagcttggtggagctggtggttaggaaagcatgggtgtatatatgtatgtccactttattacgtaggatagaagatgcctttaaagcatagataggtttaggcaagaaaggatagggtaaggaaatactccatccaagatcgtggatcttgattcctttgaagatctagcttgaatcttatccttccttgatttgatgaggtcgatcatcttcaatcttcgttctcgaagttgttatatgaatttgggacatatagtgaaggcagattcttaggtaaacaaaataggttaataggtggttatgagttaaataagtttaagcaaagtctgtctcgttgttttgcctttagattggtt

SEQ ID NO: 147670 - DNA, 649 bp, Zea Mays
tggttcgtcgccatcgacgaccttgagacgatcaatcgcttcttcaatcgtcatcgtggagaggtttagcagagactcaattgagcgagcgatttgcttgtacttctcggggatgcaacggaagagcttcttgacggctctctcctcatcgtaggtgtcgtcgccgaactgcaccatcttctgcaacagagtgtttaggcgaatagcaaagtcatcaacatcctcacctggcttgaaggctaggttcttccactccttgcgaagtgcctgcagtgtggtcttgcgggcacggtcgctgccgatgcgggtcgcagcgatggcgtcccagacttccttggcagtccgcttctgggaaagcgaaaactgcatctcgggcgggactgcaacaatgagggcatctagcgcccgtcgatcctcgtagtagtcgacgtcgccgtaccaaactgcttcccacatgtggcggacctagagccgtaccctcatcaccacgccccactcgacgtagttggtcttggtgagggtagaccacccaccgccgagaccgatgtccctgacaacagcctggacctcgcggtgaccatggtaccgatccggggagggagagccacgccgcctgtagaggccgcgatctgcgtcgacccggccgccg

SEQ ID NO: 147671 - DNA, 443 bp, Zea Mays
ccgaagacgtctctttttctttttctgctcatcagcagaaggatcaagttgattggctcggcaagggcgttttgggcgaacactcacaggtctctgaatatccaaggttgtatcagtttctaggagaggcgccaccaccaatgtcccagtaggagcagcatcagaagagtcctcagccagcaaatcaagcatagcacttatctctgcgtcactaggatccaaaggcacctcaaagtggacctgccgttcatcatcaggaatttccccgatcaaggcaaccaaggcgttaacttcttcagcagagggtcacactctaaggcccaaaccgccatcagcaacaggtggattcgaaacaaaatgagtgaaggctttggaaggaggcaggttccaggccgagtatgccactggggcaccaacatttgataccttgcctctaagaatca

SEQ ID NO: 147672 - DNA, 611 bp, Zea Mays
tgtcctccgatattccttcagctttgttggagccagagtctatgtctctcccttttgtcatccccaggaagtgtcctgaggacaagttccttgattcggctgtttctgaggaatctgctgatgacacctctatcccttcggacacaacctcctccaagcccaatattgctattgtggaatcagacctgaggagaagtaagaggcttcgtgacgcccgggctggtttcaggcaaggctcttgccaaaagaagaattgtttgatgtgtcagcacaagtgtgagggcccccctcgctttcagctaaagctatcaggcgcttaggagagcgcttttgtaatctgtcagaggaagatttggctgacaaagctctgaagaaaaagaagaatccgcctggctgtgttggctctagcaagtcaggcaagagagatgagggagacaagaatcaagaatcttcagatgatgacaaatgatatgttaattctgccttgggtgggtgtcttttgcaggtctcaacctcgtcaggctttttggctgtctcggccctggcgtttatatctgatctctgtgttcatgaacttggtggtttctggctgtgccctgttctgtctcaac

SEQ ID NO: 147673 - DNA, 544 bp, Zea Mays
ctgctatcaacttgttttggggagtaacattgtgcccaatccatatatgatttttatagcgcagaacaccgtccaccaaagagaagctaggaaccgatgaaggggcgagcaacaaatgagccttgagacgagcagcgaaatcatcctgatcatagccagactccacctctagcaaccagtgtggtgttgctgaagaaattgtagcacaagacgcatcatgagaaggttcgcggaagagtgcgtcggccacccgattgtccgttccacgcttgtacacaatacgataattgaggcccaacaacatggaaaacacccgctgctgccaagcagtatgaaggcgctgttccgacaattgtaccaaactgcgttggtcggtatggatgatgaattccttgagttgaatatatgcacgccactgagacaaagccataaggattgccatattttttcgtacgttgataggccttgtgatttaggaccaagtgccttactgatgaaggcaatagggtgaccatcttgagtcaacacagcaccaattccagtc

SEQ ID NO: 147674 - DNA, 367 bp, Zea Mays
accagttcgtaaatttcataactcttaaaccgtcaggcctttagttatgaaattttaacacaagcaagataagaaaagcacctacaactttcttataatgaccatgaacagattgtaacattaaattgaacaaacaatacagtttctgaaatctgtacagaatttggacagattcagtcactgaatttgtaaaaagcataactcctaaactgtcagacctatggctgtcaaattttaacacaagtaagataataaggttatctacaacttttctatagcacatatctacagaaaacacaatttagttcatcaaacatacagcacaccgaaaacagtacgtgcagcccaaaacagcaatcaacacatt

SEQ ID NO: 147675 - DNA, 740 bp, Zea Mays
gttggatcgcaagcctagcgcctagattagatttattacccagcgaaccggtacgcgattccgaccctaagatccaacatcaacagtgcagatcatatttgccccgaaatcaccctgatccgcacgatctgacctgaacggtcctgattcccttgcctccaatcgttacgccaggatccaattacagccgtcgatgaacaatcctatggtacccacgacttcttccctcccccgcgctacggacagaggcgccatgcccgcatggcggcggatcacaccggcgacatggtacggccgcacccaccaagactatacctaggtctgatagcgtctactcgaagcggaggttaaagcggattcatggatgcactacataccgccactgatgccgatgaagtacccagtcacggaagaaggggatccgcggaggattccggtcgacggcgagaaattgacgttgctccacagcctcacgacccaattgcttggcacatacggcttccccaggcgaagacaatactccaaaagccaactccgagagcagagaccccccagcgacggctatccctggcggcggcgcgaatctctctctctctctcaccggcgaggctctcagtaggcgatggcggctaggttttcggtgatttggaacacggcgagcgcggccgagggcccttccccaagttttatatgcaccaggaaaagccagcggattccaagggtgcgcgacgaaggttgtt

SEQ ID NO: 147676 - DNA, 349 bp, Zea Mays
tctttgatcctcctaacatggttattctaggtcatgcttggttgcttaattggatatcacctagttcctttaatgaatacgactcatggattccttgaaatatctctaaggatttatggttaaaacatatagctcatatgaaattgcatgcctgcctacaacttcaatgtagttaactgatatacatgtgatgtagataatattcagtattttgtttgtatcatgtatcaggaagtccgcggttgttcctaaatgcaatgttctttggaacaactcttgtttgaacaattttgtatgcttgtatttcacatagaaaggtcttgttcacatctagccatgacctgataaa

SEQ ID NO: 147677 - DNA, 675 bp, Zea Mays
gtgcccataggctcttcacgagaccgaggtggcgatcctgcgggagtgggaggaactggaggccgaacaccagtgcctcagtgactggcgtacccagctggaggagcgcaccaaggcggcgtcccgccagttcgccttcgagcggtccgagcttgagcgagactgcaaggactacaagaaggacctccagaaggtgtacgctcgggagctagaggcggcccggaaggagaataggttggccaagaagaaggagcacttggatcagagggaggaggtcgttatggagctctaggccaagctgagtgccttcaacaaaatcctggaggagcagcgggtccagcagaccgcggctgtggagagcctgcaaaggctgcagcaggagctggatgacaaggccagcagcattgccctggctgaggagaacttcaaggagaaggatgcttccctggataagcgggcgacggatctcgcctggcgagagaaggacctcgccttcagggaggaaatgtttgaaaggcgggagaagctgctggccgatcatgagctcgaggcggaggagaaggagcgggtccaccagttcgaggcggtgcaggcggcacaggcagcactgggcccctaggcggtggaggcgatgcagaagacacttgaagatctccaggcggagcagcgccccgg

SEQ ID NO: 147678 - DNA, 323 bp, Zea Mays
ctggaactaggttgggtaggaacaataaggttgtgggtcaaatcatggtttgtggcagcacttgaactgggctgtgtagaaacatttaggctatgggtagactcttggtttacttcaataactctttgtctagtgactctaactggtcattcctacacaggtgccataattcttttatttcctcttgttacttttgttgacatctattcaccatcattggagatgtgggtaatgacacccttacgagcttggaattcctaaatatatgtacaacacaataagcatattcatatcaaattatttgcgaacccaaaagtaatgat

SEQ ID NO: 147679 - DNA, 337 bp, Zea Mays
ggccgacaagagacagtgtgggactgtgatggagaggcagacatagacaggacgtgacaggggcccaggagtaatgagatgactgggctgcgctcttagctcaattggagaataatttcgagtccagtactccgccacgtgtcgagcacatactgatcgaagcttcacggggtgcaaggaggcgcccaaactaggtcaagtttttataacttcgattgtaaacaacaatggttctcggttaaaaaagggcatccatatttccactcagagattaattccactaccagaatagtctagttaagttcaaccaatcaagcgtgaaaccccaatgcttata

SEQ ID NO: 147680 - DNA, 860 bp, Zea Mays
cttagccgcaagcatcagtaatttattattcccaataagagccttggaccacttcctgagcgctttagcagtcctctacagctttgtgtgcaatcttaagaaaggattaaaaattgtgagctgcctgttccacgcattttccaccacattgctgtagccactaagctttggccaaaaagattcaaaacggaatcccttgtatgggcgcctcaaggtgtcaccagataaaaacagtggacagtgatcagatactaaggaggatagagcctgaacggagcagctagggagcatgaggtcccagtcattagagcagaaagctctgtcgattctagtgtgagtcctagaattagtccaagtaaacctcctccctcttaggggcagctccttcagttctagatcattcaacacagatctaaaggcccccattaacctcttatttaaattgttgttgctcttatcctcggcactgatgattaaattgaagtctccaataattaaccacttctctgcggagatgctacccagctgcctaagctcatgcaaaaactctaacttatgagcgtcgagctgcggcccataaacaacaataatccaccactcgctaggtacacagttggactgaatcaaggcagaaataatgttgcttgtacaggctgtcgagaggatccggaagtaactggcatgcacagctagcagaatgccgcccctcgtgccatctgcggggagaaaagcaaaattctgaaagaaatcaggtccaagcgtctcggacaccacgacgttgtcaacctgctgcagtttggtctcttgtaaacaggcaatagtgcacctcgtatccctggccatatctaaaaccaccttcc

SEQ ID NO: 147681 - DNA, 412 bp, Zea Mays
gcggtgtgaagggcgccgaggcgaacggaggagacgcgtgcgccggcggcggctgcgggcgctgccccggcggcgtctcctccatgccggccgcgctggctgcggatccggtggcggcgtgcggatctggagcggagggatgggatcggggaggaggagcacgggatgggacaatttgagatccggacgtggaatgcgacgaggaggaaggaagaattgctggagatggaagatgtgcttcggtgacaccggatttgcgccgctcgggttaatcgaaatcgacgtcactacggctggacctcggcttcctattggtcggggctcggggctcgcgggttttctgtctacgagaagagcagattagtagaaatgcttgcggcccgacggcgcgggtaggccggctgggttccta

SEQ ID NO: 147682 - DNA, 361 bp, Zea Mays
cacacgtcggattcaaatcgggcggacgacatcatccaaggccgaaccgcaacatgggatttaatcccgaccgttcaaatccgaacgaacggccaggagatcgcctccgacctcccagcagtcaagcacggcggagcagaagcccgcgacggcgctcttcgccggcaaacgtccattcggcgccccggagcccgactgagcaagcagcgagttgcaaaacgctcctgagaaccagacgaaatagatgggggagaaaaataccttaattagagcggagtacggacccgcccacagcacgatgcggcattgtcaatcaccggcaagcaaatcccacgatttggatcgaccccaggagctttcc

SEQ ID NO: 147683 - DNA, 343 bp, Zea Mays
cttcacttctagatggagtccttttgatacttggggtgttcagtaagttggtgttcaattggagtatgttgcataatttcgtagctttcttaatatgccaattatgttgatggagctttacagacatgccaatttataaatggagcatgttgcatttagatgtagtctatttcagaattgagtgtacaaatagattttacttataatgtgttgcataataggactaagctttaggggagtgcttttgtaccaatggtagtaattggttagtatctgatgatcttcatgagaaatatgacatcattatatggttgtatttggtagcacctgatgcaattttttt

SEQ ID NO: 147684 - DNA, 644 bp, Zea Mays
agagtctcgccgtgcttcggggattaatctggtggcctcactgcggtgggtgtgcggccggtgaccaccgaattcgtcgccatagaacagagtcgggagccgccatggtggtcgagtgctttcgccatagtcgcgggctctctgtcgggtcaaggtgactcgcctaaaccttgtggatgctcccatggcgtcttcgggcggttggggccactggctcagacggaatcgctcgtcggaatccgtggtggtgcgctgggccgctaccgctgtggccggtgatctacacgcctcgacttccggtaagaaaaactatgtcgcgttcgcattgtcatacactacgtgattgtttgatcggtactagggattgagctatgtggccggggcacattgctcgccggcgaggcggcgaagttcgccgtgaacagggagcgacgccgctgtctcagtgagctgggaaggtaaaacgctgcgggccattgattctttaatctacggtgtagattagacggccgcgtaccctttcgcgcggcggattctggaccgtagatttgtgatcgtgcgactgagagcaatcctgggttttattaagtgtggaccgttagattcggatcggtggactgaagttcaatttgactggggtccgt

SEQ ID NO: 147685 - DNA, 1132 bp, Zea Mays
cacaaagcatgtacatgtactaattaaacatccaagccaaagtgtccatgttaaacattgcatagaacataacagaagaggtggaggagcagcagaaaaatagcaaagtagggagagggaagaacgtctggaatactggattattgggggaagaggagaagggttgtgctgacctggacgattggggaagacccgaagaggacaatcccgcaggcggcaacaacagacttggataaagtggaaatgcagcagctcccgcttttttccctcctctgtcctctcccacacagtagctcccaccacttttccctactctcaaatgaagcagcagctcccgagcagataaagtggaaatcccgccactttatttcccgccacccttctttttcccgccacacttcttttccctgcgcagaaactgcatgcgctttctgcatgcacttttactgcatgcgcttttccctgcgcccaggaccgctttagcgcgcgcttttccgctttagcgcgcgtagctcaaattaggcgccgcctaagcgcgcccgacgctgaaagcaacacctttggcctaagcgcaacgctaaggtaccgcttagcatctaatcgtgactaagcggacgcttaagcgcgcttttttgaacattgctttcttccaggaatgtcattagcatggaaccattttgccaatgctatccctagcttctccttatgacccttctctagcataacatctatgcgtggttgcacttgtgtcctactgcgtgccaagtcaatgtcaaaaggacctctagagatatcttgtgtattcttgtagtaacttgagagcctactttgcttccctgtagaacaacttgcagctccacttgcactacccgttgacttaccaaaaggtggacaactatcatgttccaatgtggaaaaagaatccctcaatgaatttctcattgccatatcaatctgtgcttgttcatcaagaggaattcttgcacttcgataaccttgtcttgttgcagaaacctccttttcaacaaacagacgaagcttcttaccacgtgccctcctgattctcccatctgttactttttgagacattaggtccttcacatgatttggcactttacgacatgcctccaca

SEQ ID NO: 147686 - DNA, 1137 bp, Zea Mays
gctggacctgttcaaccggccaaggatcccaaccatcatcagcattattggcattggcatcctctaattcaatttcaccattggggggatgttgaggtcaaattggaaattgggcacaggttgccccaatccaaaaaattccaccggaagttgatgcccattatgagggtacggaggtacaggttcttcatcctcaggcatgttaccaagcatgaactgctggactatgtcacactgaacagtccaggaaaccccatgaaacccttcagctactgaaaacacaataaactatggaacctcctgcagagaagtcacctgtgctctaacaagaaatctagtagcattagaaatatccggatcccacatgagcacccgaccaaaagaaccaatagcattctgaatgtgctcgtgtgaccagaaatccaagggaaacccaaggagcagcaaccaacattcatgattaaaaaataatgctcgttgattccaagccgcattgtgtctaatcacagtgaaagtaaagcccaaagcttgttgcggacccatggccacgagattgtccctatcaaaaaatgaatcggaacctcaccaaagcctgacccaagtgggagcgctgaacactcctaatctgaacatgtctaatctccaaaaggtactctcggacaatgccagcaaaaaattggaaattgacctcatgctcaggtagcggttggaccaggacaattccccaatcatcatgagcggacggttgcgggcgagtgatagtacgtaccataatctcccgatgatcaatgggttgcgccgtgaagccatgagggagaaaagggcccggatcaacacgatggaaagccattccctccgagaatccagaggtcgagtccttttggctcgccgcacactcaccacgcaggcaagggcaaagcaatggtgggattgaccgcggaggaggggtggaagagggttttgcgcacagtgcaagttcggtggaaggcgaagagccacctcttggaagaaccgcctgagcaaactcaccaaagttattaaaaaaaggcgggtgagagggcccacctgcagacgaggggcggacggacctgaaccacagctgcggggggaattcccaaacgacgccctcaaacttac

SEQ ID NO: 147687 - DNA, 432 bp, Zea Mays
cgtcctgcaagcaacacgaacatgatggagcttgtgtgtctcccctagagttgtagatggccagcaccgaattgcagacccctgtggctacatgcatccaggtgaggaaagagagttctagcagatagggccacacagttggctctccaaactcatgctcaccacatgtcgggtgaatgacccccggtcactgggacccgttagtcagagagcgcgctgaggaaagagcctctgatcgctgaggtccgttagtcagctgggagaggcgaatatgtcaaccctgaaagagcccgccctcggttgaaccctgtggcaccgagcccggggtcgggcatggcggaacctgacaggggaggccagacgtgtcggaagggaaccactcgagtgggtcccgcgctcagccctagactgactctccaaaaatagtcgaac

SEQ ID NO: 147688 - DNA, 654 bp, Zea Mays
tccgcagtgccaacaggcgtttgctggtggctggttgcttgcaacggagggtgcctgaagggagctctgactctgttgactgtagcgtgatggagtgggtccagatggtttattgaagcttggtcccctgggtggaagcccaagggtcgagctctctggtgacgttcttgctgttgcgctcggaggacttggaatttcctcttgatgtgccctttttcttcctcttttgccctttccacttggatagctttgttggagaggtgagagaagttgtggaagtcttggctggcgaggatggtcttaagcttgggtcttaatcctttcagaaaataggccatttttctggcctcggtgctgacatcctcgggcgcgtagcgggccagctctgtgaacttgtgcacatactcactgattgtccttccgccttgagttaactcccggaattcatccttgagttgaactatcccctggggtacatggtgttcacgaaaagctgcttcgaattctgcccaggtagcatctctgacggcttcactgaaagtgtcccaccatgctaaagccattcctgaaagctgatgagctgccagttgaacacgctgattctcgggacaagcgatggcttccaacttcctcttgatcgtgcgaagccagtca

SEQ ID NO: 147689 - DNA, 278 bp, Zea Mays
aagaacatcggcagcgatatcatcaggaaccacgatgttgggtctcttcatcaaaatatggccaaccaggactgccttgtctatcgccttattgcaccacactttcatgatctcacaatcatcctctaagaccttgatatatcaatgaacagcctctaactcctgtgacacaagtttcttcgaggtgcgaagatctttaatggtagaatctttggaagacagactcgctaagcgccgacacctcatcctgggattcttttagttcatttttcttgtgc

SEQ ID NO: 147690 - DNA, 493 bp, Zea Mays
gagcactgccagaaggatcctggggcggagggtaagaggacgattggcccggatccccgtgatacggaggcgggacaaactgctcacgatcatcaaaataagtttcttcttcttcatcgacgtcgtctgctgtcgaaaaaggcaccccgtatgcctgctggtaccactcgttgatctccggaggaggaggatggagaggtacatcaggagagcggggggcgaagggagtacccaaggaggaagcttgacgacgtaggttgtcgtcagtctcccgctgacgtcgaggtacctcatggacatccgcagcaatgttccggcacatggagaagaatgccgcaaacccgtgggccaagcgggcacccatcccacggccacgaactcaaccatgaccacgaccacgtggcgtgggagatccgtggccaggggagggacgcgaggcaccggtagcagcagcagcaggaccagcagacggacccgcagatgtatgagcacg

SEQ ID NO: 147691 - DNA, 345 bp, Zea Mays
gatggagggagtaatataagtttttggattgaactggttggtacatgaaacttaatatagtaccagagccagatttcacgagtatgaatcctgctagcgccattaaaatgaaataatttaagtgggttgctcctattccatgcctcagaacatggagaggctcgacgtgagagggatattagaatgtaatttaagtgagttgtcaacctcttcctaacagattaagattttgagttgaattggttattgcgtccactctatcggagctagaggcctcgagttcgaattctggcaaaggctttatttgtgcctccgaccctttatttacacattttctcctttttt

SEQ ID NO: 147692 - DNA, 299 bp, Zea Mays
tacaaagcctcaaatggtgacatcttcaaactagcctggtagctattattataagaaaactcagcatagggtaagctcttctcccaacttccaccatgcttgagagcacaagctcttaacatatcttccagcacttgattagttctctctgtctgtccatcagtctggggatggtaggctgaactaaaattcaactgtgtatccaagctctcgtgcaacttcttccaaaatcgagaagtaaactgtgatcctcgatcagacacgatcttcttaggcacaccatgtaggcaaactatccg

SEQ ID NO: 147693 - DNA, 497 bp, Zea Mays
tgaagaaacatagtagctaggactagatcactaggagatgggttgccaacttgccattctctgaataaaattctcgatgcccctcctcttcttttgtaccatcggagttcctagtttctatttgcaattctttgttcttggtgctgctgctgctctcaacaagtccaccgggaggtgaaagcttgtggttgtggccgtgcggaggcttgcaaagttctggcgccaggttgggtgccaatgtatttgtaggatgtttttagattaaaacgcggatccatcgctattctagcagtctgcagtatatatgcagtctgaatgtctaattgtttgttcatatcgattgctgctgcatcgcttaaattgattttaccattcatctctgagcaaatcatataccagcatgctatagttttgtttcgaaatttagattaagcttgctacagtagcagcgacttagggcagataaacagatccggagccctcgaaatttcgattgt

SEQ ID NO: 147694 - DNA, 487 bp, Zea Mays
tcccgccacgtcgtctgggaatggcggattgcatgctcgttggattcgctacacgtgctgtacaagagacggcgcacacactgccacctgctgctcatgatccgactccacctccagacgttcgcatctccttccttgcagagagtttgattctactagcgtgctggatcattccattccattccattgagaaatcgagataccataccccccgtatacacacggcacttgctgtgttttctagactctttcctggcacgacatgacacggcagattcgtaggactgctggaggcacgagcgcggaagcagacgttgtatgtacccagagaccaagggaatcgaaaggaatgtgcacggttggcgacgcggtcggttctttcgcggcgggcggcgaaccggatcttccccggggatcctgtaccgtgcatatggatgtggcgtgccggtgccggtgccggccatccacgcgcggtgcacgtcgccgc

SEQ ID NO: 147695 - DNA, 712 bp, Zea Mays
tgaagaagcaaatatgagaagagccctcttcgttacaatagtgggaaccagaccattagtgatggggcctgaggttcttgaggaagttgctcacagttttaacgtcaagttggaggatatgaagattcatcaaaccaagccagaggattttcttctgattttacctgacgaagatactgcttcaagggtgcttaatggcggcaagattctaagaggacctcgtttcagcctgatattcaagcggtggacgagatgctctcacgcctcatcttcgataatgtcagggctggtagacttggaaatcagagggatcccggtgcatgcttgggcactttctacggcaaaaagtattctgattgactcctgcttgatagctgaagtgcaccctgacactttgctcaagcaagatctatcttcgtttgttgtcaaagtttggtgttttaacccggagaaactccaacgtgattcagttcttcacattattgagcctgggttgcagatgtttgagaaaagatgcctcacatacaagattcaagttagcgtgctgagggcgagttcaagcatcacaccagcggaccccacttcatctgtggctggcggaaaatccccaggggatgaagacggaaatggaactcaagatccccaccctcgacgtccaggtggctctcaggtccagcggaggccgttacaccttcgattgggcccacagtcg

SEQ ID NO: 147696 - DNA, 529 bp, Zea Mays
ttacatcaaggatttcaatggagttgcgcttcttcatttctcataattgttggtggaactattctgctcatccataggtaagtgctaaacactatctctttcagtgacaatatttatgctttggtaaactctctctctgatatattaatattgttgttacaatgtagattgtttctgaccccgtgacatggacttttgggtgcttatacatttattatttttctttacctcgaggattttccccggagctatgtttctccatttttcataattgtggtagaacagttctggttatctataggcaagtcctaaacactatctcttccagcgacgacatttacacttctgtaatctttctgcctgagctattagctggaacatctttttaccatgacaaatattgtcgcctagctcattcccatcaaagaaattcaaaatagcagtccacaacccgagttatgcaaaatcacgtaaaggatatgaatagggtatttcctcttagattttctagcatttttcagattcaaac

SEQ ID NO: 147697 - DNA, 988 bp, Zea Mays
ctgccatgtcatcatcatcatcgtcgtcgtcaggcatgtccagcgacggctccaacgggagcccatcccttgcttgcctccgacgacacttctccaaagcttcccgggctcgcatcctctcgcgagctcgggccttttccgcgtccttcttctccttgtccttctccgtggcgagcctacgcacggtccggcccgccgcgtcctccgggaccggtggccgggagagtttaaaattcctcaacccctagggacgaacaaaaatcccaacagtaagaactaaagacgtaagaaacacggcgcaaaacagaaggagggtcggacacttaccagggacacatacccatggtcgggatgcatcgggggttggccaaggacgccagcgtccagcctccctaccgtgctcgctacccgtctgaggaggtcgtcggcggagagggaggtcgaggacatctgtgaaccctccaaatcaacccccggctccatttccgaaagccgcaaccgctgctctgccaatgggagcaccctccggtggtggatagcggcgacgacccccgcggcggtaaggccctcggtgtgtaacttctgcagagcatggagaatgggctggagcttctccttgttttcgcgtgtggccccccagcgccagttgtcaccggcggcggtcaccactcgttgagaaaacggtggaagcatcccgtcgtcgttccggagataaaaccaccgattctgccaccccttgttcgaagacacaagggaggcagggatgtactgttgtgcccgccctgacctcagctggagggtgcaaccgctagcccgcaccgccatacggacctttttcacatccgtcgacgcgacgaagagatgggtccacaggtcccagtgggggtcaatccccagaaacccctcacaaaccaccatgaaaatagtcgcctgcgcgatggagttggggttgaagttatgtagctccaccccgtagtagtgcgggagc

SEQ ID NO: 147698 - DNA, 357 bp, Zea Mays
cctaatggatttcaacacagtatgtacttacatcggtaccagggatttagttcaagaacacatcactttcaaagtatggcctcttgcgaatgaatgggaaaatgtcgaaggaaactaccgctggctccagtcagggtggcttggtttatcttaagtacaccttccggtacaaaagccaatttgacgagccaaatgatgattggctagacgctatagaggcaacgagtgatgagctacttggagcctactcgaggataaaggactaggccatgactgctgccttcggcgctcgagggaaaatgagactgaatagggtttttgatgttattgggtttgtttaccctaattactgttttc

SEQ ID NO: 147699 - DNA, 720 bp, Zea Mays
catcagtcctcgattttggtcgtcgaatattatgttgaagtcttgttccatagcgatgtgcgggagcagaagggggaaaacctcagctggatgggccaaattttcattgacaataccacctgtaggcgcctgctgatcagatggaatcatagtcgattcaggggacccgtctaggttggtaggcaaataatccgaaattggcgcgtgagcgactggttcaacatccgggtaagacaccgaggccatcaaattttctacagattccaaagacgcttgcacctgcacagttgatcgggccatcagattttctgtagatgacacgttagcaggaacagaccacatatgatcataatcaaatgaactaatatcacccaattgagacgatcgtgagttattgggaaggatcgtttgaggaggctgggaagatggatgacgtttggtaaatggaaaaagaccttcatcaaaaatgattgcacgagagatataaacatgcccagaagtgacatcaaggcatttgtagcctttatgaatggaactatagccaataaaaacacactccttagatcggaaagagagtttggtgctgttatagggacgcaagtgtggccaacatgtgcacctgaaaatgcgtagcatggaataatttggatgtgtatgaaaatcctttctaaaggagtggtattgttgatcacacgactcggaagcctattaattagatag

SEQ ID NO: 147700 - DNA, 441 bp, Zea Mays
aaatctgaaaaatctttaatacctcaaccacaaatttgctcagtgggaaccggagacctgctttcaggaagcttcgataaataaccacttcgttttcctcaggagcaggggcagtgttgtctcctccaactctgacaatagacatgtcgcgaaaatatcaccccctcatggcgtcaatatggctctgtttgatagtcgactttccgaaaatagtatgacttcgccgccagggccgatcctcagaatcttcatccccactctccacgtcataactatcactgtcatcagaatcttcagacaaaccctccatgatctccttagtaattttctttgtattcgtttttgccatggattcataaaacccaacgacgaaaggatctgcaactttcttctcttcatacaacttcttctcctcggttattttcttctcttcagtcatct

SEQ ID NO: 147701 - DNA, 619 bp, Zea Mays
aagggagaactatgggcttgttactttccgcgaagtggctttgctttttgatgaggagtcttcaatggaatccagcaaacagagtgtacctttcgttactcagactctttgttcacaactttccaccatctagctttcacttgttataaatgacaagttgctaccatatttgggaatcagataatattatttctgtaataaaaatacaggattgcattgaattcatagttagattggtcatttcaggcgatcaaataccagatgtagagaagtccttgctttaaccacctcaaatttctttgttttagattgcaattactgtagcacatgagctggctcatcagtggtttggcaatcttgtaaccatggagtggtggacccacttgtggctaaatgaaggttttgctacatgggtaatcaattttagaacctaacatttcgatgtttcagttcgtaggctgccactatatattgagtaaatagaattttcttttaacagatgagtaatctagctgtaaattctttctttccgcaatggaatatctggacacaatttcttgatgacacaaccgctggtctcaaattggattcacttgaagagtctcaccctattgaggta

SEQ ID NO: 147702 - DNA, 627 bp, Zea Mays
gggggctgggtctcagctcgcgttacccatccgagccggatcatctccggcaacaccctcgggggctgggtaagcgctagcgccatccatgagggccgagttctctgcaacagccacctctaaggctgaaggaccctcagtcacttccgtgggggcagagcaatccagaccagcctcctgaccctcaagaccgcgctctaaggttgatgaggcacgggacgctgcccgggatgaccccaacccgacatcgggcacatcagcacaaacaaccatcacgcaaccatctgccggctctggcaacagatcttctggaaccatgtcttcaagagtttgatcaaagttcgccaaagataattcttgcaaaccaatgagggcagacaaagcaggagaaggaacaccactactttccccactagctatgtaacgccggctgttcttccgaatcagagggatttcatcctcttcttcatcatcttcatcaacaacacggacaatacacccattgggttcagcatcagatgggtcacacccattgggatcagcttcagcaaattcaggcactggcacttcctcagcaacaggaacagaaggaccggcaccctgatccaagctagacactcgacgaag

SEQ ID NO: 147703 - DNA, 590 bp, Zea Mays
agtgcttataaatgcactgtagtttactcactattcatgttgccatgaaaaagaaatacatccatcttcatctagctaaatatttgaaggagtatcataaattcttatatgttcagcttattttcttgttagctataaagtggtgcttcccagtggtatgcatgatcatatccatgcattaataggattgtcagaattgggtaatggtataagtaacatattctttttgaaatgtgattctgagcttgtgtagataaatgttcctcattgaactatgaattacacatcaagctctaaatttacatgttgtgctgttgagtctaaactacatgcaacgattgtaattgaactgatttcttaccttgcagcgtctagaatcccaactatcaagaaccattaaaattttatcaacaaattgaggcacacagtaccagtaggttagactgtttgctatatgttttggctaatttacaagaatgatttgtgatgaaccctgcaagttaaggcttgctgtgacaatgttttaagttgggctttggttcagatgaaacacatggcattgttcccttctctttggaaaatatgaagca

SEQ ID NO: 147704 - DNA, 443 bp, Zea Mays
taaatttgtatcaaattaatataggactctagacctgaggacccaaatatattacctccacggagaggacctatccctcaaccaatgaatctacggttccgtgaagagtcttttgcgacaccgacccacttccccatgcattcgccatcacagaccggagggccccatgcattcgccatcacagaccggagggcctgccttttcggttgactgcataggatgcaaatcaatcacaagaaatatctatccaaatactctaggaacaggataaaaagtggaagggagagatcggctagtaaacataaggaagaaaaaaaacctgatcttcaccgagaacacatccagttgcacagggaccagtgcggcatgatttgtggtcagactggcgcactgaaatggaatcgatgcaacgcttcaaatataggcgtgaactggcgacgcac

SEQ ID NO: 147705 - DNA, 281 bp, Zea Mays
tcaatgatgtcaactcagagttacttttatgcatgtctgccttgaacccagagaatatgttccatcattttaacactgaaaagttaatcaatttagctaagtgctatcctgctgattttagttacaaggatatggaaactcttgagcgtgagcttggactatatattgacaatgtactgcatgatacagaattctcaaacttgcaaagtattggtgatttggctaaattgatggtgacttcaaaaaagaatttttcatatccattagtgcatcgtctcatt

SEQ ID NO: 147706 - DNA, 993 bp, Zea Mays
cgaaaacctctccctccgcgctagggcttagccgccgtcaacgcatccacagcccgacgccgaaatcctcgctcgcccccaaatcctccgccaccgcgcccttccatcgacgacggactacccacgctttcgcatctcctgagctccgaggggcccccgccgcctccctcgctcatcgcccttccatcgacgcccttccaggtacgtgggcgcccccaagctcctcgcccttccaggtacggccccgccccgtatctccccttcatcggcgcccgtatctcctcgccctcccatccacagctactgcgctcgcccctttccatcgtcattgccctcttccatctgcagatcccctacgacctcgttagcggtgtgccctacatcgcactccccatcaccgccgtactctctatccacgccttgccccacccgggcgcagcacctctcggtcgcgccgccaccggaggtctgcccccctaagaacagaggcagcgtcattgccgacgacggagcccacacatttgtggatcccgcagagtggagctccgtctcctcttcccaagaggtgggtgctctccgttctcggggagggcgacgcttgtcggtgggcgtcgtgccagcagcatcaacgacgacaatctggtgaacctcgttttcgggagtcacctcccctcaagctaccgacacccttcttcctcacgcgcgtcagtaggcctcctccccatcccactttagttcactgccttttagagccaccgacgatgaggaacaaccccgtggttggtgccgggctgcctccctagcggtgggcattgtcggatgcgcgcatcaatggggccactcaatccatcgccaccccaccacgtcagattatgtacccttggctgctccgtatgggcagcgacggtgtgtgatggggttggggaccgtggttgtgggttcggcaacactcccgtgctgggaactggttggttcgcgagagatcttagccgc

SEQ ID NO: 147707 - DNA, 325 bp, Zea Mays
cgccttttcgttctctgtcatgggcacccgttcggctcccatccctaaaagagtttcgctcgactttcaattggcttcggttgctgggtcgactgctatactcggttgcaggcatcttctcgtttctaacgctggccacctctcgcgtactgttgccgagcaaaccctcttgccctcaccttctcgatctcatcagttcggtggtctctcgttgttgccctcgtctctcttgcaaatggccaacttcccggtggatcctcgtcccttcctcccgccggagatcgtcattgaaaatgctcagcctgctagtggctaccagcctccc

SEQ ID NO: 147708 - DNA, 682 bp, Zea Mays
tctcaaacgaagcgcgctactagagctgattgttgggtattaacaggtggccaggtgggcctaaacactcagagacaaaagacacctcaggtgcacgacaagacggtaggtagggaaatgtagcatctcgttatgtatgtatcattccgctacaagatgggggctttataggtcggtccggggtagccggataggtggcccaaagtacattactgcccccagtcagcgaccacatttttacaacatgtactgtacaacgaggtaattacagtgccgcagcccccactagttacgtgtacacacaattatacccactgattacattgacaggtgggccccacatagcatcattgcgtgtccacgaccaagataggtacgtcttctgcattcgctgccttcgtccagacgagccttcgcatctcctaccggcccttatcgagatggctcatttagaaggcttcagttccggacatctcgtcccttgtagtggtcgaggactcccgagccctcgtcttcactgaccgatggccgatgtcaatgaagtcattgtcaagtgaattctctggtcagctacagtgctacagttagttgaggtggttggcgaagacttcatgtttctgtccaaaggcctgttcgacattcatcccaacaatacccctcgagggaccgattcatcctgatg

SEQ ID NO: 147709 - DNA, 357 bp, Zea Mays
atactctccctaatttccattggctctcagatgtgcaaggggcaatctcagtcagagtcattgctgaattcctggaactttgtgaagtgcttgatgcagttgtgctccagcctggaataagggatcgatatttatggaaattcagcgcttcaggtgattatacatctagttctgcttataatgctctcttccttggttcagttcagttcgaaccagcagagcggctatggaaatcttgggctcctgggaagtgcaagttctttatatggcttgtggaacataataggtgctggactgctgacaggctcagaaaaagagggctagaccgaccagagcagtgccccttgtgcgaccaag

SEQ ID NO: 147710 - DNA, 370 bp, Zea Mays
gcaagactcacgaaatggcgagatgaagaaaacaatcacgggtaaggtgggtaaggttccaacagaatggtttagcaaaagaaattattaccaagggaagttatagggaattaatgagatcaccaaggatgtgcaaaataaaatgaccgctcatggatcattaagaaaccagggtgatcaagggcatgttaactgaaatgtcttaaacagacattggggcatgaagataagcatacacgaaaatataagagtatgcaagactcaaatgatacgagcgtactaggaccaaggtaatagaaattgtcgaaagatagtgtcttaacaacagaataagaaaggatctcagaagacaagaaggtcatagacacat

SEQ ID NO: 147711 - DNA, 327 bp, Zea Mays
ctggagtagatgagagtcctcacattgtgtgcagccatggcttctagcactgctagagtgtttgcagtgatgttgcggtagtacctgttcgaagcaatttaagagagtattatgtgcaggcaggggactgaaactgatgtatttgaaacaacagtttgaacacattatgtatgttaaaccagaacaaactcaacttctggtgtccgctagaatttaaaaagggagataaaatgctcacattatggtagcccctttaaaccatctctcatgaattaaaattaagcagaagaatgaatcaaataagtagctgaattacctcacattgat

SEQ ID NO: 147712 - DNA, 824 bp, Zea Mays
gcaggagcacatgtgggaagtaggattcccaatcagctgtacaaaagaccctgtcaagctttacaagcattgggttattctgctggtttgactaggtgaactttcagccatgtaaaggaatttcacgaagggcaaggtcatttatcgctgtcctaaaacgacacatcattgccctgttgaggttgttgtttttgtcagaagttttatagatcagattaaaatctcctgctaccacccaagaaccagtacatgctctcctgacctcccttagttcctggaggaaaagaattttgtcagcatgtccctgaggcccatttacacatgttaaccaccagggctgtccatcctctctgcaaaattggacagagacacgatggctgtcaattctctgtatactacctcatgcattgttggaaggaagcatgactcggtagcatgacacatctcgagctctagacattgttattaatttttccctaaaaagtttatttgtgacattcattagctctttgctattatgcaatcataacatattagaattttattacttccattaaatttaacgagacttatccaggctttccttttgtaacaaagctacatgggctgtactgcctgtggaaggggccacatgcacttattgcagttttgtttagtttgttgtcatttgctgcaatactaatgctaagtggtttgaacattccgtaaatgccaaccccaattagatgttaaagaatattttaaaataaaccacagtagctatattaaaatcattttggtgaacatgttactgttatggcagtgatgatatgagtgttaactta

SEQ ID NO: 147713 - DNA, 826 bp, Zea Mays
aaatagaaaaaaaaagataggaaaaaaaacgaacctgacattggacctggcatcctgacgttggactcaatccatctccatcccatatagccgagctacatatcctagtgttacctgatttttttcctctatttatttatcccttgccggagattaaatcaacatgatctcatgcgtgacgtcaattattcccacgtaacactgcctgtgggccccttggctagcggtgtctctcagatgcgagctcgttaaacagacgcttccgtaagcatcaccagggtggttgcgacctgtgcatggctgttcagacttggttccctcggagtatatgtctggcaacacctttggccatggcgcagataatggttaagctaggctgccaggctaaaccttagtcgagcggagcgagagaaagacaaagaagggtatgtcgtcgcggcaggcgatcgtcgcgtgcacggccaggtctgagcgcgacatgtggtatagaaggatagcaggagatcaggatcgtgcgcgtgcgagtttccatgcagaagaccatctggggatgcaagatccctcgtcgaagatgcaaagctgtcgatctgtttccagccatatgcaacctcgccttcacctctacaactgtggtgagtcacccgatctaatcatggccccgcggtgcgtagaacctcttgcatgaaatttagttcgctggaaaatctgggtcgtgggattggagttggccggcaatggcaccgtcgccctaggcgctctcatccctcgcgtccgtcggtcggagtgaagaagacaaccgggatccattgatccgggagcgtacggc

SEQ ID NO: 147714 - DNA, 532 bp, Zea Mays
ttctaaaacaccggcgtgccatgtcattactcggcggttacttctaaagcaccggtatgccacatcatcactcggctattatcctcaaagtggccgacgcagcccattctaactcggctgttatttctaaaacgccgacgttaccatcattcactcggtagttatctctaaaacgctgacgtcgtcttcagtcgctcggcagttatctctaaaactccgacgtcgtcttcaagtcactcagcagttatttctaaaacgctgacgtcgtcttcagtcgctcggcagttatctctagaacgccgacatcgtcttcagtcactcgccagttacctctaaaacgccgacctcgtcataagtcgctcgactgttacctctaagaacgccgacgtggtcatcagtcattccgacgctgacgtggcttcgtcatcactcggacgctatttcaaaagcgtaaatgttgacaataatagctcggccatcacccctaaaagcgacgatatgacgcccgagttactcagttactattccagag

SEQ ID NO: 147715 - DNA, 419 bp, Zea Mays
agctaccgaggccgaagccgaagctaccggggccaaagccgggaccaccgaagagtcgaacctggaaaccacacttgaggttattgacaatatactcctgaaaatggctgaagaagaagctgttatggctgcggtgaacacggcaactgaaaaggggaaagagcaaattggtgaaatttcggaggaaggagattttaactttcaagatttgcttggacaagagctaacagacaccgaaaaagaagaattgaaaaaacatgccatatcttgcggatataaatcaggagctatgctatttggtagggtcaatgaggggaagttaaggtgccttcagaaccgtaccgaggccaaaattgttaggaccctctcaaaaagcattggcttgccgaagatagaaacagacctctgcagataccagc

SEQ ID NO: 147716 - DNA, 599 bp, Zea Mays
ctaaaatttatgttcattgaacccataagtttatggtatatcttcatcagctaccaattaatatcatccttagtctcaatagctaccagacaatatcgttcttggtgacttggtctcagtttgattagtgcagttgcttatgatccatggataaattgttgtggtacaactgctagaatatatactgcattactgctaggttgaatttttttaggactgcaaaggtccagaaacctatgccaaaagagggcagcaccgattgtctcaggaaggcgcaatcaaattgaccaaagcctaatcctcaaacattttgatcgtccaaagtcttcacaagtcaccatatcatgagatcaagggacaaccaaaacaagctacacaaaaggagataataaagtggaacatcagagctatcgtaagcatgaatttgaagttgccaaattggagcaaaagaaataacttcagcatgacagaaaccatatttggatgttgcatgaagtccctgaagatgcagtgacctattcaatagaaaattcaaacatatagtagattatgtgtatggagtcccaaacttcagattcatcacagatttcctaagcaag

SEQ ID NO: 147717 - DNA, 551 bp, Zea Mays
tgccgctgccgctgtggccggtgatttccacacgtcgacttccggtaagaagtactctattgcgttcgcattgtcctacactccgcgagtattcgatcggttctagggattgagctatgtggccggggcacattgctcgccggcgttcactgcctcgtggcgccgtcgctgttggggcagtcgctcagctcggtctggggtaggtgatgatgcgagggccgttgatctccctgtgttcggcttagattaaatggttcatgttactttggcccgatccgatctaaatcgtggatatgaaattgagtggctgagattagatcatgaaataccggtttgtccaattagatctgagccgtcgatccttgatcctatggttctgagagcttaccggttcaagtgagactgatttaatttgagcccttggtttagatcggacggccaccattcaacgataccctttcggctacgtgtttttcaaaagagtccctgtactatataagaatcaacccgccatcctacgtgactatgctctgtgtcttaggagttttacc

SEQ ID NO: 147718 - DNA, 523 bp, Zea Mays
catgtaccagtgacagcatatagtactgcattacatattacacctcacctaaccttccacatacgcctgatgcagcagtcatgccgttgcgctctgaagaagcaccaaaagtgatggcacagcacagacaaggctagcacataaaagctaaagctctctgatgcaatgcaagaaaccaaaggggagatgagaaaagacgagcgctttggacctttggtggggctgaggtgaattaatgcctttgttctcatgggctggatgggctataggctggcacggtcctactcgaatccatcacaccgcgcaaccgattgtgcacccagtaaagtgaagatatgactgtcccaaccacacaaacaacgttaatataataatagcataattaattttccatatgaaaaaaaggaattgccaacacatccacaaacgacaaagcaacaaggattccagagagaagtaccaagtactggtccagaggttttttttagatcggaccaagcggttctttgatgagtggaagtat

SEQ ID NO: 147719 - DNA, 889 bp, Zea Mays
cctccatcttcttacacttgcgacctctcgattcggccgaggaggcacgacaccagggagaccgagctccgccgccgccgtagagattcgtgcactggttgcggttcggggtgctctggtgggcaccggagtatagctcggcgctcgcgacagtggtggcgacctgataaccgcggcgcgccggtggacctctaccaatttctcataggagctgctctgccgtcgcggggccatatgtcaccgtggacgggactctctacaccatgattcccggtaaggaaaccctctaccgactcgccatgatctccgtactgcgttgcgtgtaggggcttacgaattggggcacaggggcgccgatttggtcagctctgtcatggcggccgccgcgtcgagcgcgctccggcgcttgcagactgccgcgggggaagaagcacgcatggccgtcgatcttgatctgagcgggcgagattagatgtggcttaccgattcattttcgaccgttggatcgtgtccaggagctccagattagaagttggtgtggaacgcctggcaccgtagattttagatcggatggtgagtgttagataccggtttagatgtgatccaatctaatctgtgccgtccttagcggatcgagtggacgagagttaaccgtaacccttcggcctcgtacatttataaaagaacccctgagtttctagggagtaaacccgccatccaagggggtgctgtttgtgtctcggttgttttacacttgtgaccctgtcttctctgataatcgaggcccagtccagaggattataaaatccagaaaaaggaattagaaaattattttgaatgcaaaaataaatgctagaatttgattaattcatacaaaattcatattaag

SEQ ID NO: 147720 - DNA, 423 bp, Zea Mays
ggctgagcccgctgcagcggctggccaaagtgctcggtgcgtactcgttgcaccaccgccgcgatatggcgtcgccggcaaacaaagggtgaaggatcgtagcgttattgttttgccgtgtttctctgcccggttattgttcatacaagagtacaagacgtatcttcgtttgcatagtgtgaaaccatgtccaagtgcaatttgcaacaaatagtgctcttcttattggtttctcactctgagtttgactctattatgatcgtgcattcctgtaggcagtgccaactgccaaatgcagcttaacatctctccctctctcctatttcaaataggtacaaaacttgccgtagagacctagaggctattgtgttcaagatggttaggaggatgcagtccactttgctctagcaccgtgtagtcatg

SEQ ID NO: 147721 - DNA, 537 bp, Zea Mays
tgtggtgacctctggatttgtcctccagttccagaactgaataaaggaagggctaaagctggtaggtatggtaatggtggttttactagatgcgtgttgagacgatctgtcacggaccatgatcgtgattgatgatactgtgttccactaactccgcttctttcatgcttttgtatagaggtcgttcggttacagcagctgttccattgggtggcaccgtgtagaacttgaataggtcagttccatcattgcataacttcattacctctggagattgcaagagtagttgttgcttactgattgttatacaaaaaaaaaatgaaggattgcgctgcttagctgatcagatgatgtagagactatttcagatcacgcatgtatagatacatgttcaacaaaagagatgcaaggtgatacacacaccaaacaactgttggctaccagacatgactacccccttttgtactactgcttgtatctgttttttgtactactgctatgtatctgattttgacattgcagctagataaagttaaa

SEQ ID NO: 147722 - DNA, 1402 bp, Zea Mays
atgaaattgttgttcgacgatgaaaacatgtgtcgcgggaggccaaaaatagccttaccggcctccaaggccaaaaatgtgtacaatggttcggacactagtgtactatggtttggacactaaattggttgttcggccatgaaaacttgtgttgtagctcacgcgaggcccaaaacagccttactttactttttagggttgtgttttagggtttggagtttggggtttggagtttagggtttacagtgacactagtgtactatggtttggacactaaattggttgttcggccatgaaaacgtgtgttgtagctcaagcgaggccaaaaacagccttactttactgtttagtgttgtgtttttgggtttggagttgtgttttggtgttcgggttttcgttttagggtttggggtatagggttcacaatttagggttcagggttcagggttcgggctttagggtttggggctctgtgtttagagtttgggcgggaggcatgaaatcgttgttcgacgacgaaaacatgtgtcgcgggaggccaaaaatagccttaccggcctccggggccaaatgcgtgtacaatggttcggacactagtgtactatggtttggacactaaattggttgttcggccatgaaaacgtgtgttgtagctcacgcgaggccaaaaacagccttacattactttttagggttgtgttttagggtttgaagtttggggtttggagttttgtgttttggtggtcgggtctttgatttagggttcgaggtatagggttcacaaattagggtttggggttcaatgttcaggccttagcgtttggggctcgaggtttagagcttaggcttttgggattcgagatttcgggtttcgatttgagggttagcgtttggggtttaatgtttagggtttggagtttgggatttgtgattttgtgttttgggggtcgggttttagtctaagggttcgcggttacgggttcatggtttagggtttggggctcggggtttaggatttaagtgttttgtgtgatgtagctcaatagatgctaaaaacaacctttcccatgccagtagccaaaacatgtttggcgggcgggaggcatgaaattgttgttcgacgaagaaaacatgtgtcgcgggacgccaaaaatagccttacaggcctccggggacaaaaatgtgtactatggttttaacactagtgtactatggttggacactaaattggttgttcggccatgaaaacatgtgttgtagctcacgcgaggccaaaaacagccttacctgtcttagtggccaaaacaagggtggcgaacgggtggcatcaaattgttgttcaacgacaaaaacatgtgtcgcgggaggccaaaatagccttaccgtcctccggggaccaaaa

SEQ ID NO: 147723 - DNA, 399 bp, Zea Mays
gaaagttctgtttgccaagtattcctgcactaaatccctggtgccaatatgcccaaccaccaccctgaattctacttcggccaattggcatggggagccgagttgcatgttgcatagtggtctcgtcatgccgaagcttaatttcaagggacttattaccatactcataagcttctctcttctcttctcatcagctttcacataaaaccactcatttgtccagccagtaggccatttggtgcgatatccaatcactggggccttcgtatcttttcgatatgaaaaattatagcatccgaagttcttatgcagaccatcgtctctagcctttgtctgataatgaagttcatgtacacgacaaaacccttcggcattggcactttttccttggctccggag

SEQ ID NO: 147724 - DNA, 560 bp, Zea Mays
gacagaagcttgtaaaaccgcttctcggggtcgatgaggcatgccaaatctgcttggtgcgtgatcggagagtaagagaggccccaaaataagtatgccaaaagtcatttcctatgctaagtaccaagaaaaacggggaggtaaccattttcacttattccatagggaacattacaaaagcattaaggccgacacgcccgggccgtcccacgactaaagccacctacaaacgcttcctaactagggagatccattgactacattcgttagcgggatgatgttgacatgcccaggccgtccgcccgtcccatggctaaagctagtgccaagctcgtagcccgaccggaacttcagaaagctagggctctagcagcaccacgatgaaccaccaattgcacccgattaatgatgtctaggaggcgctctccttgatcggcgccctaggcccgaacaaagtcaaccacctcgtacacaccctcacgaaggtcagcaagctccagctctaactctaaaagtggcacaagacaatcagagagagagaggagtgagacaaatagaaa

SEQ ID NO: 147725 - DNA, 814 bp, Zea Mays
gtcgaccttccagcaggagcgccaagcatcgcgcgggtgcccgcgatggggagcaagccggccggtgatgccgccgagggggaggagtggaagtccatcagcggcgagagacaccggtatgcgggccaaggcggacgaggagagtagcgaaacggcggtcggatctcactgtcactcagctgcctcgtcttcctccctcaagctctcgattcactgatgctactcgatgagcagggcagggcggttgacaaggaggttattttgccggccatcagaccccacaaatcaccgaccactaccgcagtaaacaaggcacagaatacgcgagtataaaactcccagggagatacgcaccggagatccaagtgatgactggaatgatggccgccggagacgccagatgcggacgacccttcccccggcaagcgctactccaccggcgagcctcacagcggcaatcggcacgagctctctctcacgggtaacagcgcgtttcactctccctccctgatttctctctgcaggcaacgcggtgcatcccgactcgtgggcaactgcggcggcgatgtcatgcgcatggcgatccggggtcttatcccacgacgcggcggactcggtcagtcgttcctcaaatcatgcgtggcggcggagatttcggtcatggccgttgcggaggcgcgggatgacacgcgggtcccagcagcagcggcgtgagtgagatgaatgcgacagacagacgaggtcccatattccagtgaagcagatttgcccaacgcgtggatggccactgacaggcatggcccgcctgtcggcg

SEQ ID NO: 147726 - DNA, 511 bp, Zea Mays
aatcaccctcgggcatttttttctcgtttggtgaccacgcaccccggcccgatccacggaggagcacggtgttgccgcccccggcctcagagggtcgggaagggtttccccgtctccactcttgtgaagccgccgcctccctctcgaactcgtcgtcgtccactgcttcctcttccttgcgcacggcgtctcacgcacagctgcctcctcttcttcacgctcctcttcctcgcgcatggtgtctcacgcacgacagcctcctctacttcacgcatagcaccaaagccccctcctcttcgccgcgcgcggcggcctactcttcctcgcacagagcagcatacccccctcttcctcacgcaaggtggcctcctcagctcgcgcacggcgacctcctattcctcgcacaaagcagcagagccccgttctcttcctcgcgcgcagcagtttcattttctcgcgccagcctcctcttcctggttgcttctcagctcacgtactgcttacgacctcc

SEQ ID NO: 147727 - DNA, 558 bp, Zea Mays
ctctcccccgtcgagcgaggagctcatgcttattcttgccatctcacactcagttccccactctcccaaccttcctcaccttcctcgacaataataaggtgagtgtagcatacgacatggtaggcattacatggcctagcgtggcaatttgggtgcagcaccacatcgacgatgcaacgtaggcaagcatgaggtagtagagtgagcatggtgcagcactacgcgactacacaggtaaggtgagcatgtgcagtgtggcgaaggtgaggacgatggtgcgggggtggatggaccataatggtatagtaatataactttaggaattttattatgcgatttgcaagtactaggactaaaatgagaaattggggcaaggttaggtacctgatgttggaaggtggaaggagggagaacagtagattgattggtaggcatatgcagtgttacatatatatagggtaggaacccttgggggctaaggcacctagggccggtgcgcccaacctgtaaaggcaatcaactctactatggaaagcctcaatcacacacaaatgaaag

SEQ ID NO: 147728 - DNA, 467 bp, Zea Mays
gaagtgtgcgcttggtttgaatttaggcgaagaaagtggattttgggcactcggctcggaatcgatcgctagaaatggggatttgtggaaaactggtgcctgggatatctgattggtgtgaaatttggcaaatatgttacgtgaggtgtcatgagggtgctagaaaaatctgggatcgatttgagcaaatttgagtggttcgggcatttcatcgagtacctggcatgcggggttttgaattgagggggaaatggctatatgagtagatgaaacctcccaaagggagaagattacctgcaggggaactcaaaagggcactagggcacacatctaacaacttgattcacaggaattgcacaaatttgatttaaggaatcaaggggtggtggagggagagttcactggatagacagaagagagggagagggaaagaaagcagagaaatgccttaccagagaatggagagg

SEQ ID NO: 147729 - DNA, 575 bp, Zea Mays
ttgggtctctcgtggttaccaaggctgttgtagccgctgtctaggagcgcgagtgggtggctgccctcgtaagggaacaggagtgcagtgatgtggacgccctcgctcgtcaactcgtgaaggctaagcggcatctcgatggtccttcctgctctcgaaccacccctgcactacctgtggttgatccaccggtagcatacaaagttgtggtcgtagccatcctccatgcccaagcgacgggtatatagaacatctggtccctagctagttcctgtcctcctcgacccaaccttctacatctgttggcgcgacctcgtcctcctcccttgcaacgtttcgccctcggtgaccatgtcctcaccgatacgacataccctccttgcgacggatggatagtatagtcctgtccaagatcctgaggcccgttacggtagagctctaggatgtcgtccatgagtgtggtggcattgtgcgctaggcctaggttgccatcgagaggaatagttcctcggcaactaaggcccatgctctgcacctcaacgccaccttcgtgcagggcgaccgctctatcatcg

SEQ ID NO: 147730 - DNA, 560 bp, Zea Mays
ggtacttattcttgcaatatttcagtttctagatatatagtattgaaatttcaaatattttgaatataaaaatgagaaagctacctgaataggctaaacgccgggaagggcctttagaactcagatgggcccaaatgagaaaacaaatgggccggaaatcgtaggggcgtttcccaaccattttacaacttttttttggttaattatatctgtgtcattacaattttctagttttgatatgtgccactaaactttttaagctttcacatatgccattaaacttctaatccctactactttataagatatgaacgtgggcgtccacatcttcttggtgaagcctccgccgtgcccccgcatgtcctgcatcgcgcaattctcgtcgcgagagccccggatgaccgcccctcgcgcgatgctcgctgcgacagccgcccatcccctccctcaacgccatgcctgcataaaagggaggtgcagtgactttcgcgcacggcaacggggcacactcccccacgttgtcgtgattgtcgccgccgactgcgcccccacacctcccg

SEQ ID NO: 147731 - DNA, 518 bp, Zea Mays
atgagatagtaataactgatggatatttacttattgccatctctaagcctgtatccatgataccgacaatatccaaaattctatatagttgctggctcatacgaacgaaacgacgtgaacaagcatagtagtgcagcggtaagttgcttacctgtactgaatgtctggacctgtcatgtacaggcaatttcaacatatttttatttatgtactatatataactacctcatgcgtcagatgtccaggtgatgaatttcatataaacttcaaccaactgattcgtacgtgtacaaatagatgacaatggaatcaaattgtacagatagcatatgttcggtgagacatttttcggctaagatactcaactagtacctagtaccagatttccagtcacaagtgagcataatgagtgtcatgcgagcaggttgcctgtactggtttcgcctgccatatattttggaggggcagctattcatatcaggaattttacacaaatttctgattaccagtccaaaaaa

SEQ ID NO: 147732 - DNA, 385 bp, Zea Mays
gctctttatgcatcagtggatgggaacccaacgcttgtatagaaactaacattgaagtcattttttatctaggttttcatatgacaccaactggcaaacggattactattgcaccctctacattgactagaagaagctcaacgattgttcccgatagcaacaatagctgctttggatcatctaaaaaaatcacgctgtcgtttcttgagggccattccaatagttcactaggtaatgaaatccttataccggacagcctggtactgactgacgaacatgtggcttccaagccgcaccaccctagctatggttttaggggcgaggttagggtagatttcgagaggatttcctagaatacgattcgccgtcacacagccgccagtac

SEQ ID NO: 147733 - DNA, 688 bp, Zea Mays
tgcttttgttagcatcttctaaaggttaagaatatttacacaccttaaaaatgtatactccgccataaaagcaaactaacacgaacatttttatggattttatcttcattgatgaagatagaactatagttatgtaaacattcttaacctggtctcgaagatgctaacaaaagcatagaacgacaatcaatatatcttatcataaattcctccgtagaaccacacacggacatacacctatattattgaattgcctcagttttggtatcaaaattatttagccatcggtgttgtgttcaagtgaagattatatccaaacaatttactttgacaccgtgttactcttctacaattctgccatgctaacatgaatgattctcaatttgtttatttaggtagacgagatacttgaccaatcctttaaagatggaggcctctaataaaatttggcaagcttttgttctattcttgctagaaaaaagttcagggtgacgagccaaccactctaatgctctttatttaagcagggtcaaggtgaccagctgatccactccaacatgttgatttaagaacaatcaccagagaggatggtgtgagtgtagattggtatctaccagtatcagttccacttttttctagcaaactttaggtacttatatgtaggaatcatattcctatttatgctttg

SEQ ID NO: 147734 - DNA, 718 bp, Zea Mays
ggacgatcaaaccgtggccaccacaagctgtttggaaaatagttgttttctctcttcgtacagcgtacgttgtgttctttttgtcatcgttgaggatatatacccaaggaatatagagcatcggactcgcacacggcataatatatatacacataacacatcgggtcaaaatagaatcgaggctggtgcctggtggtataggagcaatgtggatcgtggagtcattgcattctcttaactagttcaatgcacaacaaacgaacgaacttttggcagagatttttttttcttttcttttttggcggggaaggacgccaacacctgtctccatccaccgacaaatgcatcgcaaagtgtccttgtaccacaaagatcccttggctagcttttccactcgacatctccactagccatccatagtcaaggttgatgggaccgaatgctgattctccactgcgggcgctggaaacccctgcgcgagcttccttacgaaaaggagaccatccttccccgaacgccaagaggaatccgcgttacatgccaaacctgggcaagatcgtcacgcaccggcggcacacggccacacccacccacatcccaaacccctcgcggtcgcggccaccacccgccgcggcctcaactggagactggagggccgccgcctccgtcgggcgacggacgacttttacgggtacccaccgcagggcgtgtatttttt

SEQ ID NO: 147735 - DNA, 446 bp, Zea Mays
ggcgactctaaccagaacaggccttggatggcgccagaaaccgggtttgcggaggccgaccttatcggactgggacattgacaaatgcaaccccgttacacaggaagagttcgttctcatgctaccttctaggcgtaaggttcggggctgacctaaaccatctaatctgttgcacgtttggcttgaggggtaagcagcgcctggtggaggctgttggctgctacccctaatgccatggagcttgtggccatcgggtcgggtctgggcaacactaacttgcatggagagcttccatgggccctcctcatcgtggctggccacctcatgcgtgatgaggttgccgaaggcaaaacccattaatggattgcttgctggtctacaccgatacactgagggatttgggacacaacccccttgagtgtgggtgacggtggagactcagcgca

SEQ ID NO: 147736 - DNA, 706 bp, Zea Mays
gtgctgtgctgctgcgcactgattgattgtgcaggggatatcgacggaccgtgtgctggacgtgcggaggctgctggggtcgaacgtggaaacgtgccacctgacaaactattcactctcccatgtggtaataatgctcgcctctcgcactctcgttccctcaactgcctacagtactagcagcaggcacggctaattctctggctgcgcggtatggtcgtgttgcaattgcattgcaggcgcgcgggcaccggctggaggacggcgtggaggtcgtggcgctcaagccctgcgctctccggatcgtcgaaggtgagtgggtgtgggtgggtggtggtgaattggtagcacaatcgagttgggtatcgtagagccaggtccctcccacccagtacacgagaggacgtacgtacctggctgccgtcgtccaggcaagtacacgtacagcgcgccctctgttggtctgttactctgttatgctgcgttcgtagtacagtacagtacaggccacgcaaggcagttggccccagtagtggtacagcggtagcacgttcgaccgcgtaatggtagaacatggtttgctaccggccgatcagagcagatggcccaccaccaccgtacgtaccctatgcacggcgccattgatcgcccggaggccggagggagggactagggagggtgggaggcggatgcgacgcgcatggcg

SEQ ID NO: 147737 - DNA, 534 bp, Zea Mays
ctaggtccgggttcagagagcttagaatttggggtgcttggcttcgaaaaggaagaacaggaagagaagggagcaggcatacctggtgggtaatagtctccggcaatgaggtggagaagcgaggcagcgttcgcccggccgtcgttggtggtaccggtgaagacccgaccgtggcggtggcagttgcctggttattcgttgcatggagagagatagcgagtgaggtgaaggaaaggacacttgggttgggttgagccctcgtaagatttgggcagctgcgacctgtgactgaggaccctgagggggggcaacttcgcttcgcgcattgcgtgcggcagtgataatcgcctcaccgaggcccaagacatccaaatccaatcgtcgtggctctcctcggagcggtggcggaggcatcaacaagagccgacgaaggatccgagaggaagagggataggacgtggcgatgtttgggatgagtggaaacacgtccgcgatagaggcatcgagccgagcgacgacgacagaggatccgaa

SEQ ID NO: 147738 - DNA, 537 bp, Zea Mays
gaagttacgggcgagctcttcgcggccaacaggggagcagtgcgcgcggcgaagggagcagctccatggcgagggtgctcagccagcagagggagagggaggagcttgggcgcaacgcacgggtggatgaagcgcgcggccatgggtggagtagagggagactcgacagagagtagcacgcaggggataaggaagaagaagcgcgcggcgtgtcaaaaaaatcagggagcaagggtgcgcgtgggagatgaagaccaaggcgacggcagcagatttttctccatgtgaggcggctagagataaccacggcgtgatttttctccaagtacagagcatgctgccaggagacgcgcgcgcaggggaaaagatcagggcacgacaacaagaagctacgcggtgaagaagataaggaagagaggtggctggggaaaaaaatctgcggtgagataaagcggcggcagatttttcttttgggatttttagagacgagcaaagagtcgatgagcgatacggcaaacgactacacatattattttc

SEQ ID NO: 147739 - DNA, 1769 bp, Zea Mays
gctatggaatgagttgaaaacaggtaacataagaagccctctataaagaaacacctagtacgtagtagacaaatgttagacctctgcaaagcccacttggatggttggttacagaaaaggcttacctggatctataaaaaaaccagtcacgatttaaggcccctcaactggaaaacacctattatgggggttaagaattatacaactgtgatatactttatatctttgaatttgccttgatctagccttgaccatgattttttttcacaaaatttcctgtatgtcaccaatgcaacctgaaaaacacacacccaagttggctttgtcacttgtctgtatgaactaggaagggatttgctaggggaaaaaatcaagaaccagttcaagtttgaaacagaaaaattctgaaagttcccaaacatgctcctcttggatgccaacctgaatgccaattgcaaatcagctggacagacaattggctggcaatctcggtgaccagaagggctcttaaggacacgagtgtgtacagttgtatcaacgccttgtcacacagtgcgtttgactgccacaaccagcgcagttgctttgttatctggcaccttctaacaactctgtctttgaacagagcaacaagtttattagaaaaacatggaaagatgaacaattttgatgaaagtaggcacagtttgtgatgccaatttgatgaggtcgacatggctgacaatcccagatctttcccatggaagcatgacaaatcttttaagtttgtttatgtggacagctggcgcaagcctgacctcatgatctctctaaatcttctagctgtccgcactgactaaacaagtcacctcacatttgatttaaccgatttcccaaataaagaaccaactcaagttatcagatgatgtaacagtgcagggagcatgtagcttaaccccccattctgattgatatataattttatattttacatgatggagtgggatctgaatgtgcttgtgggtatcgatgattaggctcatattcaatccctagaaaaagtgtgacagctgggactaagagactagccatgtgtgccattctacttctgagccttgactgcaattttaagatgttccaaaaggtcagcttaacattctattctactaaaatgttttcgtggcaggaaccccacacagcatcaaccagaagagacgcatttcaggcattaaaatagccccagagaacaggtcattggaaggtcagaaatggtaccaatccgtttttttttgtctgccgatatttctgtcagagtcgggctttgtttgtgatcagtttcagatcattgtgtcgatcagaaccttaagcaggcagtccatttgccgcctaatcacagatagcacaagattaacattgcatataaaagttcttgacaacatggtcaattcattcctggtgacatggccatccaacagaagaaaaaaaattgatattgctgatcaacgaaacagttctggacccagattggtcagggaatcagttggtttgtttattctacacctggaagggcatcgaagaaaatctctctttatttctcaccagaatcttcagttgtcagaaggccagctaaagaagggcaaagcttcagatgcatacgcgcataaactaaaagtaaatcatgttcctgtttttgtacaggagaagggatctgattgggcagtggacctggctacctagattttcttgaaatttaagaagcctcagtatcgtgtatttacatgttctttttc

SEQ ID NO: 147740 - DNA, 907 bp, Zea Mays
caaaagtctaggggggctggcttaagtagacatgtgaatcaggctgcaagttacaagccccatgggcagctaagctgcctgctaagataccttattacacaatctagagcagatagactgaacaatgcacagaattagattgtaacataaacgagctaccatttgggctttggtccacatctccatcgagcagccagtcccaaggttgttgcattgcatctgtctccaaacttgttcttggcatgccaagttgtgccacccattccagactcatttggacagccaaggtttccagcttgcggagcacctgaaaacccggcgcaaagttccctgtccccaacttcaagagattcaccatctgttatcatcaatcaatttcctcacatgattccttccttttcctgtcttaagcatatgcatggaagaacgtgttccggtcctcttttggtcagccatgaggtacgaactcacctattcctgacatgttctccgggttcacctgttcctgacatatgcttcttctcctcctacaattttctagctccctctttacctcgcctatccttttctctaaatcttccaagaacattgttgtccaatctccatagctcttcgagcaccttttaaatttttatggatttccatcatactcacctcacccagtcactctcccttgaaggttgaaactcccatccatgcctactcagctcgggcagcacactcttcctcatctaaccaccttgcttcaaacttgcgcaccaccatacctagttgctcacaccatttggattccccctcccccctcctagcatccacaacggtgatcagggtgtcgaggatccccattttcaacatgcactaggggaaaatgacacctccatgcattaaattatatatactacatctg

SEQ ID NO: 147741 - DNA, 1119 bp, Zea Mays
ctaggtttagggttgttgatgggcctcggagttagaagcccacctgaacgctatataatgaggggtgggcgcggttaaggttaacctaattctcccaccagcaaactagcagtcatgcccctctcaccctcgtcaagctaccatcgctaacctatcagttcagtatgcgacacttcctccctgtacatgtcgatacctctgaggtgctacatctggagcactagaatgaactgagtgaggacgtgaaggacaccagcgactgcacgacactgctagacgtgttcatctacatcgcgacggcttctgttgtcctacacgtctagtggtaatcccgtgacctataacagtagtagatcttgtttttatggggtcaaaaaatttgttttgctctagtgtagcctccccataatccttcaccctttcctctcgtgtagtgtatatagaagcaacaacatcaccaaagttaggctcacaaaattgagtcagtttatctcatcgatcttttttacaactctctaagaaagccttcaaattggcttcaagctcgacttgaatcttctaatgaagctcatcgaggagcgcttcgaatgatgtttggtgattgatgtttttagtattaaagggattgttgtgatcctctccatcaatagatctatcacttcctaacatgttgctattagattggatcttaatagttttgttcttcacaagccaagtcatcaaaaaatgtgttgacgttagaagagacccgactcacccacgagcaaaagtctagcacacacgtggttggcacattaccttgaatgcaatgaggaacatatctaaatgacgaaaccaatctaaagattgcgttgagcaccaaatctggtacctgaatgaccgggcggtccgacctacatatcctcctgcccacccttataggtcgttgtgtcacctggctttgggggcactacaaacttcagcatttgataggctagctccaccaatgcaataccgattgggaaatccacaattcggtcctcaggcacaagatcaagaggcatgctagaattcttggccataaaggttaacaaatctggcaggtggcataaggagagaacacccacatttgtagcaccc

SEQ ID NO: 147742 - DNA, 590 bp, Zea Mays
tagtggtcaccccgagttaagtaagcgtgagcatgtcgcaccgtcttaagtcatcgccgacttaagccgattgctccgttagtagggtatagtggtcaccccgagttgagcaagaatgtagattgacaatgaacaattcttgaagtctttttattgatgatgtatttcccggtttacagaatacattgtcgccccaatagcttttgaaatttagctaaggataaaacttcctgaggtgttctatgttccatgagttcccaatttccgtgccgtccatctgagtgaggcggtatgatcccggtcgagtgacctcagctactacgaatggtccttcccatagaggtgacaatttgtgccgtccttcccccgttagaattcggtggaggacgagatctcccactgcgaaggatcgaggtcgtatggccttatcgtgatagcgcctcagagtttgctgataccgtgctgattgaatcaccgtgttcagtcgttcttcttcgagtacatcaacatcctccagcctagtagcctcagcttctgctatgttttcaaagatcaaccttagtgccccaaacttgagatcagcaggtagc

SEQ ID NO: 147743 - DNA, 671 bp, Zea Mays
accgcgtcttcatactgtagtaaggggtaccctagtttcagggtaccgacacttcagtttccatgttatccggacaacaatataagtaatcatctatccctcctttgaagattgtagcccccgaagggaacccaagttgttcagcaaagccaatagcttcggctagctgcttggcacccattgttttctcagctgcctgatgaattatgtacttttggccaccaagatcttgatcgaagggctcttcaccaaggggcatgtcatcttcattggccttctcaacctcttcattccttgcaggctttttgcccttgttttctgttgttgcgggcttcgaagaaccaattttctcttcgaccaccacaattgttgaaggtgtcgcagttgtagctgctagatcaatcttcgacctctctatatggttgcggccatagcaggtagtgcaatatcctccactgcaaggattgtatcaacaatattcttttcctcatactctcctttgtcaatatcaaagaacgagctcattactggagctatccgctcttcagcctcctcctcacttttcgaaagcgacctcaagggaacgaccttttgagctatcagatcgataacatcctcaatcttttccctttgattcctatagaaggaatttcctcaggcataactggcac

SEQ ID NO: 147744 - DNA, 521 bp, Zea Mays
attgcagggtgttccatataaattttaggacaatttgatatagcctttacataggttcgaacagtgggtttatatttaataaacgtaggggctcttatggaaaaagtaacgaaccaaggggcatggtcttttctcggccacatgatctgatttgggtggcccagattagatcaaactttaaatttattggtacgtaatccttgttgtcggatctaaaatctacatcctaaattttttgaagcctcgatctcaactgagtcgaatgattgccgatcaacacccagattctatgtgatgaaagggtactttcacgtcctaatatgagccgtctagcagaggatcaagggcccaagaaccctcttccaccacacgctatcagaccagacgatgctaccagcaccatggcggcacacgtcggtgagctccccggactcgccctcacgtcacctaataccctaaccgaaagtcaccacatagagaggacagtaactgaaagcatctaggcccctggttggttttag

SEQ ID NO: 147745 - DNA, 475 bp, Zea Mays
aaacctccatgttttatctgccttcttgaccaatagtacaggtgacgagaatgctgatgtgcactctcgaatgatgccttgtgccaacatctgatcgcactggcgctcaatctcgtctttaagcagttagggtattggtagggtcgtacaatcactggttctgtaccagccaacaaccgtatgtgatggtcttggtgacgtgatggtggcagtccctgaggatcctgaaacaaatcagagaaagaggacaacagttcttccagacattccctgttcttgtccatggatgcaaatcccaacactgagtccccaacccctgtcaattgtaccaaccttcccttcctccagaatgccattgtgtgtgtgtcaaagttgcagaccaccggtcctagagaccgcaaccactgaactcctaatacgagatcgaacccaccaagaggcaaggaataacatgttgtggtgaatttctcctggc

SEQ ID NO: 147746 - DNA, 959 bp, Zea Mays
atgtgacctccttctcgacttctgaaaagatctccctcagcctgttggcggagttcatcatgacattctttgcagccttcttctgatgcttagtgcccttcaaccaggcaatccctaacaaaaccttgatcctgcagctgtttggtctcaagggcgtgctggtcatgtggtacttcaattggatctgcaatttcagcaagcagcaactattacctgacaatttgagtaaaacatccgagtgctttcatcgagctctgctttcatgatcttacactggagtaatcttcatgctggacaccttggagggtcatcacctcctcgacaatccagtcattttggttcggtaagttatacttttgctgagtggtcgttgcttcccctccatatcttgacaagcttttgtcaaaccgaaagtttatatgacgttggtatacattacggtttagcagctcccattctgtagctaagtagtcgacgcaaccggctctctccatcactttgtgttccagtggacctccagagaacatctccattaacgcactgacctgcaaatacagaatttgagatgccaacagaaacatctgagagtgcatttatgacattctagatgtgtgttcattggcaaggcacaagactcacgtcgacagaaagaacggccgagtagacttctgacatttttacatcttcgttggccaatagagaaccttcttcataagggttctctttcagttcaggttctttatcaatcacctcacctttttgttccagacctgatgaccgcaatttccaaattgccataataattctgtcaaaaagttgtttgatacattaacataactatttgacaaggcaagcttatattgtaacaataatggaagaatgggaccaaacaatatatatcaagctactgctaagagatcttaacaatataaaataaattaatatgaatacactatttt

SEQ ID NO: 147747 - DNA, 550 bp, Zea Mays
gaccccaagacttcattcataagggcttggaaggttgctgacgcatttgaaagtccaaatggcatgactaggaattcaaaatggtcgtggtgtgtccgaaaggttgtcttatgaatatcctctgaatgaacccatacctaatggtatcctaagcgcagatgtagtttggtgaagaacttggccccgttgagtttgtctaggagctcatcaactactggtatggggtacttgtctttcactgtgcgctcattaagggctctgtagtcaatgcagaagcgccaagagttatctgccttcttaaccaataggactggagcggagaaggctgatgtactatgtcggattattccctgtttcagcattgctgcacactacgcctccagttcatctttctacagctgagggtatctataaggacataccgccactggtgctgtgcccggcatcaggtggatgcggtgatcacatggtcgtgctggagggaggcccgttgaggatgagaaaacatcatcaaattgctggactagggagtccatcattggtgtcgggt

SEQ ID NO: 147748 - DNA, 455 bp, Zea Mays
aggtccctctggccatggcttcatcgcggcgtgaagctgggggtcggcggagttcggcagggtcaggaagacgatcgggagtggtcggatctaatctgcacggccgagatcatccaagcgtaccggttgggcaatggagccatcacgtccgtcaatcggcggatgaacgcgggagattaggtcataggtttttaaatcagagccaccgatgtgggatccaacagttgggatcacataccgattcgcggagtgggcagtctgatctgggcgctcgatctcgaatccaacaaccagtaaaccgcaatatcccttcgatgtgcgtgttttgcagaaaagccctcctggttttagaaaaccaacccacagtccgtcctagggttattctgagtctggggaaaacttctggttcagtccctgtagttctctgtattcagttctcggcccagagaacaaag

SEQ ID NO: 147749 - DNA, 382 bp, Zea Mays
ccgatctagcggtcctaggcctacacccctatctctatttctccaattttctctagtacccttggtaccttggtgtcacaacacataacaccaaccataaccctttgatgtggccactatgggagcactaaacaaacgcactagacatagcaccaatggtcaaattccaacggctaacaaactagtgattgacattgtgcctagtctagttcccttgtctagtgcttgccaaacatggtggatgagtgtttgctcgaagttgccccaaaacatggtctcgggtacaatagggtagtgcgcttgtcctatgcctccccgaacacttcctataaggacttttgaagttccaacatgtggttagatcacattggccatgtctgat

SEQ ID NO: 147750 - DNA, 416 bp, Zea Mays
caaaaatcataaactgattttttcatctgcttctacaaggtatgatcaacattatgcaattatgggcatgttgctctcatggttggataggtggaaatcaatcagaacgaatacgcctatgaaattagagtgagtcgatatgccgagacacagatctgcagtcattccagtagtaataaattcgtacccatttctagcaaacacaaaggtggtaaaatagttttcccatggcccattggagcatcaaagggatcacatgacaaatagtcgcatccagaaataagtatatagcaaaaaataattaaaacaagaggtggtgaaaagtcacatctcacatgaacacgtagaaaacatctagagatatcttgggcctgctggggtccttgccaaccttccccttccttccctttgtgggc

SEQ ID NO: 147751 - DNA, 494 bp, Zea Mays
ctatagttaaatggatgtagtgcaagttttatttttattttctgctctagttgttttctatgctacttccttcgtattagttcaccgtgcataagtgatctgcagcaaatgcctcgaccctcctctcacgctcgccccgctgtgggacctccgctggcgagcccctcaccgccgagggacgtccgctggcgagccgaccaggtccatcgtttctctctcagaagccctgttccggctggcgcagcggcataccagatcttggcgaagagtatgcttggagcacctctatcccctccaagcctccatgatggaggccggggactcgacaaccatggcccgattcgccacccgcgtgactggggacgatgacgcccttgagtgcccttccgttgcctcctcattcatcacgataagcctccgcaacatcatgctcgcgtccctcgctctccagcggaggtccatgccccactcatggagttcaacctccttcaaca

SEQ ID NO: 147752 - DNA, 328 bp, Zea Mays
tatgcatagttaaaaacattatgatatcaaagtatgtaactcactctcgtctcatgctaaagatgtttcacaaggctgctaaggtatgctgaagggcctatttcttggaagcagaagacttccgttgctgaagttcaatatttatccattgctttatcaccaatatatttgcattagttccagaaatcaataagggctaatcaatctggggaagatattttataggtcacttggagcagtttagagcttgttcggttattcctacgcaatatagattggatgggatagaataatttcagtgtggtgcactaatatgttatgcttagct

SEQ ID NO: 147753 - DNA, 314 bp, Zea Mays
cagcttcttgactctgaagaccgcactccaaggtcgacgaggcacgagacgctgctcaggataactctaaccccacaaccggaatgtcaatgcaaacatccatcataccaccatctgttggctcggacagcagatcttcaggaaccatatcctcgagagcctgatcaaaatttgctatggacaactcttgcagaccaacgagagtagacaaagctggcgaaggaacatcactactctccccactgactaggtagcgccgactgtttttccgaattaaggggaactcctcctcttcttcatcatcctcatcaaca

SEQ ID NO: 147754 - DNA, 1190 bp, Zea Mays
ctctcgataaaattacaatgtaaaccaagacgaggttgagcatttttattgcctttttcccatggtagatagcttcgcatcatcaatttcatcgtgatttgatctctcaagatcttcattttttgctttgtcatcgttctcctgattaactatgaggaccaagcctttcttcttagatgatgagttgtgttgagttgtgatgcgcacgtatatctcatgtacattgataattctcaatattctgtgttggtgtggtggcaaaaaggtcaacataacgaaatgttgtgacgatgtgaccatacttaacaatggaaagggtgtttagtttttctcacaacatatggttgtgtcggatgagtgccccttgtcacgttgacattttatacaaaaacattgttagtcaacagtgtgtcgtctcgtctttcataagaccattgataagccacaaagggccgatcaacctgggagcctatatagcctgaacgagaataacatgggtcaaacgcactcagagccccgaatgtctcagcctcccttgattcgtgattcgtgaaaagcctctaaaggaacactcgtttcttcggaggctttggggctacagtcgagggtaataacccccgaggcccgaagcccatgggtcaaggaaaaggaaaaggcatgcccgaaccaggccgaacgtaactcaacatgttatagcaggcaaatgcaagccatgtgcccctacccccagttcaacaaaaaacagggactcttggatgttgggtgaaacagaaagggttggacgcacctaaggccaatccctctgatcaagcaaaacacacccgactcacaggatcggtcggaccgctcccgcatcaacatgggttgtcctacgaacgatgatgatcctctgcattaccttcacccataaagcccaccaagtaaggacggaggtatgaacaaactacatggacgtcatctaccgacgagtattgggagtgagcttaaccaactccaagaagtggacaccacattggatagccctacaacgcctacaccgacttaggcctctatatggggtctagggaaccccaacaccaaggtccaaggagtgcgtacgcatgctctacaaccccgcaaacttcacgcaacctcgtcaagcaagtcaacaaagttgcaaacctggtgacagacgacaataagagagaaaa

SEQ ID NO: 147755 - DNA, 369 bp, Zea Mays
tatcatcaaggaggatatgatgggtgctttgcttgctgtgcaatgtgggcatgtctccaaactcaaactcctcaacacgacttttatcaccctcctgcctaagaaggtggatgccttgctggtcaaggattacaggccaataagccttgttcacagctttgctaagttggtaaccaaagtgctagcagctcggttggcaccccacctgccaagtatggtctctatcaaccaaagtgcctttatcaaaggaaggagtatacaagacaatttcctactggtgcagcaacttaccagatccttacaccacacaaaagagcctcacatcctgctgaagttggatatttccaaggcctttgactcaatatcctg

SEQ ID NO: 147756 - DNA, 436 bp, Zea Mays
gtgctcatgcaatatctcaccgccgtccgcagcctcgagaaacagttcaagggtttcaccctgcagcatgtcgaccgcaacaagaacgaagaggccgacgcgttggccaaagcagcggccaagggtgaggccctgtcctccgacgtgttttaccatgtcatcggcacgccagccgtccgcaaccccgaaggtttgcaaataactcaggacgccgagggccactaaattgtcaacctcatcatggtcgaagactggcaagccctaataacactattcctgcaaggccactaccatccaaccgaccgcaatgaggccaaacgactgaagcacaggagcagggacttcgtattggtcgagggccagttgtacaagaagggaatcagccagcctatgctgaaatgcataaccgaaaccgaaggcatagaaatcctccgcg

SEQ ID NO: 147757 - DNA, 342 bp, Zea Mays
taggctccttggtcgtcgaggagcgagcaagcaacgcttcattgctggcctgaattatagtttctgtaaacacggtgcactcgaccacgtaaactcaaaaaatgggaggtagaagtctggaaaggtgctaactgaccaacctgctgaaaggcacaagtgacctgctgaagactcccgcaacagtaacctacaaaagaatgtagcatacattacaacaagcaactggtaatagtttgtgatgagctcatgtataaaaaagagaataaaaaagacagtttcagaatcgctggtgttgtttagtggcacgcacgcttcattccgtcatttgctaacacacacttg

SEQ ID NO: 147758 - DNA, 365 bp, Zea Mays
cagcggagggtctgcccttctccaggacattcgattccaaaaccctacattacgtattcatgatgctaggatcgatggtaatcggttctggaccctccaacatgtcgatgtttacaattctgtgattcttcccaagaagcatcagcctattctgcatcagagatatattaactgggaaggatgtgaagcaattggtgatccagagatgacacaggctttgagggcctgtgagaggaagaggatgaagaacgttatgacattccaatatgattggagtgatgaagttattgctcagttctattctaccctttggatcaagctggctgatgaggaaagtccttataactttccttatctcaatttct

SEQ ID NO: 147759 - DNA, 425 bp, Zea Mays
cgactacgagcagatgtatcatgtcccgtccatcggcgtccagcacacccgatggatcagcagcgacgagcagatgcatcctctcatggtctcatggaaggttaggtaccagaccgtcctcatctggcagcccttggtgacgagcattcagatccccttttgacagtcccgttcccttgcagtgacgacctgtcaacaacctttgaacacgcgaacaccagcaactcatttgtcaatggtatgaattttggattctttgttttgatgaaatgatatggataatttactaccttgcccgtctagcttgcacatcaggtctttttttcaataaccttgcagggtctataagtttgtacttaagttttgtccatttagaaattctcagtttgttaaaaattctcagatttaaatttctggtgtgctca

SEQ ID NO: 147760 - DNA, 570 bp, Zea Mays
tacactttgtcaaccacaatgttggtttcacaatctacattattatcgactagaatttgtgcctcacaaatctcagcatcggaaacttgttccactcgaggagccttctgtgagctatcttcatccctaaatcctaatgcatcataaaattgttcatctccagcaaaaacatcagcatcatataacatagcaggatccacgtccccttcagactagcttgattttttgttgcttggcaattttcccaataacttatcctacatttttaggcttctcacataacctagtttcaattcaaactgtacaaccaatgccaacaacttacttatccagtacatatgaaatgccttctgaatatccatgtttgtgacaatttgctgcagatatttgttttctcggttccaaaaccaaaatattggctcctgacaagtccccaaattgtcttgcttgcaagatcattcatcaaatgttgaactaagtagccaccagcaatattcatagaaagaacatgatttttatcctccaactcaactctattaccatcatcaagaatagctgtataggcaggaa

SEQ ID NO: 147761 - DNA, 407 bp, Zea Mays
tgtgttgtgcttttgttcgggctgggttggacagattattcttttgtatattgcggcatggataaccaagattcttactgggttggactaattgctagagaatcgatcggttctacatgcatgcaagattaatagccctatgaatgctttatactggttcagaaatcagaactggtgttaattttgctaggaatatcggattgattggattctatttttctttaagctttttctatctagacaggggaatcaagcacatccattggctctgtaagtattttcttttcttccaatggcctgggctctggtttcctgattattttctcggtagtgcaagtcagtacctgatatatactttaatacatttaaagaacaaggttcatattgcacgaataaagggttagggg

SEQ ID NO: 147762 - DNA, 307 bp, Zea Mays
gtcgccacgacgacacctcgatctgtgctcgtcgccaccaagttggagatggcggcacaaaagcatacagtggctggatccacatccgagtctggcggtctccggctgtcttacctgcagtagcagcggcagccgccgccgtgttcccggtgactcgcggcccaccgccttccaggacgactcatcgcgcgtgctccacatcgtgacccgctgccttctgtgatgacgactgttattcgctgcaacgatggtcggacgacagatccacggcgacgagccaccctcatcggagtggtaacaccctgcg

SEQ ID NO: 147763 - DNA, 294 bp, Zea Mays
gttaattagtagactctctatgtgacgctaggtgtctatgtagaattctgaaaattatggtgccccaaattgtcgagttagaggtttaattcgatcaatgccgattaagtggttgaaaataactagtaaagaagttgtagatgtaaaactggaaacccaacccagcccaatagacccactaagaaaccctaaccctagggcttcttctacaaataggggtgctcacttggaaatctttcactcccacccctcacttttccctggccgccactttcttctccccctgtcttcttc

SEQ ID NO: 147764 - DNA, 366 bp, Zea Mays
ctcgcctacgcccggacacgcgcccacacccgcggatttcgcctgccccagctcccttgctcgcgattgccccctggcccgcgagatgccgccgcccaccgtgcctgcgattgcgcccgctgcgcgcatcgtcctcctcctattccggcccaatcacctctggttctcaagtatggggaggaagggaaggtggtggagcgagtgaacctcgccactcggcagctgcgcctactgccgaagcccgttgtccagatctacggtctcctcgcactcgacgtctcccgcgaccagctcaaggttagatactccatcccgcgcaggcaacaccggcaagatccgcggactacggtccctgtggcgtcggca

SEQ ID NO: 147765 - DNA, 320 bp, Zea Mays
tgatgatctctgctacgcggaggaaggttcatctccatccacgctccagccgctgaagctgtcggtacggtatgtttctaagactgaacaatttcaatggaacccagaaaaatccatatcatctactcctctgaacccttttgcagaggcacccagggatcgggtttgagtagaagtattcctcctgccttgggcttgccccacgcaatctctcgtacggacctccgagtctattctcatgttgcttcctcaccacagtctggaactcagtccaggacatagaaccttcatccagcttgtcaataagctccacaaacttc

SEQ ID NO: 147766 - DNA, 567 bp, Zea Mays
ggcgctcggccgcggcgaagtggtctggagagagaaaagagagaagggagagaaccggtgatgaagaagacgcccgacatcacttgatcatgcgttggacggtaaggattaaagggataaggatgaagaaaccgggaccgtaggatggtgattggagggggtagatttatctcgcgtacccgccgttcatcacgaatcgcacggctttgattagaagcaggaaataccccttcatcccaaccgttatccaccgtagaccggcaatctgacgactaaagcgaaatagtggggatcgtgcgctgtgagtcgtcgatctcagatccgacgatgactcgggaatcaggatttatacccatcgccggtctaatctgggcgctcggggttggatcggacggtccaaacatcactgtaccccttcggccctgcacatttccttaagagcccctcgggtttcagtgaatcaacccgccgtccagtgagcgctgttcactgtgtctgggctatttcgcgcctgagtcccggcccttttacaaatttgaggcccagtccagaacataataaaatcag

SEQ ID NO: 147767 - DNA, 487 bp, Zea Mays
attaggatatgtaaatcaggatcaattagacaggctagctgctatgtatagcacccaggaatagcttccttgtataggtgatagcctactatgtctgttctttccatgtatgcttgattggcatcttccatgtatgcctgattgacaccttccatgtatgcctgattggctatatatatgaaaggctccccacccacattgggtgtgtggtggttctctccttccctgcttattctacatggtatcagcttaaccgatccttccacccctccccaccgcacctctctgttgtgctgcccctctcacctaggtcaccatgtcgaccaactctgccaccagcttctcctcctcctccagcacctccagcagcatgggctccttccccgcccatgctgtcctcgttgctccctatgcaacagtcactgtcaagaaccacatccccgtgaccctggagctgcagaggcccaacttcaaccagtgggaaccg

SEQ ID NO: 147768 - DNA, 769 bp, Zea Mays
aaaaagggaaaagaagctaaacaaatagttgacgaccatgtagctgactttctttatgaaaataagataccattgcatgtcgtcaagtcaagaagttgggagattatgttggagtctattgggcaatatggtcctggatatcgtggtccatcataccatgaagctagggtgccttggcttgagagggctgttaagagaacatctgagttgaggtcgaagcatgaagcgtcttggagggaatatggttgcacgcttatgtccgatgggtggaccgacacagcacaccgtcacttgatcaattttctagtaaacagtccggcagggacctactttttagcttctgttgatgcttcaagtgaggtactttttagcttctgttgatactttttagtttcaatgggaaaatgaatgggttgatcaggaatctgatagtggtactctttgggctgctgttgatgaagcattgggtgcaacagagggtctccggggccgaaatgtactgctggtggtctggttagggggacctcttcttctcattctcagcctcatccaaggacctatgttcgaactaggaagcgtccaaggaatactcaagatgttggagaagaagatggtagttatcatgatgatgaagatggtagtgatcatccagctgaacagtcagtacaaactcaaggagaagtggatgaggaagaagaatctgagtcaggtggaggggctgctagtgatgctgcttttcaattggatgaggctctactgctttaggtca

SEQ ID NO: 147769 - DNA, 420 bp, Zea Mays
tcgtgtcgaagtcaacgctggaccctccggtgatcatgtgaatgactccgtgatacggctaatcggcgaagtcttcttgttttggtgcttggggtgattttggtggtgtaggtttggttgatgcggaggcgggagtgggagtggtacgacttgtacctcctggtggtgctgatatgcgtggttgggtagatgctgggcgtggccgtggttgtatggttgtgggtggtggtgttgatatgtgtgcgcgaccactctttggttgtcggctagttgtgttcgagacatcctatccctggtggcctttctttccgggcaatccctcgtcgggtgcgtgcagtcttcgccatgaaacaggcagtaatatctgcgtggttgttgcgctcgtccccggccccggccacgcgtgccattgccgcggcc

SEQ ID NO: 147770 - DNA, 762 bp, Zea Mays
gtcggtcaatcgtgcgcgcgggccgttctgtctctgtcgcttacacgtgggacccgatggtcagccccgtctccaccaaatcgcaacagatccacgcgtgcaggaaagccgcgccaacctcgctggtgatctcggcctcctctcgcgtggacttcttcttcccctgggactataaaagccatgtgtcgtggccctagtcgaccatcggagccgctgcatcaccgaaagaaaagaagacccgtcaccagatctctgcagggaggaaagccgccgggcgatagccacgtcatcgccgttgctcgagctcgggcccgaagctgggaaactaccctacgtgacgcctagcattgtcggggtaatctcgagcacagtagacagcctacaatacctgaattgctcaacggagatccaatttcaccatccggtcgccattaatgtggctgaccatcgccgacaccttcatccttggtaataatactctctgtcgtcttactttggcctccgcttcatgtagcccatgctggattgaaatttgggccggggatagccggatggctcatcgccaccatgtcgccgccgcgacgacgcgggccgcgccgctttggccgccgtgcgtttgggggttgtagacgggtagcgtaggccattggttttaacaccagcggatgggatttgatctgggaggggtaaatgctggccatcggattcgttgccgatggtgcagatatgatcgggtattaccctttcgctggttctggcgag

SEQ ID NO: 147771 - DNA, 559 bp, Zea Mays
aaacccaatagtcggaaactccaccaacggtcattacagctaaccttacgctggtgggacaattattattaagcaccccaatacccgatctttcctggtggcagtccaactaacatgcctccctggtgatattctaaagatagcatatacaggtaaatccacaccattagttagcttctatacactattgataatttcagtaatactctctgccccacttgcctcttctatttatcccaactagttatcatatacatcgctaatgatcattgctagctaacttgatgttggcggaacattagtctaaagcgcaccaacctagtacttcctagtggttgttcacctaacatgctcccaggttgatatcctaaagctagcagatccaagtaaattcacacatcataagccagctttctacacattcttgttaatttcagtaagacttcttgtcccactctcttctgttaatcgaaactagctgtcagatacatagccaacaaccattgccagctaacatgacgttggagggtcattaattaagcacctcaaccgaattttt

SEQ ID NO: 147772 - DNA, 427 bp, Zea Mays
ccgcaaccatgcactctatgcaatactcaaaaactctaaagagcaggaaactgtattcctagagtttgcttccgtgctactagatgggactccggattggatctaaggcgggggcatatatattggaggcatgttttgcacggtacaataggtcaacaactgcttatggctcactactcatacaaggatgtagctctttctcctccattacaatgtaaaatgagaaatctgaaactgcaaacaatacgctttgtttttttcccattagatcataacattgattttataaaaatgcagctcaaaacatgtcacgtttggtttatcgttttggacatctttgttctccttcgcctttcttcggttcttccttttggatgcctatgtacgcgcatagtgttggggaacttacgcaaattatggattcttt

SEQ ID NO: 147773 - DNA, 1182 bp, Zea Mays
caacgctcagttgctgtctagcaagtgcaagctctgaagcacttgctctgcttcgccttcgcaaggctcgctggacgagagaagatgaccggaggggaggcgctcgccgtcggctcgggaggcggcggcggttcgataacgttcgcggttgcgatgagctgcctcaccgcggcctcaggcggccttctacttggatacgacatcagtgttacaggtcagtctctccctgtacctgtacgtatgctgaaggagtgaagttgcatggactgtgtcccgtaattacactacactcttgatgctcggtacaacttgtttcttgtctagccgcaagcctgccacaatggtttgtgagccgtgtttatatgttaaacttcgatgtgctcatatacttagatcgttaaatcactaagagatcgcttggatgctcatatattaatatctattagtcttgaattaagataattgcatgggtatttaaacagtggatattaacatccaaacaaggcctaagacattatttgatgtccatatattcatatcaatctatatatggtgggggcgttttagggtaaattttagttcaaattttactctaaactatataggaaacatatcatgtgcaatcgaaccaattagtgcaaccatacaaccaagacatagtgatgaaggtgggatggcctgtttaaagtatcatttttcaaaacaactctcccactcttcctatatatttttaaacaggctttcctatctctatccttctgtcttggttgcacacattggttgcaccggttgcgccaaataatttggttgcacctgatgcgttcccaactatgtaggaacaaagttttttttagtattgaagcaatactgcagtattgaacaatatattatatattttgaggtgtttgggaactcatttttcttgacagtgttccaatgcttacagttttcttatccatagtcaacactgcacggtatacatgatgtatgcgtaccattacaagatgtgcagctacatacatctcacgttaaacaaagcaactccggctcataagtcgttgtcttacggtaccgtgtgtccatttcagatgatgcatggtacctctaaacaattccgcaacgttattgtaccagatggcaaagtcgctctaacagatttcaatcagaattcataaaaaaggg

SEQ ID NO: 147774 - DNA, 321 bp, Zea Mays
gcatctggtagagataggggttctattgccgtacttctctccctttcctcgctcaccacgaccgacattcttcctcagtttctacaacgcacacttgacatagcatctgaggaacaggtgacgggctcacttcacctctattgaatttcgtgtgcgcaccttagttcaataacctcttaagtgccgctacccatgtttggtgcagcaggatctaatcctaatcttgaacgacatccgcacgagtcaaagcgtcaagcccatctccttcacgggaaccattggtgagtgatttgttcatgaccatcttgtggattttaatta

SEQ ID NO: 147775 - DNA, 820 bp, Zea Mays
ctcacatcagaccggtacataaagttatagcatccaaagttgttatgatactgctctttcccaactgccttcatctggtaggacaattcgtgaatgttgcagaagcagttggcatctggctccagcccttggctcctcatagcccaaataaaaattccaactttaatcaaagcttcaggagtaacctgatgaaggtatatctcaaatgtctttagcacttcgaccaacatcttatgcaagggaaaacaatgcccatccttcataaaacttttaaataccaccactgcgtcagcttcaggaagaggaacagtactctctcctctagccctcactatggatatatcatggaaatatctgcccttcatcgcttcaattttcccttgcttaacagtggatttcccgaaaacaacatgacttggcctccatggtcgaacttcggcatcttagttctcactctcaatatcaaaactatcgttgtcgctggagtccccagacagtccagctaacatttcatcagtgattttctcaacgttggtcttctccatagcttcgtagaaaccagcaagcacgaggtccacgcttttcttatcttcggccatttcagtaatgattacaatagaaagccgaagctcaaaaaacaattgcggtcacagaggaagaaagctaaaacaacaagcacaacacaaagcgagatagcacgaaaaatattctcagcgcaagcccttatatatatacacaaagcacccttgagcggtggggcccgcaatgcagaatgttttgctattctagcgaaggggaggtgttttttcaaactttcggc

SEQ ID NO: 147776 - DNA, 481 bp, Zea Mays
tcaggaacacactgagaaatgttgttcattatcagggacacaccgcagcgattaactttttcatttccgataaaactttgtaagatttttctaaaatagaaatttttaccgttgttgtgtgccgctgataataactaatgtttctcagtgtgttcctgataaatagtaccatttctagtgtccaagagctaaagtcactttgttactgtgccaaaaataatttctcctaaagttaaatacaattttcccacacacgtggacttcatgaagaaaagaatgttagagatttagagtatatttagtaatttagatattgtgtatcgtagattgccatatgtgcaattggattaccttgtttcccaagtcttgtactctatataaaccacctaagggctcaatacaatacaatacaaccatccaattacactaattatattctcattcatgatatcatgagtctagatttagatcataaccctag

SEQ ID NO: 147777 - DNA, 373 bp, Zea Mays
gaagaagagattgattataacaccgttatgccatctaagcctagccatttggattttggaaagtcgactatgttcgaagctgacatgcccatgatgacgaagctaggctacttcagtgaagccgagaagaagttgattcgctttggtggggaagagactatcctgaaactagaaagtgatgaagtggtagtttttaagagcttcttcaaagcagggttgaggtttcctctgcacggaatgatcgcagatgtgctggaaaattttgagatttatcttcatcagctgactcctaacgctattgttaggctcagcgtgtttatctgggctctccgaagccaaggagccgaaccgcttgccgaagccttctgccgag

SEQ ID NO: 147778 - DNA, 613 bp, Zea Mays
tgttcatcttgaaggaccaagtgttcagttcatcttgaaagtcctgagcttggttcttatttctgtgcaaagtgtgttggttcctgttcttatgttcagttcctgtttgttcttactgttcagttgtgcaaagtggattctgactgttcagttgtgctctcccagtttattctgtgcaaagtgtgtggtgttcctgtttgttctgtgcaaagtgtgtggtggttcagttgtgctctcccagtttcaggaggtgttctgttcatcttgaaggaccaagtgttctgtgtgtaatctgtgcaatctgtgataatttctgttgtaattttagttcaaatctgtgtaatctgtgcaatctgtgataatttctgttgtaatctgtgcaatctgtgataatttctgttgtaatctgtgcaatctgtgataatttctgttgtaatctgtgcaatctgtgataatttctgtgtgtaatctgtgattatatttttagttcaaatctattgtaatttgtgtagtagcgtttaaaattttaaaatttggcgggagcttcattgtacagaagaaaactgtcgacaacccacctaattgagccaagctaaaaaaaagggaaccaaac

SEQ ID NO: 147779 - DNA, 675 bp, Zea Mays
ggtggcgaggccaaagcactcgtcaagaggcgctgattgtaaatacagaggtacatgccatgaattagatcgtagtatttaaacaagaattatagagctacatatcatgaacatattttattaagattgattgtaaatgtacaaacaaatttgagaagaaattgctaaagaacagggggcaggttcaacacatagagctgctctgatcaaagcactgtcagcaccagctcgctgatgcagctacttgcggacgtccacacttttccgccacctaggcaccaactgcttagaacgctaggtcaaggtggcctgcggactgtggccatggtctcgccaaccatgcgctgacatccgggggtgcgcaaggcacccagtagcgctccagcaccgccgcctgaggcaccgctgaagagggcagacaggcctcccactggtattctttccggccagagccaccccctaccatggaccgcttgcccaacacccacattggcttcagcgcctcttgatcggtttccaagacctaaccgtcgtcgctttgcctagtgtcgagtagattcacgttgactttgttgagccctagcgcgcaagtggtggcaaaaacacagtcgcgagcagatctgcgcaagacataggtttgcatatttttccacgggtggggccattagagatggc

SEQ ID NO: 147780 - DNA, 433 bp, Zea Mays
gcctgggtgcacggcggggacgcgcggccgggcgggagggcgggggcgacgcgcgcgcaccagccgttccgccggagaactcccgctctggcacgatcgtcgccgtgcgacaggctgctggccaaacgcgcgcgcgatagccgaggggaggaggacgtagaggaggggtaagccggctgcggaattcaccatgaccaataacttcctcacgacgataaagagcctgaagctgatcgagggttgcaaagccgcacaattatacgccttaagctccgttggggcagcctccacgtccggctcgggggatgccggagggagcagcaacggcaagccccagcctcctccgccgccaaagaccatctcgatgcggtccggatcgctgtactacccgcacgcggcgccgtccacgtcgggcgccttcgtgcccgagccg

SEQ ID NO: 147781 - DNA, 279 bp, Zea Mays
cggtacgtctccggtgtgtgcggtcgtccctatctcgggccgcaacttccttggcaacacacctccccaaagcccggctgtgggcgtccctgtctccgctgtgggcgtcgctgtctatggcacgcgaccgtccctgcctccggcgctcgcgggcagatctccggcgcacgacagctctctgacgttcgggcagatggatctccggctgtgaaggattgtctgaagtgtctccggcgcgcgttcctctgcatctgcaaagtctctagcatgcgtggtgcg

SEQ ID NO: 147782 - DNA, 405 bp, Zea Mays
gttcgtgctctatttaagtgggccatcatccgaaataaacataagctagactacatcaactgattttagtggtcagtaccaggattgaagggctacttatatgggctggatggggtcgataacaaaagatgacaaaatgtagacaagagctaaatcccaattagttttatgtggttccatatatcattcttggtggtctttttggtgcgtggaatctttgattttgagtggtccttgtttgatcctattaaataaatggtaggattttaataatctcgccattcatgacgtaatgaagtacaaatattgtcttcaaaaaaaaggccagcatggttgcatacacaaagattaaatttattgaaattcatccacctgacactctgacagtttcatgttggcctattc

SEQ ID NO: 147783 - DNA, 299 bp, Zea Mays
gtgtggcgccctcgcttgtatatgtgtaaaggcttgtacgatgaagttgtgtgccctcgcttgcctgtgcctcgcttgcttgtacgatgaaggttgagccgttgtgtactttgtctggtatgttttgttatgctgtgctggtgtgattatagtcggtcttggcgcgaacggtttgatgctgtcgtttctgcttttgttgtactagtccggctgcgcccttaggcggcttctgcgcgggtagtcttcgcggtaaacttcggttttttcgcacttgttgtgctagtccggctgcacccttg

SEQ ID NO: 147784 - DNA, 338 bp, Zea Mays
gcttcttattacatgggtcccaagtgattcttgcaattgctcccagaaacgtgctacaaatggtgctcctctgtcagacacaatagtccttggtattccatgcaaacgaactatctggtcaatataaatttctgcatacttttctgccctgtgaatggtatgtactggcaagaaaagtgctattttggtcaacctatccacaatgacccaaatagaatcgtggtgccgagaggtattgggcaatcccacgatgaaattcatgcaaatatcctcccatttccaagatggtatgggaaggggttgtaaggtgcctgctaccttcaaatgactggccttga

SEQ ID NO: 147785 - DNA, 752 bp, Zea Mays
atcgacaaggaggaaattaattgaataaacctttaaggcgtcatctgtcgcttccaatttcatgctgtccttatcacttatcttgttgccttgaaaaatttccaatgcatgggacaagctgttcaatggaagagtcataaaccaaggaagaaatgaaaagatccacaaaaactattttaatctgctaacctctttgtggatagaactaatttcccatttcgatactctggatctttgttattcatcaagtgatacgaaactgcagacaccacaatttcctctatatacttgctaaggcacatagtatcagataggcaaatcgaacctaaatcatcacattcaagatcattttctgcaagcacttccataatatgatttcggttatcttgaaactgaatcatcttcatgtcttcttctaattgggagttccaacttacaaggtggttttcattttcaggtggcttgatttctatattatatgggaacagaacagtcaatctgtcatccgattcctcatcactgttcatatctacaatccttgatccgaggattaacactggaccttcaagcttgtttagtagtttctcaaacaggagatacatttttggggacttgtgaaggaacttctcaacatctcttatatagagtacaactgggtacttctttgacactgaaagcagaaccttgtacaatgcttgcactaaaattttctcatcaaaagtccaactgcttgaccgcctaagaggagctgc

SEQ ID NO: 147786 - DNA, 638 bp, Zea Mays
ccccaaaccctagacaggtattctaacaatatcaaaaggaaactaatccattattgaggaaaccgattaaaaggaaactaatcctgacttatcttccaaaggatcttgatttctcctaatcaggtgctgattggctctgcttcttctggcgccctgattggctctgctgcttcttctggcgcccttcccttttcttgcgccttatgaactggcgaaccacaaaagcgtctataacatttccctcctctccgacaagcaactcgtcctcgagttggatttatggatatcgtctcttgaactcagaacattgctcccatgtagcatcggccagcgctcgccccagccattggaccagcagcttccagacacctctattcaaacgagccttcactacttttgctggaaccagtagtaccttgccatgaagaaccgccgacaggggtattggtgcggatggtggctccccttggaatttcttgagaagtgccacatggaagacatcatggattcttgcattggctggtagctgtagcttatatgcgacctctccgatgtgctgcagaatttgatacgggccatagaacttaggtcctaatttggaagttgctgctgtggtgacacccactgctgacctttgg

SEQ ID NO: 147787 - DNA, 1096 bp, Zea Mays
ttgcaagcgcgacctgattatgtttttctttgcgaattggatcagttcttaatcactaagactgttttctgtggaccccgtaaaacaggagatgcgacactatatatgacactgcttttgtagagtgaatttttaaataaagtatgagatgttcctaggtactccgaataaatcagaatcatctagcttcctgttgactgttgtgacaacctgaatatttcggcagtgacgattgctcaccggtcaccattgttgcttagttttctgcgtactgcaccgttgctgcctcatttgatttacatgattcatgtgcacaattaggtcttcttgacccctgacaatcacgtaggatcagtttaatggcactgacatttttgcagcttactattacaaaatacagaagcctctctgtctactatagaaatatagaatggtcttcttgcttattatctggctcgattagtggctaaagggaaatgaggtggtatgatgtcgctcctaaaggatgttgtttgcatataaacaatctagaaattggttgatttagttctacaaataagtgttttaattccatgagatagctgtaggtggtctttctattccttgccttgatacttggtattcctttcccaatatttgtcttgctggcataacctctgcctggccgaattcctgaacctctactcatctgtttttgacgcaaaacacaaaccaattcccatattatcaccctttaattgactcgtatcacttgcttggttgtttgtccttgagatgttaattaagtcggaagtatctatcttattgcggtgatatctacagatgatagtaattgaattccttatggtgacaattactcaccagtcaccaccatttcatgtgttccttcatgtgttcgttggcataactgtcggttggggtcttttatttatgcttgggttttcctttctccgtgtctatcgtggctattggactaacataatgtatggattcatggtacagcctcgcttactgctttactatgcctgactgtatcctagaatgcaagaaatttcatcgctgacgactgttcctgctggcaaaaaaaaaagaataa

SEQ ID NO: 147788 - DNA, 507 bp, Zea Mays
tccctcttgcctgaggtctcagtgtttcgatgaaactgtgtgaccggtagttgtcgctacatacttgattttgcgaaaatcctaggtcaattgattggtaggatcaagtctgggttttactgcaaaatcttaccaatatttgtggaaggaaactcactccaaaaccaaaaggtttcctttttgtttggtagataatagtaatcaacccggggatcttggaactgtttgtatagtggtattggaatccaaatccttcaaatttacttcaaaaattccaccacaatacactagatatttcaaggtttccatgctaggtcttgaacttatacggtttgtgctactgagcagtatcctgattccaatgtttagtgattttgcttctgatctaatatttaatcttgctttgtgccattttgttctgttgaagtctaccatgttgtgcttctgtagcttggccctagttttgttgttggctacattccctggatccactacataagattgctc

SEQ ID NO: 147789 - DNA, 848 bp, Zea Mays
gccacctccacctttcatggggggacacttcaccatgcatgtgtcacctctaccttaatggggggacacttcaccatgcatttgtcacctccacctttcatggggggacacttcaccatgcatgtgtcatttaccactttaatgggggaacacttcaccatgcatgtgtcacatccaccttacatgggggacacttcaccatgacacatcaccataattctagagaggtccaaaaatatataggcttcgtgacttaccatgattagtgtagggaattctagaaggctatgtacatcatggttatccatggttgttcctagaaagttgtcttgcttatgattaaggtttatcatgaatattgtataatcttctagaaacttggttatgcttattatatgacaattgtttaagcgaggttttccttgcatattttcaatgggcaaatgatggccatgggaaaagctgtcttaattgatgctaaggtcataacttctatagtttaagaacgacttcggggggaggaagaggtcgaagatcatggcatgctcacctatggctcaaatcgacgatgagggcttgtcctctggtttgaagagtaaggcacgcgttgttcggatgtgagggtgacaatgagatggtgactggactgtgaggttccgtggcaagggcatcagtatttataggcggaggaacgacaatttataatggagggagtctcgaccggcgtactgtgattggcgacgttgccacagtgcaatcgcaacatcccgaggttggcagggtaacttggctcatggtgggtcattcatttagttgtgattgtgacaagtgactggcgtgtgctcagg

SEQ ID NO: 147790 - DNA, 276 bp, Zea Mays
atattttactgttccaggctgaaaaggcccgagctagagttcagtgttcagatggcagcattacattgatctgaatgttatcagttgtgattacacctcccttaaaggtagctgtttacttttatatacttgatacttttcagcatttgataattttttatgtatagtcgataggttgaaaacacttcaacatgaaatattacattgctagccaagcaacgtgactagatgtgcactcatgtcacacatctttttagcataagttcacgatccgca

SEQ ID NO: 147791 - DNA, 382 bp, Zea Mays
gggagatgatggaaaaatcctttttcttcaggaactcagagatgtcagaacagcctgtgctggcccttggttggtggctggggattttaacctcatctataaaacatcagataagaataactccaattttataagagccatgatgggtcgtttcagggatttgatcaatgaccttggcctcaaggagattccgctgttaggacgcaaattcacttggtctaaccagcaagataacccggtccttgttaagctcgatagagtgttttgtactgtggattgggagctaaccttccccagagttcttcttcatagtgctgcgtcacttgattcggaccactgccctttgcttctgggactcagtgacaataggcctggaaaacgg

SEQ ID NO: 147792 - DNA, 364 bp, Zea Mays
atccttgagggccgagttctctgcaacagccacctctaaggctgaaggaccctcagtcacttccgtgggagcagtgcaatccagaccaacctcctgaccctcaagaccgcgctctaaggtcgatgaggcgcgggacgctgcccgggatgaccccaacccggcatcgggcacatcagcacaaacatccatcgcaccaccatctaccggctctgacaacagatcttctggaaccatgtcttcaagagtttgatcaaagtttgccagagataattcttgcagaccaatgagggcagacaaagcaaaagaaggaacaccactactttcctcactagctatgtaacgccggctgttcttccgaatcaga

SEQ ID NO: 147793 - DNA, 420 bp, Zea Mays
aactcgaaagcaagctgcattttaaaaaaaatggtagacttcatcagagcaagattaaaccaattgcatataaaagcacatattaaaattcacaaaatattttccatttatttactgtctctatataataaaactcaagcaagacaaaaaaagtccgcatttagtttaaatttaaggttgagttcatcacaaatctttatgtagaacactgaggaaaccacatttaacaatgacatgaaaagaagatcgatacaaattaactctttaattatgcctcccaaatgaatcaactgagagtactttacagccctttacaacatcacacatgacagaattgacaacgacttaagtgttgtaccctggtatcaactgaggtctatggtgttactaatgaagtgacacacacaacattttccctaa

SEQ ID NO: 147794 - DNA, 2014 bp, Zea Mays
aatggagcgggatagacattaggtttgttaatcagtggacagtctgttgctgttcatgacaggtgggaaagttgagcgaagctgaaaccgtgtcccttattttgcaagggtggtgctcataaggaaccacccccctcttctttgctggtgggagaacaccaaatggcccagctgttgcaccatcaggattctgcattctacagcaaggaattgcacgggtgccggtggggtattcttcaattctttgggtttcgccgtcgcctacggtccacaaagatgctctctgacaagagacatggtcaggagaaaaacagccgtggtaagttattgagtccttagttctctgtttttctttttgtgaaacggacttaaatactagcataggtattgaaaattcatgtgtctaaaactatttttgtttgactaccaagacaactggcgaatctaatgattcaaagtagataaactgtttatagtttgacttttacagtgtactgatcttgatttgtccttaagtgtaacttaactaaaactttgctttgtgttcgtatgcatgaataaaacaatgcatataatgctcagaatctaatgctatttatcttacgatacaggaagtagacgccgaagcagctcctatgctccattgaagaacgaagacagtgcaattctggatgatgaggaaaacactgaggtatatcaggtaacgtatccttgaatttcagattgactttcttttttcttgaatagtacttattgttattactctattgatcccctatattcacttcctacatgttgcttgatggttaagcacttgaatttaatgcattaccatgctctatgcttatctgtttccctttagttcaaaccagtactaacttgtctgaactgtgtccgccttctgcgaattagctactacttgtatgcatttattgtgtttttttagctgtggagttagtatatctgatacttatttggatatagtgttcaatacaaagcagtttatagaagttacttcttccaaaccctacatacagttgtacacgcacagctaattcatctgaagatcaatcccccttattcctttaatttcttctaactcaggttacaaaaaaacagaaggcctcaaaaaggaattctggcaagtctagtttgaggtccttgattctaacgaagttatatggaaaggaaggccagaaagagaagatgcttccggttgcaccaaagctactccgcactatttcgatacactatctggaaagcaatgaatacgttcttgacggcgaatccacttcgagcggcgatggttcttcaaacagtactaagccgccgatgcaaaatgctggcgatatgatgaatctgcaccatgctacatctagcgtcccagatggctgtggtgtcgattcaagctcctcacttctcctaaagatagacgacgtccgtacgaagcgaaagaagagccaccgtagcatttcgatggacgggattcttcacaaggtcccctatgggaagaaggtgtccggagatgtgatcagtgaaggtctcccccgatcagcctctgccacgtacgatagggacggcgcgaaaccttactttggtggtgctgctgcaaagaggcatgcaaaccaagggtttcggcgttcacgttccctcagtgaatcctgggaaaactactcgcgcctacttgattccatctcgagtggtgagtccaaaagaacactggccagctctaagtctaccagggatcattccctagatggccctgtcgcgagtacttcattgcaaagaacttctgaagccttgaggtctcaaggtctgggtaaacgtgatgagaacctcgtgactgcagaagatgcgttggcgccacatgttcaagagaaaactggtgaagttgctaagggtcagagctccagcgatacgatggtcgctggtggctctgaaaatcctgctttacctgacgagcacgttgacgacaaagctgaagaaaacacatgcgctgctccttcaccttcag

SEQ ID NO: 147795 - DNA, 606 bp, Zea Mays
tacttcacaggcggccacatacttagaaacgtcaaccttcatccgcttccaccagaagttttgcttcagatctcggtacattttggtttcgccagggtgaacggtgtaaggcgttttatgagcttctctcaagatatccatcttcacctatgatttctgaggcacacaaaggcggcccctaaaacgaaccaaatcattctcatcaatggagaactcccggggttaaccatcgcgaaccctctttcgagcttcgtgcaataaatgatcctgctgctgagccgcacgcactctttccatgtgggaagattgaataagcatacgagtctcctcactagcggtgccgacatagcacaaagcgatccccaaacggtccagatcagcgatcaacgacaaggccacttttggaaccccggacctgctaagggcatcagccaccatatttgccttccccaggtgataatgaatggacaaatcataatctttaatcaattcgagccatctacgctgcctcaaatttagctccttctgagtgaaaatatacttgagacttttatgatcggtgtaaatgtcacaagcctcgccataaagataatgcctccacgactt

SEQ ID NO: 147796 - DNA, 1183 bp, Zea Mays
gccgatttttgatccattcaacatctgtattagatagagttaaaattgcgatggtgttagagtgttgtataggagttacatgttttgccccttcgtaatgggctttggtccacttgactctatataatagagacccaactcatgaattagggttagggtttcgattctccaaccaacagccgatgcctgcgatcagtatccacgctaactaggcactattcagaacggagtgagtttggctggaattaattcgtcacgaagtgccctgatctagtgctcctctcgtcttcctcaagttccaacctgtaccgcctgacagcagagacggcgtcccccgggagtgaggacgttgtagtttggactttgtatcacgtctgtatcagcacgtgcgcatcccatttagcgccttgttcaaaggcaaaaaatggtctcacacacccagcagcccagcaccaggcccttcaccagtaatccttgcaggagcaaaccccaccatcgaagcgatggaatcggctcgcgtccctgaccaggaacgaccggttggtagtggccgaaaccgccttcaagaacgagtggcagtccccgcaaacccttaggttcttgatcaccacaatctcactgccggcctcggtgttcagcaacccaaacgccaccgccaacttctcgctgtgaaacccaaccagcggctgtgcagcctccttctccatgcgtcccttggggaccgccaccacgctctcccgcactcccgacttctccttcaccatcagctccagcctggtcaccagctcgtagatcctcctcgcttgtgggtgcgagtggtcgtcggccatgaagaggtgcaccctcccgttgtgctcgacgtagctgcatccgggctccttcttgagcccgcgcttcctcatcaccgcccgtaccctcgcgacgcagtccagctgccccgtgtcggtgtatatattcgacatgagcacgtagtatcccacgttcctcggctccagctcgacgacgcgcgcaaaggcctcctccccaatctccacgtttttgtgtatcttgcacgcaccaagaagggcgccccagacggcaccgtcggcaggcatgggcatcgatgagatgagctctcgagcctcctccaggcggccagcacgtccgaggaggtccacaatgcaggtgtagtgctccagtgtgg

SEQ ID NO: 147797 - DNA, 618 bp, Zea Mays
aatgaaattcaaccaagaatcatcaaaatctttcttattggtttcttgaagaccaatgaagttaaccttctctttcatgataacatcacgaaggaattcacttttcacacttttgcctatcccctgacaattccaaataacaccaatcattctgaacaagataggccctggacatctgactggcctttcctcttgatagggattttcctatttttaggagttttaccagccaagttattattgtttttttcctcacagtttttttcctgtgttgaattttacgaccttttctaaggatcataacatcttcaagatcagaaaaattatcatcatgactatcattatgaatgttattatcagcatcagaaataaaacaatcagcatttgaattatcagcattaatcctaacagattgaaccactaagtttttcctagacaattctaaagatttaatcagatttaaattttccactgcatccttaaaggaagaacctaaatcaacaccaattttgtgagccacatccataagaacaacattatcagtattcaaaacagaaaatggattgtaagacgtacctttgttgatgaatgcatctttagccatagctcttgcagcag

SEQ ID NO: 147798 - DNA, 516 bp, Zea Mays
aacgggtgctccccagggagacaaactgggacggatgtaccctttttgctgtagttctgaaatctgaagtttcaattctgccaattcagtgggggccatgcggtatggtctctttgcgatgggcgcagtgccgggaatgagatctatatagaactctactcctctttctggtggcatcccgggcaactcttccggaaatacatcctcaaactccttgattacagacatgctctctgctgtcaggttaaacatcatcgggtcgttcgcgggtggttgggcttgacaggaaactgcctttccttggtgatctgtgagaagaacagtcttgcttgcgcagctgatgatacccttgtgcttagctagccagtccatccctaggattacatcaattccttgggatggcaagatggttaagtctgccaggaacactaccccacttaagagaattctgacttgggagcacctgagtttgcacaggaggtctgatcccggggttcgggtgaccaaagggatagc

SEQ ID NO: 147799 - DNA, 299 bp, Zea Mays
caaataagacgacataccacgtgcgcttgcaaggcgcctgcgtcgccttgtttcatacgaatgggcaacacgtgcatacagagcatcagccatgggcacaccgcgacatgtaccacgtgacacacacacctagcacttgtagaacatgaatagcgcgcacgcgaactgtaatagagaagctcccacataaaaaaacatgtaccatacggctttcaaacaaacgcaaggaaaatgaatcaatggttaactgtatcatatacatactaaaacatatagcaaacttaggcaaacaattagcc

SEQ ID NO: 147800 - DNA, 385 bp, Zea Mays
gttctggccacggtgaccggaagccgtgcgattagattgccgtgttcccggcggttggtggtctcctagcgcaattatgtgggttgtcgagcatcaccggcgtacagagaagctagaacaggaacaaagaggacatgagcagacctgtggaaggctggcaatggtagggtgtagttcttgacggcggagagggatttgggggaaaccagaaattcgagctcgctagtgggggatttgggatgcaggtgggtgcggtagctgcttgggaacatggcggagctgggggcacggtctatttatagagcccacgagcggtggtgaccaatttggccgagccgtgctggcggccggaggtgaagaagaacctgggcgcggtgaattcgtg

SEQ ID NO: 147801 - DNA, 656 bp, Zea Mays
atcaggttggctcttcctttcagtaggggtgttgacctaagagctggctatcgtcttgctaggttgcttggcgggctggttgctcggcaagcccgcttagttaggttgctcgatgggtagtttggtcggcagtcccacctcactaggttgctcgatgggcaggttgctcggtagccccacctcgctgggttgctcggtgggcaggttgctcagcgggtatttgttcggtgggctggttgtccctagaaagccttttggacctttacgctaagctgtttggcaggtgggcggccagtttgtgggcagtatttgggaggcctttaggtcttctttgggtaccccgttctcagatactcgacagcagccctcgagcctttgtgtaactccttggagttgcatagaggtttttcttatgcgatttctcttttgggtgcgcgcaagtgcatctgttagatgtatcccccgagctcttgagtaatccatgtggatggctcggcggtttatgcagtgtaaggggcggaccctttcatacgatggtttgccatgcaccgggcgtgagtccatcggtctctcgggtgcgcgtgagcgtatatgctagatgtaatccttcagcccctgagtaatccatgtggattgcttggagatttatgcagtgt

SEQ ID NO: 147802 - DNA, 379 bp, Zea Mays
attggagctggtttatgcagatgcttagagatgctattggaacaccagaagggttagctatttgcactgatgctggacaaggagtgatggcaggggttaaggaagtgttcccaaatgcagaacatagagaatgcatgttacatttggtcatgaacttcaagaaaaggtttagtggaaagatatttgatgatcatctttgggcagccgcatatacatggagcccatacttgtttgagaagcactggacgataatggatgaagctatgccggcagcaatggcgtacataaggcaataccatactaggatatggacaagaagccaatttgggacccattgtaaagttgattatgtgaccaacaatttggctgattgctttaa

SEQ ID NO: 147803 - DNA, 467 bp, Zea Mays
gcaagtactgctaagagagcttcgaatttcttagcctcgagctgcacaactgtggtgtgataacattggtgcaacatatctatgtgccaatcctatttttcatcgccgatctaaacacattgaggtggattatcattttgttcgggagcgtgtggctactagacagttggatgttcgtattgtttcaacgaaagatcaagttgctgatgtgatgacaaaagccttgctagcttcatcgttttcattgtttaggaccaatctgaacgtcacttccctgcgtccagattgagggggtattggaagatattagatattgtgcttatcagataagctaggattgttatcctcttcgagctgcatctccatctctatctcttcccctgattttctccaaccgtgtaacagccatgcatggctcatctatataaagaatacatcggcaccatcttcaggtgtcgagtcttgag

SEQ ID NO: 147804 - DNA, 491 bp, Zea Mays
ccacagagaaggacagaaaaccctgaataccaattttcaaaatctaaaacttgcctagaaactgctacgaatcgtcaggactagaccgctagacctaggacgaaaggccttaggcatagagggagaaataggtggctaattgatcaggccccgtgggccagtacttatatttctaaggatgccctaaaaagcaccctatttttggagaggcaacgttacttccagcatgcatgcattataaacacaaagaggaattaaaaacttgagctaacccactttctttaaaaccatccgggctctctttttctctttccttccaccataatctttacctttggttcccttccgcagatgaattcacccacccccgccagtggaggagacactcgtttcagttccgacttcctttctcgcgatggctttccttccatcttgtgggaagtgcttaactctgccggttaccctacgcccctttgtacacggtgcagttg

SEQ ID NO: 147805 - DNA, 624 bp, Zea Mays
catcatccctgctaccagcacttccgtaggggccgcctttcttatctacgcgagcgcccaccgttgtagacactgcccgcgcgcccatcggtttgaacatttcgcacttcagcaagctcgacttcttcacctacgacggcaaggacaccctgaattggctcaaccattgtgagttcttctgtgggcagcgtacactcgcctcatatcaggtatggctcgcttcccaccacctcgcgggtgcggtccagacatggtactatgccttggagcaagatgagggcaccattgtgagaacgattcaaggatctttgctatttgtggtttggcccaaccatcggcaacaatcgtctcgacgaactgtcgaggctccccttccacaccaaagcctaggattaccaagagcgttgtgtaaaacgtcgaatgttttgccggtccaaaagaccgacctcttcattgggggtcttctgaagctcattcgggtcaacgccgaactctaggaatcccaagacatgcagacctcttcattgggggtcttctgaagctcattcgggtcaacgccgaactctaggaatcccaagacatgcagacctcttcattgggggtcttctgaagctcattcgggtc

SEQ ID NO: 147806 - DNA, 630 bp, Zea Mays
tagggtttgagcatttttcccaattggaggtgcatgaaagggctaggatatgactcataggatgatcaacacttggttaagaccttggtcctcaagtttggtgtctcttgctcaaactaaaacacatgtgataataggtcacaggagtatgtgttgagcaaaggccctgagtaacacctggggtgttacagggactaaagctgagtgcaaaatgcttctgcaacatgcacgagttgtcctatgagacgaaggctacagggaaggagcaatatcataataatttatgttgttacggcttcgtgcctcgctctgatgtgagctatccagttgggacgtttcggaagagatgaccaggagcctagatggaagaatggttttatgtaaagaacaacttaattgaaagagaatatataagggggatcatccaatgccctatttggtctcacttcgacatcagaaggccagccactgctcttggaaatgatatcgaagcatgccagaaggctttcaacagtgtatgcacttttattggcacaagagacctagtccaagagcacattgcttatagagtgtggcctcttgtgaataactaggagatgccgaaggagactgctgctgggtccagtcaag

SEQ ID NO: 147807 - DNA, 1074 bp, Zea Mays
gagactctagtactcatcgcagcgcaggggatgctggatctacatgagggggcacgtgcgacgctagagccgtgcatggttgtgcgggagacgacaaagccatgcatggtggcgtgggaatgacattatcgtatggtagcgcatgagactctagggtcggtgggggtagcatagggggcatcagggatgtgtgtagcgtggtgggggaccaaccatgggtgcaatagggggcaccatagagtcagcctcgagaatggtgttcaacttaagagggagaggcagtggaaggagaggtagagaaagggaagtcggactcgtcgaagatgacgtgacaggagataaggactctatgtgtggagaggtcgaggcacttgtatcccttgtgatcagggagtacaaaaaagacacaaacaagtggagtggggtggaagctttgtgggggcactggtagagataatatgatagcaggcgcacttgaacacacgaagatggttgtaagaaggagaggtaccaaagattgcaaagaagggggtagggtgatgaaccgccttggtaatgaagcgattgagtagataggtggcatttgtcagcccctcagtttagtactaagtaacaagggaggcctgaaacaaccgagagtgtatgacattattcgtggtgtgaatcatacgctcagccctaccattctaagaagaagtgtaggagcccgatatctgtagatggacaccgtgagaaagggagaagtcatgggacacggagttatcaagcttatgtctattgtcaaaccggacactccggatggtgcgaccaaactgagtggaaacccaagcaaataagtgaaagagcgtaggaaatgtattcgcaccagggaatgagcatgtaatatttatagctagaaatgttgagaacaagggatgtacaaacatcacagtgaactagatcaaaattgcctatggatctagaagaagaggtaggaaaaggaattctaacatgacgacctagctgacaagcatgacgcagaaactcaaaagagccctgactacaaaagatgacaaagccgctagacaacttggg

SEQ ID NO: 147808 - DNA, 957 bp, Zea Mays
tttgaatcataaatacatagttaatagacaatatgtatagagagtcgtgtagaggtagactttcgtgacgagtccgtctcttgtattttttcaattaacttctagatttctagaccttattttcaatgggatcgtacatactcttagagcatctgcagagttatctaaaaaaagtgaccctgaatatctatttaggaagttgctaaacaggttttgggagagaaaatttgctatccaacagatccttatatccagggacttaatcaaatttgaatctctgcattgacatattccaccaatcacgtacagctcaaagagtgcaggttgttcgtttatgccaagagccaagtgcagcctagtgttagtggaccgtttctttttcccaacagcaggtgatcggtggccagatattgtgctccaacgtactgttgctatgcattccaatccttgcttccagctattgtttgcttcatcaaattctatccaggattttttcttcatgattctgtgcattccaatccttgcttcataatagactactgttgtttgcttcatcaatttttgttcaattttttttcttcatgattatgtgcattccaatccttgctgcctgctgttaaggacacaattatatagagtttcactgcagaggctcgtaacatgtttgaaagacaatttgacgtgttctgctactctctgttttagtccaatgagctggagaaaacatttgttcctatacagacatatcattgtgatcatgagttgccttgcttattgtagcaatgaagacaacgttactcttattttgaagagcattggtaatacatacagatgcagcatgtgtacttgagcacctctatctgccaataactaaattctattgctgcaataactaaaaaactccaactgaattgtactgaaatatacttaaacaatatgtactgaaatatacagacg

SEQ ID NO: 147809 - DNA, 350 bp, Zea Mays
ccatctttagactggactggtagctgttattataagaaaactctgccaaagaaagacacttgtcccaatcttttccgtagtgcagtacacatgccctcaacatgtcttccaaaatttggtttactctttctgtctggccatctgtttggggatggtatgctgagcttcgtatgacatgggtcccaagtgattcctgcaattgttcccaaaatcgtgccacaaatggtgctcctctgtctgatactatagtccttggtatcccatgcaaacgaactatctggtcaatgtagatctctgcatacttctcggtcctgtgggtggtgtgcactggcaagaaatgagcggtcttg

SEQ ID NO: 147810 - DNA, 605 bp, Zea Mays
gtttctggttgtaggggatctttagagcacctctgtcatgcttgtcagttaggtcgccgtgttaggctcccattccccacctcctctagagcagcagacatttttgatctgatacactgtgatgtatggacatcccctgtaatcagcatttctggctataagtattatttactcattctcaatgacttctcgcattatttgtggacttttcctttacgtcagaagtcggacacttcccaccctatctcacttcttcgcctgggtctctactcagttcggtcgcaccatccggagcatccagtgtgacaacgggcgcgagttctataacaatgcgtcctgtgacttcttcctctctcgcggcatccacctccgcatgtcatgcccctacacggctacacgtctcctcaaaacggcagggctgaacgtatgattcgcacaacgaacgatgtcgtgcgctctctactctttcaagcttcccttcctgctcactactaggctgaggccctcaccactgccacctacctcctcaatcgtcttcccaccaaggcggttgcccaccccactccttacttcacacttttcgacatacacccctcctataacca

SEQ ID NO: 147811 - DNA, 919 bp, Zea Mays
agaaggtccaaggctcggtaacacagtaccaaagccaaaaagacagctaataataagcattatcaaatgactggacggtttcttattaagaatggcaacagtcaagaagtacaagatcattagaactgctgcgtgaagagagaacaaacctaaggtaattctatggaacatattacatcaagcattgttcaaatatccttggcttcaactatctagacaacagcccttaacaaggaacaagaataaaacaacaagttattagcactgtcatctcaggactctagactctttgcttgggctacatgagaggcagctgatcgagtgaagcatatgtacagagccggagcaactcctctcccaggcttctctctcccttctgcggggccctccgggacttggattcgatgtgagaaacctaaaactcgtaattcccacctcatagacacaacttcagtatccatactcctttgaagtgatgtaggagtagcttgtacaggtctcaagggcaccgcatgcggcacaggtcatgtacctccgagctcccaaactgcgggtaatcctgctgctgttgttgctgttcccggtgcttggactggctcttcttggaggagcgcttcgagtgcccctcgctggcaaggacattgctcggaggcacggtggctaccggttggttcatcatcggcggtggcgccgatgatggtgggcagcgatgttggacgttgatggtgtgcgtcttggtttcggttgagctgctgcctgttatatttattctgagaacagcttccttgtccctggtgtcttcgcaccaccagttctgtggtattccgtctacgaattcttcctgcgtgtaaaaatcttcatgatgtagtgtaatttccaccgtttcacctggttttatcagaccgacggctggttggac

SEQ ID NO: 147812 - DNA, 413 bp, Zea Mays
ccaccatcgccttctcatggtgaggcacaaccaccacgtggccacaggaaacttccaccaccatctagatcgatgtattcaaccatagcaccctcaccggcaaattacaatgttgtctcaccatctgagcaaggtcccaagatcaaagatcatggcgccccggggaatgcacctatgtcgtcgggtcaagaaggagcatcgccgccatggtatttttgatgcgaagatcaagataaatgcttgccaattgcagttctactctccacaagagatcaaaagcccaaaagctactttagagggagttccttttttcttatcacacttatcacgtcgaagcataatattattgaataatttatgtaatccatttggaccaagcatgttgtcaatgaaatcttatgtcaaaatgtttc

SEQ ID NO: 147813 - DNA, 530 bp, Zea Mays
acgtgatacacgaagaacagagcacgcgacacgcgcggaacaatttaataacgcgcgtcacaacgcacgaaacagcatgcgccacacgcaccaacgacgcgcgacaacacgcacagacatcacgtgaataaagtgtgaaccggacgcgcggcgcagatgcatgcaggggtagacatctcacctccgcgacaaactaccataaggtgaacgtggcgtggctccctcctcgatggcgagagggcgaaggcgtcgacgagctcgatgatggcgaggcttggatgcacgacgaaggtgatgcgcatgctcaccgcgtctctcctcctgatgacgacggccgtgcatggtggggcatggtcggcgtgccgatggcgaggctgtgcaactcctccacgcaatgatcgggcgcgtgtagggacgcgtcggtgaggcatccacgctggcgagccgcgtcagaccgccacgctgagctggccgcaccggctggccgcgccgggctgccgcgctggctgctcgccgcgggccgcgccggc

SEQ ID NO: 147814 - DNA, 544 bp, Zea Mays
tttcgagacgattcattcacggagagatgttgttggctccaatcgattagcctgagagatgttgttggcctcctagggcacatcacatgaatgcaccggcgctctgaggacgataacaatggctggtatgcaacggcattggttggctctggaagaccttgtgtcatggcaacattttcttctttgctagtgtcaggcctcgcaacccattatgcagactgtagcgtgctcagctggccagaaatttgcctgctgaggtttctgttctgttcggcgcttgaatcataagaaatcgaatcacactccatgggtaactcaagagaagaactatagcatactaattaagaatcaatgacaattaagaagtaaaatataattcattcattcaaccatatactgaaatttaaataaccataacataagatgcaatttgcttaggattcttcatataccacaaagtgaacatgtaccaaatagaaggtttaggcagattattcattcaaccatcagaagtgatccgtaacacagacacctgccaaatctg

SEQ ID NO: 147815 - DNA, 1075 bp, Zea Mays
ggcccaccgggggaaaaccctcgccctggcccaacttccacgcgcgcggggacctgtggcttccacgttcactgacgggcggagcccatcgctcagccacacccctccctccgcgcggactcgttcgctgtctgtctctgtcgtgtgggcccctttggtcagcactttcttctccgccgcgagcttcgcgcgccgttgtaacagccgccgccgaggaactcgggaccccttcaaccacctcgcccacggacattgcgcggactcggactcgccccgcccctatataaacccggtagcgctagcttctctatccatctcgacggaccgtaggcggaaaggaaggagtgtgtgtcgtgagcatcggcgtgggtttggccggcgatttggtccttcgattgggaccgggttggctcggcgacgtcgcggggcagccatacgaagcttcggtcgacgttgggggccttctcgggggcgggaattgctcgtcgtcgtgcaagctccgccgtgaatccgctctcttccgtgggcgggactgcaacccttcaatcgccggtgagacccctctctgtagattcactatcatcccctcttgattttgcaccgattaatttctagttcggggtggtttggcaccggattgcgcgttcgccggcgaagctccgccgtgggtgcgccaccgccgccgctcggggtgctgggaattgggggaagggctcctgaccgttggatctcgttgtgcggtcgagattagatcgtgaggataccccttcgccccattaaaaaccagccgttgatctctaatcgtgcgactcacggcgcgtaccggttcggtcggggggaagatctaatctggccccttgattcaagatcggacggctctgatgggtccttaccccttcgctgtggcgaattaacagaagagcccctccacttatttgaaataaacccgccgtcctatgtgactgtgctttgagtcttagaagatttacccagagccccctgacctttcttataattgaggcccagtccagtgaataggaaaatcatagaaaatgatttagaaaatgatttttag

SEQ ID NO: 147816 - DNA, 580 bp, Zea Mays
gatgaatggtcggaagaggcttcacgtggcatttatgtgagtaaatcacaaagcttactactaaaacatactttgggcatgaattcttatttgaattgagctaacttgaactatattgttcttttcaggagaaggcaactgagaaaattgttgagaaaatgtatcaaacagaaagatttgatctaacaagagaagaggaaaatgctatttttcaaacaacattcaaggaaacaacagtcatgtaaggcaaacagacttcatggtcatgggtacctatcaagatatccaacaagaagtcaagtgatggaatcaaagttcctcgaacaagctcatgccacggttgcaaccaaccaaaagaacattgaactcgaaagtcaggtctagttgttaaatgaaaaacttgtgtgtgaggttgcagaatgagaaagaatactacaggaaaaaatgcaagcactgcaagaagaagaagaaagaaaaagacaagtgcttagagaagaaatgaggcaagaaatggttgctgcccttgctgctgtagcacaacaggtataaactttgatatttgtatttttaccatcattgc

SEQ ID NO: 147817 - DNA, 297 bp, Zea Mays
aaatacaaatactttataattcaagttttcttcattgcatttatacaactgcaatcaaaacatgtatgcttctgagttaacactgaactctcttatgaagcagcaattggaggatattttttgataaaaatttgtaaaatggggtactgttggagccgttttttatcaattgagacttatattttcaagataggacactgagttagggcactgttggagatgctttacttgatagctggttagacttctacttgacatttctacctggcaggctgttgtactcacaagccaaattcc

SEQ ID NO: 147818 - DNA, 351 bp, Zea Mays
gtgacattttgatgctggcctgatggctgttgttatatgagaattcggcatacggcaaactagactcccaatttctgtcgaacgtcaacacacaagctcttaataaatcttcgaggaccttgttgactctttccgtttgaccatctgactgggggtgataagcggtgctgaaatctaacttggtgcccatagcttgctgaaggctcttccaaaattttgaggtgaactgcgttcctctatctgacactattttccgaggaataccatggagcctgactatctccttaagatatatccgggcaagggtggctcctccaaaagtggtttttactggaatgaagtgggccacct

SEQ ID NO: 147819 - DNA, 602 bp, Zea Mays
cctaaggagcaagatcgagagctcgcagctcgcgcttcgaaaagcttccggcttgccaatcctgctcagccatggaatgggtcagcacacagcatagcatccaccgacgcgtgtgttcggatttgttgattcatctgctgcaagctatgaatgaaagatctaaagcaaaacatggtttgttttctttttatttgcagccgatgaggttgtcacctacaggaacggcgagaggtcagctgagattctacggagctcgggattccagtacacctacttcaaaccctacaacgggtactgatgctatccagatctctcatggacgtcagttttttctcccccccagaggttaaggagtcacaaaatgctctttttttttatgcaggcttggtcactacactatccctgaagagatggacgacgtcagcaagtggctgaggtcaacgctgggactctgagcggcctatctcgtggctaatctcaaagtcaaatacgttggcatacatagagaaagagagagagaggtattgacaatatgcagagggtttgataggctatgtgatttgtgagttgactgtcatggcttggtaggctgtaactccacg

SEQ ID NO: 147820 - DNA, 581 bp, Zea Mays
gaaagatagtgtcagacagagggacgcagttcacctcaaaattttggaaaggccttcagcaagcgatgggcaccaagttagatttcagcatcgcttatcacccccagtcagatggtcaaactgaaagagtcaacaagatcctcgaagatttactaagagcctgtgtgttaacgttcgacagggattgggagtccagtttgtcgtacgccgaattctcatacaacaacagccatcaggccagcatcaaaatgtcaacgttcgaagcattgtatggaagaaaatgccagacccccctaatgtggtccaatgtaggggaaaggacactagaaggacctgactttgttaaagaagccgaagagaaagttgccctgatccgcaagaggttacttgaagctcagagtcgacagaaaagttatgcagacaacagacgaagagaactcagatttgaggaaggagatttcgtatatctcaaggtctccccgatgggtggtgtcaaaaggttccaaatgaaaggaaagctagcaccgcgtttcgtcggcccctaccccgtcattagcagagtgggacccgcagcataccgc

SEQ ID NO: 147821 - DNA, 634 bp, Zea Mays
tgaacattacaaatggatcggtagaaaacataccagtcctataaatacaagtgtacagaagaatgtgaagacacctttatctcttgatcacatatgcacatttaccagccccttctgttcattaaacctataatcatgcaatacaccagaactatctcatattcaatgaaaaagacctcaacatagtgctactatgttaccgcctgtttcttggccagaccatgagcaaggcttcatgccaagtcctacatgccgatagtttggagagtatttggtattaatttttgaagacaaatatcaatgatgtagtgcttaaaaatacatatcatgggacaccgatgtcagagatgcagctccaagcaggagatttctccatgttcattacttccatggagcttctaatgtcctccacttcagcccatctatcacctcctgcttggatattactcagcaacacatgatagccaacattacttggttccaactccacaagtttctgagctgcaaaatatgcaagcttagagtttgagtgaattctacatgatccaagaagggcaccccaaattctgccatctgccttaactttcatgttgctgatcacttggagagcttcctctagattacctgaacgacc

SEQ ID NO: 147822 - DNA, 307 bp, Zea Mays
atcctgaagtagagcctgaccctctagtctatgtacttagggaacaaagtgaacttcacagacagaggaccctcaacatcatttacaactccactgatgtagagtgcatttccatgcttaggatgaagagagcccctttttgcttcatgcacgacctttagagagaggggagtggtaacttatagggagggggtgtcagtagaggagcaagttgccatgttcctgcatgttgttggtcacaaccaaaggtttagagttgtgcaccaggcctttaggaggtccatttagacagtacacaagcactttc

SEQ ID NO: 147823 - DNA, 291 bp, Zea Mays
catatttctctgtcttgtgggtggtatgcactggcaagaaatgagctgtcttggttaatctatccacaatgacccaaatagaatcgtgatgtcgggaggtgttgggcaatcccacaataaagtccatgcaaatatcctcccatttccaagagggtatggggaggggctgtaaggtgcctgctaccttcaaatgactagccttgattctttggcaagtgtcgcattcagagacatacatagcaatttccctcttcattctggtccaccaatacaaggatcggagatcatgat

SEQ ID NO: 147824 - DNA, 1055 bp, Zea Mays
atcgccttctacagtcggccagtggcgccacggcacagggcgctcgtggcttatgagcgggagctcattgggttggtccaggcggttcgccattggcggccatacttaagggggcgcagcttcatcgtccggatggaccactacagcctcaagtacctgctggaccagcgcttggccaccatttcacaacaccattgggtgggcaagctgctgggcttcgatttctcagtggagtacaagcccggagcggctaattccgtcgcggatgcgctgtccaggcgggacactgaggatggggcactactggccatctctggcccgcgcttcgacttcattgaccgcctacgccaggcacagctcgaggacccgaccctggtggccatgcacgccgagattaccgctgggactcggcctgcgacctggaccatcgtcgacggtatggtgctgttagggggcaggctgtacatctcgccagcctcgccgctgctatcggcgattctacgagcggtccatgaggacggccacgagggcgttcagcacaccctgcatcatctccgacgtgatttccacttccctaacatgaaggagttcgtgcaggactgggtgcggtcatgtgcagtctgccagcgatacaaatccgaacacctccacccggcgggcctcttgatgccactaccggtgccgcagggtgtgtggacggacgtcgcacttgactttgtggaggccttgccgcgcgtccgcgggaagtcggtgatcctcacggtggtggatcgcctgagcaagtattgctacttcatcccgttggcacatccctactcagcagagtccatcgcccaagcattcttcgtcgaagtcgtccgcctccatggggtcccacagtccatggtctccgacagggacccggtcttcacgtctctattttggcaggagcttatgcggctaatgggtaccaaactctacatgacgacaacattccatcctcagtcagacagacagtccgagtcggccaaccgcgtcatcatcatgtacctaaggtgtcttacgggcgatcggcc

SEQ ID NO: 147825 - DNA, 435 bp, Zea Mays
ccgcgccgacgctggcctgtgcctggagcagcagcacgaggaaggaaaacagcagctggagccgtccagagccctggcgaagccgccgccgcgcacccatggcaacgggagcgcctcctcccggagaatagcaacccgggaaccaggcgccagttcgctacccaccgtcgctggccgagcctctgcctctcaggttcccaatgccttggaggacgagacgggaccaccgctgcgttcaacgaccgggcacggaaatgttgggtcggcttggagatccgttgcctgtcccctgcatcgccatcacgccggggagaacagacgccgcgccgcctcggttgtttccggcgagctcgaggtgctcgagctattcgccggagcccattggtcccgccgcaccggaatggggtcctgtcctttgttccccgcccggcgttt

SEQ ID NO: 147826 - DNA, 613 bp, Zea Mays
atcacatagctaacagaaccatgaacatcgaaatggtgaaatcatactaaaccatactaaacgataagcaaggtaaactgaaccatgaaaacattagttttaatttccattaatctattaccacagtccagcctcacagacggacattaactttgtcattgtattgtaatatgtaaatcataaaaagaagcaaaaaaacaaataaattacctttatcaaactttttgctatcaaggtgtagcctggtaacgatggaggcttcctcgaagagatgctcagatatatttcgtgtaaaaaagatgagcgcattgcatacatgaaccaaaatcatgcaagtaaataagtaataaggcggaaaagcaaactctgagctaataatgacggcaccatggtaagttgaatcgaaaccaatagaagcaaacgaccttgaatctgcacacatgcacagtgacaaccaaagcagcgaaaggctagaggaggcggcctgggtcgacaagtggggacgagaggagagcataccgtggatgcgcggcggcaaggcgacaacatttctaggggctagcaggcaggccccggcagcgacgaactggtggagacagggggcacgaccacg

SEQ ID NO: 147827 - DNA, 363 bp, Zea Mays
ccgccgtgccggcgctgctgtacgcggccaccggcgcggcgttcgcggccagctccaacatgtcctactgctcagcctacggcaggcgcctcaacgtctgcaccgccgacgggggcggcagcggcagcaacttctgcagacaggtgcatatctccgtctacctcgcgctcgccgcggccatcgccgtgtccgtcgccgaggtggtcaggggcattggaggaacggcgtccggcggaggctcggactcggactcagactccagctccgacggctgtgaccatagctgccgccacaagcattagctaggttgtgcgttttggagtttgtaccagcaacattgtgtggcttcatttcaacttctgg

SEQ ID NO: 147828 - DNA, 2719 bp, Zea Mays
ctacaggcagtggcgaaagagtacccatgggtaaggaatagttttgtttctttgtgaagcatatcattattacgatagttcttgatgcttttcccttcccgtagaacatgctaggtttaatacaccactagtttcagccacttaaaacatttaatacaggctgacccccccccccccccccccttcaagaaggcgacaaatagctgcttatctggcctgcagtatataacagttgtgcgcaaaaaaccaacaccacatatggatgaggagaatgttatattgaattcacaattttgagtaatgatggtgaattggaaatattcacggtctttatcctaaaagagcaggttattgaattcgaatttcctattctatgattttacaggatatttggtaactagtaccagtactaagaatcaagtacataggcttagcaataagaggagcccagacactagacgttttggtctactagacttcaccctaggtgttatgttgttatggtggtggctagtgttcagtgagtgcaagtaggccgcccgagggctttgcccatggccgaacaagagggaaggggttccttcttaaatcttaattcttggttggttagattgatacatctcctctctttatatagaaaggtttacttgaaccctaagcaagcgatctttatctcttacttgacccctaagtaagtgattcttatcctaaccaaattaatctaacttatctctattctaacaaactaaactaatctaatatgtctggcaatgcacttgccataacactactccaccttccacgactgctcgtccttggactgtgctggtggccatggttgcagatgtcgatgttcccctacagacgtgatgcttagaagggcaccatctgatcgagttgcatgtgtacaaccaccgggatcccatggtgtagtctggtgtgtgatgatacctaggagtggtcacaacaacgataacggagatgccctcatagaggttcgtgatggaatgtggcggctctatgcagtgcgcgcctgcaaagaaccccatgctttctcaccgttggatgactgcttgtagtctatgcataactgccacaagttgtccggcttcttcacgagcatcaatatcaagcgatggccctagatggagaccatgagctacataatgtcctcgtttcgtatgctcgtaatggcgtgcaacgggatcaatggacgccaccatgtcctcgggcagagggtcgtccccgtcaaaggctgagaccttaaggcaaaagaggcaggtgcagcggcggccgcgcacatatggctcatcacaattgtagcacatgccttgtttccggtgcttcgtcatctccgtcggcatcagacgctagaatgggtgtggcagtgtaggcgagcctccatgcccgcggacggctgcagcgtcggcgtggcagccacctgaccctgagaatgtggcaaacgaatggagtagaaaggtgctcgttgccaaggtgatggaatctagcgcctgggaacgacgttggtaggcgtgcgccaaactgagtgccatgttgatgtcaaggggttggaggagctcgatgtcgatccgaatgcgatcgggtagtactgtcgtgaagagttgcacctgttgggctggggcgagccgcgagcggctccatgtggcatcgaaggctctagaaacgctcttggtagtcgtcgaccgtggtgcggaattgtaggcgggtgagctcgcccaacgggttatggcggaggggcgggccgaagcgttgctgacacaacatcttgaagcgttcccatgacaggatgtcgtcgtcacacgccaacaacacgttccactgttgtgccaatccggtgaggcggtaggaggtgagccacaccttgtcaacctccaaggcgcgctgaccatagaagaagtgctgacatcgtgtgcgccagacgagaggatcgtccttgccattcgggaactcaagcctgtggaagcgggaccggattgttatggttgttatgatggtggctagtgttgagggagcgtaaggaggccggccaggtatcttgcccacggcggagcaagaggaaagggtttttcttcttaattctttcttgctcaattggattgataatctcttctccttatatagagaggtttacttgacccctaagcaaccgatccttatcctaaccaaatcaatctaatttatatcttttctaataaaccaaactaatctaatatgtctgacactctactcgccataacctggagccaacaatgtggatttttcatgtggtggcagcaagttaggagtactcacaggttagcaaccagaggagcctagatgcttggtgagggcttaatagttaatactctggttgttttgggtgcctggacactatggaagacaagaaatgatgtgatattcaatggcgttgcagccggagtagatcgggccatacttcttgcaaaggagtaggttaacctctggatgttggcaggtgcaaaagggatttgtgccctggtaccagcgactcagcaagtcctactagctgatagcagcctgtcaggactcctgttggtctgttagtcatgtcttagtttcatccgggtgtgaaatgtgaatgtaactattaaacagtgtgtgtgtggcgtgtgttgttctggccattctggccttttctcctacgcaatgatatgcatctctcctgagtattcgagaaaaa

SEQ ID NO: 147829 - DNA, 323 bp, Zea Mays
agtgtaggtgagggagagctgtgaaatctttttgagggtgaggaattgaggataatgttgttcaactacagggagatgggtatcatcccgaaggttgagccgttgtaatgtgtgatgccctcgctgtgtgtgtaactatgatttgtatgatgaggttgcgtgccttcgttgatccggccgcgcccgtaggcggcttgtgtccgggtgcttttggggaaatcttcgattttgcgcatttgttgagttagaccggctgcacccgtaggcgtattttgcgcggagtcttttggagaagacctcgattttgcgcacttgtgctattc

SEQ ID NO: 147830 - DNA, 946 bp, Zea Mays
caggagtcaccagcaaagccctcagcctccgaaaaaacaataaattgggggacctcatcaagtgaagtgacacgaacacgaagcaaagttctagagatattactctgatcctcctcccagagaattagtcttccaaacgacccaatggcggcctgcaagtactctgaagaacgataatccaatggaaaccccagaagcataagccagcactcatggttgaaaagaagagctcggtgattccaagcgtcattatgacggaccgcggtgaaagtagcatccaaatattgctgggggccaagcagaaccaaattatcccgctccagaacactacgaaactgcactatcacctgccccaagtgcgagcgctgaatggctcgaacaccgaccctacgatgctcaacaagatactccctgaccacatctctgaccgcagggaacaagacctcgtgctcaggcaaaggatgaatattgataatcgcccagtcctcatgcattggcgataaacgctgcgagactgacctgaccatgatcccacgatgctggaccaccgaggcgctgaagcctggtgggaggaacggctccgggtctacgcgccggtacgcccattgatagattctcagagggtcaccggagagccaaagagcaaaaggagcggtttggggttttggtgaagtgacacccagcgagagctccaaggacgtttcgggcgcctgttcgtatatttttaataagaccgccctggcaaattcaccgaagcaggtaaaggtgggaggggtcccacccgtcagggacccgggggaagggcggaaccaggacccgaagtccaagaggtgagacgacccctccaaaaggcaattactttcgaaggaagggaacgaggagaggggaaatccaaaatccgatttcttacgattgcagaacaattccaaatgccccctggctttac

SEQ ID NO: 147831 - DNA, 437 bp, Zea Mays
ttgctgcgcaagtgccgacgtttgggcctgcgcaagcaaccgctgctgacaatactgattttgtggcggcctcaaccgtagtgcctgttgataatagtttgtttgtctctgtgtctgagtgttttgagtctgatggtgaatctgggagttcgtttccttggatggaggagtcctcggatgaaggcttggattattttgttgcgttggatgtggctgcggcggagacttcgccgcgtgtggagggtgccggggatcttccaagtgtgagtactgggtgtaggcagcgaagggtggtgggaaaacatagtgtgggtgaattttcacgaagtggtaggcaccgtcgtatgaggatggagcgtggccgtcttcgagtagaccgggttggggcaagaattgttgccctcgccgattggggcgagtataggcgagggggatct

SEQ ID NO: 147832 - DNA, 449 bp, Zea Mays
atcccaccttcgacaatgtatctgctgctgcattgcgatccctttccatgtgatggaactccaattcttcgaacttgtcgccatataccatcagcttcttgatgccgagtgataccgcaatgctcagcccatggactagtgcttcgtactctgctgcattatttgatgctggaaacaatagctggagtgcgtactttagttgttcacctccgggagcaataaagagaatccctgcacccgctccttgcagcttagcgagccatcaaagtacattctccacacttcagcaactttttggctatccgggacctggtgctcagtccattctgatgtgaagtcgaccagtgcctgagtttttatcgccatgcagggccggaactctatgtcgtgagccccgagctcgcatgcccacttggctatccttccaatagcttctttgttgtggagaa

SEQ ID NO: 147833 - DNA, 504 bp, Zea Mays
aagtagtcttgggttcttttctaccaattcttcttcaaaagtggagaacagatcggatggcaacaccatgtataagtgccttttatttttgttatttcatcttgcaacagatcggatggcaaaagttgcttattcagatatgttttcttcagttgatttactcttctactttatttggcattcaactgtaatttgaaacaaatcactcatgtactatatgggaccaccatttttaagcatctatagctcatgcaatctgttctccacaactttagttttagtaagatgtatgttcttccctttgtaagttcaccacttttagttatagtttcagttactacaatttcagttgtaagttcaccacttttagtaaactatatgttctccactttataattaatttttcctttagttttctctttctacaactctccacactttacaaccaaatttcaaattgtgacactatattttgccttcaacaggaacaagtatgttgccgac

SEQ ID NO: 147834 - DNA, 1354 bp, Zea Mays
gagcatgccatgtagaaaggcattcttcacgttgagttggtgcaccaactagtcatgtgagagtgccaaggacaacactatgtgaacaatggtcgatttaacaattgggataaaaatctcatcataatcaatgtcggggcgttgagtgaagtcgcgacacacccaacatgccttgtagcgcttcaaggatccattagcgtgtcgtttatgagttcaaacccatttgtcaatgatgatgttgctaaccagagcctcaaactcctccttcatagcctaatgtcaattaggatcagcgagggtagaacaatcattcttcaaaactagtgatgtagccagaggagatgtcatggacacaaccatacaatgaacaagctactagaacatacacttggcatgcatggttatgagatgcgggttaactggtgggatgattagctcagcaccagccagaagaggcagcgatagggtcgtaggagcagtagtcggtgaggggcatcacgagtagatgaatgtggcatgaatgttcgcggagggatcagcactaccactggcgcatctcttatgggcgcactggagaggagaacgctagggcaaccatggttgctgagaaagctaggttctcttgtcgtgtgtttgcctaaagtggagccacacgtgacacaatatacgacattagaggtacaccagggagtggcacaaaacttggatggacttggggagcaattacccgagctagtaacaacgcaaagcctagtgacacttcagggaaggcgtatcctgaagaggcaccaatcgagagggcatcactgatgcccccatctttgaaagtgcacctatctaaaagataactaaatcatttgtaagaccaagcaagatagagaaaggaaactctacatcatcaaatgcaacatgttgagaatcaatgatgcgactagtggagagatcaagacaccaacaagcccttgtgatcaaaagagtatcctaaaaagacacatatagtagaccgcatggcaagcttatgtttagcagacacagagaggttcgggtagcgcgcacactcaaaaacctagagatgcagttaggaatgctaggtatggacaggaagcgttgactgtcttggtgggaatattgttcaacaaatacatggcagtgtggagaccctcaatctagtaatgtgtgggcatggatgcctataaaagcaaagatcagatgatgttattagtagaatgaataacacactcaactttaccattttgctgtagggacaagacattcgaagcagtgcaccctaaaacaagaagaaagtatgagaggaagcattgtcgaactcagcctattgttgtattggacaaac

SEQ ID NO: 147835 - DNA, 284 bp, Zea Mays
gagaatttatcacgtccggaagtgtctgatgtgcatggtggtgcggcgtgaacgccacctgttcgttgtattacccgtgagccacatagagcctcgttccttttctcttaaaacaataaaacaaggtggctttgcgaaacaacaaggttttgtggcggagctatgtcatggcgcatatcaaaatattatcccctggttagagagaaagacatcctttgccattgcacaacaatgtgcaagcctgatttgcaaggattaaaacgaaccagataccatcaaccact

SEQ ID NO: 147836 - DNA, 421 bp, Zea Mays
gatggctcctctcatgagcagctatgccttacaaaatagtgaaaaattcttatttggccctgattggaacttgcttttcttctttggtcctgaaacaaatctgctgcctctaatgtcttgaagtgatacatgaaatgaccaatttatccccgagacattatgaaaaaccaaaggatagccaggcataataccagcataattttgagcactctttgatcccaattttcataacaacatattttaagcactttctgataggaatgcaacatgcagatctccaacattacagtaaaaatgatgtcaacttgatcatggcacacaatttaaacaagttcatcgtcctaaaaattcaaaaggaacacaagacataattaacgtagtgttcgatacatacatcagtttgacagtgcattagatcgac

SEQ ID NO: 147837 - DNA, 646 bp, Zea Mays
gcaacactcttctactgtttctcactttcacgcattttatggttacatggcatagctctcagttttaggctgtagttgtttaagttgctgggatggcagtggatgctaggtagtgagcattgggattgcttactgggaaagggaaatgtttgttggcacttagttttgaccttttttttggggacaacagttctacacgttcgatgttaagtacgtttcatatgaacattcgatgactatgtctgtgtgatagactgtgctggcagttgtgacatcatttgtgccttttaattgttttcatggctggaagcctggcaataggtagactttagtaataattgtccttttaattccaggaaagtataattgggccgttaatcattattccttatattgggtttactgatgaaattgtagttgtgaacagtatcacacatttctcagagggattaaggaaaaaaatgcctgcttatggcttatcatgcaatgggcaactgagcatgccccagtgtgttctaccactgcatgcggttttagtgctgtagtttctattcagtcagtttcctagtgcaataggctgtcataatgccacctgccagtggatggtaatatttaatgcttcatatttatctgcccgttcttgcct

SEQ ID NO: 147838 - DNA, 655 bp, Zea Mays
ggcttcaccttgcagcatgtggaccgagccaagaatgaggaggccgacgcattggccaaggcagccgccagaggcgaggccctgccctccgacgtattctaccatgtcatcggcacgccagccgttcgcagcccagagggcctccaaataaccaacgacactgagggccaccgcatagtcaacctcatcatgaccaaagactggcgggcaccaataaccatgttcctgcagggatattaccacccaagcgatatcaacgaggccaagcgcctcaaacaccaaagtcgggacttcgctctcattgagggacaactttacaagaagggggtcagtcaacccatgcttaaatgcgtcaccgagaccgaaggcatccagatcctgcgcgaagtccacagcggaacttgcggctctcatgcggggcctagggccctagctgccaaggtgatccatcaaggcttctactggcctgctatgatctacgccgcgaatcgggtcacaaggtcgtgcgaagcctgccaaaagttttctccacgctcgggaagcccttcgcagttcacaaagctaatcacccacatgtggccccttcagtgctggggcctggacattgtcaggccactacccacggcccaagggaacctcaagtttaccatcgtcg

SEQ ID NO: 147839 - DNA, 601 bp, Zea Mays
cccctcggccccaaccgactcacctaggccgttaaagggatctcagtcgtggtcctcctctccctttccgcgcttgcacccatcaacagcctcaccaccgagctcgcaaccaaatgaagattgccgtggcacccaaaatttcgccgccgcggacaattgcgtataggcacagcgtcgactccattgtgcctgggcgggaagcttcaccgagcctccacggagctacaagccacctgggcggaaggatagggccactgggtgaccggaatttcgtcgccgtgcaatcggatccgctccaccccatgaacagcagacctcggcactccaatccacggtaacgagtcccctataatgttcaccaccattagcgctacgtgtattacacttcgaattagcgctggagtgtcagtgcgggtggggaatgcttcgccggcgtggggcctcgctgtggcggcgttgtggccgccgtggtgggctgtccgtgggagaagaagatgcttgcgccgtccgatcctctgcggatggttgggattagaagccaggtatcggttcggacatgtccgcttgagaccatcgattagaaatccgatggtagagatcg

SEQ ID NO: 147840 - DNA, 347 bp, Zea Mays
gagacattctaaacggctggtctcggtaaccctgagcatcctggtcgtgtaagaggaatctcatctaagtaaggatggaaggaaggattcggaccacaatgggaaggtctgtacaagaaacgtgatcgatacaagaaagagatggcgaattattttaaggaggaggccaagaaagagttcaaaggcctgatgtctgaaatgctatcgaatcctcctctagaattgatgcaacaattggcgagtgcgatgtctgttcaacagatgaccactccacagatgcaaataattccagcagctcaaccgccggcttccaccgagggtacgaccatcccaagctctatcgcgtc

SEQ ID NO: 147841 - DNA, 1036 bp, Zea Mays
gcctagcgaagggggctcttgtctttccgctgtgggctgtggcttcctcccctcgagcttatctgcatagcaaaggtgctttgcaatcagatgggaagttagtaggaaatgtgatcgaggtcagggtttggcttcacccaatagataccatgctggagatagctgtggtcaatgtagtcaaggtagttgatgttgaggtggctgtatatgaagctgctgacacaaagaggtgccatgatgatgacaaagatgtgtcggggtagtcgtcatgaaaggggatgatgctgaggtcgatgtagttagggctatcgaggacgtagacaaatgcagtgacacaatcaagagagggttgatgtagtcaagctgcgagggacgaatcatgcgacatggttgccaggcttgggaatgcattgtggatgaagcacacactagtgttgccaatatttgacgtacgaggtagagggccccaaccatgcatcagcgtttgagggaacattagaggtcttggcgatggttgctgtgcgctgaacgatggggtagaaggtgctgatgcaactcacggatgtcgaagtagacaaagtagttggggaagagacgatgacattaaagacgtggttgtgctggacgaataagaagccatacgaagtcggacgtgtctaaccgaaagattagtccaaacggatgtgtctgcccaatggcagcagttcggacgcaaggtatggtggtgatggtagcactcgatgttcgtgatggaggactcaaatagcttgacaaagattgggtattgatacgtgctgcgtaaggggcacaacatggttgtcgttgcaaatgagacaacgatgtagatgtagcgacaaatgccatgtggatagaggcatgcctgtgagggcatgtcttcgtcgatgatgactataggcagtggtgctgtggcctgagatagtgatacaataatatccctattgctcagagagatccacgtagtacttgatggtagacgtcatgggagccgggtggaccatgctcaacatgttgatcg

SEQ ID NO: 147842 - DNA, 302 bp, Zea Mays
gtcgtaaagagactttcgagacgaattgtcggtgactcactcggaacgagaaactgaccgaaattgtcatcttctagttagtgcttcacaaaatcagctcgttactccttcgttgattcagttttctttgcccttgggcctctaaaaattgtcaattttattttttgtggttggctatccacaatagatgctgaaaaaggacaacctagttaggtggagagggattccacacttagaacatacctagtgccttaaaacaatttactactttaaaatatagggtttaactcataaaaaacaac

SEQ ID NO: 147843 - DNA, 277 bp, Zea Mays
tcacggggtccttgcggatacgctcgcctgccctattgctgcatttgttgccccgccatttcctgcaggaaacaggtgttgttagctttggcattaactaagtcggcgatggcctcagctaatgttggaggtactggaggtggattcggggttacttccctcccacgggaggttcctgccccatcctgtgcgcgagtcttagacgacatctgaggcaaagaacatttgaagaaatatgatatgccaaaacaaaccatccatttcacattactaaaaa

SEQ ID NO: 147844 - DNA, 1275 bp, Zea Mays
tttgcagtatggtccctggatttctatttctttacccgacacaacctcgacggcgcccgcgcttggagccgagctccggcgagcaagaccggccggagggggccacgaacggcgctcccgagcagcggacacaaacttggatctactccgaccgtttcccctaagttaattgcacggatggcgacctacaccgccctgcccacgggaacagcggaggcatcggatagaatcgcgtgttccccgtgatctacggcggtttagttcaatctacaaggtcgaggagtttgagaagagcttagggatgctagaacgagcaacagcgcaacatgagttgacctgaatcgggccggccgcggtgagctcgatcccgcggtgcttcagaacatagttggggaaaatttgaaattggagcacccggttgcaggattgggggtgatactggacggtggggtacgtgatgaggttgcggagctaacggcgggctcgatttatagcttccaggaacggtggcgctcgaattgaggatggcgcggtggcggccggagaagggaggcgagctcaatccggggaaaagtggctttcaccgtggcagcgattccggtgatcgccgggcatgcaaccggtgagtcaccgcgaggaagttccgcgctgagacacgtggtgcgcgacggcggtagcttatcggtgacgaggtcattcaaccggcggtgagctggggcggtgaagtgtggcggtcttagccgtagccaagcttgagtagatcagacgccgagatctttactgggttgtgcttatccatggcgacggcgcacgaatcacggcaagcggtgatcaacggcgacgggccaccggcgacgagcagagggataggatcttcttcagtttactttttactgtaccatgggacattcagtttatgacgcctgacagagcaagtttaagccactttttctctgattttcaaatgacaacccaatcagtgacctatatcaaagttgtagagttatatactatctacaattcgactatagggatttcatttgtttgagcactggatcaaggtttaaatcaaccccaaagatggctctgtcacactgaacatcagaattttagactgaatcagcctgacagcttaacttcaggcctgattatttccaaacttctcttagcaactatgctcacacccttaaacaaagttgttctcctttaattggtctacaaactttatgtggtgacctagggtaaaaaccctatgctttgcaagctacaaagccc

SEQ ID NO: 147845 - DNA, 1021 bp, Zea Mays
ccaattctctagtgaacaagtgatggggtggagtggagtgaagtgtttgatgcagttataggtgttggctacttatgctagcttgttgcatgttgccttcgatcatggttctccccttaattttatagacgaaggggaagggaagccctattacataaatctagggattggacgagacagataggggcccaaccttatcatgttgcttcttgtccttcgggatatttgctgacaaaaggacttcttcggctaacatcgtcctcttccaccacgttattgtagccatgtgtgctatgctaatgtgccttgtcttttcttgcagcatacccttggttatcctctaggccatggagtggttgagccatgttcaacttccctacaggtgatgcacgttcgttcgtgtttttcctagaatggtcatttggactgtccctaacattagagctcttttgctgacatacaaactattatgatgtcattgcaaccacatacctgtgttagagtctgactcttcatttgtacgatcctgtgaatttcaatcccgacgggtcggcgcgatcctaccgacccctaggttgggcaggacagactctacatggtgtgagtttgtactccgaccctttagacgattggaggtcggatgagacgtaaactcaatgtcgatctatcctttgcttggtccctcgagggtcgggggtcgatcgagagggaaacatgaggtgaggtcgttcatggtggttagggtcagataagacatgtcattcagggttcttttatactgctgaccaccatttcgtgtcattcttggtccatgttatacctagtttatctaacctcaaccacacccttctatcaagagatatggttagaattatccattttgagtcctcaactcctctagggacccctgagccctagatggcatatgtcctcgccattagagtatggggtcgagaacttttagggccccacggcctatgaagttcctcgagtgaccaaatgttacaagaacttggggggg

SEQ ID NO: 147846 - DNA, 735 bp, Zea Mays
tagctcataacctcaataaaaccattttcatgaacttcagcttactaaactaatccttcttcaatatgtatctaccatatctactaagaaaaatcttcaactttagtgaagttttacagtaacagtataatatacttgctgcattcaactcctccgccaatggaaataaggtcaagtgcaaaatacaattgatgacaggaagatatcatgccgcttgataccttcaagataatgtaagaatcacccatgaagaactttccatacgaagatgcaggggcagggatcggcttgaaattctcaatacgccatatttccaagccgctgcaaggtattaaggataacaatagccattcatggacctagaccaaaagcatagtggagttgtagagtaattttcaacaataaatttgagatcaagtgcgtgctccataagaccataaatactcgatgaactcaattttgacaagctttagttattataatatcatccttcgatgtaattgctcaatatttaaattagcttattaatattgctatttactatttagttatccaaaaatgcagacaccttttccaggaaatgagtaccaatttctactgtgttatatatatagaacacactgagagggcatatcccacgagagttcattatgtattacaaattagtaattgataaaaccgtcaaacaggtacatgattgtttttcctctaccgctcccgtgtgggatataaaaa

SEQ ID NO: 147847 - DNA, 284 bp, Zea Mays
acaagggtagtcaaactcaaaccacatgatgcctacgtaacatgtcattagaaaggttaatccacccacatgacgcaaaaaagcacaaaactactgtcagtcattgttgccgagcatggttgcaaagcagtcaacaacttcgacttccctatggtagacaccaaactaaacccaccctattgatgtcgggcagacaagccagaagcacatggccgttacatgtccttattgccaagctcaagcacgacacaaagagcagttatgacttgtagatcgcatcgagg

SEQ ID NO: 147848 - DNA, 1040 bp, Zea Mays
cctagttgctatcggctgtgtctgattcaagcttcttcataagtttcaaggcaatctctttgagtctttgttgcctattatttcttgtccttgttggttgattctcgactcactaacaccttatgcaggatatgctatatcaactcgctgtttcacttctcgatgctggggcaagttgaaggagcagtcgtccatgcttcatgaaaagctttctcctctgcttggatctgaggttgcagtgctttgcaaacagttggctgacttagaggcctctcatgctacagaaaatgccggtaagatagccattgttgcattctcaactttattagtttcatgcttattctatgtggtgccttgtagcttctacggataaattttctaaactcgaagacactaagattcgctacgagcctgacctccgtcgggttaaaacaactcttgatggcgaccgagaggccaataatgcttcactacgacagaaatttgacatggagaagaaaaatcatgaggtaacttgttgtgaactccagctcgcctactccatttgtcgaagcgctacataatatgtcccaatctgcaggatgaaatgcataagcgagaagagaagatccaaagcttgttgagtgaggtgactcagcagaaggaacatatccaaactttgtcctccacaaagtctactctcaaaatactacgtagcttgtcagaagaccaatccaaaaagtatatggctgtgaagtccttgagaacaactgtaaggtgttcaaatttcttatgataaagccatggacaggctgaagcatgttgttcggtaaaaaacagtggtctccaatattgatgcttacagagaaattacgatagaaacaactcaaaaattagagtctaatgtggctagaggtgagggagctctcccccaagataaaccagtatctccccccaccatgtagagtagctatacttagttctggagtatgttagtttgagaacttttggttgtattgtgttgtgaactatttgatgcctttctcaggctgttgtatgct

SEQ ID NO: 147849 - DNA, 637 bp, Zea Mays
gggcttcccattaaaatcctacggctaggattttatgaggatgggatctaatctcggtcatcgaactaccatcctacggctcagatttatttgacgaaggggtacgctacacacgaccatggccgtccaacacgggatcgacggcgcacaaacgattttctctaatctaatcttggccgaccacgtatggatccacggatgagaagcgatcccctaatctgaaccgctcgtacacatcctacggttggcgccttcactctctgcttcatttaatcctagccgttaaaaacaggatcagtggtccccatgtaatctcctacacccgcccaaccgaagcaactacggcggcggccagctccggtacagagaagccatggccgagaacacatcctgccacgatccacagccctaaacaccgatctgactgggggtatacgacggggcgacgacaacgaaattggacaagggctaactaccggctataaggcgatgaagttgtctgtccatggattggggaagaaacagcggcgctcccccaccgtcagcaagaaatcctgagcaccggtggccaattcccgcctgaaccgactgcgaccacggacgaggagcaccgaaaaggttatgcgaccaccctccg

SEQ ID NO: 147850 - DNA, 1034 bp, Zea Mays
gtgagtccatctaattacatgtgtgtacatgcacatgccaacttcgatccctttcaaagattattatgcgtacatgagcacacccatgtcctttactggatatgcgcctgcagtcaggtgtgctttgcattgaatctttgtagcccttctattcttcatcctccccacagtggtggcatttggataggcagtgcaagtgggatcaggatatgtgatgctgagacagttaaagttatgatgaagaatcaacagaattgcagtatgattcggaaactagtttcagaagttagactatgggttagcctctcaataacttagttttaaatggtctacgttgacatgtctttgtctaaaattttattggtacttgcattatcaacctaccaagaaataaagtttgttctgttttttctgctcctttgatctctttgctaaaattcatgcggtgatctgtgttccaggccaatcaagaggttgaacagagctgtgcaggtgagcatgcattcattatattcccacagttcatattctttgcggtactacatctatggtagatttagtcgctgctgccatacatcagatgcccagatcttcttcaggcccttcgtcggcgaggagtatcacaaggtacgccaatcgcttggtcttatcttcctgctctgcaaaaacaagcacgcaaacccaatttactatgttacaccccttggcttccgatgaggtggccgaggtgtgaggctgacggtggcgctggtagtccgcaaggaaccggattggatgtgctctcccttgtcacttggtaagagacccaggtaaggaacatataagtggttgttctaatttctgatattagccaatttcccccctccaatctgttactgatttatatgcccttctagggaccagcagatcccacacctattacatgatctatccttctagaatagaatctgctctctatcttctgaaccggtactgccttcttcaatatcgaccaccgaccggtccacctcttcaataatcgtccttcattgccc

SEQ ID NO: 147851 - DNA, 978 bp, Zea Mays
actagcgctcctcctcgatgccaaacattgttccactccagtatacaatattcctaacgtgtttgcaggctccgacccttcagtgtaaatcctttagcttttctcaaacttgcgggtgctctgcagtacttgatcttcactaggcatgacattgcctatgcagtacaataggtgtgcttccacattcatgatcctttggagcctggtctaacgttgaggcggagtgccgcgctttggccagtgtagtgaccgaggttacttggctacgacaacttcttctcgagctgcacgctcctctttgtcgcgctccgttagtgtactgcaacaacgtcaacaccatctacatatcctccaaccccgttcaatatcagcgcaccaagcacattgagatcgatcttcacttcgttcgggagcatgttgcggttggagatgttcatgtactccatgttcccacatcatctcagtacatcttcatcttcatcaaggggttgtcttctaccgtctttatgaaattttggtctagtctaaacgttcgtggcactgatggttagactacaggggcgtgttagactattgtattagactataggcccgactgttcctgtggaccaagggcggcaactgtctaggcagcgtccagccccactagtttcttttagattaggcaaagatctctttgattggcggtgtttctataaacccaggaatccttgcctcttttggtccttgtatattaggcaatgatttccttgattggtggtgtttctataacctaggacatccttgcctcttttgtttccttgtagattaggcaaggctctccttgattggtggtgtttctataaacccaggacatatttgcctatacatgtacgtgttatgcaccccaacataatctatctactacttcccagccatatatttaccgtttgtgtattcaaaatgccccatgcctttattactttacatattactccc

SEQ ID NO: 147852 - DNA, 475 bp, Zea Mays
gccgttggatactaatctacggtagagattagatgtgggcttactcgttgggagattaggtctgtgccgtcgattctcagatgggtggccacgatctgatcaggcgttcctttcacctaattgaatcgtggccgtgtgtcgtggatcggatggatccagggtgatctcggcttctttaaatccgtgcccttgatcttagatccaagggttgctgctgcgtactgtttcaatattagggcatatctaatcagggccgttgagttccgatctgatgatcgagatctgtgcataacccttcgccgcaacatcttttgcataagagccctcgaggttttgtgaaaacaacccgccgtccagggaccctgttctctatgtctgggatatcttgcgcatagcccctgccttctctggaaattgaggcccagtccagtgatgtgataaattgaataaatggattagaaaataggtttttagt

SEQ ID NO: 147853 - DNA, 500 bp, Zea Mays
atgttagtagcatcacagccagaaaagttgtttactccctcgatcgcacaatagagtttgttttatcacttgttttttatgtctatattcaactaattgataatgaatctagacacatatacaaaacagttacactaattattgtatgaatctaactcaatattcatcatgtgagtgcatatgtttcttcttgtcagcagagaagcaggttgcaactccatgtggccagcccaagtcccatcctttagcatagagttgcaatagtcttcaaacagaacttcatcctcattaaatggttcaaactcctcgcagtgtttctacagatgtgcacaagaaggattagaaaagcatagatagtccaatgcatgcatggagcaccaactattttagcatcaagatgaagttttaacaaaggttaggtaaagtgctctatcaaagatattgacaaagtattttgtcaaggttatataatacattgttcacaaattttcaagatgaca

SEQ ID NO: 147854 - DNA, 1299 bp, Zea Mays
aaaaagttaagttgtgtttcgtttgctgttcagttgtgtttccttcatcacttaggagcctttagttagctgctcaaacaaaatctgcaaaatcctaagactctgtagaagtattctaaacatacttccacttaaaaatagtgcatatctaatttgatcccaaaaaagtagcacaccagacattaaaacccagtccgcatgatggcacgatgccaagaaagcacaaactgcaattgataggaagtcatcaaacaaatccacaatgattgtttgccatgggtaggcatcctcaaaaaatgagggtgtgtaacaatgtgagcgcccacccaaaaaccattgtgacaaacacccattggaaaagtccgaggaacaatagaaaagccccatctaacaccaaggcagaagacctgtgtcaaaccaaaacttgaacgtaaagacatgtgtcaaaccaaaacttgaacgtacctttgaaccaaactaggaacatacattctgcagttgcggcaacaagtaaaccagacgcgtaccttttagcatacacaattcaaccagttttttcgcacaaacatcacgaaataggaataacttagtgtttttgttttaaaaagaatttagcacacgcagctgcatagtatgtgaaacctggatttgtggattgatttcagttacaaactcataccgattgcaaatttgggtcacacacatgcaaacgcctcaacgctttatccgtgacatatagaaaacataacatattccaagtttaaagttgcatcattttgcagctcgggcctacttaagctttgagctaaagtaaaccaacctctttaggggtattggttatattgttcaaaggtttgatgggtctaaatctgaatctatatgaaatcatctcaatgctttatccatgaatctaaactaaaataaatatgtcattgcaaccttaattggcttgatacatttatttgtggaagcgtatgatacatttacaatgttacaagagacattttttcttaaaccaccagatggtccactgtcctacactcacactgacagcctcccaaatatttagtgaactaaacctttttaggaaagttcaatctatcgaacacttaaacttattgaaagaacaaagcataagccattcttattggtactttctctgtgcaagcgaccaacaaacctagtcgatatgtacgagccaaatgatcggttaaatgatcaccaagcagtagagcaatcgtatcacataaacctaggattaatacttctgattcaaacgcacaaagcaccttcacttaa

SEQ ID NO: 147855 - DNA, 471 bp, Zea Mays
ggcaacacccccattgggatcagcaacagatggagcacccccattgggatcagcaacagatggagcacacccattgggatcagcagcagatggagcacacccagtggggtaggcgtcagtaaattcaggcacaggcacttcttcagcagcaggaaccgaagtaccaacgtcccgatccaaactagatactcgctggaggcgtctctttttctttttctgctcatcagcaggaggatcaagttgattgactcggcaaggacgtctcgggcgaacacttacaggcttctaaacatctgaggttgtaccagcctctgggagaggcgccaccatcaatgtcccagcaggagcagcatcggaagagtcctcagccagcaaatcaagcatagcacttatctctgcatcactaggatccaagggcacctcaaagtgaacctgccgttcaccatcaggaacttccccgagcgaggcaac

SEQ ID NO: 147856 - DNA, 439 bp, Zea Mays
tacatactcttgaccacctttgtttcttcatgatccatgagcgatcgttccattcctcacatccttaatgatctcatcgtttccaatataacttccctcggtaataatttcttttacttcaaccattctattggaaccttacctatcttacccgtgattgttttctccattttgacatttcgtgagtcttaccttaactccatcctttcctatgctctttgttattatcacctttacccttgacacttctatatcttgcattgatgttcatcttatacctacccttcaaagtctcccctctcccatctcaatctgagagttgtatgttttacctatttttcttttgggcgtatcatcttctttgtcccttgcgagtttttaactccatcctttgcccacttttgtttgctattacctttacctttctcatccctcaatc

SEQ ID NO: 147857 - DNA, 488 bp, Zea Mays
tgcgaggttatcatttgaatttggcaaggcagcactatgtacggatgatgatgtacactcacttctactctcacgtatacttgtcatatgctcctcttacttgtatgcatgccatttcctggactaaaaatcgatcgcagctttggttcttttttgctttcctgtgctaatgatggatgcagtctacttgagacgtcggtaatgctgcctgctttggttgggcatcgggagttggtgccccccagatttagggtcttgtcgagcgaatgaacaggactaggtgcttccactaccccgcgaaagggtcttatcacagtgtagaaaagcagcactttttacctttcccttgcacgaacggcgacgatgagacgctgataagtatttctttggacatgcaggaggatgatggaaagcagaggaacaaagcttgtcaaatgaaggctggcccccgtctcatgccacttgttcttgacatcagaaagcactac

SEQ ID NO: 147858 - DNA, 364 bp, Zea Mays
gttagccctgccaccaccaccaccatagcatccaaatcaacacctaccacccccaccaccaaagctagaagacttcattgatccacccttcagaggagtgattcatatgatcaccggagggtctagcttggatttcgagaataaacgacaaaaaagggatcaccatcgaagggtcaaccatgtcaccgtcacaagacatgtcatctagacgaagtggtctcatgtaccattaacctttgacgcaagagatgtcgaccttcgtagcgtgctccatacgaacgcactcgtcatcagttgcaatgtggtaggttgggagctacacaaggtcctcgttgacaacgagagccaagccgacatcatcctc

SEQ ID NO: 147859 - DNA, 342 bp, Zea Mays
cctgttagaatcactggtgcggttgatgtcttatgcgtaatatggggacatgtatgtgcgcgtgtgtcgttgtgtattatagtgatggtggcgtaagataattgattgaggtgtgcgggtatatgccgtaatatggttatactcgcaacgaagaaagatgtatgtcttgtgtaacacaacgtttagattgatgtcgtataaccgtgtgaagggcgctcccaatggtcatgtgactaaagggggttgtagtggcaaagcgagaagtaagtttaatatttttaaacgattagttgatagcacctatcgacatcgtcatgatttttgttgtatggtggatcgatg

SEQ ID NO: 147860 - DNA, 876 bp, Zea Mays
actgctaacacttctcatcgagccgccttgtagcggcgcctgtccccgtacgcttctcccccgctaaagattacgaggcatttttgtcggctccgccgactttgttggttttggggaagtccttagtgggggtctcctgctccaccggctttgtcgactcttcctgctttgcctttttggccggcggcttggagatgaagcactttaggagttcgcactcccagagtttgtggcaaaaagggaagtcatgattctaacacggtgaatccatcaacttctggaagtggtcgttgctgttctttgtcggtggcctaggcaatcgccacagtaacgacctctccctctttggcgcgcgtgtggtggtggttcctccagcacctatcgaggtgctctcgtcgatccctcctctcgccgctgggctcgccaacatcgcatgggtttttttccttgtggaaaattgcctctaccgtgtcttccttgtcagcgaaacttggtcgctatgttgaggaggtcggtgtccgtctttagtcgccctcgttcgagctcatggactagggcctcgttggtggtgctataggtgaaggcactcaccacatcagcgtcggtggcgtctgggagttcgttccttttctgtgagaacctccggatatagtcctagaggctctcaccgctcttttgggtacacctcttgagggcccaggagcttctagggcacttgtaggtgccttgaaagtttccgtcgaaggccctttggaggttggcccagtcatgtatggtgctggccggtagatgctcaagccaggccctcgctccttccgcaaggtggacatggaggaactagatgaccaggtggtcatccttgatccccaccatgcg

SEQ ID NO: 147861 - DNA, 545 bp, Zea Mays
cttggctttttggaaagtgagctcttctcgacgggaagctttctgatgccttttggtgtctctgtatgctcgcccatggcggtcgtcgctaatgtcaacttgtacagctttcccctcggcccttttccccttggaaggttgccgctactaggaaccgcagttaagctatttgctagtagagctagagcatgccaacctacctgctagcacgtcgtctctaaccctcctccgctttctcctccttcattaattgacatgagtttatggtatctcgggcagctgccaccgtggaaaacccttcaatcaaaagggttaaaccacgggcactagttagatgaaaccttcactataatgtggagtgtttatagaacgccacttataagagaagtaaaactaatgatgcttgcacgaaatctttagaataaaacatctcagtcgtatttgcaagataataacaagagcaatacgatgatgtgtaatggtgctattttattttttatgaatgtttggtgctcttttttttgtttatcactttcaacactaat

SEQ ID NO: 147862 - DNA, 331 bp, Zea Mays
tgtgaatccgttcaggggataaccgacgccattggcaagggtctcaccagtgcagattcggttggtggaagagttattgtgccggcgtcttttacaggcgggcgcaggtaccatgtaatgaactaccaggacgcgatggccatatgcagagtatacggcccaccagatctctttgtcacgttcacatgcaaccctaaatggaaggagatagtcgatgcgctgcgcttcgagcctggtcagcaaccatgcgatcgttctgatatcgttgtaagggtcttccatatgaaggtcgatgaattcatagcagacattagagaaactaagattttcg

SEQ ID NO: 147863 - DNA, 1051 bp, Zea Mays
gctagaccccccactagattccaggaatgggggctgtaagaagatccagatgcttggctccagcagtctcccataactctctttcttcttcagcacttctggtagctgcctccaggttaggtgtaattctgtcaaaaacacaaccatttctatgattccagaggttccaaaacccaagggtgattaaagaattaaatcccttcatggcaatcccttgtagctgccgactagttcttctccaacatggcatagcactctcttctccctgttggggtataaaaccttgcaaattgacttgtctaagcagctgaaacaaaaaattcctagcaaagacacaacccaccaatatatggtctatatttttaggctcttggtcacacaggggacatttatcaggatggctttgaccatgtttctccagtcgatctgttgtccaacacctccttaaatcagctaaccatagaaagaatttacatttaggaggtgaccccggttctccagattctttcccaatgatcagatcgggtcaacccaatgtagagaccatcataggctgctttggctgagtattttccattagtagcaaacctgaatatatgcttgtcctctatgactggttgttgctggactgtttgaagtgcatcccagagatcaaggaaatcaaccaacactccaacagtcaaggcccctttaatatttgtcaaccattttctatcaattgaagccttatgaatagttctgttgttcttaatcttctatggtacaactgccatcaatctaggagcaaggtcttcaattttctttccatgaatccaacgatcttgccaaaataatgttgaagatccattcctaatcttagtgagcatggcagtggagaagaaggccatcatcttttttgaaaattgcataggcagtggggaccatggtttatcaggttgagttttacccagccatagccatctcaatctcaatgtccatcccaattctgagacttgaaataccaaggccaccaagctcaagaggtctacactgccatgaatcaggtggaagg

SEQ ID NO: 147864 - DNA, 439 bp, Zea Mays
gttgaagtcccttcaaaattcaaaaatacattcattcctatgcttccatatctcccaagctaacaacaccactgagaagttgaacccctattgatgatgcttattaacttgctccaatgcttggcgtcaccactcaaagacaaatcatattatttagccgcgcctgatgctgctgctgcagaccaaccaatgaaagactgagaaccaaactttgcttgagaacatacatgtaatgagtaactgtcgtgcaatttactcctgactatatagagggattgctcaggatgatcatgaccttgatgggttaaacaatcagaagtccaacacttttgggaggccaacctaacaaaaacaggcagtgtggtggaccctaacatctcgaaatttctttccctggcttgaattcaacagctcccacattgaaacgatgataggctga

SEQ ID NO: 147865 - DNA, 656 bp, Zea Mays
ctgtgccttgtcccagtggcgagcacatacacggtggcggccgagacaccggagttctggcaccctacatttggaggcacattccggtagacaaacaaacaacctcatgcaaagagtgttctgaagctaaagcaaagcaacaacctggctcatctgttcttatcaaactaagttttgtacacagatggtgatgatcgtccagttttagtagcaagctaagtagcctgctgagacggaaagcaagaaatcatgatgccgcccaaagcaatcgaaggatgttttgcaagggaaaagacgtacgatgatggatatgataataggtttccggtggtctcttctaagacatgcatacatgctggatcaggtgcagaagagagaatgattaattgaggccgtgtgtatgtgtggcacctatactcatatatatgcatgcatgcaactttgcaagcaaataattagtgacagctatatataattagcactgtgtagtatgcataggttggcgttggaaggggaaagggtgggggcaggtgccaaaattatttcgaaggaaaagcaggagggtattggtgcagatagatggcaacagtcatggcagcatggcaatgattctttatctcattataagctcctattactggaagtatgcgctcaaa

SEQ ID NO: 147866 - DNA, 648 bp, Zea Mays
aaaatagattaagtacatgggtttactttgctcatgaacaaactcatatgctaccactagtttcaatcaacaaaaataaccaatagtggtagaacatgaatttacatcttttatttaatatgcatgatactattaagtatgtactatgtgcactaaccacatactagtaggggatgatatgatcatgcacatcacaatgatacctttgctttgttggagtagaggatagtcaagattcttttgatttagctctccaatagcaatgtgaagtccaattgaatagcttggtgaagaccaattatcaataagaaatccattcttcatcagtatgaatttgagaacccatttaagatcaagtgcacaatatgaatgttgtagttcacatgcatttgttccttcaataccacttgtatgtgagagaattatgaatttgcactgaatataggaatatcacttgtaaggatgataccacttgttgagatattgttccagaaaattcctttgtttatgcaagactgctactcacggacggtccgcagtgggagctcggacggtccgtggcctgatctctcggactgtccgtggcctaggaccggacggtccgagacctggaacttgcactccattgagctgactgttaatttctca

SEQ ID NO: 147867 - DNA, 466 bp, Zea Mays
cagaagccttgtaattaattaactaacaagataagatgggtataagttgccttaaaggagacatgaaacagtaagctaggtttaccctatgtcaggactcaggagctcagggttgttcaggaaaaataagaggcccattgtcatattcctatatataaccacccaactaagacgctaaaagatattaattttattttatgatgttactacatgcaatccgacttaaaacagataaaaggattgttgatacgcctttcatttacatgccaaaacgtcttgaaacaagcaaataatcttcacacaaaagagtgtcattcaggcatcggtcctggccattcgataatcctttcaggacttctctgttttaaaaaactaagtatgtgtaaggccaaattgaaacaatccctaaacactaatgacattaccgtttcactagttgcacgaacattaaccatcaatggtatat

SEQ ID NO: 147868 - DNA, 313 bp, Zea Mays
tgcaacttctcccactcgctttaagatcaagaaaggtccaatgaagcgaggggacaactttcctttaactttgaatctcctcataccctggattggtgacaccttcagatacacgtgatcaccctccttgaactccagtagtcttctccgggtatcagcatagctcttctgccttgattgtgcaattctcaaattctcccttatcattcgcacttgttcttctacctcttgaataagttcaggcccaaagaactgtctttctccagtctgatcccaacatagaggagtcctgcattttctgccatatagagcc

SEQ ID NO: 147869 - DNA, 502 bp, Zea Mays
gccaataaccggggccttcgtatccttccgatacgcaaaattataacagccaaagttcttgtgaaggccatctgctctagccttcgtatggtagtgtagctcgtgcacccggcaaaaagtgtatggtagtgtagcttcggcattagcatccattccttggcttcggagagcccatatgaagacgctaagtctaacaatagcattgggggtcagctgatgaaggtatatttcaaagttctttagaacctcccctatcatgtcatttagggggaaccgaagccctgctctgaagaagctcttaaagacgataactttgtcctccctcggctctggaattacctcttccccagcaaatcgaacaagcttgctctcagactccccgaaatagcccagttttttcatcatagtcatgtcatcttcagttacagtagatttttcaaattcaagatgactaggctttgtcgggttcagaatgttgttatcctcttcgctttcattatca

SEQ ID NO: 147870 - DNA, 369 bp, Zea Mays
ccaacgactagaactccatggatacataggttgcagagtaatcaggcatcttgtgtagtctccggaggatgctctcggccgtctgcttagtgctctcgtcccctctgtggaaggcgctcactaacgccgtgggcagcatccgatcgcctgtcacctccctcacgcatcggtcgtcgccgtggtccaggagcttctccaccacgcagaagcacttctgccacagcacgttttgccggtgctgcctcagcgcagcaagcacgcgccgagcaacgtcgagctcagcaagggccgctacgctcttctccacgtccaccctctcgtcgaggagagtgcacagcgctcggagggcagcctccaccacccggatgt

SEQ ID NO: 147871 - DNA, 331 bp, Zea Mays
ggaccgttagatcttggtgcacggctctgatcgagtctagacgtaagttgacggggccgttgatcccatagcaaacgactaggattagatctagacgaaataaatcctgagcgacggattagatatgggtggccacgatttgatttggcgtaccctttcgtctcaatgaatcgtggccgtgtgtcgtggatcggatggatccagggggatctcgacttctttaaatccctacccttgatttcagatccaagggttcctgctgcgtaccggttcgggagcgtaggattctaatccgagccatgtgttgccgatcggacggctcagatctatt

SEQ ID NO: 147872 - DNA, 457 bp, Zea Mays
cgagcgccagcccaggccatcacgagccaccacccctgtgcacagaccataaccagcagccaaacactgcatcgacagcacgcgcgcagccactgccaagcgcaatcgtctctactcacgcctgacgccgccgctatcacgtgccaccctcctgccgacaaatgcggcctcctcattgccaagcgcaacccctcacttctctcttggctgcgccaccatgatgtcgccacggaatgcgcagagccgccgaggagagcaaagtcccagcgagaaacacaggagctcttccttccacctctggcgaacctccaaggaaactcggcgcccagacctgctcgcgcacagggagcatctctgctccggcggctgctcaccggcctccctggttcttcctctcacaatcgtgcagcgccctcttctctacggtggttgctactcctctctgaagctatgcgca

SEQ ID NO: 147873 - DNA, 527 bp, Zea Mays
gatctcagatctatcttcgagaatatcttagctcccttcatttgatcgaataaatcttcaattcgaggtagtgggtatttattcttgatggttacttcattcaaacttctataatcaacgcacattcttctcgaaccatccttcttgttcacaaacagtactggggctccccaaggggatgaacttgggcgaataaaacctttttctagtaattcttctatttgtttcttcagttctactaaatctttgccatccattctataaggtcttttcgagataggtgcggttccgggtactaattcaatagaaaactctatatcacggtcaggtggcatacctggtaattcttccggaaatacgtctgggtattcgcacactactttgatattttccaagggcttttcttccaagtgattgatcactgtcttccctttttcatctgttgacttgtctatgttgacttggattctttcaccttgaggacttgtcaacgtaattgttccgttggcacaccgtatcactccatc

SEQ ID NO: 147874 - DNA, 801 bp, Zea Mays
gctacaggcaacccatgcaatctgtaaatttgttgcataaagacttgtgctactgaagctgctgaaaaaggatgtttcaagggcacaaagtggctatatttagagaacttatccacaacaaccaggacacagtttttcccagcagaaagaggtaacccttccacaaaatccatacaaattgtttgccaagctccagttggtataggtagtggctgcaataacccaggatatttgcttcgatcaggttttgcttgttggcaaatggaacaagtggtcacaaaatcttttactgttttcttgagaccaggccaggcgaacaactgcttcactctgtgataagtcaccggaaaacctgaatggccaccaataggtgaactatgcattgctgctaaaacttgtgcatgcaactcagtgttgttaccaagccaaatcttgcccttgtagcgaagtagtccctctcgaaactcaaaattgggagcagcatcaggatcaagagttagtttagcaatcaaaactttagctgcttcatccttccaatatccctcactgacatcatgacaccatgtcggctgcaggacagacatagaatggcacaatatttcttcatggggtcgcctagaaagggcatcggccacccgattctgagtccccggtttgtacaccactctgtattgtaatccgagtagcttggtaaaaactttctgctgccagggtgtgtgtagcctttggtcattcaagtgtgtcaaactcttttggtcagtgaatataacaaactcatcatggagtagatacggtctccag

SEQ ID NO: 147875 - DNA, 496 bp, Zea Mays
ctatcaataggggcctcatcaaggagactgtttggcttctctataggcaactcattaaggagtatcatcccattatccgaggccatctgttgtaactccggtgtgtcaaagagtggttgttcatgtcccctagatgtatgtgaagtccttccatgtccagacggcgggggaggcccaaggcaaaggtgaacagaccgttggtggggcaagggactgcccaaacgccgaggctcatcattcctctgatcatccatgtcgtctgaaccatcaaactgatcgccatcctccgatggagtgagcagcaaggaacctctaagaccatcatggcagattgcaagtacccttacacttatattataggctaagcatctccgttcatagctttgtgggcctggctctagaatatgcagaatcatatcacggtgcagctgtttcggttggaagcaccaagccctcgctacaaaggatggaagagttttctgcaatagagtgtcca

SEQ ID NO: 147876 - DNA, 1136 bp, Zea Mays
ttcgaaagtctgcgtgccattaattgctaaacgccgattagccgaacctgtccatcaatgggcacattgatgggggtggaattaaaaagttgccgcgtacacttgacttggaatcccagttgcaaatgcagggtacggcagtacacacggggtttttttaaccgaacaggaataaccagcgcgtggaactgtcagtgtgaaacggtggggaagggggatttggtttcggtctttatagtggtggtatggtattaatgcgagtgggtggagggaattgaattggagaccacccgcacctaaccggggcatcgcaggtcaaatgccggtgggcccggtagtttagtggcaggcaggcccctcgcagtccaccacggggcaagggcagtgacagtgagaagggtggtgctggtgctggttgcgcctatgcgttgtatcttttcccgatacggtcaggtcagccatggggtgctgctagtgctaggggccagcttgctaccacaagtgcgcctccactccctagtgctttgattgctatccagcgtctgggctttggttggcttcgaattgatctgtggatgaatgggacaacgcgggtgtgtctgctggtactagtgtggagacgtcgctttgctccccgccttttaggcagggttcttggaatcttggtgcaggactgcgggccgagtgcgatggaggccttgttgaatggtgggtgttcttgtcggtctgccgtctgcgttctgcacagaggttgttctgtggaattttttgtgtttggattgtgacaacatgataaaaaagcagctactttttggccagaatttttaaaaaggctgatcaggaattgggtggcagagggggtctgattctgatttttttaattctttctgttcttacttggatttgtcgattaaaatgaggtggcttacagtgacatggtcctgtgttatcatgtaagttcagattggtcaccaagtagacaggttactatcgctggtcattgtatatttggatggtttttatgctgttagtactgactgctgagtagggtggtttctacaatcactttggacattgggtcaacaaaatgttaggcatagtcaatgattctcatagcggactatctttggtgtttg

SEQ ID NO: 147877 - DNA, 1409 bp, Zea Mays
cgtgtaggtatagggtatcgcataattagaggtctggctacagcatgcgcaaatccacacttctctctcttcctcgcatattctggacaacgatcatactttccctttcgtccgttcccttcctctggccaccctatttcgcccacggcggcgatcgatctggagattccggggccctcctgcaaacggtgccggtcgggtagcagggggtgttctcatcacggtaagcgccgccggcagaatcggcggtccgaatctccaggaaccggcgattccacctcaacgactcccacatctgtgcgaaggtatgcatctgaatcgacctgtgagatgtttcgatgcatcgttgtttggatcttgtatgtagcgtccgtcgtgtgagatttgtgtttaatgtcttcatttagcatcctgcagacctgcacatacacgtttagggtttaaacaaaaaattgctggaacacaaatacataccaatcaccaattggaattcaatttgttccatgtcggctagttgctttactgatttcatgtgtcacagatgttcggtgctactgcctgattgcatgtgtcctgcagatggcgtacactcctttggataccctcaaatgggttgtaaaggaaatggagatgaactcggtcgaggttaggcagacggttggtcatcctaccaactcatcttatgaactccagcagcttattgacaagatcctagacttatcggattggttggacatggttgccattcaatgtgcataagttattaccaattacaacccaccccctcacccactacagaagagttagaagttgccgaggaatttggacgagagcctccttcataatcttcaattcgaataggttccatgccatgctcgtactcagtgcccatattgtgtagaatgataacacaatcaacaatgaatttgagatcaatggggttccaattgcgagcatgattctttataatttggtatttgtcttgtaagactccaaatgctcgttccacgtccttttggtactcatcatgtttggcggtaaaatacttgtgcttattgctaaatgggcaagagataggttaaatcaaagtagtccacgacagataaatgccgtcagcaaggtagtaagccatatggtattgttgaccattcagttggtaactaaccgaaggaccaactccattggctaagttgtcgaagactggtgaatgatgcaggacgttaatgtcattgcaagatccaggcattccaaaaaatgcatgccaaatccaaaggttatggcttgcaacagcctctagaatcaatgtaggtttcttgtagtaacctctgtactgaccttgccaggtcgtggggcaattttcccactcccagtgcatgcaatcaatacttccgatcatacctggtgttggg

SEQ ID NO: 147878 - DNA, 575 bp, Zea Mays
gcggggaggtgggtctcactcccttctccgccagcttctccttcggctctcagaggacaacctgctccaatcccggaggtggtaggcgtggttttatccgaagccatctgccatgggaagagagtcactatcatgcacatgccatttttttaactagttattttattcattacatcaggccattacataatacagcacacagctaccataagctcattacacacgagtgctatctagggtactcccgaactctttctctaaagtgtccccaaattccttgagaaggtcatcaaggctggccagggacaactcctcggtgtcggacgagttccttaacctggcagggggtagggttggaggggtttcttccttctgctcagtctgacatccttggcttttggtcttcttgcgtatttttcttgcgggggcgagcttcttcagtttcttgtcatagtccatctttaaggtgcggtaagcctcacgggtattggtctcctcgccttcagctattgcgaggctctcttgaagggacgccttttcccctgaaagttccctgactttttgctccaggcttt

SEQ ID NO: 147879 - DNA, 735 bp, Zea Mays
ttagaatcagcagcagatggagcacacctagtgggatcggcgtcagtaaattcaggcacaagcacttcttcagcagcaggaaccgaagtaccaacgtcccgatccaaactagatactcgccggaggcgtctctttttctttttctgctcatcagcaggaggatcaagtttattgactcggcaaggacgtctcgggcgaacactgacaggtttctgaacatctgagattgtaccagcctctcggagaggcgccaccaccagtgtcccagcaggagcagcatcagaagagtcctcagccagcaaatcaagcatagcacttatctctgcatcactaggatccaagggcacctcaaagtggacctgccgttcactatcaggaacttccccgagcgagacaaccaagacgctaacttcttcagcagagggtcgcactctaaggcccaaactgccgtcagtgacaggtggattcgacacaaaaagagtgaaggcctggggaggaggcaagttccaggctgagtacgccactagggcaccaacatttgataccttgcctctaagaatcatctcaagttggttcaccaagtctacagagggaattcttctgttggtaacccgagtcgagtcagctaggcctcggtacagataagccgggtatgccctgtctttcaacggctgaatattcttgaagacaaaattagcaaccacagccttagcagtcagacccctctccttcagc

SEQ ID NO: 147880 - DNA, 333 bp, Zea Mays
ttccaagcctccagcaccacgtcctgaaatccctccattttggtccaaaaggactcaaaatggaaccttctcttgccaacaatattgtcttttagaccaagaagcagcgggcaatggtctgaatcttgagaggatgaactgagcagaagcacatttgggaagtaggattcccagtcagccgagcagagtactctatccaacttcacaagcaccgggttatcttgttgattggaccaggtaaactttctgccatgtagctgaatttctttaagagctagatcgttgatcagcgatctgaaccggcccatcatgtccctgttgaggttggagttg

SEQ ID NO: 147881 - DNA, 816 bp, Zea Mays
gaagataactctgcatcggtctcccaaatatgaggatggccacaacccagaatagtgtccttaagaccttatcggcttaacctgagacaataactaccttttcatatcttacatcatatacttagcattcaagtaagtcttagattcctattgtgatgttaatgatcttgtgtgagcatgcttttgatgtccagaaatccaatagcaaagatggcagatgttgacggaagatcattcagtctttgccagtacgagtattaaatttgcttgtttcagtatcgcaagcaagaaaacagcttaattattttatctccttaactatctgtcactgtgcagctagttctacaattgaagctatcgactttgtcacctccatttattatgttccttaggagaaaattcaaaagtttaccaaaaataacatgttctgacgtctgaactgatagccagattttgtatctagtttttttccccaaatgatcagatatttatcttaattaaatgctagcatttagcttgtgtgcatatagttgcctcagaaaagacatccataaacactttgttttcaagtaccaaaatattaaaagaatgtgtaatctactctctggagttcagtactgtaagcttatccatgattaactaagtaggttctgtagaaaccgtggtctcacattaaagaaatatttagctaaatgattccgtagctgtcctgccaattttggaccttgtagccgacagacgctagtgacttcggttgtcctgttctgtgaacattctgttgaactttcacaatcaaggtatgcagttataagtggt

SEQ ID NO: 147882 - DNA, 275 bp, Zea Mays
tgcccacctaatgcacgacgacatttcatgcacgacatggtgatgaccactcatggccacaccgtgaacgcaacacggttctagcttcaatgtcgtcgggtctcatatgcagctagctaaaaatagttaagcaaacatgcactacctaattacatgaatcaaaatgcaaattgtgcatgggattaactaataaattaccccttaatcatgttgtacatcgatcactcctagctgttgccttagctcgatgaacctgaccttgccaagtgcctttg

SEQ ID NO: 147883 - DNA, 630 bp, Zea Mays
gctgccgtggagattttttttctcctggattttttctaccgaccgcactctgctggtcgccaacgcgctcatctccctcaaccttatctcctgcgctgctccagctcgtagaaaaatcccaacgctgctctctcccggcgttctcctctcctgccgtgcccatctccctcctctgctcggctttcctcctccctctctgctcgccgaccgagctccttccctgcagccgagcttcttcttccacagcccgccgcgcctgctccctttatccggctcgtccccatggcgactgctcggccctgccctcagccgcgagctcccaggtgccgcgcgcgcccctggcttggcccagcgctccgttcctgcatcgcctggccgcgattccccaaccatggatgcgtgcagctccctggcatttcctccctactcggttcctatgcgtgctcgccggccgaagctttctagtgcgctcgtccatgcagcggcgcccctgctcaaccgcgcctggccggttctccctcggcgaattccagccgagctcgccggcgttgctggcctctagctccccctctccctccatctctctccaacgcctacttcctctgctccttcatcccgcgcgcgtcccca

SEQ ID NO: 147884 - DNA, 766 bp, Zea Mays
gagacaaggtgcgagcacaggggagccagagatcgagagcggaggtgcggctggcacggctagagacgaccgacgaggaggattgacggcgactgttacacgtccagctccggcgaaccgtacagcatcaacagatacaaatcctgaagcggaggcccaacttccacgccgtagcacgcggcccatgaagcccaacccaagatatgccggcggactgaagtagagtatatgtaatctgttagctgggagagagatttttatgcattttgtaaaacctgaactgagaagtaaactccagcttcgctgtcctatccttctctgttctccactttcccttcctccttcccccagagctaacaattggtatcaaagacctcatcgatccctccccgatggcgtcaaccacaccctccccgatcgatcccaacctcatagcagcgatcggcgcggagttcgacaagcggatctcatcgctggacaccaaatgggagcaacgcttctctgcgctggagaagtccgtcgcgggctgcaacgctgggttcacaacgttcaccgaggaaatctccagcgacttcaccaaccaaatcgttctctccgagtcaacaacttccgcatccatcacccgcacagagcagaccatctacgagcacatcgaccgcgtggaagggtctctagccacatggctcggtggcctggaatccgccatgcacgcgttcgacgattggcgcccccggatcgagtcctccgtgaccgatctggaacactc

SEQ ID NO: 147885 - DNA, 928 bp, Zea Mays
ttttaattggccaataggttagtttacattttagaagaagaatgtgaatagagagctcaacataggtttacttgagggttgatggaaaacctgctctgacaattttgcatgtgtacggatatgtgatagttctggtggggctgctagttttttaaaacatggacttgtgcgactgtgtattaactgtgcacgtaagctataggctgatatctcttccttttacaggtattggcaaatgccaagtttaaaattacgaaatttcccattcggatgagctgaggcagttagaatttatattatcgcgttaaggtgctgaagcgaccacaggtttcagcatcataatagttcttgatgattgaagctaatccacatagaacaaccaataagcactgtgggttgtgcttctgctgccataaaatgacagtccttgtttaccagcctagtttggattatgaccttattatttcttgaatgtacatctgcaactctgcaccggagcatcataccactgctccaagcatatatcatttatgtaaaaactgaaatgaaaattcaatattctgacagtcaatttgttttttaaccgcttgcagcttctgcattatgatatcagatacgtcccttgcttcgtgctcctggacaagcacggtagagctctagcgaagactggagtaccaaccagccggcagcacgttgtcgccggtctccatcacctcctgaggatgcagcagccatccggactggaaggaaaccagaatgcgcctccgtcatgaagcccaaatacctgagcaaggcctgtattgacaaagaaaaattttcagaatgtgccttttgtttttgcaagcatgaacaatgggcaaacattgatgcgttaattctttagctggtaagtacagattgaagttggtgcaaaagcaaaaggcaggtg

SEQ ID NO: 147886 - DNA, 694 bp, Zea Mays
tcgtcattagtagagtgggacccgcagcataccgccttgaactaccagaatctatgtcggatattcacaatgtgtttcatgtctcccagctccgtaagtgcctgcaagtaccagagaaccacatcgaggcagagacaattcagattcaaaaagatctccagtaccgggaaaagccaataaagattcttgactcagcagtccgaaagacccgcaactcagaagtaagactctgtaaggttcagtggagcagagaaggagaagaggaagctacctgggaaagtgaggactctctgaggagggaatacccttaccttttctcgagccccatctgaatctcgagggcgagattcctttaagtggggtaggtttgtaacatcccaattttcaaacccgaggtttggaaccctaatctaaccccccttccttatttattttatccctaggtcttctcatcatatgcatatactttgtttgattagaagcacctcacttagaatatattatattctttttttggcacctaagattacctagttaattaattgttcaaaaaaagggatgcaaaaatagaaatagaatttggaaaataaaaagaaaaagagaaacccttccccccctagctgggtcgtttccagcccgcggccgcttccccctctcgcgctcgcgactccctccccctcggcccacctccggc

SEQ ID NO: 147887 - DNA, 305 bp, Zea Mays
gattattataattttccaaactgcgaaggaaaaccgagtaataagttagttatagaagaacttgtcagaaacgtaggtgaccacggccagcttggaggggttaagctgcctaaccgttgagctggacgttgtagttgtctcacgtcccatcggctatcgacatgttgaggtagcgccacttttggacgcatttgtgtagctgaactggggcaaggcaagctgtcctttgaagccgggacacgcctcgtgtagttctgtggtccgagtgttgggttgttagcattcacgatgcaatttattcggaa

SEQ ID NO: 147888 - DNA, 580 bp, Zea Mays
cttgacaggagaggctcccggtatcaatggaatactatgatcacagtaacgagaaggaggaagaccagaaggaggctcgaacactgtgagaaattcagacaacaatgccaacagaggtgaaggtaatttcaagtccgtcacagactgcgagacaggttccaactgatggacagcaaccactgaacctggagaacaaacagcagacaagccttgcaacaacaccgaagattcttgataaggaataatcatccatttttgcaaccaatgcacattcatcggactatggcatgccaaccaatccataccgagaattatatcatatgatgataatggcaagactcgaaaatcagatgtaaatgtgcagtgctgcactgaccatttagcgccgatcaattgctgaaaacaaatttaaacgagcaccatcagcaacctgcacttgcacagaactaggcatcaaggaaataccagacagctttgttgccagtgcggaagacaagaatgagtgcgaactgcccgaatcaactaacaccaaaacttcaaacccctgaatcactccttgaaatttcacagtaagaaaagc

SEQ ID NO: 147889 - DNA, 942 bp, Zea Mays
tcggtccatatgtaaccaactctataacaaccgtatccaggcgggatacgatccacggctgcgcgtaacaaactcctctctggccattacgacccccactccttagcgtataaagccgacccttcccttggccctcgcagcctattgagccaccgccgaccccgtcgagtccctgagcgccagtggaggaggagagacaccgcatcacgtcgccagggctagacgggccgcacatcgccaccgcctcgccaccgaagtcgtctcgtgtctacgccatcgcgcatgccgagagcgagagggtcgagagagacagagagagcatggggggaaggccgccgcggttgaccttcacgctccgggccgcccagctccaaccacatgcacgggaggtgtcgccggtgcacgccgcccacgtacgtggattttccgggtggaatagttggtcggagtacgggagatttctcaccggagctgcttcatcgccgccgagtcgccctactcgtggtctgcaccgccacggccttaatcaccagtgagttcatgccctcctaattccccatcgtctcctccacatgatgcgcctatagaatcgaggttaggggctcgaatgtgttgggcagggaatcgcggccatggcgccgccgtcggcacacagtgccaccacgtgctggtcgtcggagggcagtaaaggaggaggagatagcgtgaccatcggatctctaacgaatggccgagattaagagctgagtaaagattcggtcagtagcgatggtgggcgtagatcgccgatcggacagctctagtatacggtagttgttggccgctgatctgcagatatgtggttggtagttgttggggcactatgtcgtgatccaatctaatcctagccggagatcgagaatccaatggcccatatattgcgataccccttcggtcacgtat

SEQ ID NO: 147890 - DNA, 315 bp, Zea Mays
gttcggtttgaaacttttaaattgtatgggagtaaaacatgtgaaagtatttggtgattctcagctggttgtccaacaggtgttagaagaatatcaatgttttgatggtactctaaatagttaccttgaaaaatgttggggcataattcattcttttgacgaattcagtattcgacatatctctagagttgagaatcatagaaccaacaatttggcacaagacgcatcaggttatcggataaagcgagggagatttcacaacactgaaaacctgataaccggtgcagggccaattccctaggtcgtggaccgtcc

SEQ ID NO: 147891 - DNA, 370 bp, Zea Mays
gtcctgatgctgctgcttatcacaacgagactgaagcctccctcggcctgaaaaatgaatttcgagcacaattttttgttgctccagcatcaattttgttagctatccaggtttcttgcaggtgattgtaaactattggagtccagcgtgtgtggttgaaaagtgcagagagtccaacgttacagcctggttgaaatggctggaaacaaagtgctgctcattccattgttactagagtgaaacaaagtgcagcttgtgtattttgattttgagtcattcaatgtaattgtaccgattgattgggttgtagtaaacaaaaattaagagagagtgattgtttcagtgaacaaaaattgagccaatattgtga

SEQ ID NO: 147892 - DNA, 626 bp, Zea Mays
caccaatagcttagtggtcaagaattatggatcttccggcgccaaggaccaatgacatattaatgcccaatttcacttcaagctctgtggtaatatgggatttcatggctattttctactcttcttactcctggtagatcggagatatattacggtaagcatttcaaagggtggaattcaatgtagttctgctacataaactccaggtatatgcccatttaggactgacctttccatttagcttaaagctataccataccaatcaaaggaccatgccaagtcaatttagtgactataagtatttataattctgagagatgtatgcaacacaagcatagaggtcctagacagcacgagtaaagtggttcgacgggaacacacaatggttttatttcacaccaacatagtgaaatttttctcagaataacctctcggtatactcacaacttcgtgttgctggcgattacatgtccttttatctcatagtttgcttcatgtcatttagcgataaagagagcaatgtgctaacatctggttgagcaatgtatggctgagatttatagtcttaaatcatttggtaaggccttttgcttactaatagaatcccaatttgtgatgttttctgt

SEQ ID NO: 147893 - DNA, 359 bp, Zea Mays
cgcgtatccggatcctggttggagacgatgttccctggtcgagggtcactggcactgtagctaatacactggttatcaccaatatcggttgacatcaacttggctactgatgatgtggtcatggtctgaatgcttgcccccattgactctgatgatgggttaggttgatcttgtgttcgtgtttagtttggttgcagcttttggcgttaggtggcctgctccatcttgcttttctacgggtaggatccgtgctcaagttcgtctctttgatgtgccagctgccaaggaatgttcctctgattgaccgtcaaatggtttggtccaacagaacaggtactaaacctacagggacactcgcc

SEQ ID NO: 147894 - DNA, 663 bp, Zea Mays
atcaaagttcgccagatacaattcttgtagaccaataagggcagacagagcaggagaagggactccactactttccccactggctacatattgccgactgttcttccgagtcaaagggacttcatcttcttcctccccgtcgttttcatcaccaacacagacagcacccccattgggatcagcggcagatggagcacacccattgggatcagcgacagatggatcacacccattggggtcagcgtcagtaaattcaggcacaggcacttcctcagcagcaagaaccgaaggaccaacgtcccgatccaaactagatactcgccgaagacgtctctttttctttttctgctcatcagcaggagaatcaagttgattggctcggcaagggcgtttcgggcgaacactgacaggtctctgaatatccgaggatgtaccagctttcgggagaggcgccaccaccaatgtcccagcaggagcagcatcagaagagtcctcggccagcatatcaagcatagcacttatctctgcatcactaggatccaaaggcacctcaaagtggacctgctgttcgtcatcaggaatttctccaagcgaagcaaccaaagcactgacttcttcggcagagggtcgcactctaaggcccaaaccgccatcagcaacagg

SEQ ID NO: 147895 - DNA, 525 bp, Zea Mays
gattaggaaagcaggggtatatatacgggtatagccacttcataaaagatgtgtttaaagcatagatatgtttgggtaagaaagagtacggtaaggaaaggctccatccaagattgtggatcttgattcctttgaagatctgacttgaatcttatcctaccttgatttgatgaggtcgatcatcttcgatcttcggccttagaatcgtcaccaaagttagggatatataattaagatgacttgtagataagaacagatgattagtgggtaggtcatatggaatgagtgtactatggcataatctagcttcctttggggtctagcgtgactcatatttctctttaataagattgatctcttcctacttgagctttggtgtctccatccgggtttgggacaaaagattaagatagatcagtaggtaacaactaggcagagggtttagtaggcagctatatgctagatgggattagttatgtatcctgttatgtaggtcaagtggttgggtatggccgagtcgatcta

SEQ ID NO: 147896 - DNA, 485 bp, Zea Mays
acatcggcacaccacctgttatgaaccttgtcgggatcgacacaggatcgacactttcttgggtatagtgccagccatgccagccacattgccataaacaagccgccaaggcgggtcagatctttgaccctagtagatcaaccacatttcatcgtgcgggctggatatcaagagaatgccttgtagtcaaggattcccttggtctcgagtttgctaactgcatggagaaggagaatacttgtttgtactcagttacctacgggggcaggtggtcgtacacggctggcaaagtggtttgtgacaaacttaccattgggacaaacaccaggttcagcttcatgttcggctgtagcctggacgtggagtacaagaactacgaagaagcggggattgttggttttggctactcaggcatctcattcttcgagcaagtttcaagtcagatcaactataaagatttcagctactgtctgcccatcaatgag

SEQ ID NO: 147897 - DNA, 891 bp, Zea Mays
tcctatatttgatggcactgatccctgaatctggttggataagtaacataattacttcgctatcatcagcatccctgaaaatctgtgggttcaagcagccactatgcatttgcagggcaatgctaccaaatggtctcaagcttataaataaccttcaaatcatggaagcaactctttgaagctgttgaggccaaaattggcaaggatgattacagaactgctgtcacagacttattggctctaaggcagactggcattgtgaaggactacacaactcagtttcagtccttacagtttgatatcactatgcactgctgtcaccttgatgatttgttctttgcttccaagtacgtaactacgtatgtggctttaaagatgagatcagagctgtagttgaacctcaagtgaacacaacagttgacatagcagctgttattgccaatattcaacaaagggtcctggagagaattaaatttaaataccagaggacacctaatcaacccaggcaccaacaccaccacaaagatgataagttgataacaggcctcaacagacaacctggccacaatgagattttctctaaaaggaataaaccacaagtgaatgccttggtacggaaatgcctggacagagagcttgatggtgaagtgttggacagaactgaagacacacttcctgaagaattttgtcggctgtccctcaatgcaatatccagcactgatcataatgattgcatcaaactcaagaccaagttgaagaacaaagtcatgcttaacttactggacctaaaacatagtgaaaaactgctgactgacaaaaaggtctctaacttaaaatggtactgtcaaggacatacacaatctttagatacggttgagctcgatatgcacc

SEQ ID NO: 147898 - DNA, 1137 bp, Zea Mays
tcccctgcatagtgaatccaatggatgcgatctttggagatttatttgaggagaaaagcaacaaagccattaagacccctgccaaagaaaaagaggatgttggttgtgctaggctatgtgcctctccctgttagccaagtcgagcctttgtgatcgtggtttatctctttctccctctttcagtcttctgatcgaggataaggagggtgagttgagttaggagaatggactatttgtgggtacttggtgatgtaacaaaatttgttgttgttgtgggtccctttttcttcctaattggtcgggttttgcgccatcgtcgcctattttcatccttgtattgcccctacatcaccgtcgactacgtcgttgtgcgcctctctcacatggtatacctggaccgttcatgctcttcgtcatcttctttaagcaccactgttgcaacactctagcaccaccatgactccttgcgcaatgcagatctcaccactgccactctgggtccctagatgtgtcaaccatctacttctttgacttcgtccatcacaatctcgttgccagtgtcgtcctctgtcctcgtctacttcatccacaccgacaaccattggtgcattgacacatgcttcctcgttgttcttctacacattgcaactatcgcggaggccttctctgctagtcactttagacactgacgtatggttggggtcctctacctagtatgtcttttgctagcaacactggtgcgtaccttcatccccggtgtgtttttgggcttagctagtaaacctcacacatgcctcagccacgttgattcgacaatgtcgacttcgccatcgaccttctccattgactgccttgactgcatcaccatctttgtctatggtgcttccttctattcgccaccatcaccacaacacatcaagcacacgacttgtgtggctcctacttcttagtgacctcgatagctttcatcgaccacaactatcctttgcaagattatcgaccacaactgttcatccttgtactaggctacctcaacatcgacacagagaactatcgtctacatcagcttctcgtcggtttcttctccaagtcgttgcatctgcactccgacaacgtcacgactatgggggattttag

SEQ ID NO: 147899 - DNA, 289 bp, Zea Mays
gcacaggaagctggccacagacaggagcgtcgacggcgcggtggccggggaggtgtacgatacggcggtggcggatggcgccgggttcgcggacgccgaggcggccaaggccttcttccagaggctggaccagcagctcaacaaggtgaaccggttctacgagagggaggagcgggagttcctggagcgcggcgagtcgctccggcggcagctgcagatcctcctcgagctcaaggctgccgtcacccagcagcagcaggcacggcgcggggggagcgctgccgacacg

SEQ ID NO: 147900 - DNA, 1025 bp, Zea Mays
aaagtttttacgccactagaactttggttttactacagaccaaccagcgtcatccagtcgcatcgaggcagactcgcgcccattgaattggagcagaccggacgacccagaatcgacgccgcccgccgcaggctgatggaaaagggcactgtttgcattcactgcggcagaggagttgaatttctgctacaagatcgacgggccgtccgctgaccatttcatcttctccgagcaaggaatccgctgtaaaggatctgccaataaagtctgagaagagcgaatcccatctccgattctagaatccgcaggcgacttagcagatctggagacatcgattcccagtaggccccccagagaagacgataaaccatccccacaaatctgaatatcttgacaagatttgcgaattgccggcttggagtggtgcggatggcaaggaacagacccccaaaaacttaccgccgttggagagtgctgccagagcggccctaccggatcttcaaaataaccattgtcttgcttcacgggaagacgaacgcggaaggcaggagacgaaggcggcaccagacgagtaaggccagccccaccagatctgaggagaccgaaaagctggcggcgccgggagaaggagcggaggccccgccgccagggaagtcggcaccgcgagcggccgcgaccgcccgaccgtcagtcttgcaccgcatgtcctctgtaaattgaaggtatgttatcgttggagtctttagtttgaatatcatgaatcaacagatttagcaacggtgatgatcttcatcatgatcgccagcttagaaccagcggtaaacaaaaatggtttaaatattttaaaaagcacccacacccgccgcgcaatgttcgtctcccgtcgcctccattgcagccagatgcatatgcaaggatattcattatattgctttatatttctaggagtaataatcaactatttcgatacactctaacgtattatatgttaatatattgtagtgttttcgcttgtgggcgtttag

SEQ ID NO: 147901 - DNA, 624 bp, Zea Mays
tcttgttgttttcccgccagatgaattcagcacgtgtgcgagcgagcttctagatgtttgttgccagctagctgatcctgcctcttgcgattataatgaccacatcatgcattgcaccagcagctccttacttatctctgaggacgattgtactatagtactatgcatggccagattcagtgcactggatcagaagttcagaacagatgtgtatcactcgtcagcttgtgcagcatgcatgcgagtaatggacatgcaacagtggtgtgccgtggtggttgcttgatccagctttggttttgtttgtttgtttttttttttttgagggtggggggtgggcggggtggttcaaagttcatgtcaactttataaggttcagacatgcaaagggggccggccgggactctgaaaaccggaggacgacgcagcatgtttcacacagtgatgtttccactagctagtcatctcttctcatcgatcatggctgcttttgtgtgtgatgtgcatgccgtcgattcttgcattgcaccactcaccactgaaaaacgtccttgtagccccgatagatagattcattttcagcacgctttcgatcacttgtggcactgtcgaaaaaaccaaagc

SEQ ID NO: 147902 - DNA, 761 bp, Zea Mays
cagcggcctacacagttcggtggtccgggcatcctcaacttggagctgtttggttgggccttgtgcatccgttggctgtgcttgcaaaagaacaactcctctcgcccttgggctggatccccatccaggtgccacgccacaaaggcattgtttgatgttgctgttgtcaccatgataggaaatggagaaacaaccaaattgtggactgatcgctggctgcaaggaaaaacagtggctgggtgggttcctaatttgataaacctgatcccaagaagggccaagaagcagaggacagtagcgcaagggctgaggaaccaaagttgggtatcagatataagaggttctctgacagtacaagtgctagttaagtacctgcagctctagagcttagtggacaacctggaactccaacaggatgttccagatcagcacaggtggcgcctgaccggccatggcatatacactagtaagtcggtctatgaggcctttttcacagagacacttaatttgctccttggaaacgcataatgaagacaggggcgcctgagatgcaagttttctatctgtctagcagttaaaatcatgtgttggacggctgatagacttgcaaaaaggggactacctcgccctgctgcatgtcccctctgcgaccgatgagactatgcagcacatccttgtctcctgtgtgtttactcagcaagtctggacaatgatctttaacagattggggctgcttgtcctaatgcctcagccagggattt

SEQ ID NO: 147903 - DNA, 333 bp, Zea Mays
aaattttagactatggttaaaaaatttccctgtctgtcccacgtcaaagcacaggtctaagttccgatctcggtcgcggtcgttctcacattggttacagttctactgtgtatgggtgaggtaggggtttgaaggttttctcgacatgcatgaggtcttcttcttaaatgtaatgctcggagctatcttacccccgcaggtcgagttttttaaacatttatgttcaaactgaaagggaaagcaatgtttagccttggaggtgaaggacataacaaaacctcagataatgctactttgacgtcctacctgattgtgttcctgcagtttttcaat

SEQ ID NO: 147904 - DNA, 2505 bp, Zea Mays
tggaggtgattcagaaccttgccaggatgaattgttcccatgaatatgctggtccataggcccttttgcatgggatgatgctggtactagttgctgaagattagctgattcctgttcttcttccacctgaatatttctcagagaacatggttcgcgtacctgtgcaggatcagtagctggtccaggtataacatttgcatgtgatgctggggttttaactgcagaacctttgggtttcttccccctgttacttatctttcttgtgcccttgaactcaatgaaatcagcaccatcatgaatatgagcatcagactgagtaatagaaggtgccagaggaggaaaagatgtatcatcagcactgtttatgataacaccagctttagcatttgactttatcagttcctctcttgccgataaatcatgtaaatgacttctgttactctgtgatatattgtcattttttttatcacacataggtctagcctgatctccaaactgttgcccagaagtttcaaccaaatcaacccaatgaatagatagcccggaagctgttgttgtagttacctttgtattttccagggctatttccctctgagtttccaatcgttcctctgcttgaatttccaacactgatttagccctaacacctggagtaggtttccatgaatgaggatggacagaggaaatatccatttcatgaacttcatttgagatatgagatgctacacttttcggtttctgaagaccttgaaatggttgaggaaaacctgtaacttcaaaaacagtcatcttgctataatcgttagaaccataacttggagttttcttagatggtgagtctacaatactttctttttgtgaaagagcatcaacaactgcagagccctgtgtgagactagcagaacattctttccaagctgcatgacccatcatttcatggggcagtggtagggcagtagcgcaactttccgacaaaccaatatttcctgtgtctctcaatttcacacttgcatgtagttgtagattatgcttaccatgaccaggtaacttcagagcaagatcaagaatctcttctgttctttgaagacaaagcttcatacggtcaccagatgacaatgaagtatgtattgtcccatgggaagaatcataaagctgctgcatggaacgatcatgaggtatggactgagaaatgtattgttgctgttgctcctgctgcctgagctgtagcatgttgttcaatagagaggattgaggttcagggactccaggaatcaggggttgcaagtgtagctctgatagcagatactgttgttggttgatgtttaactgaggatcatgatatattccaccgagaaacttttctggctgtgtgatttgagagttcaaacaagctaaagttggttgattctgtgttaaaacgtaatgctgttgagcatcaatacctatttgctgagaattatgcagattttggtgcacatttagtatctcttgagtaacatctataccacacataccagcatgcagatttccagagtcagcattatttgaccgaagtgacaatccagaagtagcagtcggtgcttgtcctttttctgcaggaagcagcattgagagcaggttaatattctgaggttggagggcttcactcgatgggtcaaccatttgcgggaagaatgttgagtgtgaagttgactgtactgattctttcttttgtgactctccaactgatatgacatcaccttctatttgaaaggtattttctgtctctaactgcaccttctgtacttcaagatggtttatactattcactttctcaccggaaacaaacctccattcattcatacctgaaattaaaataaaatagcaatcacatcatgactggcacaacatgagaaaatgtcaagaaatgggcataaagaacgccattgatgagaaacaaacctccagtaacaacattagttgctgctctaggattctggattttactagacactggagcctccaaaaagtaattttctgcttcagttacacagccattcttgtttatggatccataatcagatgttccaagatacactgatcctagatgtgaggcatctgtcatacttcttggtttggtattgctgaagcctggaggcacccttacctttgcccgtaagtgtggcatgacatccccaagtaataagaaaggagaatcacagggagcactggcaacacgaactagcaaatcaataccaaaatatccagcttcaaaccaaccaatgatgtcatatccaggaaaaggaccttggatgcacccttttggatccttgtagtacagagagaggttttctgggttaacattttcaccatcaccaactttagttccttggtccaaggcattgcgctgatgtccaaattcagcacatggcccatggataccaccaccaccagactcagattcttttggaggagatttatcagacttcaagtgttccctcaaatcagcagccccaagaattccta

SEQ ID NO: 147905 - DNA, 563 bp, Zea Mays
tcgaggtttcgcgagccatcgcatgcgagaaaagcgaaaagaaggacgagggaggaagatagagatccgccatcgttgaatcaagcaaacatcctcgttgggggctcggtaccagacctgggagtatcgcaagaacacagggagtccgaccagtgcccaaccaaacggaggcgtgggcagtgctgtggccaattgctcgccggagcggtgcagccacagcggagtcgctgcgatgcatggccagggatctccacgccattatttctgataagacagtgtcgactgagttctccgttcacaccgcgtaggtcagatcctatcggtggttttgggtctcgagggggcttgcagggcgggtgctgaccatggcgccactgtttgggatcacggcgccaacgtgtccctgtgtctagggaagaagagataacggtggtcgttggattctgatcaacgggtaagattagatccatggtattgcgcttcggagggagcggggccgttgatcctggtgtcaacggtggcgattagatcagagaataccccatcgtttcggttaagggcta

SEQ ID NO: 147906 - DNA, 495 bp, Zea Mays
actgaatgaactcatcaaacttctagctgacctgcatatccagcgatgcgaggagtgctaaaatcctaatctggtcttcttctcttgctgatgcaacatttgaggaggtttggagaaatatggacccgtaataccatgtcctgcagttcatccacatgatctcctaaaaactgttttacactgtggacacaccgtggagttttaatataggtgtggagatggataggttgctggagatagactaactttgtacctgcacagttttgttaccaaaacacattttcaggtggaagaacaatgaatctgatagttgtaacaggtagattgagacgtagtcgatctgtgtgcttgtggtacgctcaggatggcactagtttattagtaggatgcagctattaaaggttgtagaaatgaggctagcgttgagcagcctgacgcactgtgatgtactatgccgaaaatgtatatttgtgtctaacaatttgtcaagctatg

SEQ ID NO: 147907 - DNA, 329 bp, Zea Mays
tgaacaaggcatgacttccagcaattgtgcatttttaactcaattgaacagtataaaaagacatggacaaaggtattcatggccttttgacagaaaaacagacttcaaggtacaacatgggccatgtactcgtgtgcgtggaactgagccaaaacatcctctaagacatacagtaaggttaaggtatatagcaaaatctattagctcagaccaagaaccaatgacaagggtgctttcttttttgccattttgttggtgtaattataaacaagtgtaagggtctatctgtaaagtgaagtagtataatggaagtgagaggtgctgtgtga

SEQ ID NO: 147908 - DNA, 892 bp, Zea Mays
atcacaaccttatatactaactggtttgcctagtctttaattcactggtgcataagtccactcaactcagagcccgacacttcattagagtttaacaactcgaagtgaagtgaagcacttcattagagtcaaggttcatcactattatctctagatacccaagtgctcaaagaatcacttagtgattagcatgggtgctttgtgaagtgcttagattatttataccatttcttatagtgtttatttaggtttaggcctagtgtttgagtgatgttagaacaccccttaccccttggtgcttgtgtgcactattgaaatagttgtaccagatagccttgtagtcttgtaagatcacaccaactgtgtttgtggtatagccaccaccgtgtactagagggagaggctcacaatgttttgactagaaactggatagtgaagatggtggagagcatccaaaagataccacaacatagcaccacttgcatgtgaagaagacccagattatccatgaagttacccaactaggagcttcgtcatcctatggtatccttgcgagggggctcaaacgaggacttggaagaagcttacacgtttctcgtcacctcagacaaaaaatatcattcacaagggataggagcttgtatctctatcacacttaaacttcaatttatattgtgtacttcggttgtgtgctttacgttcctagcttacttgataggccagtggatagatttaaaaattaagttgcatagcaatacttagtaaaaaaagtagtctaaccactatttgttttttagtcaatatagtcaattacattatggggcaatgttcatatgggtatgttaatttagttgcctgcttaaccccttatcaagggcccccaaatgcagtt

SEQ ID NO: 147909 - DNA, 391 bp, Zea Mays
gacggaggattggctactgatggatgaggtggtgctttcttggatccatggcaccctcacggccgagcttcaggacatcgttcgtgtgtcggacgatacgactcaccggatctgggttgcccttgaggcccagtttctcggcaaccgccagacccggattctgtatctcgagaccgccttccgccagcttgctcagggcgatctctctgtggacgagtattgccgccagatgaagacgatggcggatactctccgcaccctcggggcacccatcaccgatgagagcctagttctcaacctcctccgtggtttgagccctcgtttcgatcgtgtgacgcccatcctcacccgcatgaagctgtttcccacctttgcggaagtgaagaacaac

SEQ ID NO: 147910 - DNA, 633 bp, Zea Mays
gggaaaactcgaaaatcgtgagctctagcgaacgattgagggtgggagcgggtgctttggtttcgtgatgacatagcgcagctgacccgaccttcaatttatagagggcttaagcggtggtgctcaatttggccgagcagtgctggcggtcgaaggggagtaagagtactggtgcaacgaaacaggtggctttcaccatggcggctcctctggcgatcaccggacgtgcatagcatggttcgccgcgacgttgtaaagcatttggacacgcggcggacggtagggatgactcaacggcggtgagatcttatctgatcgacgataagcaaaggggaaaagtgcggcggctagccggattggtgtccagctccacggcggcgatgatttttctaccccgtgacgttatccatttaccctgggcacgaatcgagacgccggcggcacgaatagtgacggagagatcatcagcggcgaggttctgaaccttatcctcccggggcactataccatggcgaggatcattcaatgcacctgacagccaaagtttagggcgaattttctctcaattttatgtagtaacatgatcatcaccctttagcaaagttatagctctaagatccagctacaatattg

SEQ ID NO: 147911 - DNA, 448 bp, Zea Mays
gtcttgcatgtggggtccttgtcttcgtgcaccgcgcatttgaccaaaaaagcctgctatttggggtgacagcaatggtcaggtaagaatacacaagatgttccgcacaaaaacttataaacatgtgtctgcacaattcagtggccgatgtggtactaagtttagcttgcaaatacaaagtgcatgcgtcctcgaaggcccatctgcttgttgcggcccataccaaatcctcctctaccacctccttcccagcccagcggtcctgctctcctggtctcaccccgtgctctcatgttcctcgtcaagctcgagcatctcggcgcaaccgcggaccgacttgctctcccttcggcgtgcagcacgatcccagtccacgacctccacctctaccgcttgagggcgcaacaatgaagataaatagtgaccagactgactcgaaggcgctccc

SEQ ID NO: 147912 - DNA, 693 bp, Zea Mays
aacagacgcctattgttttcccattttttcgcttcccccgcatcgatagcttccctcctgcatatttgcgggaaccaggactctccctaatccattcgcgtgcgtccgtagcagtggtttcccgcgtcttctcgccgtgtgcttcctcactgatatgatatgatcctctccgccttccctgtcctgatatgatatgaacctctgccaactaatataatataggatgtatctgtattttgttttagaaaaccgaatcagaaacataggattgtaggtaacaaaagtctatcagtttagatgttttggagttagcaaagatttgcgtcggcaggcaccgaggattcgtgccgacgtggacgtcgagggcccagcgatgcatcacccactggccactggtggctccgatccttcagcgcgtcgcacaaggccgcgacgtttccctccctttcaccgaccccgcacgacactggcaagtggcatgagcggagccccaccaaacaactgcgacgtgtccgggcacgtgatccctgctgtgcttgcagggcaccattttttcagcgtgattattattgctagtactattaccagcagtacagaaacagctgctggtggctggtggcactggcagtcataaacaagagattagagacggcttcctgcactattacctgtaccacacgtttaacacaatag

SEQ ID NO: 147913 - DNA, 567 bp, Zea Mays
tgtacagatatgctcctgatgaggtggcagatgatgaaaggaagcaagaacacttcacagaaggactcaatagccccttacagtatgcactagttgctcacacatttccatcatttcagagactactggataaggctcttgctattgaacacaagcgtgttcaattgggagatttgaagaggaaggccattacccaggggcagggtagcagcagtgttcatccttgctacgttctgccacaaggtaccacaactcgtccaggaggaggaccacgtctagctcagtacgctccataggggttaccacggacacctcccactcgtcaggctgcccccattggcaccccggcgaggcctacatgacagaagactggccctacatgcttcaagtgcagtcaagttgggcactatgctaatgcttgtctgggggggaattctggtacaccagctcagaacaagcaacagactcctggtaagggatattctattgccagggttaatcaagtcaccgctgatgctactcctgatggtgctgacatcgcactcgattatattaatgcaattcctg

SEQ ID NO: 147914 - DNA, 380 bp, Zea Mays
cgaaagacacgaacatgccccggatgagctggccgtcgtggaggaggacacgcacagtcacgagagcggcggacgaggtaaagctcatggtgaccggtgcaggagggtcgagacactgctggagccggggcgcggtcagccggcacagggaggcgcgggctggacagccgggcgcggaacagcaggggcggcaaggtgctcggcgtcgggcgtcctcggaacgggacagcaggggcgctgctcggcgcggaacagcaggggcgtgggtcctccgggcgggtgctcctggacggcgcgaacagagggcggcgttcaagctgaaccacggcgagctgaactggaccccggcggaggtcctcgacgatggcacggcgcggcgg

SEQ ID NO: 147915 - DNA, 336 bp, Zea Mays
cccagttctggtttatacagctccaagaagatgaaggcacacctccttgggggcgattcaaggagcttctcaacctgcggtttgggccagccgttcgttcgacgccgctgttcgagctctccgaatgccgccgtacagggaccgtcgaggagtactccaacaggttccaggcgctccttccacgcgcaggccgccttgatcaagaacaaagggtgcagctctacaccggcggtctactgcccccgctcagccaccaggtgcgcgtccacgcatcggcatcactcgcggcggccatgagtttggctcgccaactggaactggtggagctggatcgcc

SEQ ID NO: 147916 - DNA, 905 bp, Zea Mays
ccagaatcgtagaccagagaagaaccatctttgtaggttttatttagcccagaaactcatcaccgtccagctaaaaaaccaaggcaaactcagttgaagaattggtattctgctccaaaaaaggaaagttgtgtttcatttgctgctcagctatgtttccttcatcacttaggagcctttagttagctgctcaaacaaaatctgcaaaatcctaggactttgtagaagtattctaaacatacttccacttaaaaatagtgtatatctaatttgatcccaaaaaggtagcacactagacattaaaactcagtccgcgcgatgccaagaaagcacaaactgcaattgataggaagtcatcaaacaaatccataatgatcgtttgccatcggtagacatcctcaaaaaatgaggctgtgtaacaatgtgagcgcccacccaaaaaccaatgtgacaaacacccattgaaaaagtccgaggaataacagaaaagccccatctaacaccaaggcagaagacctatgtcaatccaaaacttgaacgtaaagacctgtgtcaaaccaaaacttgaacgtatctttgaaccaaactaggaacatacattatgcagttgaggcagcaagtaaaccaaacgcgtaccttttagcatacacaattcaaccagtttttttcgcacagacatcacgaaacaggaataacttagtgtttttgttttaaaaagaatttagcacacacagctacatagtatgtgaaacctgaatttgtggattgattttagttacaaactcataccgattgcaaattcgagtcacttacatgcaaacacctcaatgctttatccgtgacatatagaaaacataacatattccaagtttaaagttgcatcatttagcagctcgaacctactt

SEQ ID NO: 147917 - DNA, 419 bp, Zea Mays
cataaatcggcactttaccccgatcctccgatcgcgatccaatggatgaaaacacgccacaacacccgctaatccgcaccacccctacgagatccaatggccacaacgtggccctgaactagtacaccagagttttaatctgagtcgtccatcgctagacatatggtttgcaagccctcatctaccaccagcaccccaacgtagcgctaccacggcgccgccgctgatccaaggccgagacctcgccggagatgcgcccaatcgaggttctagggcataatccgaattctaccaggagtcaaagagggtgaacgtggtcgtgaacatgacggggtggcataccagtgcacagcgtgaccggtgccccatccgcggagcagctacgacggcgatgcttccttcccggatctcgcgttgcg

SEQ ID NO: 147918 - DNA, 532 bp, Zea Mays
acagggattttagacctcggaggctcccgatctcgggtgcgagagttccagccaattgccggcctgttaagttcctgtgcatgagaaaagaaataagaatccaatgtgcatgatttgtgtaaaacgtgaagacacaaataaacaatagcagcaaatcaaatcggcacagcagctctgtaaaaagttcatgctaactacaagaaaggaacaacataaattggttctttcaattccttcctctgttgtcctcttaatggacagaggtagcaaactattagaaacggaagttcaaaaatcatcaagagatcattagcgagctattaaaatggaacttcaagaatcatcaggaggctgttcatggcatcaatctggatggaaataaatgaaaaccacacttacagaatctctactttatcgtcaaagcatcgcacgccagaccagctgcatgggctgctgtccatggggtcccaatcctggaatacgccatggggatcagcttccaccctcaccttcagttccagcaacgccaatc

SEQ ID NO: 147919 - DNA, 845 bp, Zea Mays
tacctgtgtccaccataaaaggaacctaataatgcgagaatttgagcgctctaaggcccgtcgaattggtagaaacatgaaaaacagggcactgaatatgtttggtaacatgtaaagggcaacagcataattataaattgattcattctgcaaattttgaatccaattgctgagaaacttcacaaggcctgtgggattttgaatagagcttgagtacgtagtaggaagaattatcaaccaggcaacagctacagcaaattttaggatatatcttatcctttgtgagcactccaggctcttccaagctttccagttgagaattaactctagcgtggctgaaaaggtttaaagaccaatttcagaaatcgtattgcatttgaagcaagggccacagcagcaacagatagtattaagactccgcatacaagtcaagattaataaaaacttggttaaataatgcagtatgagaaaaaaagtaagataacaaatgcataaagcccctggagtcagtctgtaccttgaaggaagttcagaaatgccgctgttataaagattgtcaatacatttttgaaaacatttggttcaaatatagaagaaagtgacccagaagggctccaggcaatgattaccatggcctgcaagagaagaaaaacagattatgtggcacacactggaaaaatgaacacaaaaacttctgtgcagggacaaatgccaccattacctggaaccccaatataaagaaggcccacatacgatcaaaacttctgaacatatgcaaaaatgtacgaacttcaacaaaatttgtttttgatgcccttcttctcctaatcacgtgaccatgttgc

SEQ ID NO: 147920 - DNA, 1065 bp, Zea Mays
ggcaaacattgacacgaagttgcactcgcacatcacatatattctaactacaagttgctgagtatgtaggcactacccaagtagtacgtgacgtccatctccaaggtcaacgagctagctaggtgcctacagcatttctgattttctggcctaatgggccgggttgacaaacgcattacgcatgcatctggttgtaaacattatctcgggagtccgtccgtccgtcagcttttttatttcggccggatttccactccattcgcgtatccacaggagcacaactttcctgtggaatggttccttctccccgcgaatcggccggtagggcacgcctgcggcatggaattcgacgcatcgaaaccatgatcagatatggagcgaccacggcgtgattcgcgatcgcagtaaatcccgcggagcaccagatcagatcgtgggccccccgtagcagcgacggattccccgtgaaagaagcgtaattgtcagatttgcatcttccatcacctgacggatttccccacaggccacagccagagcccatcttttattattcctgtgaccacgaaaccattcgtcatccccgatcacgcgcgccattgcacaactcagtcacaggagccgtgttggtcgtccatggcactgctcgatctgcaggtaccaccacaccactgcgtctacgtacgttctccgtctgaatactcgcatctcccgacgggttcgcgccactgcgttgcatgaagtgtagtgtgtatatatacggtaccggttaatgcgtgtaggacagcctttatgaggcgtactggcgagaggatcagtacgctatggacgggctggtttgttcattagagatccacgctcgaattcatcccaacggcctgtacagtggctgcccggcatcgcctccttcaatggctgataaagttgtgccagtacaggctctggagatgcgccgcgcccgtcgagacggcgagctggtgtacgagccatgccactacgattttatatggagtggcgtagaaaaggagagggcggcatgtgtccgtgcggtggttgtggcggtgcggt

SEQ ID NO: 147921 - DNA, 560 bp, Zea Mays
cgcccagctctagtcgacggcgaggctgaggatggagtcatcgacggagccgaagatccagctgcgaacgcagcagtccgcttgatcccagatcgggtcttgcgggcgtgggggagcagagtcgttgatgtggtggcgaaggaggaacttgccgcacatcgatttgaagaaggatgcccatcgggagtagttggaggctttcatctccagcttggtcggtacatgagattgaaccgaaaccgtggcatacgagggcaccatgagctgctggatggcgccaaggttggcgctggcgcctaaggtctgctcagacatggaggagaggaggggtgccggcggcgtgagaggaagcagagagcagcggaaggaaggccgggatcgaattgatcctggtcctctgataccatgtagagagttggtttaggggaaagcaccgcacactcaatcaggtgtgtgacttctcatatatatagccaagtggcttggtgtacaaggatacaatctcctaaactaggaaggctgtcacctatacaaggtaaggctaaactaagaaggttgtc

SEQ ID NO: 147922 - DNA, 659 bp, Zea Mays
ctttgaagacccatttacatgtgataggaacaacatgcgagggtaaaggaacgatatcccatgtaccagtgcgttcaagagcaaccaattcatcaatcatagctagctgccactcaacaatcccagaagcttcctgatatgtagtgggttcaacaattgccacagcagcccgtggaaaaccatagcgatctggaggttcaatgataccacagtcacgaagacgatatccctgattaaaaacatcattagactcattattgttagtacaagaatcaggtacaagatcagtatcaggatcagtcgtagaaatagtgcgggaacgacgaatgcaggtttggatggcaggtggtttggaagagtaagaagatgacgtggaggtggaaggtggtgttattggaatgagaacatcatatgtggatgtagaagatgatggtgcagatgcaggaatggaaggaagacacttgaaagaagtaaattctgtgggataatatgatgagtgagtagactggttgtgaaagaaggggcgattttcattgaagcatgtaaattttatgcacaaattacttggcacatgttgtggattgagtggaaaagaaatctatttaatttaaggttgtaaatgttgaggattgataatagatagcatgtcaacatccgat

SEQ ID NO: 147923 - DNA, 404 bp, Zea Mays
ctgcttgtacttctcagggatgcaacggaagagcttctcggcggctctctcctcatcgtaggtgtcgtcgccgaactgcaccattttctacaacaaagtgttgaggcaaagagcaaagtcatcaacatcctcacctgacttgaaggccaagttctcccactccttgcgaagtgcatgcagtgtggtcttgcgggcacggtcgttgccgatgcgggtcgcagcgatggcgtcccaggcttccttggcagtccgcttctgagaaaagcgaaaactgcatctcgggcgggactgcagcaatgagggcatctagcgctcgtcgatcctcgtagtagtcgatgtcgccgtaccgaactgcttcccacatgtggcgaacctggagccgtaccctcatcaccgcggcccac

SEQ ID NO: 147924 - DNA, 280 bp, Zea Mays
gggggcgggattggataagagttggccaataaggtaggattgttttgttggagcagagactgggattaacgatgtttttccttgtatttttcaagcttataacaatgttaccgcaagtgaagattttcccttgactttcgtttctgtaatatatgtacacttttcttccaaagtaggttactaaagctagcacattttgatgtagaaacatgatgtgcacctctagaaaaggtttgtgatacctgaataattttcatttgtttgatcacatttaactcgc

SEQ ID NO: 147925 - DNA, 546 bp, Zea Mays
aactgagatgagaacagctagtaatgcatggattacaggaatatcaaatgacggcgacaaagatgttacttgagagaaactgatgccattcacgcagaagggggaaaatggccatccacacgagatcatgtaagtccaacgtgatcaacatgaagcctattcatcttcaggcaccctcgaaagccaatatgggtgaactatcttgcatggccaaatattttcaacgtccctactggcttttacaacatcaacaacaccaagatgctcagccttgcgaaggtatttccgagcaactatgtagccatctatgaagccaagtcaagagttgtacaagctaccgtcggccttggatctatcttcatagcctctcgagcgtggtagaaactctgagaacataaaatcccgttatgtcgacgagcttcagatgggagtgaacataaagtacatgttcacttatatgtgaacgggaaaccccagaacctttcttataaaccaacgatctgaaagaaaacttcaaatacgattccagtgcttggacaatctgct

SEQ ID NO: 147926 - DNA, 694 bp, Zea Mays
cttttcttggtttctcctccttgctcctagttctaggagcggacttgtcggtgtttcgattctcgctctgacaagtaaatttttttacgcgtgttccgagctctggacggtgtgtgcaatgggatcaagatttctgctagttcgagcataacgtccctacatccagccattggcggcgtgcgctacgacaccattgatcatcaaagctcgtagtaggggttacaagcaggcaagagagagagaggagagactcccaagtattttattcatggtagaggtggttacaacgtggagtcctagctaagtctcggcttggtgtcggggctccagcctccgggtcctccgatcctcctgttcgtcggacatctgggcatcgtctcgttaggatctatccttgaggtcgagagcactccggggaaaaagaaccccttctgtccggggcctgtcctcctccttttataggctaaggaggtgggggtcggcccatggtgtcttcctcaggaaggggtcgtcgggtgatggtaaaaatgagcgttctaccatagggtaaagccatgtgtgcatgtggttgcctggctgtttcgtattatttattgcggacacgcgggcagcatggggcccgagcacccgtggcgaagccaccaggagggccagggtgggcctggcacccccaacggcccaaccaggtcatacc

SEQ ID NO: 147927 - DNA, 1457 bp, Zea Mays
gggaaacaaaaagaaacacaaatgtagcagagtgaaaaatgaaacgatacttttgtttaattttgttggaacattaatgacctttttgtaagaggaagaagggttaagatccaaaggatttagttcaagtttgacaaaaaaaaatcctcctctttcaagcaggtcctaagaggcaacatatcttttcctggaatacgcaggagagttgtgtatcattgcactaaaaagacaaaggcgcaaatagccaaacaaacacaaacaccgtaggaagaaaaaaaaactaggagggaacttagagcctacattctctttcccaaatgggacagtccacgatcattgtttgatagaagggatcgaattggttatcttgaatagtatgatgcatgagaaagaaagaacattttaaaaatatcacatcatactataaattactcccatcaatgaatacacaatgcaggacaagctactcttgaaccaaacaggtgcactaagaagagcacatggcataacaagagaaacaaataccatagatgaaagagcttgtagcccagctgcatgaagaatgcatatcttctccttttcacccatctcttgggccagatgacatagtttaggaatctggttttctaaattgaacatgtaagtactgtcaacctacagtgagaagttaataatccacgagtcaaaacagtctaaaaagagactaataatgaatgatgcatccattttgcagattgatgctacaagaatgtttaaatacctgactatttataaagtcaaaaagtgtttgacatgctaatttccgcaagtcatcctgtctattttgctccaataatgtctctacaattgttagcaagctgttggcaaaaagtggcctgcaaatcaatggcttcacccattacagtaattgttcatgtttataaactaattcttattaaagttccaataaaaatgagtaagagcacgttatacgaaaaagaactaaatttttgctccaagtacaaattcaaatggtgtcatagagcaaggtccatcaaaattgacaaaaacaaataacaatcattgaagaaaaaattagaaactgtcagaagagagcaaattataacgctttgaaactataaatgtgtggcatatgcaaaagagaaaatgcatatatgtttacaagtagaaaaacttacaactgctcctgacaagaacatatcacctttcgatagattgccataacaactttcactgaaccatagcgctcagccctaaattccttgtagcatttttgctctaagtaaactgtaatctgtaatgggacttcacgatggttttcataattgaactcatgttacacttaaaactatacgggcaaagcataaaaggaaataaacctttggaacacgcataggattccttgaaatatattcgcacagtttccctatcttgcgatcatttggtccttcatcctg

SEQ ID NO: 147928 - DNA, 635 bp, Zea Mays
cagccacgacccctccaacctctacccatggttggttggagaaggagagaaagaagaagaaagcaacaaatgatcgaaggatgagtgaagagaacaacggtgcaagcatgctatttatagaggtcggggtaaccgtccacttcctaccacgctcgccgaacagtcgcaagtattcaataagcaattcaagccgcctgaaaatgagtcaggcaacaggcgccgcttcgcgtaacacgatgacatttggaccaaggtcaactgctcaagcaatatgattacaccacgcggtcacatcaagttactactccaggacagtgtgctaaacgttctgcataccaagagaccccttgggcacacccattgggtgtgttgccaaaaattttcaaaagattttctgaagaagtcatatccatacagtatacgcaatgaatgtactacgacaaaaggaagagatcggctgagatgggaggaagtccaaatatagctactgaaccgcaagtctaatcagcagaggcattgaagcacagagcggggtgatgtccagccgagagccatctacctccaccagctagacgtccaatttgtcaccaatcaaattaattttagacctaacaaggcatggatagataacgttg

SEQ ID NO: 147929 - DNA, 605 bp, Zea Mays
gagagcaactgcagcggtgggcctccgccgccggtggcgccgcatgcgcttccttcttttcacatgagccccttctgcatgtaggcagctagctgcacggctgcaccactgatcgacaggagcaaggggcatagttgtcattagtgctagcttaagtacccaataatttctgcggcgatgtcttgtaaagactttgcacccttgcttggagcctttggacgcttgggggcccgtatgtaaattgttttggtacgccatgcagcatgctgatcgatgcggcccagcaagtcgagagtgcgtcggtgattagtactacgtcatcagtgctgcgctggctttatttgtctgactaaaataagtgggcaaataaagactattgggggcatgcatgcatatatgcgtactacactggagtctggacaggcacatgcatgcatgccactgatcagaacttagtagtatatcgtcatcggtgcagcagctagctaacttgtggtcagatctttgtttcatgtactataatttaagaacattttcgtcctgattaattagttccatcgtgtgcaaatagccgtattggattttctctccgttcaaccctccgc

SEQ ID NO: 147930 - DNA, 933 bp, Zea Mays
attgtatagcatcatattagttattggaatatttagttagaaaaaacaaggtgtgatttatttccttgttcagaaatttgcaaacctaaattaaatagtaatgcacggcatagatgcaggtaggcaactgatctgatgaagtaaaaattgtatgaagtacaaccatagcaacttgaaacactgactatagttccattaattaattgtcaacattctaatctcacatttgtccatgccagttgccagtttctatcatttatctatcggtataagtcccccctgccaaacaggctggactactcagcagtgccataactgaaccaactcaccaggcacactaggacactaggcatcacaattcacaacagttaaccacagtaccatgaaattctgcacacgatcacatgacaagctaagtttcagtgatcaaggacaaccccagcctgctaagcagacgaaattggcatgatcacccaaccgctctatctcaagaaggggcctaagctagcacggcaaccaccgtagcccgagatcgagatctcggtgatccctcacacggacacacggtcatacctctgcctcgtcgacgcgcttccagcttctgggctcctcatcgtcgaagtccccatcgtcccgtgacgcggccctccgcgctccggcgcgtccacccccgcccccgcggggcggcggcgggccgcgggcgcggggattgtcgtcctcgtcgccggaggagatggagagcagctcgacctccgagtcgtcgtcctcgtcgccgccgcggctgggctggcgcgccttcgctgcggcgcccccggccctggcgttgccgccgcgagcattgggggcgggtgggcggacgaggttgacaacgggcttgttggcggcgggcgggcgctggtggctgaggtcccgcgccgcctgctcctgcagcgc

SEQ ID NO: 147931 - DNA, 334 bp, Zea Mays
gcagaatttcagaaggggagagatggcagcagcatatactcaacccacaaagtgtttgtgttcaaggaaaacaaaaccctacaaagcgatcaatctgtagggtgttctttccaccgaaacactggaagaatatccttaagccctttcaatttttgagcacctgaagcaaatatgctcctatagtcctatatccatgatagctagacattgagcatcaagagtcttatgttttaagcctggtactgctgattattactcaattcttgaaggcaagatagacacatatggcttcaaccctaaaagtgttccgtgtcagctcaacataaactcctag

SEQ ID NO: 147932 - DNA, 710 bp, Zea Mays
tgcgagtcattcgacgaatggcgcacagggattgacggcaccatcgacgacatatgcctcaaagttaagaagcgacccaagcatgaggaacgggcggtgatggatctggctacatcttcgaacccctggtcaccgcgcgctcacctaccggactcacgatcgaatggccccgcatcgacaacaaccaccgggcggatggatttggtgtcgttacttatcaccctctatctcccgatcaagggtgcatactcacttcccgtgccccatctccaaattccgttcaccctacatagcatgctcccgccagtcatagtcatgagtacgatttaggggggtcagagtcttcattgttcaggcataggtcgtctgcccaaactgaattttcctatgtttgacggggcacatccaaaattttggattgctcgttcacaggattactttgctctgtatcgtgttgtgttcatgcatttgttaggagcagcggcttcttggagccaaagcaacttaggaccggttcgtggtcctagttttgtcagcggattctcgatcgctttagcaaggagcaccatggactgctcgttcgccaactgcttcatctcaagcagacaaccaccgtagctgattacatggaacattttgcttcccttgtagatcaattaactgcttacaatggctctcatgaccctatctgtgatacccctggtatctcg

SEQ ID NO: 147933 - DNA, 610 bp, Zea Mays
ttcggcctcgacgggtggtaccgaggcatcgaaggatcccgccgcgcacatatgtggcctcgtcgtgcgtgaaccccgggcgggagaccagcaatttcacgccgatgctcaccctgtccaccaatccatagcatgtcgtgggcgggcatactcactggtgtactctcggtaatatgctattgatcgcaattgttaccttccaatcttcgcttggcagcttttgggggatcgattaggccactggttcgtcgttgtttggtgcgccggcgaggtgccgccatggagattcctgttcaccgtgatggttgaccggtgagcaaggggatgggtctggtgccattggattgttggtgtgtggctgcatttggatggaggataaggcttcggccgggaatatctgtaccgtctgatctaatcgagcggttggtgtgagatgtggcgtcatgaaaatcctaaccgtgggtctcgggatcgacggtctaaaatgcatgccattttgatgaagctctaatctaatccgagccgcatttatcatatcctacggctgatactgggtgataccccttcggcccgccccttttgctaataagcccctgcacttaccagaaac

SEQ ID NO: 147934 - DNA, 448 bp, Zea Mays
tgatctctaggattctggattcactttggagcgactagctagaaagagtagcatgtttgttttcctagctctagttgtctttgccgcattcaaaactcttcagtttggagttacatatagataaaggcaatcatccgtaacctatcatctactgcctaatggaatttttttttatttctcacactatttccccctcaagttgagatgtcctattggcaagttgcacattcttataattaaacccacccagtggtaaacattaaaactccaagttgtatcgccctaaaatctaaactggcagtctgcaattcacctccccgaagccctagttccatttccttagtgatcacctactcacctattgctaagccccagaagcaaaggggaatcaatcagcgccaacaaaccttacgaatcaaatggtggcctggagagcacataggactac

SEQ ID NO: 147935 - DNA, 637 bp, Zea Mays
cttcctcaacacgccccaaggcaagctagtcccttgcaacctctcaacccataatacctaaacatagcaacctctctctctccaccctgattgcgcgggaacaacgacgctggaatgttaggcgcatctcgtagcaccaccaacagcacggcgtcgagatgagcggtggtggcgacggcggcgacaaggaggccttcttccactgcctggaccgcgtgccttccggcctgcacctcgacgccgatttcccttccgatgacgaagaagacgacgaggatgacgtccgcgtctccttcacctctgccgccggcgaccagcatttcaagagcttccggtaccaggcggccgtgccggtggaggatgacgaggatgacgacgacgatgacgacgacgacgaggacacgtccaagtacgacatgtggatgtccgacgagcccatgtccatccaggagcgccgccgccgcctgcaccaggggctcgggatggccagcagccgggacctcgcgctgcgccggcacagcatgaagaaacgccccgccgatgtcccgcgggccatgtcccggagcgtgtcgaggtcaaagccaccgccgtcgccgatcccagccaatgcggcctcggccgccaacgtgccgagcac

SEQ ID NO: 147936 - DNA, 572 bp, Zea Mays
gagtcatccaaaacctaggccttgtttggtttgttgggaatttaaagggattaaatgtccaacaagtcaaagtgccccttatccactccaatctccttggggaggtgattaaccgaacaagcactcgggggttttgtcataggaatgggatcctacctaataatataggagttgcaactattagaggaaagcaagaatttaagagttagtctcctcgtggcgctacccaatgcccaccaacacaatgttggctctgatgttgtcacatccttcacctattctacgtgtcaacacttcccatgaaatatgagtcatccatttcccttcagttgtgttttgcacattagcaccttccaagtttggtcatgtattcattttatatgttccaacttgtcatgtagtacaatgtgaacaagaaatatgttaacatgagataatatgtactaccatggtttgcatagataaaaaattgtattatacactagtaaatctaagactgatttggatctgttgtttatccttgtaataataatggtgctaatttcacatacatgcatggggcttggaggtca

SEQ ID NO: 147937 - DNA, 564 bp, Zea Mays
gtttcacgccgcacactagtttctaacatgcttttcacataactcataattcaactactcactaacaataaatcacgcacgacaactaccacatcaaccgatttatttatttggaacaccgcctgcctagcgtaccactagttcccacaatttgattcaagctcaacaatacaaccttcattcgattatacaacagcgacctaagcatcgcattacccaaggcatacatccttcctcgtcgcgagtataaccatatcactgcatatacccacacatctcaatcaaatatcttacgccaccaccactataatacaccacggcacacacgcacatacgtgccccaggttacgcacaaggcatcaacaacatagtgactctaaccggattaatcaaactcctcattcgcctcgactatcccaatcatcgatcacatgcataaaacaagtacacttatctcttatttttgcgcaggcttaacacctttcgggataaagtgttactataaacaccttacacatatttgccttaggaacctatcagttcactcgaagacatctattcaag

SEQ ID NO: 147938 - DNA, 312 bp, Zea Mays
gtcgcggtcatgtgcgccgttgctgctttctgaggtgccgcctgcgcgatcgatgaggcaccagaccccgcggtggagataggggacggatcgcagggcatacatgcatgcgcgcggcgagcgatgtaaacgatgcatgtcgtggaggggggatagcaatcagtggtattctttcaatacttcctcccaatcggaccatgtttgctctgcagactgcaggcatcgtgcattcaggtactgatttgccccaaaaggatgcacgtaaatgatcgggtcattcgaacctcgagcatggatggatgaatatatggg

SEQ ID NO: 147939 - DNA, 401 bp, Zea Mays
ccgagagatcctcggctttcgagcaacgtcttccttctaccttcccaacgtggctccatcaagaggacaacgagtatgttaccttttacgcccaccttgttggagtccactttccctctcccaatttctctacaccgttcttgattactacggtcttcagcttgaacaccttacgtccaacgtcgtgattgtcatctccacctttgtctacctttatgaggcattcctcggagtgaggccttgcatcaccttgctttgacatatttttgttgcttgcacttcttgtggccaaaatcccttaggaaggtgtacttttagttgcataccgggccctggtgtcttttccactacatccccaccatctttttctaggaattgggaatgctagatgacctcttggg

SEQ ID NO: 147940 - DNA, 349 bp, Zea Mays
agataagtaaaacaccactctcaaattgagatagaagactgaagattttagataacagacgtaatgtaatcacaaggcaggatagagtgatgagaagggtaaaggaaataacaaacagaaacacaacaaaggatagagctaaaaactcgcaggtgacaaagaagaggatacgaccaagggaaaagtaggtaaagtacgatgctgaaattgagatggaaagggagaagattttaaatgccggtataagataaacctcaagtaagatatagaggtgtctaaggtgaaggtgataataacaaaagtcatgacaaatgatagagttaaggcaagactcgcgtagtggcaaagt

SEQ ID NO: 147941 - DNA, 902 bp, Zea Mays
ctgacaagaagaaaggtgtggtcggggtaacactctttggcgggccttctacaaccggtggacgggtagcatcaccatgctcctggcctggctcctagcagccagcagcaatagctgcgccaggtgtcctaggccatgatggcggcgtttgtactgtttggaccgtctgacatacttgtctcttaacccttataggcttcaacattcccatcacaaccgcctacaccgccaagttgaactccatgaaccgatagctgggattagtaaattcttgctaactcgtttagcactatggctctgcatccacatgttacgttcatcaattgggtggccgactctggcgcctccaaccataccaccaacatgtcggcaacatctccctcttctgctcatctaattcaactacaccttcatctattgttgttggtaataactccatcctccccatcacctcaacatgtggcgcggttcttcccgggccattctatctcaacaacattcttctcaccccttatatcatttagaatttcctttgtatttgttgcttcactattgacaattcgtgttctttggagttgaaggatctcgttacccgaaacatgatcatgaggtccaatagctctgagcctctgaccctttctacacacaatgcctctttgggtctcctgccccctgcgtcatgtctgttgttgctgcgtctacctggtatcgtcgtcctagttaccctgtctctaatgtgttgtctagtttgtctaatgcttcaactgtcaagggctccaatgcccaagacagcagggccccgactacggagctcatagtcgtggtcagcaaaggcgccgaggattttgcccggtaacccaattgtgaaggaggtgagattggaggaacaataagagaaagga

SEQ ID NO: 147942 - DNA, 584 bp, Zea Mays
aaaaaagtctttagtttgtaacgatgcctactctgggtattcaacatgaagtgtgttcactagcaacttatttctggtaacactatgatattgagcccaagctactcttttttccgcaacgacagagccaaatttcattacttgacagcaacaaaattacaaaagttagcatccgaaatacgcaaagaccgagcccacgctgctctaatattttgatgggttgtgcaacctgaagcctaaaaaactatcttctattcaaaattcatgaaattcaacttgttatgcttttcactattttgcacgttcagcaggcaaacaactatgcctgagcctgactatatgtcttattgtcctctgttcttaatgtgaattgctcccagcgattgagtgatgctgaattcttcactgcatgttctatgatgcatacaagcaacatattcagttgaagcctgtttctaatgctatgctcattaagcatcaatagttgagcattgaagtgtcttaccaaagcaactaacttgcctatattaatattgcattgctcctatataggatcatctcctactttctcctcacaattgcaa

SEQ ID NO: 147943 - DNA, 542 bp, Zea Mays
gcgggttgatactaaaataacatagggtttcttatgaaaaagtgcctggccgaaggggtatctcaagatctcggtcattggatcggacgcgaacggtgtggattagattgattttatcacgaaccggtatgcaatctagtccatcggatcaactaccaacggtgacgattttaaatgagcttgatccgatcgtgcccctgtgttgacgatccaacggtcgcggaacacacaaccctaaacggtacgctgggcgccatcgcagccacccgagacggatcgaacggcccacgagccttcttccctccccagtggatcgtggcggcggcgcaccagagtcgcgcggcggagagcctccggcgagtgatgttccggtgcatagatgccccaatccccgttcctaagggtgctacgtgaatcgcaaagcacaggcagcagggaggtgtgattctcaccgacggcagagactcggtcgatgcagtccacggcggagggtgagcccgcggcggcgtaggaacaccggtgaggaatcgcgtgcaccccgg

SEQ ID NO: 147944 - DNA, 351 bp, Zea Mays
taattgaacgaacgcataatacgcatcgttacgattcgacccataaatatagagaagcgacgactactttggcatgtcaccacctctctatataagccaaaacaatttctactatcaactaagagttctaggtattaagcacattattactttccacgcgcaaataaacctcaacttaacacaagtgacaccgatagatttttactaactcgtcaggcacataacccggtctcgcatacaaccatattgtgacgtgcactcgagacacttcgatcaatgtggcgcgaccactaatatatgaaccccgacactcatccttcacgcaaactagcattttctaaactactcgtc

SEQ ID NO: 147945 - DNA, 283 bp, Zea Mays
gagatgtgatttagaaatggtgaatatcaaagagcagtgtttaagagtacttgtgactaggctgtgcttctttctttgtacacgtcatgcagctgtggaggaataccaaggcctgcaggagtggttccagatggagacggagaagtacacggctctgatacaacaccggcacacggcggagatcgaggcgttcacggagcagctccggctcaaggacgagaagttggaggcgttccggtggcgcgcggtgagcatggacgtcgaggcggcgcgtctccggagc

SEQ ID NO: 147946 - DNA, 1579 bp, Zea Mays
caagagacggagtagaaggccttggtgatgtctaacttcagcagtgccctcgtctttttttgttgatgaagtaatctggcagtctattgtaccatcatgaagttgtcctgaatgaaacgacctttaataaaagcgcacttccttagggagactaaatcatgtaacttttgggacaatctgttagccatcagctcaagatatctctccagatctgcccaaatccaagtttctgaaggacttcaagcaagaaaggccaagagacggagtagaaggccttggtgatgtctaacttcagcagtgccctcgtctttttttgttgatgaagtaatctggcagtctattgtaccatcatgaagttgtcctgaatgaaacgacctttaataaaagcacacttccttagggagactaaatcatgtaacttttgggacaatctgttagccatcagctcaagatatctctccagatctgcccaaatccaagtttctgaaggacttcaagcaagaaaggccaagagacggagtagaaggccttggtgatgtctaacttcagcagtgccctcgtcttttttttgttgatgaagtaatctggcagtctattgtaccatcatgaagttgtccggaatgaaacgacctttaataaaagcgcacttccttagggagactaaatcatgtaacttttgggacaatctattagccatcagtttggtgacaagtttagcaatactgtgcactaaacttataagtcgaaaatcttttacctctttggcaccttccttcttaggtatgagagttacataagctgtatttagcctaccaaattgcccaaatttcctgctcgaaattgcagaaattacagccatcaaatcctctctgatgattggccagcacactttataaaacctttctgtgtacccatctggtcctggcgccttatctgatggtaactgctttataatttcaaaaacctccttttcagacattggtgcatccaaatcagccaagtcatgagtgggtaatcccaagtagtccaggtcaactgttatggatctgtccaccctgctgcccaaaagcttatggtaaaaatcatccaccactttgacctcatcatgatcagtgtatgtgccactacccgagacaagtttgacaataagattattccttttttctgtatctagcatgcatatggaagagcttggtgttggcatccccatcctttagccaattgattcttgatctaattcgggcaatggtgcgcttgagggaagcaagggctagtgaatgcttcttaagacccctcataagccattcctccaatggggacatgattcacatatcttgagcaacttcgagttgatgtaggatttctcttgcaagtgccaactgggaagccacatgaccactcatctcctaccacaacccatggatcatgacatgcacttctgatttgccttaactcttgtagaaaaaagatatcttttcatcattactttgaggcccatacacgcaagttaaccaccagggctgaccattagatttctgaaattgtacagagacactataagcatccactctacttaaac

SEQ ID NO: 147947 - DNA, 431 bp, Zea Mays
ggcccatccggctcaccactccactggcccacgctgctcacacacgcgcttcccttcctgactctgcctgcggggcccgcatgtcagcgattttagttgatgtccgcgtgcacttgcgttctttgcgctgtcgctgccgcatggggcccgctcgtcagacttatctccctcctcacaacaacctccgctcaacgcgccgagaactccgagctcctcccttggtcggtgcgttcccatagggattcctaggcagcttcgggctcttgggggtataaatcctgagccgaggtgcctcatgaccatactcatcgggtgcctcgcaagacatacacgttgtggtgccgggtcacagtgcttccatcgccgagccaagcttaccatcgccattgttgactatcgcgagcgcctccacgggagtcttcctactgtgt

SEQ ID NO: 147948 - DNA, 666 bp, Zea Mays
ggcttcactgacctaaagagaactaggaacaaccattaatttgacaggaaacccactgggagccgtctgcccacgatcacggcggacaccaagcttgggagcacacgttcccgcctcaccatggtcgactagagcaaacggacgccaccgtgagcttcacaagcacacagaggcacgaaaacaacacatggattgaatagggacttaccagaacgagctggccacggagcgcagagctctgggttcgccggagacaaagaaaggggaaattggtgtcgcggcggctctgggtgaaatcgggagatgggatttgggctactcggccgtaaagaaccactgattccccgcgtacaaccaatttggagagtgggagaggagacacgacgaattttggtttttacccgagctcacagaaaaactgtgagtacctcgccgcagctcccagcgctatttataggcacgacgccctggctaactatccgcggtcacgaaacacgttgccaacgcatgacgaccacgtagtaaaggagcacagtgaggtagaattgagatgcgagtgacacggcggcggaaatgactgatgcggtggccgccggtgaatcactccggctgggctagggcggtggcaccacgtatgggttgtcctgccccgacgttatccattct

SEQ ID NO: 147949 - DNA, 521 bp, Zea Mays
cgctgttgtacccctagtatggtattccatcttgtccgtttggtacatgagtccctatggcttgcttggtgtcagcgttgtggtacctggcggattccgcagagttggcttatggtaaggttcgaggttgtgtctggtaatgtttcatcttctgtcataccccttgcatcattatatatcaagcatgcgtaggtatacgcgtggtatggggtattgtttcgtcctttccggcgtatgggttattgtagagactccagtgttgaggtctccgtgactggagttgaccggccccatgagttagcgagggcacttccgtaggcgcatgtgggggtgttccatcgagtctgcctgaggcctttcggtactgtaggtacagtacgatcgtgatttggtgattttgtgtcttgtcgtggctgtcgtgggccgacaacgtcggcctggattccttctttgtgaccctgcctgatgggggtttggttgtttgccccgcctcaaagacttgtttggcggggacttggtcg

SEQ ID NO: 147950 - DNA, 353 bp, Zea Mays
gggaattttgtcaaggcaccagtgatcaagatggataacctgtctgcgatttctctgagcaagaatccagtgtttcacaagagaagtaaacacataaaactgaagtatcattttatcagggagttcattgatcgaggggagattgagctggaagttgttggcacctctgatcagttggccgacatcctgacgaaagctttggcaaaagtgcgatttcaagaccttcggggaaggattggagtaatcaaactgcattcgactctgaactaagggggagattgttagttagtttcagagtttagttaagtctgcatctttcatttcagtgtatgtgaaataatagttggctgagt

SEQ ID NO: 147951 - DNA, 426 bp, Zea Mays
ggccaattcgatcccgcgcagcccatctggcgcgctcgcttaccagccactgccgtgtggggccatctggtcggcgtcatccgcatcttcctcgccacgacgcaacgcaacaaccagggagtaccgaacccagccgtaagtgcggtaaaacgccatgattctcggggcggatttgtagctgatagttacgatgtggacttcggcctcgtttccccctttccctggcatataaagctcctgtgtggctgcgagttctccacccgtgccgcgccgggcaagtaatatcatcggcgtcgtccgcggttcaaggttcgtggtgccctgccttagcaattggggtcgcgtgggcctgcccgtgggtgctagcgacctccccagccccgaagccgagccgggaactgcgcaatttctcgtcggtcgccgtcc

SEQ ID NO: 147952 - DNA, 331 bp, Zea Mays
ggggggcataccccaatgtctgaaaacttcttgcaacaactgagtgtaggatacatttatatatacaacaaattagtccgaaatcaatcattttctttccaaaacaaccttctgtcatgtcattttgttccgcccaaattaccacaaatgttctatttacctttttgtgacacacgtactactaaatatccctgcgtttgggtcaacaacttaaatcatgtttcctatggatatcgttctctgactcagcaaactcaggggaatgggctggtagtgtggtaccagcaaagcaccttatcggaattcttgtacaatcatgcttggtgtgaaa

SEQ ID NO: 147953 - DNA, 344 bp, Zea Mays
tttgatattgtatctgtgatcagggcagttagtaacatctttactcttaatcgggataatgtttctacaaatgcgcccaggtagatatctaatgtcattcacaactaaatagtagtttgcttgcatatattattgatctctagaactggaaagggaggctggtggactctggattagtttatttatatcatgctagtacacagtactacctaccgtacgaggtggagaatgtagacaagatcctgacagtacgtgtgttgtagcatgctgaaagagacgggaagtggacagtacgtgtgttaccatatgcaatgtatatatgtatgtatatatgaaaaatattt

SEQ ID NO: 147954 - DNA, 2244 bp, Zea Mays
agaaaaaaaagtctacaaacccaaaggcccagctagctagcccagcccaacagcaacagttttaggttcaaacagctccctccccacccgtgcagtgcatgtgcagccgctggtcccctcacgtgcagccgccggccgcagcaatctctctcccgcacctccatctctctccctccccacagctccttctctctcactccccgcaggtccccttcctcctctgactggctggctggggccgcacatcctcgtcgcagctccatgcgaggtccccttcctcctctgactggctggctggggccgcacatcctcgtcgcagctccatgcgcgccgccaccgccactgcgcgcgctgccgcagcgccctctgccctcgccttactcccgcggcaaggcgataggacaccttacgtggtgaggctcgccttaccactttagcgacaccttaataaccatgattcttattattttccactttccacatatagcctaactacacaaaataacatactaataatgtattgacatctgaaaaaactcagacaatatgcaactggagcacagaacatttgttgtaagttgtgactataatcattttatatccagttaatatgtacttgtaaactgtaaacactcagaatcttgtaacataaagactcaaacctttgtcctatctgaagccatcttcaattgaactgagaaccagtaatatgacccatcagaagcaaatgttttgatatcaacatgctcctgaagatgaatggcatcttatatattttacaatgcttcaagaagattagcaatagatcaaatgcaagcacaacacattgcataccttgttctcaagctcaaaaagcgatactcctacgctgtactgtgtgcaaccaccaacagccatagatattgcaactcgagctggactgaaattgttatcccttgactcagagcgcataccagcagatcggttcaagtaatcttgtggtgatagcatcacatagtctgtgctacaatcttcaatatcttccagtacttgcatatttctgtgcgacattgttcctcttctgacaagagactttgaagaatatttaagggaaaattttgaagacttagacactctacttagcgagtctggtctgctaagtgagtctgcttctgtgctttctgtggattccccttctactatgcgataacataatggaattgacgagtggttttttatccagtaagggacaaacaatctcagtgtctttggtgcagcatcactagcacctaggtcatgctcaacactaactcgtagtctcctaaaattaaccaaaaaaaagtgcaactatcaaaaataacaaaataataaaagctaatgcaccaaaagaaaatttaaatacaagctcaattaacataggaccctgtcttaagtttgcgtagcaaattaacctacgaccctgtgggcaattgccgacaatcacagtacatctacatggcatcctttatgcatgattattgcacataattggtttatattcatggtttgtaaatttttgttgttgggtggttcaggtatcttgttagcgagctagtgtactttagcgtgagcacatagtgatatccattaaagagacgatactgatgttctagaaaatcttagaagtttaattcacattatggtgtatttaatttgatgataagtcagacaatcatggaataatatcaggaactgaggtgatataacactgttcctcatttttgtagtagtcttaagaaggatgggatgacataattgcattaacttattgtatcatctataaacagctcaaatctgagttgcatattgttagatacagcagttacaagcaatgcaggttctctaaaaagatgacaccacaatgaggaaatgctaggccatgaccacacagctcaaaatgagaatcgacagttcaaaaagggaaacatccagaagattgatatgaaagtgctgaatcacagtacaaactgtacacttgcgttattgttgtaaaaatagtgaaataatgaaaataataacatcagggtccatgaaacttagaactaatactattactcatgcaaaacactggatcattgcaaaagcttccaaacctctggctctgcttctgaaccatccagaacgaagaaacatgttccaaggacaacaagtccattatcaatacagcatcctgaaagaaaacaggaaacaaaatattatagtacttcaatgtaagcatgccaagac

SEQ ID NO: 147955 - DNA, 868 bp, Zea Mays
gtacaacttggctgttgatcaatggaacttagggtgagagagctcttggttcgaggctctaaaccctccataaggatttatctgggggcaaaaactgggactaacagtacaatcgtgggagctatatggctctggctttagttcagtagagagatcttttctagctggttagaggttacctttatggcgcaaaaggggcttgccactatggatataggatggcctctgttcaaatgaggatagccgggaaggtattgtgccattttgaaaggggggttcctacatctaactgccgaggaatcctagcggccctaacttgttagacagagtcttgaaaggcttcatagtggaccctgttgaccttccttggaagtgggtcaagaggttggctgcctcggacaaaggggtaaaccacgactcatggggaaagtgtacatcctttgcagagtgtaaattattataatagccatgctcacggtcatgagcgacccgggaaactcacagaataatggtattgacaattgatgatgaggtttatttatgacaatgcttttatgatgattacatgtcttcattttgttcatgatcatgtgatcatgtggggataaatgggaaaatagcacattttgagaatagtaattctaaaatattgacttattaaaatgctaaacgctgtaaaccagtgtcatccatttgagtctcgtaaccccatgatatgcttgttaagtacgatgagtacttacgcttgttttactttcaactttggataaaaatcccggatgggtaatagatggcaatcaatatgaggatttccctgaggactactaggtttgggtcaaccagttggcagtccatgtgatgaagccac

SEQ ID NO: 147956 - DNA, 724 bp, Zea Mays
cagcgagcgagcgaacgaacatattcccctagattgctctcctgacactatcatcttccacctcccagcttcactctcaagcctccactccatcttcttgtgaagcttctcaagattctcgcatgcctttactcctcctctcactcactctcgccagcttgcttgctaaacaacctccaacgccgacgccaatgccgacagctcaactcctctaactagcctcccgccgcaattcacaagcgcccggagaaagaaaaaagaaagaaacattggaggcaccccccgatgaggccttcgccacctctgctcctgctcgtgctcctgcatttcgcgctcctgtccaccaacgccaatgggaacggcgacctgcgcggcgacgcgatggcgctgctggccctcaaggccgcgctcagctgccgcccgggcgcgctgcggtcgtggtcggtggccaatgccgggtccgtgtgcgcgtgggcgggcgtccgctgcgcggccgggcgcgtggtcgccgtcgacatcgccaacatgaacgtgtcggacggcacgcccgtgtcggcccgggtgacggggctcggcgcgctcgagaccatctcgctggccgggaacggcatcgtgggcgccgtcgccgcgtcggcgctcccggcgctgcgccacgtcaacgtgtccgggaaccagctgggcggcggcctcgacgacggctgggacttcgcgtcgctgcccggcc

SEQ ID NO: 147957 - DNA, 364 bp, Zea Mays
aggaggtgtatctttgtccaaagtgacgccagaagaggagacaagtcaaaaccttcgactttataaatggcactacttcaagcaaggtcgaaggagagagctttggcctacacgcaacgaagagcgaagaagagaaggtgagaaatctagaagacccgatcgacgaagcgagcaaagcgagtgaaggtgtcagtcaccacgacaagtcactcggcttctccactcccttgtcaagatccaacggtcgtctttcactactcccgacgaacctgcatgaccttcactttcatcgtctacaaactccacacttgtgcaccacagaccaaaatacatgttgcacaaatacactcacatcccacttagc

SEQ ID NO: 147958 - DNA, 1148 bp, Zea Mays
agctcatctcaacttccaaagctaccacccctagtaccaatagagccaaagacacaagatatacaggtactgctttctatcaaaacatctcaattataaatcttaatccgcaaaaacaaaactaacatgtacattgctatgtaagacctctggttcagaagcagcatcaccacatgaattacaacttatggagattgatcagactaggttagtgggtctactttttatatctttcttttcatatcatccagaaaatatacaatgttttgttataacatcttttaatctgatatgttatagttgctttgacaacgtcagagtatcatacaagagaaatttcaatgcaattgatgactccgacaaggtaactacttttcaacacatccgataatacccatatagatatcaatatatgtacttaatatttttaattaacctatattgctccttcttttacaggaagaaacacatggtgctgaccaactttcagtctttgcaaaaagaccaaagatgaagaacaattagataccttctacatagctactcttttgagaccttgcatctattgttcaatggaaatagatcggttgtggttctacttacgagaacaacaaaatttggcttctcgcaaccaaaactcttttgcagtatgtataaacatatgactgtttgcaagcaacgtagcagcagttctgttaagctcatcttttgtaatgacatatctttaaacatgctgcttttgatcaaaataacactcactatcaactctatataatcatatgatattgtctgatattagcattttatttctatggtttttattgggcaaacttttgatcaaaaattacactcactatcagctctatataaacatataatattgcctaatattagcattttatttatatggttcttattgggcaattctcttttagttaattttttctatgtagtttaaactattccagtttgttgtcacaattcaagtgacaggtccagaaaaaatatctacctatttgtaatttattaattgacttttcctcatattgtagaaaatatcagctaatctgctcacattttgatttgcatatacataatggtgattctgacacgagtcatgctatctaaagtactttattcattatttt

SEQ ID NO: 147959 - DNA, 319 bp, Zea Mays
gtctctgcggtttgtgctgatggtgcttaccagccgtgtttagaagtgttaggggtacccctaattacggtatccgacactattgctcttctctctcactggagataattaccgttatggaacaagagagatcgggtttcgaagaaatggaggcgttggcaatggcttcgatcttttggagatgtagccgacagacatgcgctaatatggacaacatacagtcatttgaggttgtcgacaccatttaattctctccgtgctcacgccatcaaaaacctggtgtcgccgttgctttcttgctcacgcgctctgcttgttc

SEQ ID NO: 147960 - DNA, 448 bp, Zea Mays
cacggtttgcatgtgtttggctccttgctcagggtttcttggacatcaagatgagacagtggctgaggaacctgatgactcgcagcattgccattataccaagcttaatcgtcgccatcatcggcggatccagcggtgcgggccgcctcgtcatcattgcatcggtacagttgttccaccttctggtgcatcgattattgtctgttcaattacataagcatcatttacaggatctgtaaatacaacttatcggtagtttaattgtatgaactaatagcaaattcattggcttaaactcgtgattgtatatagaaaatccttctggcgattggtctggctgacttgctgtaaattttgtgcagatgatactgtcttttgagctgccatttgctctcatccctctcctcaagtttagcagtagtagcagcacgatgggccaacataaaaa

SEQ ID NO: 147961 - DNA, 437 bp, Zea Mays
aacttcttatcactgctgctacagtagtcaataaagagtccgtggatccacgcgtgccggccacagaggatcctcccccgcgcgcggtacggtcaatcacgcgcgagccacctaatcatcatagttcacattcactaacccactaacggactaacctaagctaggttatgttaatgtagcaacagtggcgtcactttctaacagcaactctagtaattctctaaaatactctctaaattaataattgaaatagttaattcataaactctagggatagcagtctgccacgtgtttgaaacagccaccaacggacctgtaaactttcttggaaaaaaagcccagtggcatttgtattcttcattttctatatatgtttccacggtgactcttccagccggggtccagtccaacaaactgtatctgaaagattttccgac

SEQ ID NO: 147962 - DNA, 374 bp, Zea Mays
cgtggcgtgagtacgcctattaaatcagttgttggcaaccaacgccctcggttcaagcgtctttccagtgaagaattagcagcaaagcgggctagtggtgagtgctaccattgtactgaaaagtatactgccgatcacagatgtgcaaacaaaggggttttcttgctggaattaacagaagatgatgagggtggtgaaacattggatgatgttggcatctctctccatgctctcatcggtattgatattggcactaccatgaaactgtctgtttgtttgtatggctgtcagttagtggccctcgtggacactggttcgacacattccttcatcaatgattctgtggtcagccagctgcagcttcaagttgaacc

SEQ ID NO: 147963 - DNA, 340 bp, Zea Mays
ctgtatagtgacccaatatcactggacaaagagactgttgttagttgttcaaagcatggcacttcgaaggtaaatgcactaaaggttccagatcatgagattgggagtacttcactcgatgggtcaatgctgcctcgaggaactgtagacatgtgcctaaggaagtccatcaaccggtctagtgaaagttactgcatagatttcaaagattgtttagatggaaatgattgtagagacagccaacaagaaaccacgcatgacaatgttttaaggaagaagcaagaatgttccctgttgccagagactaaagatgagttgaacgggaaagctagaaaggagg

SEQ ID NO: 147964 - DNA, 685 bp, Zea Mays
ttacttcacctcctccttgatgttgcttcaaaatattagtcatatcgactaatcctatgttgtgctcctatatgcccccttgccaaaagtattttattctagtatggtctatacttctctcaatctattagatctgatctcactcttgtgcttgcgacatctttgtagatgccccctgaccatagcctttagtcttttgagactctttcctcttccattattaaattgctaccatttgacctctattccattttgttattgacatgctcgtatccttacatttttaatacccttatcccttgatctaaagtacttacccttgtacctctgttgcctatttaaacaattcagtttatgtgtccatgactttcttgtcttctgagatcctttcttattttgttgttaagtcactatctttcggcaatttatatgcccttggtcttagtatgctcgtatccttggaatcttgcatactcttatattcttatgtatgcttattttcataccccaataactgttcaagatatttcagttaacatgtccttgaccacccctgtttcttaacggtccatgagcgatcattttatgtcgcccatccttggtaatctcgttgttcctttataacttctctcgataatgagttcttacttcaaccattctattgcactcccacctatcttaccct

SEQ ID NO: 147965 - DNA, 419 bp, Zea Mays
gaaggatctggggtcgtcgatgcgtttatgctcggccaagatcagatcgggataggattgtcgtgcaccgtcggatccacggttgaccgctaggatttaaagctgcgtatcgttttgctcgggcagtctgagaccgtagatgtgagatcctgcggtagaaagcgattctgggttgcattaaacgcctaccgttagatcgggatcggagggggcctggtgacgtaccgattcataaggctcggttctaatcgtggccgttcatgcatgatctggcggccagattcagaccataccccttcgccatacacatttcatagaaaagaccccctgttactttagaataaacccgccatcctcattcactattcactgagtcttggtaagcttgcgccagagcccctggactttctgaaaaatga

SEQ ID NO: 147966 - DNA, 528 bp, Zea Mays
gttgcagcctcatattcttggactatgtctcagatggatgtcaaaaatgcttttcttaatggtgatttacatgaagaagtttatatgcatcctcctcctaggtttgatgctcccccagggcatgtttgtcggctctgccgcgccttatatggtctgaaacaagtttctcgtgcttggtttgagagatttatttctgtcatcacggctgctagcttttctcctagtgatcatgatcctgcattatttattcacatcctccaaaagtacgtaccttacttgtattatatgtggatgatatgttgattacaggtgatgattcagagcatatttctcgtgtcaagaagcattttagtaaggaatttcagatgtctgatttgggacctctgagctatttcttgggcattgaagtacaacagattccaaaaggtttttatctgtcacaatccaagtacatacaagatcttcttgatcgctctggacttactgatacacgcacagctgtgacaccaatggatattcatttacaac

SEQ ID NO: 147967 - DNA, 539 bp, Zea Mays
gtcgggcatgtagtattttacattgtgggcttgcagcagcattttacattgtcaattctcaagcttggtgcatcggtggggtatgactttatttatgagaacgtgggagtgtgaaaactctcggttatcttttttcggagaggatcttttactaatcccaccggtacatctactgttgcaaatctcctttgggggtgtcgagatagcgatggatcccgccttccttttgtcctaagctgtgggggggtctgagatacctcctcctgacttcctcagtgtgccgtgctgcggcccatgatcgcccccatgaacgagcagaggaccacacctcttccctttggtttcttgcatctgagaccacctgctttacgtgctggacttttggcttcgtgctgactgccttttgccaaagcattctggcccttgagaaaaacaacggcattaggtgtggttattgccttattgggtttaggttaggtgccctgcgacgctgcttttgtctaggttacacatgtgcaagggagtccaccagcgtgccg

SEQ ID NO: 147968 - DNA, 444 bp, Zea Mays
tgtaaatgtcacaagccttgccataaaggtaatgcctccacgactttagagcaaaaaccaccgcggccaattcaagatcatgagttgggtaattcccctcatgcctcctcaactgccttgagccataagcaatcactctgccttcctgcatcaacacacagccaagaccaatacgcgaagcatccgtataaactgtgaaacgcttaccgctctcaggcaacgctaggataggggcgtccaccaacttgctctttaatgactgataactgccctcacaatcgccggaccagacgaagggaacacccttctccaagagtctagtcaaaggcttagcaatgctggaaaatttggtacgaagcgccgataatatccagcgagccccaagaaactttggatttcagagacactagaaggtctcttccactccaccacaaccgcaacatt

SEQ ID NO: 147969 - DNA, 673 bp, Zea Mays
gctgtcgaatacagacatgactggatgctcggttacaaatactaataagaggctgtttggttatatgtttttggccatgatctatttacagtggtatctatttcctttcttttatatttggttggaccagtccgtaacgatttatactgtaaattaaatggatacggagccatatcttttcattaccactccctagctagtattataaatatatagcgttaactaactaaacatactcactttctgttacactgtaaccaatagcgttgggatgttaactaaccaaacatatctctaaccaatagcattaggatctattcactttacgttaaccactccctacaatgaactaaacatcacctaaatgtttgtgttctggacaatgtttgtcacgaatatttttctagatatattgagtaaaattaacatccatatgtatgacatgtataaccatcattgaaggatcttaaataagttttctcattgaaggatctggagaatcttcactgcctagaaatagaaataaacaagagatatgacggtataattttgacacaacaaatctctttcgaatagttggcatggcaaactacaaagctttaaacacatcattttgcactagcgaaaaattatctattcacgaagtaacattgctaggaccaaaagatgcaac

SEQ ID NO: 147970 - DNA, 419 bp, Zea Mays
gctggtatctgcagaggtctgtttctatcttcggcaagccaatgctttttgagagggtcctaacaattttggcctcggtacggtttcgaaggcaccttaacttcccttcgttgaccccaccaaatagcataactcctgatttatatccgcaagataaagcatgttttttcaattcttctttttcggtgtctgttagctcttgtccaagcaaatcttgaaagttgaaatctccttcctccgaaatttcaccaattcgctctttcctcttttcagttgctatattcaccgcagccataacagcttcttcttcagccattttcaggagtatattgtcaataacctcaagtgtggtttccaggttcgactcttcggtggtcccggctttggccccggtagcttcggcttcggcctcggtagct

SEQ ID NO: 147971 - DNA, 357 bp, Zea Mays
ccggtacctcgacgaccaggtggagctcgtcgtcggcgtcggagcccacgaccaccaagaggatcatgaacaagggtagcgccgaaagcgagacatgattcacatgaatagctagtgctactgctaactgctaagaagaggcatcgaaaaacgcaaaaactcctcttcttcttcttcctctttcatttcggtttgcagttcgtcgcctgtaaaacaggggagccaaatgagcttgcagtttcttcctctcttcttgttgcagcttgcagctcttcccgcaaatatgatgtaaccctacgtattacactgtcgtaccaaactgagtaactgacgatgcacccagcattccagaatcac

SEQ ID NO: 147972 - DNA, 579 bp, Zea Mays
cacgaaacgtggtgcgtcggctagctcaccaaaatagaagaatgacagaggacaatcctgtggagggcagcatgacacatctaaggtcactggttgcttgtgggtgtgatatggatggttgggtcatgcactcgagctctacgctgctattgcgtgtgctagctttagagcaatgctgcacaccaccatctatggacattggtcatcttggaaaactgcttcatctcagataccttgggctacgtggtactctcgtagacaagctcccagacgaaataggatccctcaagcttctgcaagcactggatttactaggcaccggaatatcacgacttccacggaccgtttgcctactaacgcagctgaagtacctatacggtgatgcatgcacgatagtgcccaatggtttcctcgggaaggtgacgtcactggaagagttgcatatacatcctcctagcgaaggtgacgagtacaaccaacaacagtttatgcaggatttgggcacccaccagggagaaattagggtgctcgatttgatgaggttcagagatgagtttgacgatctgagcatggagtctg

SEQ ID NO: 147973 - DNA, 368 bp, Zea Mays
cagagtagccagagcatgttgaaaccgaccctcaactgtacaagcgttcatgtaaacctttttcttcttcttatacatggacgcattcatgacaattgtcaaggtcacaataaagataagactctattggcatccagtttattatatgttgttatgcacattctgaacttaacacatgcatattgaagtttgccatgtttagcttgtgcccgagacttatgtcaagcatgatgctccacatataccttgtgtggggagcatttgttagtttgtagttattttttctacttttcaaacagtagacagaaaaacctcagttttatttttttcctacttccagcacagaggctctcacccattcgagccca

SEQ ID NO: 147974 - DNA, 963 bp, Zea Mays
ttcttcgacagccccgattgtagatcctaattcacatatcacctggtaattttgcagttcctctggaacattttcagccacaatccaaactgcatgcagcttagatttaggtttagcctgagagctccaatgagaaacggaaattttagctcccgacattttcattttgagctcagggaaattaatcatctcgtcaagcttctcttgagaaggaaattgcattaggaacccggcatgacacttggtagctttccaagtttttccccatggaaagtggaacccaaagtccttctcaagatcttcagcagaaatcaaaccctccataacagtcaccaaaccgatgaagcttcttttgggttttctggacaagggtttcgtaaaatgagaagagtaaaaccctaatccatcagccgccataccaacgatagacatacaaggtttgttctgtttaggcaacacacagcgagcagtcatgtgggtttctttgtgacaaaagtcacaccacaaagatctaaaacaatctctagcatggtgaccatcaaccccacacttttgacaaaaaggacggcgcacattctcaatctcttttttcaaagccacgggaggggttttgaggatacctgtttgacctccatcgccggcagacgaggccccgatgtcctcctagacatctgattttcccagatttggcttcaatctccagctgagattccgattcttgttccacgattgggatccttgaggcgcatctttctgattccatcggtcccagttagggtttcgccccttcagatccatcttcgtcaccacctcgcgagacagcaccgaccactcttcttccacaagcggaggacgaatcggggattcgaaccacccgccgcggaaactggaacgaaacaatgacggaagcgaccaaagccacgagagcgagtaagcaagatgcggaaaagagtgcgagccaac

SEQ ID NO: 147975 - DNA, 467 bp, Zea Mays
caccttagtgttttgcactcatcatcattgtggtcaatattgttgctagatgcatcggatgagttgcacgtggtagatcttactgtacattctttttagtttgccccgtcactgattgggattgagtcgtccactatacattcatatcacgtgtactacttcaatataagtaatattacactagtatcaagaggacgccttccctcatctcttcttggtcatctcatctacatgtctacgttatcgattcatcatcacaaacatatatcagagcgcctttccttagcacatgtgacatccattatcgagtaccaagcgcatcttctccgagtaatagagctattgtcgtgtttcctgctcctcattaagcctcaacactgcctccaagtgttcgctttctcattgcatctatatcatcattccctatgcattgatgattatgttgcataaactttattgtaccatcc

SEQ ID NO: 147976 - DNA, 898 bp, Zea Mays
gcagtccaagcactgcaggagttgagttgtacagaagaaagcaaggggagtttgacagacctttggctgaaaaaatggcgtacgatcacaacactttgcttggtaagtaattacccgttgtctttagtacattaaggcttttgttcgtcgtgtgaatgtgctactttttgcagcatcatggtgggccatgtttggtgtagacactccaacgttacaaatgcttgctttgagattggtttcacagtgttgttcctccagtggctacgatagtataggtagcatggtgtaccatgttaaggcgagggcaatgataagagacttcaccattgtgttgtcgtctccttcgaatgaggccaccgtgacttgatagctcatgataaactggatcaaccttccgttgtactttggccaattcccgtccctatagttgcttggccatggcgttgcctgtagtctggcggagagtgggcatctgttatcagtgaaattgaaggcatggaaggtgttgctctgatgagtctatctaactttgtcaaaactgctcaatctcacatggccatgcgaggggtgcgtcggatcctactgggcctgcaacagcgagatttcctgctcaagggcttggaggtgctctttttcttgctagataaggagacgtattatggcctgtgccttactacgttgctgcttggccgcttgagcatctctctgcttctgaaggttggagttgcacatgcaaaggctcttgagtaagagttgctcttcggtgttgacaccaaggtccgggccgtcgtggaggtctgcatcattgtattccggaggcatttcaaatgggtgatgttggtggcctgctatggcattgaaacctaaggggccagaggcaggttcttcatcaaatcca

SEQ ID NO: 147977 - DNA, 588 bp, Zea Mays
gcttaccggggtcgacagcgcagatacacgcgctcgcgaggaggagcagaaccagcatgttgtacaacgacgacgagggattcccccgcagctggttgatctccgtgttttatcgagggcttccgcgcgactgagtgttctaccccgaagcaccgccaccgcattccgagcattgggctaaagcacaacccgtgttcgatggtggcggcaacctttatcccgcagccatggtggtgctcgattctctctctctctcttttcttcaccagcgcgactcggacgcaggggatttttgcacgcgagggcaatcgggtctgagagcagagaagggcaagaaattagagctggactccatggcgttgcgtggttgagtttggcgcccacagagggagttgatggtggcgacgagtttatatgctccaagaaggcagagtccgcggaggttgcaaatcctgaccatagcgtgatttgggagagaatctgttgctgccagtagaggcgagaggaaaacccggcgaaaggtgcggcctccatggatttggccgtaacagactggggatacggatgggacttaccaatgggtcccac

SEQ ID NO: 147978 - DNA, 563 bp, Zea Mays
ttgatgctaatctcatctcatgtatctgaagcataaaaccaaatagtgtcaccctggaagaagacagcaagtgaaggctatccttgtgttggaacttgcacagtgaagtgattgacacaataatgccaagctatgggcttgagtcgttgcatcctggattagctcatacgaattatggatgtgcacaaaggtcagaacgcttcaccttgaagcctgtagataagattagcaacacaaaaacatctcagcaggaaataaaaagatgttgctcgtccccacaactataaaacgtgacccctgctggctgaagacaaggcagagaagcaagcatagctgagagcacacttgcagtgtgagggctctgcctgctttctctgcggctagcagggttgccttatgttgttgcgagaaggaagaacacccctttatttcctactgaaatatttctacgtgctgctgatcttatctactggcttccagatttatacacatccaaaattattgtcagccaatgcagctactcgagcccataccttgtattacatcagtcacttgattgcaca

SEQ ID NO: 147979 - DNA, 516 bp, Zea Mays
ggtgacagtctgaatctatagcatttcagataacgtgccgtcagcaaacacaaacaaaatccggtgataattggaatcgttagcaaattcctacattctaacatggttgatatgggaaagtaagtacataagaaactggcggcagcgtgctctctagcaaattcatggagcccttggccgcgtcctggcacgagcgaagatgatgacggcgctgaagaggatccacggcgcaaagatcccgttggccagcctcgacgaccgcagcggctccggcaccccgttggccgcaaccgccgccatcacagcgagcaccagcaggccggcgacgatcaccgacaccggcttcgtccacgactcctacggcaacgaaaagggaggccgtgggggttggttccgcgaaatccacgtgccgcgaggtgcaaaccgtaaaaaaaggaatggagaggaacacgaccaactcaactcaccccgggctcgccatcgagggcgatggcggcgccgtcgcggaagggcagc

SEQ ID NO: 147980 - DNA, 299 bp, Zea Mays
gtcatatacatagtaataataatatcattattagcctgctgcatgtgagtggggcccgatgtatgttcccaccgtggccatggcgtacgaccaaaccatgtgtgcccgtgtttctgttcttctctaggatcgagaacaatattggcacttccagccacctccactccaacaaaccaaaaccatgcgtgcccgtgtttctgttcttctctgcgatcgagaacaatattagcacttgcagccacctccactccatcgtggcccaagctccgcgagccaaaacctccatggcccaaatccca

SEQ ID NO: 147981 - DNA, 298 bp, Zea Mays
gcttgcgcctccagcttcgtcaagtcgcgcatggtcgaagtgctccacgggcccagtaacaaggcgtaatgtctggaggtcgccgcaagcctgctgttttttcatggtgggatctagattttggaggtagttgttgactgatttgctcaatccttagctaaaattatgatttttttatgatgagtgatctcgaagttagaggcctcgattgttttaatactacaaatatgtgccacagcttccgctaattatatttcttcgcctaagtcagagagataaagaaggaccaatagaaagc

SEQ ID NO: 147982 - DNA, 359 bp, Zea Mays
cttgtttaaaggaaatcttaaaccagctttaaagaagcttttgaagaccactacttcatcctttcctggcttcggagtaatctcctccccgccgaagcgaaccagctccttcttcgcttcattgaaatagcccaaattcatcagcttcagcatgtcaccttcggaaatggtagatttcccaaactccaggtggctgggtttagttggcactacgctgtaatcatcttctgactcaacttcctcagcatcaacctgctcagcttcagcggcaggtgcatccttcgatactaccagccctgaccgttgcatcactttagagattggagcggttttggcaccttcggcttcctctccgtcgc

SEQ ID NO: 147983 - DNA, 736 bp, Zea Mays
tttttagtgatcaccaatgtatcccccatttctcaaatatggtaggaggggttgatgtattgctaatctgctgcaggggcgcccccaataatttaaaaaaaaacagtattggtgatcactaataccactattggggatgaattattgatgagctgctggagatgctcttatgcatcctgattcctggagtggaaatctagctgggaggttctgtactgggaaatcctaatactcttagcgctgtaaaggttctgctttctagctgggagtgccatcaaacgtttgtgttgcagtcgtcccaactccccagagtttagggccgtggctgccacagctgttttcagcgagttgttttgtggtattggtccagttggaacgcaatgcaacaaagtgaaacgcaattgaagattctttttttaaagagttttagagctatgctctagtcttttgactgggttcaactattgcagcacatagggggattggcataatgcataattgcataccaacccggaacataatgtaaagcgtaaacaactcacaataccactaaaaaacaacgtacgagaacgaacagcagaagcagaacaacgactagggctgtaccatctgtacgtcaacaattgaaggttatttttgtagaggttataaacaactcttttagattatagacttacattttctctctgtttcaggtgcctggattttaagataatttcagacaacaacattacac

SEQ ID NO: 147984 - DNA, 877 bp, Zea Mays
cgactatacagtccccacgatagcaatagtaagtaggaataagtacactgtgttgtttgaagtggctaaggagagtctccgtaataggcttagagaaataagttcaagccaaaacataaaacatgtatgacggcccaaattgtgtgtgacatacaatgcctatatgactcaaatgatggaagcaaaagatctgtcttagcttgaacatgtaattatagcttagcaccatagaaaaatgtggatacatcatgctttattggtcgcgatagattaaaaacgtcacaggaggcaaatgacccaaaaatatgtagtagtgagttctatctaaggtgaaatgaatataaagaagctctataagactagtgaaaggattactcaaactaaattattttaccaaattaacaaattataggattgtaacattgtcgatatgtatgaagacacaaaataaaaaagtagcagcctttagaaagttaataaagcaaattaaattagagaagaagcgacgtaagaggtgaaagaggatgagaaagaagagaagtagtttacttgctatgtaatttttaattgtttttatgaattatgtgattttatttatttaattgtgtaattggatgtagatgtgtttatataacataaaagtctaaaatgtgtaaaaaaaattaatgtgaccctaaaataataaaactaaagattgtgtatagcaagatcaattattataagatcgatagctaagacaacgtaatagtagactgagtcattgagatcctctagttttacaagcgtgcccacgatcagttttaggctgtgacgagcagaccatatatgattatgtaaaatactattttatattataaagtgtatcatttaaaataga

SEQ ID NO: 147985 - DNA, 945 bp, Zea Mays
ttccaacctgcatgagttgtgctgggcacttcgtatgagatggctatggctgcataaaactgatccagggcgtccttgggcaaacctacctattcaagttccttataaagctcggccttctccattgttctaatctcggaggtgggaaatggggccaacaccttgttttggacaaataagtggccttttgggacaaagaatcagtgataatgctcccagattatttcaaaccattccaaggaggattgcaagacgacgaatagtctaggagcccttactaaatagaagatggatctcagacatcaagggagctctatctgttggagtaatagtggattatattcagttgtcagattttcacagtttggttggagctcttcaatatctcacattcactcgccctgacattgcttatgcacttcagtagatctgcctccacatgcatgatcctcgagagcctcatttgacagcactcaaacatattctacgatacctccgaggcactactaatgaaggcctccttcgatgttcttcctcctgtggtcacgtcactatctacacagattgggttggatgccctgacatgcgatgctccacttctggttatgcggtatttattggcgaaaatctgatttcctggtcatccaagcgtcagaatgttgtttccagctccaacgcagaagtagagtattgcgttgttgcaaatggagtagctgaggcttgttggctgtgacaactcttgcatgaactgcatagctccctaatcaagactcaagagtactcttgtctattgtgacaacatcagtgttgtttacctctccaccaacccagttcatcatcagcgcacgaaacatattgagattgatctttcactttgtgcgagaacatgtagccattggtgatgtccatgttccccacgtcacgatgacttttcagtttgtcata

SEQ ID NO: 147986 - DNA, 328 bp, Zea Mays
aaatttacctgtgtgccactcatgtcttacatggacttactttattgcagttgtataaaggattggttggtcagttgatggatattgttgtgaatgcagtacgtttgatttctgttgtagtttttctgtgaaaggtttctatacctgtccatttcgaagcatacttgaagtatgaaactgttataggcttataggttctgtgcatctgcaattcagatgactcagttgatcagttgtatgttagtagcgaaccccttacattaattcatgggatgtcgtagaaacaaatagacttgtgatccggatataacgtgggcgtccacatctc

SEQ ID NO: 147987 - DNA, 577 bp, Zea Mays
gaatttttcctccactcctttggacaagccttgcaagagtatgggttctccctggtatggtatcaacatccatttctgacaccaatggacctccataggactgaactgttctaaccagtccatacctaggataatgtcatagacagccaggggtaaaatctttagatccatctggaactggtaatggtgaatagaccagatggcttggatgatcgaagtctgacacaacattacttctccattcgccactctgacctgaatgggggcagtactctcctctggtagatgaagcttagccaccaattgttggcttacaaaggaatgagtgctacccgaatcaataagtatgctgacatcttgatcctttaaacgacctcctagttgcatagctcttttagccttaccacctgacactgcttcaaaggaaagagcagaaaacacatgctcctctggaagtacttctgactcttctccagaagctgattcttcaggctcgaacaactcccagacttcctgtatggcctgaagctggacagtagtcgcacaggtatgtcccttatgccatttctcagcacac

SEQ ID NO: 147988 - DNA, 347 bp, Zea Mays
cgaggagagagcagcaagggcgagcaaggagaagagtgaggcgaacctgcggcactgcagatataggcaacgagaggagtggagaggacgccgacggaggagctcgaccatgactattaatggcacgacatgagtgcgggaaacggctagcagtaaaggtggtgccgagtggaaggagagagagggcgcggacgtttcggctgggctgtgcggcaacgtgaatgccatgggcaggagaaccggcggcagcgcgtacgtccgatctagcagacgagcagattgagccgtgtctgtgtgggagaaaataattaaggagagagaagaaagtgatgaggcccacatgtaag

SEQ ID NO: 147989 - DNA, 1456 bp, Zea Mays
tgttaaagccatttgcaacttgatcttttgtagatacgattctgaccttgaaaagttctctagctactcttttttcttacaaaatgaaaatcaatctcgacatgctccgtatgactatgaaatatttgatttgccgttgactgtgatgatgtaatctatgccattgtagatgttctgaatcatcagcttgtccagatcagacgtgatgtgatcagtcacaactgtgtcgaggtactagttggtgtctacaccatagccatgagtggccacaacaacaatcttagtgtcagaggagtagctttcattaaagcggtacaacaatctagggcagcatgccctactttgctacgtacttgccagatcttgtcagtgcgtcgggcttgagggcgtccattagatgaggagaaagacacaccttgatgaccacatccactaggaggacctccacaccctctgccttggccatggctacgactgcggttgttgcttctgtgccctcgaccagcagtatttgcggaagcttgatgacctccatgaagtagatccatcctcacgctgaagctaagaagctaggatgtggcttcagacatgatgatctgttcaacacgaccacaaacgcagagaccactggtctgttctcttcatcaagtcccgctaggatgtacgagatgagttcttcgtctattctttgcagatgccatctcgtctgcaagaaactttatcttggtgacatatcctagcacgtagcacagtcatgttaccttttctagttgttgccagggcaatcctcatgatcagtctttaccctagactgcgatggataggttgaaactgactcatgatttcttgagtaaaggaggttaagtgctgcccataaggtgtactctagattgagatctcttcacgaaacatcatctttcttggtgttgatctcttccagtgcaatagtcgagccatcaaggtagccctgcagctgcgcgcccctaaggttaggtagaacttgtgccttccagaccgtgaagttgttcttggtaagctttaccgccacggattgccctagaaggggtgttggcataacagagtttgaggtagatgccatggagatttattattgtcgtcggctagggttctagatttgagtggaggagttgcttctgattacaatgtaagaaaacatgatgccaggtttaaactgttcatcctaacctattagggcgaggggggccagggggctgagtatatatagggcaaaatattgccatcagaattataacatgacagggagtccaagtcagttacaactgccttaaccgactcctattctaactctgctatctctaggacagatcaagcctaattgtatcatatatttaatcagagtcgattgtggtcttcctctattatagaacaaccgcatggacccatgatctgatatgactgtagactgatatataag

SEQ ID NO: 147990 - DNA, 451 bp, Zea Mays
cagaaaatcctgcatcaggacactatctgcgaagtataggatgtatgaaaggctcacagaaaagcggtttgaacttgatgatcatggcattccaatggttgaggattttgaggcaataattaaacctttagaatctagttattctgtggcttctactgatgaagctttggtgtatggcatttctgctagcggtgtagttgtgctaacactgtcaagagttagagtccctactcgacaatttaactgctttgttatgggctgccaatctgcgtcaccaagtatgtatgtgcttcatgtgaaggagaaacagcgtttccctggatggaggacaggtttctcgtcatcaatcgatgggattttggatggtaaacgaattggactgtgcaccaagcatgttaaagatatatatctgggacacatctcccttcaatcagtcgattttggttccctg

SEQ ID NO: 147991 - DNA, 291 bp, Zea Mays
tatacctcaaagggtttggtgttgtcaggctgagctagcacgggtgctgtcgtcagatgctgcctcaaagcatgaaaggcatcctcacatttctgactccattcatactttactcctttcttcaacaattcagtcattggcttggcaatcctggagaaatccagaatgaatcgccgataatatcctgccaatcccagaaaactctgaatctaccgcacggtggtaggaggcttccaatccatcacttcttgcactttctcaggatcaactgataccccatcctgagaaatg

SEQ ID NO: 147992 - DNA, 1208 bp, Zea Mays
cactcccgaccatgtgtcgactgactctcgtttctccaggggaaattctatttcatgcaataattgtcaaatattcggaatttctggtcagaattgtaagagggattttctttccttccctagtaagtttgagaatgtctcctgggaatactctctgcgactatggttcaaggctgctcgtctcttgtctgctagtgggccttctcccctcccttttttaataattttggcgagttcgcacaggcggttcttccgagaagtggctcttcgccttccacggaacttgcactgtttacaaaaccctctttctcttcgctgtcgcgggtgatcccgccgctttcaagccctcatctgcgcggtgagtgttcttcgcgcccgcgaccccatccttctaaagtctcggaaggaatggcgttccacagagtcgaccccgctcctttcctccctcacggttttgtggcgcaacaagttgatcaccgggaaatcatggtacgcactatcacccgtccttaaccctccgcacatgaagattggggcatcgttcttgtgcaaccgctaccagagcacgaggttaattttcacttttttgatgacattatccgtgagtacctcatgggggttagacacgttcaggttaggagcatttagcgctcccatttgggtcaggctctggtgagattcaggtttgcttttgacagatacaatcttgtggctttgggcccgcagcaagccctgggtttttctttcactattattaggcacaatgaggcttggaaccagcatgtgctgtactttaaccatgagtgttggcttcttctactcggtttccctttggatttctggacacatgagcatatccagaatgcaatcgggtcttttggtagggtgctcatgtgggaccttgacccgtctaatgtgactagattgcttgttagggccagagtgacgtcccttcaagaagttcccccaatttattatcttttcggttgctgaagggtttcaaggagtctcctggacagttcagtgtgacatcgtccagcaatttatgcttggtgctcagccacaagatgaagaccatgtgccctcttatccccattatggtcaccagcttccggtggaatactttgggatggggtagcctgtggccaactttcaatttgatcttaacatcaccccatgggaggaatagaagaggatgtagtcaatga

SEQ ID NO: 147993 - DNA, 383 bp, Zea Mays
aatattggttgtgttcccctttcctttgttggagttcccagaattctactaaaaattggttttattttgcttcgggtatgggcagtccttgatgaaatgtccggactttccacagttgaagcaaccagtggaagaactgtgaagagcacggaaatgagtaccagaggcactcggctgattggtaggagcgggggcagtagtgggacgaataaagataggctgcttgaatggatatgaaggtgggcgaggcgaagaacgattttgattaaaaggtcggatcaccaacctggttctcttttcaggcccttgatttgacctttcacctccaaacccctttgattttccatgtcctgcatttttggcttccactgccagtgtcgtgc

SEQ ID NO: 147994 - DNA, 319 bp, Zea Mays
caggagtacacagttattaactagaatgattagctaacaagagggtagcaaataatcatgcttcagatacataaaggtcatgtttaaaacctgttttaagatgaccaaaaaagggaagacagtcatgaatacaagacgattttgcacatagcaagaacaggagcgatagtcagaaaacactggtttgggagtgagagcgatagatgacgaggtgtcacagataggcagagctacgagggactgcaagaatatactgactacaacagacagaaattgataagcaggttacatttgaaaggagcagttcatcaataaaact

SEQ ID NO: 147995 - DNA, 298 bp, Zea Mays
cccttaaaggatttgattagggtacccatagttattcgatatcccgtggcctacgacggtttctgtacctttcagaaatgatgaagatgcacatgtcctacgatggtttatgtaccctttttacagtttgtttggaccaacaatagtggctaggcgggcctaaacaccggtggggcctcaatgcacttcctcgaagggcctcccgcttcgcttatctgtagcctgcacctgcagcgccactgacccgttgtttcctcctcccgtgcaggagaggaattgtcatcacatcatatcatcg

SEQ ID NO: 147996 - DNA, 952 bp, Zea Mays
gtttattttcccattgcctgctgatgatcatcacgcttgaaagaaggtgttgtaaaccaacaatcttgagaagtccatcatttaaattacatgcatgagaaggtgaaaataatcctagagtaaacaaaatttaattactcattagcgtactgaactgcctgctgcacaatctctgcatcacaagttaaggaaattggcagaataccttgcctctctagtgcagctttcttcaaatgtaggattggataatgttggctaccattcaaccgcattatctcacacatataggactggtgtgtgagaaaaatccggttgctaacattggccgagtagtcgttgtaagctttctctaccttctgcacaatatcagcaataccctttggtgaagttttttgatatgcagactgaagtgaagagaagaaaccaaggtccaaaatatttaggtcaggagagtttggtggttgacacatcaaccttatgtcaaacccatctgcagatgctgcctcaccaaaaaaaggatcatcagcagcaacatgtgccttggcattgtcttgttgtatgaatacaggggtaccacgttcctctggtggccacttctcctttattgcgggcaataccttgttcacaagataatcacggctaacatctttggttactgatggcagcaccttagtaaccattgtacctgtcggcctattgacactactccttttagctggctccactgtaacgaatgcccaagtaccaatctttcctgaaaatatacagttcccatcactatcaaacctaggcctagcgactgccgtcaaaaacatcaccttctctataaagttcttgctctaggttgttctctcgggtacagtctcatctacagccaagtagtacttctgagttttcttagtgcgataaaaccatttctcatcaatgtgcacaatgttgtacattccattaa

SEQ ID NO: 147997 - DNA, 487 bp, Zea Mays
cgagtcttgccttaactctatccatggattatgattttcatcattatcacctttatccttatcacgtctatatcttaccttgatgtttatcttataccgtcctttaagatatcctcttttccatctcaatctgagcattgtactttacgtacttttcccttggtcgtgtcctcttctttgtcacctgcgagtttataactctatcctttgttgtgtttttgtttgttatttcctttacccttctcatcactctatcctaccttgtgattacattacgtctgttatctaaaatctccaatctcctatctcaatttgagagcgatgttttacttatcttaaccttggctataacctcttctttatcgtgtgtaagcttgagcgcaactccattctttgttgtactcataccactggctctccaatgccttcatcttttctctcataccattgtcagttgtcccctttgacccttgtgatattgaggtct

SEQ ID NO: 147998 - DNA, 565 bp, Zea Mays
tccggtctctatcccctcaagccgtccgacataaaatcccttcatcaagcccttgttggctactcggcaaggccggagcaatggcatgctcggtttggtcatccatctcctcagatcgttcggtctattttgcatcttaataatctcccttgtctcaaggagtctagtgcgtcctcggtttgtaatgcttgtcaattggctaaaagtcatcagctaccttatactaattccattcatcgtacgactatgccacttgaaattattcattctgatgtttggggtcctgctccaatttctattggtggttataagtattatatcagttttattgacgattttaccaaatttacatggatttatcttatgcacgatagaaccgaggctcagcgtatttttctccaattccaaaaacatgttgagcgccttcttgacatcaaaattcgatgtgttcagtccgattggggtggggaataccagaaacttcataatcaattttttacttctcttggcatcgctcatcgtgtttcttgtccccacacccaccaacaaaatgggtctgctgaac

SEQ ID NO: 147999 - DNA, 455 bp, Zea Mays
agctgtaattcgtcgctgcaccgaatctatgtgccaccgtcgtccgttgtgctcggcgtcaaattggagccttgcgcgcggccaggcggctttgcccgtgtttccggttcgcattggtggcgatagcggagcaggagggtgaccggagcgcgtccaatttatctccgctgtcgcgcattcatggtacgccgtggactgaccaaggcaacgccagacttagggtaatgaccagctctccatgttcgccttcttctcaatttcatttcgcgcctggtatatctaacgattgtgtaccatggagcgccgtggacattccggccatggtggctcgctgcggcactctgcgccgtcaccggagttcagtcggaggtaggagatatggtcgtgcccgttgatcatcgcgtggacggctatgattagaaataggataccccttcagctaggttagatctgtg

SEQ ID NO: 148000 - DNA, 800 bp, Zea Mays
aaataacgcacatgaagattgcatgcaacagaacgtcaatcgtgcatacaacagaccctgaatatattacatggcatcaagtaaacaaacctattgcatcaattaaacagaatattcctaattaaggaatataatcaattaatcatgcatgaaacagaccctaccgaaaggaaacacataatacaaaaaaggaaacacattaagtcaggcaagggaatcagttaggcacgattttctgaatatattacacggcatcaagtattttacacgacatcaagtatattacacgacaagggaatcagtcatgtaaggggaaaaaagaaacaaaatatattacacacgatgtgcgttattgtgtccgccaagcaggtgttctcttctcctctcttctttgggccgcacaccagaataaatcctgccttctttccatccctggaaaacacgcccgctattcacgttccagctgtttaaaacaagcaatttttcaaacataaaattggatgcagtgtaacagagcagtagcaaaaggctggaactggaagcacgcccacatcaagtatattcctttttcctagaaggatggaagcatccacacacacacccgttcagccatccatccccaggaagaaagatttggttttgacggaagattgcatgatcacataaggtaataatggcgaaaaaataaataaaaaaccaatcagcgaaagatcgagccaccttgtgatcagtggaaaacaagaattaaacagcatgaaggctttactaactattttcaattgtttttagaggcgcaaatt

SEQ ID NO: 148001 - DNA, 583 bp, Zea Mays
ataaaatcaagatcttcagtcgatgccgcttcgggtatcgacaatgttaacttctcttgcagactttcctttacttgctctattggactacattctgaaggtccgaccttagcgcaggaaggagcagtgcttgcagcgacagcttctcccaattcttcaactttgtcttcagaaactctagtaggagcaggagtagccatcttcgaaggtttcagaacaacgtctagaacgctggccattctcctccctttcctaggagtcatcgctggaacggttgctgtctttgacaaccccggcattgctggaggactctgcagcttcggttgctgatcggtcttagagctctctggttctgttttctctagctgaatggtatgaacttcgggtgctgcagcgggtattacttcagatgttggaaagatatcttcggcagactcaacaacctctgtctttgagacccctgcagcgggcagaataacagccctctccaagacgtatgacttcggttggtgagtcacaattttcattttctttggttgcggtgcggtagagaaggtcgatgatgcatttctcatttttgccc

SEQ ID NO: 148002 - DNA, 319 bp, Zea Mays
cagagttgagaccgcggacattccagaataagactagggaaggatccataggaaaacagttgtaataaaagacgaccgcgggctgcaatcagcagaccagagtgactgtcccagggggaacagcctcaccttcgtcatccggcaccacccatccaaagagattagcgagagcctccacttgggcacgagacaggggtgcttggaagagcttcgcatatgcatccagattttgttggctgagatgttcactatctgactccacaaggatggacttcatgattgtccttctggctttgggaatatgctgaatttgctccac

SEQ ID NO: 148003 - DNA, 693 bp, Zea Mays
gttggttattcacagagcgcgagggaaatacgacatctccattccaagctggttggatctgtggcagtcataagatttgttttgctctgaccaatctttgtaacttttcaattagatctctcagactaacatataactcttgtaaccaagtcgagttgtacctttttcatatttaataaaagattctcagtaggggtctcccctcctgatctttcaaaaaaaacaaggactaacacacgtggctttcatgctcaagatccacaccagccacgacttagctcaaatatctgctttgtccagttattcaaatagagagtagagcagataagggctcattgtccacaaatatccaaccaatccactgaatacagacaggagtagagacagacaaaaactctactgtggtaggctcaaacaggtgcaaaactgatatttttctgcagagggggactgaacctcgagccccatattgcccaccccaagtctatctcagtttgtgcacataagtggaggacagcagggatgtgaagatctttcttcagatttttgtagcaactcccagtacctgttgaactctgatctctccctattcacctccctcaatcccacaatttcccatagtaacatggggagcacacttactaaaactggtcgattaaacaaccctctaccaattcttcataaagacttcag

SEQ ID NO: 148004 - DNA, 535 bp, Zea Mays
attgtagtttctaattgattcaaaagttaagagtctctctttttttaatactatttagtaagtaattagaaatgcatgggtatcttcgatgtttagaaacatagttaggtaagaagagagatggtcagagtgaggttagctgatggtaagaagaacttggtaagggaagactccatccaaggtggtaaatcttgaatcatctcgagatctgatttgactcatattcttccatgtcgaggttggtctcctccttgctctttggcgtctccatccgggtttgggacaagaggctaagatagatctgttatgtaggttaagtcgttgggtatagccaagttgatttaagtcaccaatttagtcttaagtgaattaggagtatgtccttatcctttgtaccagcattaagtaacttacactagattagatcagatcatattagattagatgggatctagattagatcgatataactagattagactagacaatatctaattactttggattatatcatggttgttaaactagggtggat

SEQ ID NO: 148005 - DNA, 545 bp, Zea Mays
tgtctcgagttgctctcttaacattgcacgatcaacaactgtgaaatcttgatcatataacttagcaagcttaacaagcttctccaaattgaacatagaaaatgacttctttggatcaaggaaagcaaaaccaactagcaactcacttgaaacttcactgaaccgatgacacaactctgtattgattttatcaagaataacaaaaaatatctcggtgcggtagtagtgaagatttgtgactgtgaatccatctcgccttgatcgacctctaataggtacttctgcatccatgtctaccacaggaatacccttattagcacaaaattccttcacatcttcaaaaaatgactcccaaccattatctgtcctcatcatagcgattcgggctttaacaacatcaagtaactccatggcaagaacaatatcaacactcttcctttgcaacatttgagagagctcatttgtgattgcaagcactttcaacatcaattttagaatgaaagcaaatttgaaactctccattttttctatcaaccctgctgctt

SEQ ID NO: 148006 - DNA, 417 bp, Zea Mays
ggtaccttatctttaagggtccgaggacttcgctgatgaagtaaaccggatgctacactgggtatgtgtgtccttcttccacctgctcgactactaacgaggtgcttaccacgtgagtcgtgtaggagatatatagcaacaaatcttctgctcggcatggtggcttgagtactggcagagtggtcaagattttcttcagtgcctctagagcctcctgtgcttctgtggtccattgaaatttgtccaccttcttgagcaatttatagaatgtcattcctttctcgcctagccttgatatgattcttcttagcgctgccatgcatccagtgagcctttgtacctttttctatgaccgtggcggttccatcctcataatggcctcaatcttctctggatttgcttctattccccaatgac

SEQ ID NO: 148007 - DNA, 566 bp, Zea Mays
agcgtgagcatgttgcatcgtcttaagtcgttgccgacttaagccaattactccgttagcagggcatagtggtcaccccgagtaaggatgtaggttgacaatgaataatttgagcgctctcgaagtatttttattgatgatatacttcccagtttacagagttcattgtcatcccaatagcttttgaaattcagctaggggtaaaacttcctgaggtgttctatgttccacgagttcccaatttctgttccgtccatctgagtgaggcgatatgatcccggccgagtgacttctgctactacgaatggtccttcccatagaggtgacaacttgtgccgtccttccccgttagaattcggcggaggacgagatctcctactgcgaaggatcgatgtcgcatggtcttatcgtgatagcgcctcagagtttgttggtaccgtgctgattgaattaccgtgttcagccgttcttcttcgagtacatcaacatcctccagcctagtagcctcggcttctgctatgttttcaaagatcaaccttggcgcgccaaacttgagatcagcgggt

SEQ ID NO: 148008 - DNA, 495 bp, Zea Mays
gtgataataggcaagggtataaaggaagaggtaaatgtgcataacaaaaaaaccaggaatctaggaacaaccaagaatagagttaagataagtcttgcaagtggtaaagtataggatatatccatgggtgagataagtaagagaccacgcttgaactaaggtgggaggttttagataacgaacatagcgtaatcgccaaggtaagattgagagatgagaagggtagaggcaataagaatcaaaagcataacgaaggatgaggttacaaactcgcgagccaaagaagaggatacgaccaagagaaagaaggtatgagacggaagaggggcgattttaaagggcaggtatgagatgaacatcaatgcaatatatagaagtgtcaagggtaaaggtgataataacaaagagcataggaaaggatggagctaaggcaagactcacgaaatggcgagatggagaaaacaatcacgggtaaggtgggtaaggttccaacag

SEQ ID NO: 148009 - DNA, 864 bp, Zea Mays
ctagttatagtaattatttctgtattaaaaatccatttccttaattatttaaccaatttacaagtttctggaccgcgcatcaatttctggggagtgcaggggctacggtgcagttaaaccctagactcagaacacagtagcgagggatggtggctttattctataaaaatagaggggttcttatgctattctgccatggcgaaggggtatcgtgatcacagggtcgtcggatttgaagtgaacggtgaggattagcttcgtctcaccgtgaatcggtatgccaagccagtcgtccgatcgacggttgacgactcagatctaaaataccctgatcagccaccgagtcgcacgatctagatccgaccgctaggattaaatgagatgaaggggtacgcgacttttaatcctgaccgcacacccgcgatcaggcggtcctggtgcttcttccccagccatcgccgggtaatggcggtgcccaagctcccacggcgacgcccgcgccgccgcgaggcaacctcgatcatcgctgcgctaccgaagacttaatccgtcccaaaataaagtggaggatagggcgaacacatgactggggaaattactgatgatcagagcgggggaggtgtctgcccatgaaccggggcggattgttggcgacgcaaatgctccgatgataaattaggggtggccccactatcgagtccgcccaagattgccttggatgaccgcccagtgactcgatggaggccccaggcctgatttcggacgtcgggtgacgccgtggtgtaagatccgcggcggcgctgcttctcgcctctccgctccgacgcacacacacccctgtcctcacggtggggatcacgaagg

SEQ ID NO: 148010 - DNA, 725 bp, Zea Mays
cgagctttgttgatgtaagaaccttccaggatattgtgtacaatacgttcagagaggcgtgcgaagcacgtggtttactcgaaggtgacaacgagtggaaccttctatttgatgaggcaatagtctctgcctcggcgtttcagcttcggcaactgttcgttaccattgtcattcactgtcctgtttgcaatgttcgtgctttgtttgacaaatattgggtctacttcaccgatgacatacaccgtggacttagagaggcccttggcaatccacgctacacagctccacatgagcaattccttacattgctttcgaggaaactagcggacacgtttgctaacagtggtgccaacatagctgactatgacctgccaatcttatcgtcctgtggtgaagaaatgtttggcaaccgactgataaacgacgaactgaggtctgaaccattgctattgtgtgaccatgctgccgttgctgtctcgcagttgaatgctgaccaacggctcattttcgaaaggctaactgaatctgcgctctccagctcgccgggcatatttttcgtatgtgggcatggtgggacaggtaaaacttttttgtggaacgctatactcacacatttgaggtcccggcaaaaaaatgtgcttgctgttgcctcctctggcgtggcttcgctcctattaccaaaaggtcgtactgctcattcacgtttcaaaatacccttcgatcta

SEQ ID NO: 148011 - DNA, 449 bp, Zea Mays
cagtgcttcatattctgcagcgttgttggagacaggaaactagagttgtagtgcatatttgagtttatctcctttcaggacaataaagaggatgcccgccctgatcccttgcaattttagtgacccatcaaagtacatcttccatacttccattaactcagggttctctaagacctgctactcggtccatctgatatgaaatccattagtgtctgggttttgatggtcgtacgtggccaaaactctatgtcatgagtcccttgctcacatgcccgcttggtggtcctccctactacttctctattgtggaatatgtcgcctatcaggaaacccgtaaccactacgactttgtggtcatcgaaatagtgtcgtagcttttgtgcggtgagtgttcttcttcatgtcgctcgactactaacatggtgcttaccatgtgagtcatgcatgaa

SEQ ID NO: 148012 - DNA, 318 bp, Zea Mays
gccttcttggtatattttttggaggactagtatgttctgttaacttgctttactgatagtttaagcaccgccatgaattaaattagaagttttgcacttgagtggtcgacattctcattctcatgatattatatgcccaacgttgactcgttgtaccgtaagctgtgcatgtggaccagtattgttcataggatgtgtagagcgtgataagattttcaacctttcgaaaaggattacacattagatttggtctactgcatatgcatatactattaagagcctgtttggtaaagctccaccgctgaaaagtgattcttg

SEQ ID NO: 148013 - DNA, 300 bp, Zea Mays
ggcgacaggacttcactgctcacaactcacctcactccctatattgccactcacctcaatcatacttagagacttgggactcactccctctcgactcgcttgtatcccctactacgagcacttaggtgtaagataatacaaggcttcctcccccactggaagtagggtcttctcttgctcgaaccaagataaatcttgtgtcttcttgcatcaaccatccgggacaggagcacgcatcacaaatttactagttggttaggacccccaatttccaaaacaccgacaaatagggaatcaatc

SEQ ID NO: 148014 - DNA, 512 bp, Zea Mays
aaactttgaggccctatatcttccaaactataaggattttgccctatgtcaacacatcaagtttgtagagctatcataggagaacaagtttgattaagggactgatcactagtgctgaacagaaattggagataattaagggtgaagttgtgctgtcaggagtaagttgggcaaatctaaaaattgggttcagataggtatggccccaatgaaatgcagtcgaattgagagcaccaaatctgaaaatatgtacagaattgaaccatgaatcttatagtaaacttaaagactattgtttggtgaacaagttttattaatgaagatcaccctgttcttaacaagaattaggagatagagaggatggaaggtggtcagttcagtaaaacgctgaagaccaaaactctgcaaatatctgaagaacgcggataaaagatctaaggcactgttgaatcagatgtgtgcgagtgatctggtgaaggggatttgatcgcggagggataacttcagacatg

SEQ ID NO: 148015 - DNA, 1110 bp, Zea Mays
gttttactagatttatagaaaatactatcgacatttacatctccaaatagatttattatgagagtatattccataattcatctaatggtatttgctacaacttataaatattatttttgggggttatttggtgttttttgcccctgttgtataatgcaattgtgattatacccctacttttctaactgtgattttactctcgcgatcatgtttttgaagctttcgtttgcccctagtttgtactggcacttggtactgccgcattaaacgaaaaaattagaaatcgaaattagggccacacaaaaagaccaaagtaccttatatcctttgacccatgccttctctcctgtacccgttcacctagtattgatgcaaaatcctcaccctaacaagaagcggtgatgcgtcatgcgtagggatgcaagcaaaaaggttgacaccgcagaacaaggttggtttcaacgggaggtgttaccgaacgcgttagtggtgtgcgggacgaccaatatcgattgctgcgttggacggttcggtcgttatcgacttgaaccggtcggtaacggttgtctttagtgacgtcgagccttttgatttgtccatgcgcgtgccacgtcaggtagatgttttttaatcgtttgaagttcgaaaatttcaggaaaaaatctaaaaattcaaaaaaaatccctagaatttggcctacaaattagattttatttacgtatcatgtaattttttatatttatgaagtatgtatttttttttgtttaagttatgtgatttctaatcgtttttattaattatgtaattttatttgcttagttatgtaatcatatgtatttttattttaataaaacgagttgtttcatatcaactaaaagtctgtaaaagaaaatctaatgtcgtgctaagtagttgtaggctgctgtgcactagagcgctgcgatagataagaccatctcgaaccattctccccatatttctccccctatctgtactttctcttatattttactacatctccctgaaagattccaaccaccccccattcagcttcccctatacaccataacacattatcatgtgatgaagcttaaaaagattaatattgca

SEQ ID NO: 148016 - DNA, 449 bp, Zea Mays
actactaactacaattgaacaagcacaaaccgattcaccctcaccaattaaatcgcgaagcacgattaaccaaaacaaactagaccgacagactcatgtttcaccacaggcaacttgaccatccaaatgtatatcatacttgaaacatgattgtcacagatgaatagatgatacagctgaaagcatataggtcttttaactagtctagagaagtaggcagacagcactgccaatttcagtgcaacacaataaatagcagccaaccagacagacagtcacagtacatgttctagagctctgcttctaaacaagcaaattaacctccaaaattcagaagaatggtttcgtttggcgtggacatcaaatgcaccagatagtataaggcttctagcaaaatggcacagcacatttaattacactcatgccaatttcaagtgtgcccacacaca

SEQ ID NO: 148017 - DNA, 396 bp, Zea Mays
gtggaaaagcatggcattcccactgcatatctagaaattcccttggtcacccgaaccctaggggcagaccttctatgccacctcaaatgctcccaagtcaggattcttttaagtggggtagtgttcttggtagacttagccatcttgccatcccacgaaattgatgtgatcttaggaatggattggttaaccaagcataatggcgtcataagttgcacagataagaccgttcttctcactggccaccaaggaaagtcaatttcatgtaaggcttagccacccgcccaagatccaatggtgtttaatctagcagcagaaagcatatctgtagtagaagaattcatggatgtaatcccaggagaattgccaggaatgccgctagaaagagaagtggag

SEQ ID NO: 148018 - DNA, 281 bp, Zea Mays
tctgctgctataaatgtggaagagcgtgcaagggccaataacaagccatcccagcaactccaagctcacattgttgagaagggcggagatagaaaattccagaagaagaagaagaactctccacagaagaatctgaaccaatctaagtccaaaaagatgatgaagaagaaggaggactttatctactatgtttgtggtgacttcgggcatactgcttggaggtgcaaacaaagggaaaaggtcctccacctcagcgcaaagaagggaacgtgttggttaac

SEQ ID NO: 148019 - DNA, 385 bp, Zea Mays
ctcacctcgggcgtggcacgcgggtagtggagccccgcagagacgagcatcctgcgcttcccgccaaggataagcgcgcggtggtcgtaggtcacgttgaacggctcgaagaatgtcccgccgtcgtccccaccaaccacttgtctcagaacccccgccgcctccgcacccgccagtgagatcgacggggagaggcagccaaggaggaggaggagactcagaaatgccataggaggcggtggccgcagccacggcgtcgtcgggtagggcgaggcggtcatggcggagtcggcgagaaggagcacagtggaaactggagcgcacacggcggcacgggcaataatatcagcggtggagtactggagttagcgagatgggaccgccg

SEQ ID NO: 148020 - DNA, 686 bp, Zea Mays
atttatagagtttcacagcttctgttggtcaagcacaacattcacattcaatatcaattcttgctgtgcatatctattaggatcagtcatgaaccgcaaaacagaactggaactgtaggaaatgatctctttgagcttcatttgtaggtacttgatgtaattaagatgtgttttaacttagaaaagactcgctgaagctttacctgtatataaaaatgatggtcatgtcacatatgggaccagagctaattagaaatttccacggagctggtggacaaactattcatcgtttcctgattagagtacagtagatgcagttatcaaaaagagtagacccagtgctggatgctcccacatgaatggggtctggtgaagggataaaccaaggcaagtctttccctgcaaacgagctgctaataacttagtgagacagttctcaccactgcactagacctgcccttctagtaggtgcaattatcactgggttattttactttttgttgataactaaatgtttaaatgatgatctttttagtgtgtttagttccatggaatataccaagtgttgtggctaccccacccttgctgcagtcctcatcagtacccccacctattgttgtttttcaatgatgctcctttggaagaagctccacaaccaccaaaatatcaacatgtgaccacaaaca

SEQ ID NO: 148021 - DNA, 800 bp, Zea Mays
ctggagttccctagaaacagttaacaagacctgctcttgttgctagaattttgggcttttgagatactgaaattttctggcctttgtcgtgaatgcaaaagaataattggtggtttcatagtgctgccttgcttttctgttacctacttaatcttcaagaacgacatggacagttgctgctgtcggcagggaagaaaattgaacgttacggtagaaatctaaaaagaagagtatagagaaaagcttggacaagagatagtggcggtcactcactttggtagaaggttactcttgcatgtagtacgtacaggtacagtactatagaacactgtagcaactgacgtcgtcctgggggctcgttagtgcaggcaatgctggcgggaacaggaggaataataccaggcaggcaccggagactagaacggtcatcagttcccaggcaccggagactagaatggacagttgggggtacaagtagcactacatgggttaatgttgtgttgcatattattaatcaggtttagacacatttggtagatctacttaatcaccatgaactggaaactgtgtgattttactaggagggctataggacttttgacatatttttgacagaacacctgagtttgctttcatttctttttcatctaatttgtctgtatggacatgttctcttttgcttggataccacaaatttaattggttactgagattttgggactgggtcaacaaatgaaaggtgcatttcaagttttgcttctgtgatgtttccacttttattttcagttatttcacctgtt

SEQ ID NO: 148022 - DNA, 511 bp, Zea Mays
caatgcaatgcgaatatagaatgcaatgcaaatatgcactgggggaacattcgtctttcacaagtgagcaggcaaggtaggcatggttccacatgagctgatccacacccaacaaaaggatttatttggccaacggttctcagctggagagctcactaggacccagcaacagaaggatttatttggccaacggttggattgttttgtaactccaagcccacaagtttagcaaccgcatcgattgatgaactggagcatcaaccatatcacccctagctagcttcaccttcttcacaacgggccggggcccggaaacaaaagttggttcttgcattgtgccaggtagggtaaacaccaaacatgtcagccactaggaccacatcaaacatcggaataagctacgggacgcagcatcgtgctcccaatgcgctcttagaaaactcagccatcgtttatcgcactaggaagatctggaacatcaaagacaagcagaacatgacaaggccccccc

SEQ ID NO: 148023 - DNA, 311 bp, Zea Mays
ctctcggtgcacaccacggtgtgggtggcgaaccgggggacgcccatctccgacccggagtcctcgcagctatctatctccaaggacggcaacatggtcgtcctcgaccacagcaggtcgtctaccgccgtctggtccaccaacgtcaccaccggcgtctcctccacgtccacggtcggcgtcatccgcgacaacggcaacctcgtcctggcggacgcgtccaacacttccgcggtgctgtggcagagcttcgaccactcgggcgacacgtggctccccggcgggaagctgggccggaacaagcgcacggg

SEQ ID NO: 148024 - DNA, 817 bp, Zea Mays
cagaactgtgatggattccatagataaacatggccacgtgtagttgtgagctcatatatccattacttacaatgcttaaaaacaagaagccatgtatgtgtcagtacctgtgatctgtacctgactaccgcatcagcgtgataatgcctctgatttgtagttcggtgctgcagttggtgtagcatacatgggctcgaagttctgcttcagtacttagatcgagatatggctgcctgcttatttgatttccaagtattaggagaggatataagaaaaatacaataactagtaatagagcgatgttcagtgggatcactcgtctaagtgtctaagtgccatcggagtaagcatgaagctgaagggggctataagaagcatattgtaaaaatctggagcttgtcccttgtaaatatctcagcacatgaaacaaatgaccacagtgaactgaagtagggggcagatacaaatttgagatccataactgaaagtccacaggactgtagtatatatagccaatagtagtgtgggccttatgggccttaacatgtaccatctctgcaagccgctaacacaagaaaacctgactctgaagaaccaaaacataagtgttccagagttcttgttacaaaagtttctgtgtctttggcaatctaatatctctaccatttatgatgaaatgtagtttctacgtgtatttggcaatctaatatgactaccatttatgatgaattgtagtttttatgtgtctttgaccatctataatcatttgtccatgctctgttttaaatgtataattccatccctatggagctaggat

SEQ ID NO: 148025 - DNA, 840 bp, Zea Mays
cgacacgcgaggtacgcgcaaacagtgcgcgcgacacgcacgaactaagtgcgaattagcatgcgacaacgcgcgacacgcgcgaacgacgtgacatacgagaacgattaaacgcatgtcgtgattacactagacgagtatcgaatcaaaatatttgagttggtactatacattagttataattaaatttatattttaataaccatcggataaataaataattaattaactaaaacatgtgctacaataaaaataatattgttaacgtgtacacgacattattacaaagctaacgcaactgaagatagaataatcggacgcctaacttaaaaattaacacatatttaatcgtggatttgattctaggaccacacaaagaacataggggcgtagccacatcctgtgcaatagactggatctagtgtaggcaagaacacagaacagcgaactgcgagccaatgaaacaatgtcacgtgaccatcagtgggagagagagaaagacaatttcttctccaggaaacacacacgcacgggatgggagtcacgggcggttctttcttttcctaatctcacgcatgtgctgtaacaggaccacacatgcagccaacgaaacgtggacacatggccaagatggaagagacacaaatgcagatttcttcctctattgcatgccggcaaaagcggatcgtgcaacatcacatatggcggggtggggcttcgccgacgagggaggtagggcggtggtgtgagaactcgccggagcggcgcgacgagactgcgcgggcggcttgccggggcgggcagagatcgctgaccgggaacggagcagcaaggcggcgc

SEQ ID NO: 148026 - DNA, 586 bp, Zea Mays
atataactagcttttgatgaagcaaatgatgataactgcttggcaagaatgaaaataggactggtgtccgccaggatccatcttcaacaacagatattactgctctcatacgaagaaatcatcaggagtagagaggatacaacaggtctctacaagatcttcatatttctatcacaaattatcatcactagcagtctagtggtcaagacatatgactcttctggtgccaaggaccaaggacatattaatgcctaatttagcttcaagctctgtgttgatgtgggatttcatggctatttttctactcttcttacttctggtagatcatatatagattatggtaagcatgtcaaggggtgaaatccaatgtagttctgctacataaaccccaattttatttccattcagtattgacctttaccatttggcttactgtataccataccagtcaaaggactatcccaagtcaattcaacgactataagtatttacaattctgagagatgtatgcaacacaagcatagaggtcctagataggacgagtaaagtggttcgacgggaacacacaatagtttttcacacaaac

SEQ ID NO: 148027 - DNA, 492 bp, Zea Mays
tactccaaagcggaagataatgcgttatccgcggccttcggaagccggaagaagaaaaggctaaatagagtttttgatgctattgggttcatgtaccctgattaccgctacccgccacgggggaagaagaggaagagtgcaacttccgggaaggatgctgcttcagctgctccaagcgagcccgcgccgaagaggaaaaaggtgaaggttcttactcaccggccgcgatatattgaaccggccgtagtgcccgaatttggcggtgagacctcttcggctactaaagccaaggaacctgcgcctgcgcagaagattgaagagccggcttcaatgccaaagacatcctcagccaaattagctgagccgaaggccgataatataggggtcgaaggaacaaagatatcagaaattacaagcccttcggcagaagtgacagtgccgaaggcacaaaaaggtcttacagcgacccctaagaggaaaagaatgatcaac

SEQ ID NO: 148028 - DNA, 548 bp, Zea Mays
ctcctcccctaggtacaactcatcctggaggagggccacagtcctaccagcgtccttctcagcagacaccacagactccacacactcgtcaggctacccccactagcaccccagcgagacctactggccagggcactactataggcaccacatgcttaaagtgtggtgaggttggtcactatgctaatgattgtccaaagaggaaccccaacacaccggctcatggtgattcttagggaaagcagacacagactccaggcagcaaccgtggttataacatcgctagggttaatcaaatcaatgttgaagctactgaggatggtccaaacatcgtcattggtatgttcttcattaattcagtgccagctactatactttttgattctggagcttcgcattcattcatatctactcgttatgttcatcaaatagtctaccttacatagccctatgtagacctacgatagtcattacacctaaaggggcttatgaagcaacatatatgagtcatagaatagaagtaacaattttgggaagaaagttttggg

SEQ ID NO: 148029 - DNA, 350 bp, Zea Mays
aaccagttgaatatcagattcttttggatgcaaaaacatgatcacatcatcagcatacaaggacactctgtgttgcaaaggtctagaagccaatggatgcagcagattttcgagatcagcttttgaaattaaccatcctagcacgtccatgacaagtatgaacagcataggtgagagggggtctccctgtcttaagccctttttgagctgaattttttcgccagcaacaccattaagcagtacttgtgtggacgaagtagatagcagtccacacagaacattcatccaaatctgcccaaaccccagtttttgaagaacttcaaggaggaaaggccaagatactgagtcaa

SEQ ID NO: 148030 - DNA, 377 bp, Zea Mays
acgcatttgactttgtccgtctatataataaatatggttccgtattcgtgcaaacaccaacttttactccttttgttcacggagttgaaagtttcttgactgcacgaatttcacgaaaatcttgtagtaaacaccaaacagtatgtacagccaataggatcgccacccctatacggtagttgaaccgtacgtaccgctctgtgaaaataaaaattaaataatgaagtcctgtgctgttcatcgcgcatgtctttgctgcattgcatgcatgatccctccataaattggagatatacggcacgtactgttgtggatcagagttgcacacactggctgctgccacgcacatggcgaaacaaagaaaaaacaaagcggtg

SEQ ID NO: 148031 - DNA, 344 bp, Zea Mays
aagatcagcctcatttggcgggctagaacagagaacaaatgtaaattcttcgcttgggtgctcatccaaaataaactcctcacagtagacaacctagcacgtcgtggatggccgcaccacccatcttgcgccctatgcaatggacctatagaatcaggactccatctatgcctaacctgccccttcgctcatgaggtctgaaacacagttcttgcttgggaaagcttttccctgccgcaacatgtggattggagcaacatctccagcattagcgagtggtgggagaagacggagactctctttccgcaagatcgcaaaagggagttcaatggcctggtcatcta

SEQ ID NO: 148032 - DNA, 309 bp, Zea Mays
acctgccctcgaggctgtggatgtgggagagagctgagcccctggtctgggcaggtcggtggtgcttttggtgaacaatgtatcctcagatggatagcctcgctcggcgcagctccgttccattcgttcttggtggtacctctgctagctttagcgattataggcagtgccttttgttccgtggcatgcctttgtatctctgcccttttggtttatggtttgaggctgaactgtgtcgtacctcaacattccactgttttatggccctagcttctgttattgtggttctgcagcgtctcttgctgtttg

SEQ ID NO: 148033 - DNA, 529 bp, Zea Mays
ggtcgacgaccattaatattgcgaggtattccttttcgtatgtagagaggcctcgagtttgtggtcccagtgctttactgacataggcgagtgggtggccaccttgcattagcactgccccgatgccctggtcacaagcgtctgtttcaagcacgaaaggcttggagaaatcaggcaaggctaaaactggtgcttggctcagcttggtttttagacaatggaatgcaatgtcctgttcttgagtccaaagaaatctgctattcttcttgagtagtagggttaaaggcttggagataataccaaagtgttgcacgaatttcctgtagtatcctgcaaggccaaggaaactacggagttctttgacattagaaggtgttggccaattgaccactgcagtaactttgttgggatcggtctgcactccagcttcactgatcacgtgccccagataggagatagaacgagtggcaaaggtacatttggacagcttcactttccattgatctttctgcaagagagatagtaccac

SEQ ID NO: 148034 - DNA, 363 bp, Zea Mays
tggcaaggccttaagtaaaagaaggacggcgtatagtaatcgactgcgacgtggtaagatggccgacggcgtggcataacagcaaagaacggcggcacgccggtgatggccgtgcggccacgtcgccggtaaggggagaagtgaccgagtggccacagtgctccaagtttatccacggtgagatcttttcaaggtgagcaacatccacacggccgtggcaccaatcccggcaaagcggtcgccggcggtgagatcttttccacggcagtcgatctgatccggttagagcactgtaccatgggatatgttcatcagtgtgcctgacagtcacagtttaggaccaaatctctctaaagtttctct

SEQ ID NO: 148035 - DNA, 343 bp, Zea Mays
gtcgatggaagaccagacggtcacggcgacaggcacacgccatccacataggtccttgtggcgacggcgtgaaggcagcacaggaggtgctcttgcagcaccttggcacaagaggttgtctggcagtagcggcgtcaatgcgtctgaggcggtggagatggatttggggtcacggggtggtgggacggcgcgaagcggtggctggagtatgctttttcgcgtatgacttagcaccaacgttgatttcgggagtcccaacgaggttggtaaatgtagggatgaaactgagttttgtagggagtttgtaaattcagggacctgctttacataactattggaggag

SEQ ID NO: 148036 - DNA, 317 bp, Zea Mays
ggctgatggaaaagcttgaccataatgacatgacaattcgagccggcccagggaaggagctcaaaattacaaaggagacggtgcaccttattttggggttaccaaatgctggtggaggaacgacattaggcattgatgaagctgttgctgcaaacaatttaagggctgaacttggtttatcaaaagaagaatttgcaacagttgcagctcttcaagatcatctgaggaaagggtttgacgatgatctaagcatcagatccttcttcctgatactgttcaataggttgttgttccctactgccagctggggaataact

SEQ ID NO: 148037 - DNA, 280 bp, Zea Mays
cttttgtgcatggggttgaaatgtagaacgtgtctgcaagtcacagattgtggtatcagccatagtgacagaagctctgaataccgtatcctacataaactgtgcctctgcaactcttctgtgtttagtgtttaactgaacccagtagctctaaacttcctcgttgttgtcagtaaccagaactcaaaagctaatagatatggtagataattcagcagttgctgtctttagacatgtactccagacaataaatgcataaccttccttgctggcaaattta

SEQ ID NO: 148038 - DNA, 448 bp, Zea Mays
gtccggcttccgcctcagcagagtgtgcaggctcactagggtgtagttgcgagtagagcacatggacttcctcgtgcaatgtattgcagtagacctgcaggttgtcgacagctgagcttagctctctaattcgggcctgagcccttgcttctttagcacatgccaacatatgggactgtactgcccagtccagtgctaagtcccggtcagccagctgatcctgcaagtgacggatatctcttctcagttcatttatcctatctccgtctgcaatccatgcattggtcctgtgtcgcaacgttgcttgaagtcgactcacttcggcttccaagtctcctatgggatcgttactcccactgctactgctttcgtgtcgaggggccagttggtgccggggtactccaatcggtcccgttgatttgcgtgccgttagcctcgtgcgtggcgg

SEQ ID NO: 148039 - DNA, 1015 bp, Zea Mays
ccttccccaggacactacagaacggatcgtaccgagctctagcctacagaagccggggatcagcataccgagaaagatggcagtaagacgacgatggccgccccggcgataaataactaaaattaaaaaaaaaacaggaacggataggcccacctcgtattcggttgccgaggccccagcgccaaggggcccgcccatgcatttgacttgcgcaaaagcaaaagctcacccatccatgtcgagtcgagagtcgagctcgagaccacaccaccgcacatgcaaactgcccggcccgccggccgggccacacgaggatatactcctgtacagaaaagaagagattcccgctgcccctgcggcctactactgtactctacgaggaggggaggtgcaccatccagcagcggagcctaccttcgtgagttcgtgtgtgccctgagtactcttgtcgcctgctgctgcagagggtgattccgattcggcgtcctgctgcctgtgcaagtccacctcctctccgttgcgtttcgaaccggaccgggcatcgaaacggctgcatctggattgtcatttccttaccacacagcagctgtggctccgccggacagagacggggaacaaacaaccggcaaggtggtgcgtgcctaccacgctcgctcgtgacgcgacgatcccacggccaccacctcacgcccaaagccgcggcggcgcctttctctttctcccctccgatccgtgctccgcatgtcaacgcgacgcgaacaaaaaggactccctccatccaccaccggcaccgctgctctgcctgccacacaacgaaggttcgtcgctcccgctcgtataaagccagcgcccctcgcaaagtcgcaccactaagaccaactccagcaacactccgtatcccactccgcatccgcattttgcacggtctgaggcactattgcgcgctccagcaggctccgcatccctctccgcaaaatggacgccgtgtccctgcgctccccatttccacactttc

SEQ ID NO: 148040 - DNA, 556 bp, Zea Mays
tctcgtcctcgagatttaagaagatctagggaaaagatggggaaaatctatgcgaagctcttcttctctttcccacgttgcttcatcctctccatggtgactccattgtaccttgcacatctttatcaccttatttcttgtaactcgagtcagggtgtctagaatctttatagggtactcagcataagtcagatcatcttgaacactaaggtcctccagtggtagctgctcctcaggtaccctgaggcacttctttagctgagacacatgaaatacatcatgtacatctgacagatgatcgggtaacttcagttgatatgcaacttctcccactcgctttaagatcaagaaaggtccaatgaagcgaggggacaactttcctttgactttgaatcttctcataccccggagtggtgacaccttcaaatagacatgatcaccctccttaaactccagtaatcttctcctattatcagcatagctcttttgcctggattgtgcaactctcaaattttctcttatcattcgaacttgttcttctgcctcttgtataagt

SEQ ID NO: 148041 - DNA, 623 bp, Zea Mays
ccctggtggtggtggtggtgccttacgtgtccgtgactcgatgggaagtctgatgtggagacgaaagggaaatgagaattttgccgtctcctgacgctggtccccgccccgcggttgtttgacagcaccaggatttactcttttcagtgtgtatatatcccgagctttttttttaagccaacgacaaagttcaggtagcaaacaagaatagccgtgtgtccccaaccagacctagaaggctagaactgaaaacaaaacagtgatagccttgccgctgacatgtgaattgcagagccgatgtttgagtttgaaggttatcggataatagactgggaggctccaaggttgtggtaatggtctataaaacggggaattgtacaaacatgaatgcattttatactaccacaaaatgagcatactgtcaggcacgtgggctatattgtcaggcaagaaccaggtttctagtcatattttctagcaatggttagttaaaaaggtcgtttgttttcactatgttttttgagtttttttttgagagaatatgctttttgagttttgagaagagtagataagttcatcttctattttaaaaatggtacagtagataaaaacctcaatcacaa

SEQ ID NO: 148042 - DNA, 509 bp, Zea Mays
cagagacgcataggctgggcagggattgagcggaggctagctgtgctgtatttatagggagcttaggggagagattatggccggtttaaaggcttcgtgatggcccttagatgcaccgtttcattccactatgaaaacaagagctgtaaacaccattaatggaggaggaatggctcggcggaagaaactgtcacgatgtttgcggctggacgtgggcacgggcactaggcaagggtggcgtggggaggtgggtagccgtgaggagtggaggtgatggggaggtgagcagccatcgagatgaaccggcggcggcggcggcggctgtgtccggctctggcttcgtgcgtccagcagaagaggaaagagtggagagaagaagtgtgagagaatgacgtatgggtcccacttgctagtgagaaaacgtgagtgacatgagacacgccaggctgtgcgatgtggccgtccaggctgatcgttcatgcattttttttctttttgttgttgttttt

SEQ ID NO: 148043 - DNA, 572 bp, Zea Mays
gttttgacactcaaccatagtcacacaataggtggtgtgatggctatgaagtcatgccatcacttcactatataatccaaattaacaaaacaactttaaccgaactcatcaactagcccattgaattctaaccccttgacatgatgaaatcaatatgacaaaccactaaagaaccataattaaatctctaccctccatgattcattaacttgaacaaatatcctagaagatgatattttctaagacaagacattcatgttaccattcaataggagttcacataaggaatactaatagctctcgtcgccaaagagttagaagcgctaaacattttctttcaataaatcacattccaatttaaatctcaccatacaatgtgactattttataagcatggccacaatcctcacaaacacacatacaagtctaccaacacattgttcactccatttattccacaacctatacttcaacacacaccattcattgcctatatatgcactaaaacatttctcacaacatccgaaactcaaaaccaatccctaccacacaaaattttgatgaagcaccac

SEQ ID NO: 148044 - DNA, 1257 bp, Zea Mays
ctcgaccgaggcgatgtcaatggcggcggacgtcgttgaggtccagcttccatatgcaccaggtccctaccctcctgctgcacagagggtggtggtctctttgctacttgctctagaggagggctccgaggatcttcccgccttatccttgaagggactggagtcgaggagatggaggcagaggagagaaggtttgttgagggggctccatccgggcaactaagagcctagagatcatcgagggctctaacacctctgccatggaagtagcggtgattgtgcgtgtgtcgatcacgcaagagttgctccctttcgatgtggtaagtctcatctcctttttgccccttagtgtttctaggattcctcacctgagtatcactcctagttgtagcgtctcctaacccagtcgtcgacccggagtgacgcactgcttgcagcgcagtaggaggtggagcacttgctcactgaagctgccagttcggaggagcgggagctgttcgtgctcactcttaggctgagaagccttgggcggaggtgacgcgcctacgcacatagcgaaatgaggcgcggggtgacgtggatcgccttcggggggagaggtcatgcttttagggagctctgtcggagttgacccgacataccgatgacaccgagttggcactaaactcagctaacgctcacctagaggggttggatgcagatctctcgcgagaacgtgaggcatccagaggtacacccttttgggaacggggttgttcttgattggtctatgtctaaggttacttacatttcttcttttgcagagctctaaaagatgtcctctgtggctcgggacacccaaaatgtggtagacgatgagaagcacaagctctcaattgcttgtgacgccaccgtaatcgcatggctccaagccgaggattcactctcggagtagagcgtggagcttcatgctctatggttggccacgggcatgtcatgtgtgcacctttgtccttcgatgacgacaatggtcttgttgaccgagcaactgggaatgttgtggggccacatggaatttgtcgtcctagaggacgcgttcttcatgagcaatatgccccttggacagatggtccctcacttcgatgagatcgaccctgtcatgagtcgcatcgaagaaaagttgcatcggatcgaagctcaagtcatccctcatgctcagctaatagtgtggtgagtcaacatggggcttctcctgcgatgctcccagccacagctcct

SEQ ID NO: 148045 - DNA, 307 bp, Zea Mays
acattatttaaaaattaaaacagtgaaacaatattccagtcacagattcactaatagtattactctctctatcacacataatagagagcaagagaattagagaacatagtacacattatccgctctcctctccacttctctagactccagcacggcagcactcgaccacaacggcgtcaggcattcagaatggtgagcaaattggcaccgcacaacagataactcacatggttaattcttcaaccgcacaacagacaactcacatggttaactcaacaacggcatcaggcacaactgcagtaagcac

SEQ ID NO: 148046 - DNA, 486 bp, Zea Mays
gttgtggtggtggaggaggctgctgatgtagtggacgtgtctccaacatggcaacccgatcgacaagctcggttatccgtctctccaccctatctagcactttgccaagatccattgcaataatcgcgtcatggatagacttgtggaccgtttcctccatattttcctccatacgcttgcaaataacatcaaagtcttcgtggctgacacaatcagaaaattgtgtgggaatgactacctcaatctcgtcatcggatcctgccattggaaacaccaaaacaggaacaaacagtaaaggttatccctaataagcaactacgctctctgggtgaataggaacacacactaccgtgtcttaccaagttcttactagtatctaatgaaaacacaatgcaaaggacggtacaatcggaggctggttcgtgatacttaccaagagatagtgaaaccgcgattgcaaggtcaaatctgtattgatcagaagat

SEQ ID NO: 148047 - DNA, 413 bp, Zea Mays
gatattctggtctattccaagaatgaagacgagcatactgagcatctgcacatcatgcttcagcgactgcgtgatcatcgtctatatgctaagttgtctaaatgtgatttctggctgagggaaattaaatttttgggtcacacaatttctcaggatgggatatcagttgatcctgagaaggtacaagaagtgatggattggaaacctcctaccatagtacggcagatccgtagttttctgggattggcagggtattatcgacgatttattccggatttctccagaattgccaagccaatgactgaactgttgaagaagggagtcaagtatgattggcgccagaagtgtgaggatgcctttcatacactaaggcagcatttgacaaccgcaccagtgctagctcaacctgacaa

SEQ ID NO: 148048 - DNA, 1241 bp, Zea Mays
ggttgttgatgtgccagatggtcaaggtgaagatggatcaggtgttgctgctactcgatctcatggatcacaaaggaagctcacttcgactgtttgggaagacttcacaagagtatgtgatgatgatggagtttggaaggctaggtgtaacttttgcaagaagcttctttcagctaatacaagaaatggtacaaatcaccttcgtactcatttgaaaatttgcatttatcgaaagaaaccaggtgataaagtgcaaactaatttgagatttggagctgttgacaagggaaaagtagctgtagagaactatgtttttgatcaagaagtggctagaaaggcattatattctatgattgttttgcatgaataccctctgtccattgtggatcatcatggcttccgtaaatttgttagttcgttgcaacctttgttcaaattgggaactaggaacactattaggaaagatataatgagcttttactggttggagagaagaaaagctaggaatttcttgcaaaagattagatgtcgtgttgctattacaactgatctgtggacagccgataaccaaaagagaggatatatggcagtcactggacattttattgatgacacgtggacacttagaagctgcattttgaggtgaataactaaatctacttgctgcaatattgtattatatatgaactaaaatggtgccttttttgtaggtttgtgtatgtgccatgtccccatactggtgaggctatttgtgatgctctctacaagtgtctccagagttggaatattgattgcagggtatcaaccgtgacccttgataattgcagcagtaatgacaccatgattggtcttatggaaagcaagattgggccaggcaatttgttattagatggcgacgtgttgcatatgcgatgttgtgtacatatcctgaatcttattgtcaaagatggattggaattaattggtccttctgttgtgaaaatcagagacagtgttgcttattggattgctacacctaaaaggtatgaaaaatttatgaaaacaacccaactacaaaaagttcagttgaataggaagttgtgcttagattgcaaaacaagatggaactccacttatactatgcttagtattgctataccttataagaaggtttttgaacgattgcataatcttgaacccaactatcaagttccaccagaagatgactggaaatttgcttctattgtttgtgagaaactgaa

SEQ ID NO: 148049 - DNA, 324 bp, Zea Mays
cgaacgaatcttcacggtggcggagaaaggatttgggggaaacaaggaattcgggcacactggtgatcgattgctagcaattcttggtggctgggtagttgatgaccttgcggagctaggcaccggctcaatttatagggagaacgggcggtggccgcgaatttggacgagacacgcggcggtcggaggtgaagaagaaagcactggtgcacgcgagttcgtggccaacggcgtggcaacctccccggcgatgatgggatggcccaagggagtcacggcgacacggtagaaaagctaggccacgcggcggaggaccgtcgaccg

SEQ ID NO: 148050 - DNA, 460 bp, Zea Mays
cctcggcttcacgtgggctggcgactgtggtatgtcttaacccccacaagctgatgttctagcatccccgtaccttggtgaagctcaccgagaagtccgtttggtccttacggtcttggtttggtcggaacacgggcttgacaccgcgtgaactgtcctggtgatgacccactcaaagttcagttggcccaggggcaattcttgtgagcgtcgtgttgcccgcatcctactcgtgctccctgtgccctcaatttaaaacatcctgtgcctgagccatttgggtgagcgttgcggtactgggcttccgccttgaacgtggtcatggcactctgtaagttagtgagtcaaatccatgcctgtagatgctcggggtaggttaggatttggtctggtcgctatccaacggctgctcgggctctcctccgccgttgtgtcgcggtgggaatgcgtccgcgccgcc

SEQ ID NO: 148051 - DNA, 788 bp, Zea Mays
gcgggagggcgtcgccgccggccatccacagcggcaagctcaccggcgcacaccaactaagagaaatagggacgtaatcgatactacgaccagtgttatacgtagggaagacagcagcagaggcaatgaggtacttcttaccggcagttacgcggtgaagcaggcaggccacagcgcgatggatcccgcggcggagctagggcttccgatgaggaattccgcgtgcgtagagaccccaacggcgaaattagcaaccgccaaggtgccaagaggtcacgacgcaacgctagagtgccccacggatgtccccgagcccgtggtttacgtgtttgacggcggcgactttgagctctccttctcacccggcggcacactagttgaagattggaattcgctcagctaggaaaacggatgggccgagggagggcgcacgacgcttcggttatagcctccacgtcccggagtacccgacacggccatggacatgcgcggtcaaagcggagattctggtgcgcacgagatcttcggaagagaaacatctgacgaagcggggcccgcgtggcagtggagaaatggttcaaacggcgtgcaatgccgatgccgctgacatatggggtctatggtgcagtgaggtccgcgcgctcgcccgccacctgacgacccgggtccaccaatcagtcgcggagcgcgcgcggtttcgtccgtgggttctgcggaatgggaaagacgctatgggccgaaaatgagtcagtcggcccaagtagtcctttaattctttttctttttta

SEQ ID NO: 148052 - DNA, 645 bp, Zea Mays
cgagaaataggaaattttcattgagcattcaagttagggacaaatctcctgacataacacgaaactgacacctggggtgtcacaccgaacctcgtccaacgcctagaggagagcatgaaattttcttctcttctgatagggaagcgatccaccagcgtgtcgagttgcactcggttgggtaaggcagccaagaagctggactgggagaactgacaaagaaccaatcctccgtcctccatttccagccgtggagcaaagaccaacatgatctcatctgcgctagcatctctagagctaatcactgtgattaccacatccgtctagaaattatcttccgcaatagacatctgaacagaccaatcgataacacaagcagtcgcctcgcttgccggaagcatctgctcgggaggatgtggagccaaaatctccaaagctggctcatcttcatgctccatatgtttcttcttcctccaccgtttgcacctggacctggcagggccgccattaccgtgtgcagtcgagacgccaagcatgcttccccctgggtcagaagggacgatcggaacaacttcgggtgaagcaatatgctgccaaaccgaacggtggcctaccgatcgttggaccctcccctcaatcgctggtgaa

SEQ ID NO: 148053 - DNA, 592 bp, Zea Mays
ccgccagcttgttcagggcgatctctctgtgggcgagtactgccgtcagatgaagacgatggcggacactctccgcaccctcggggcccccatgaccgatgagagcctcgtgctcaacctcctccgtggtctgagtcctcgcttcgatcgcgtggcgcccatcctcacccgcatgaagccgtttcccacctttgcggaggccaagaacgacctgcttctcgaggagcttcacctctccgccgctgcaaccaccgctcccgccacggccctctacagcgcaccacgagctgccccctccgactctagggggggtcctgctcaccgcactcaggccccgctgccctctggagctccacgacagtctgctggcttcgggggggctcgcagccacagtcgcggccgcggtcgcaagggcggacgaagtggcggtggcccgtcgggaggccgtggtggctcatcgggtggctctcagtggccatccttctacaacccgtggactggcaccattcacatgtggctcgggccgtccgcgggtgcctcggcccctcgccccaccgcctctcagcaggtcttctttgccgctgcacccccg

SEQ ID NO: 148054 - DNA, 278 bp, Zea Mays
atctgggagaatacgatttactgtacgtccagaatttctagaatccaatttgatgttgttctatttggatggacaggttacatctaggaaggatcaataccagtactggtgtacaagagatgaaccatatcagtacattttagtaaatgactttgtagagtccttcaaagcattccatgttggccatgcattgcagtcggagctcgagctgcccttcgatcgaaccaagaaccaccctgctgccctcacaacatcaaagtttggtatcagcaagatgg

SEQ ID NO: 148055 - DNA, 591 bp, Zea Mays
ttgcctttgacccaatgcaaaggattttagaccttgcttcagagcatggcgtcctgacacctctccctcttgctgcagctaagctcagaacctcgctctatgttgacgatgtggctatcttcatcaatccaacccgtaatgacctgcaagcggccaaacaggttctcaatgcgttcggagctgccacgggtctaacaacaaattttgagaaaagctccatccaccccatccgttgtgaaaatgtggatttgtccaacatcctccagccgttcccgggatgctgcaaaaccttaccttgccaatacctcggccttcaactccacacccgcccgctccaaaaaattcatgtccaaccactagtggagaagatcgaacagcgacttgccggatggaaaggtcgactgcttaaccacgcaggacgcctgaccctaatatcttcagtgctctcctccatgccgatctaccacctaatcgtattcccccttgcaaaatgggctagaaagcaaattgataagattcggtgttctttcctatggaaaggcgaggataacatgcacggggcgcactgccttgttaattggcaaacagtgg

SEQ ID NO: 148056 - DNA, 479 bp, Zea Mays
tatttattgatcggtaagcctgcttatatgcttttactgaattggtggttgtcttgccatacagcggaaggaaagacagcgatgtaagactaaggtttagccaatcattagtataccctcgcacaaccaaaacacaaatgatggccgctgatgacacactgtccttgtgcaatgttttctattcactaaacaagacaagcgcgtcatttgattgtgcaatgttaagtcaaccgatagatgggcgacagtgttttagggggtcctactttctagctgtgtgcagataactcaagtctggcgctccatcccttctctctttaaactattggtggatcgagaaattcaactataatcacgaaattccaaaccttctgtcgaagagttaattgatcttaaaaacctcaaaagtctagcttaaacatcaaaatctgaatccccgaacttcccacttggggttctaccttctgacgatggcgagt

SEQ ID NO: 148057 - DNA, 465 bp, Zea Mays
gtgttttacttgagtggacataaacacaacctagttacgccttgaatagaagggattataggaaacctggtatcacaaaaagttatttgctagcccaataacgtcttcatcctctagttgtactctaataccctctcgtgcgaatacagtgccctcaatatcataaaaacgtcatttgtggtttaaaaggtgatctattgttttgaattctttatattccaactttttagtaaccgtatggtggaaaaatgtgccttacaactttaacctatgtttggatagttctctcactcaatttggctaaatttttcatggtctttattttattgagaaacaatgtggcatattaatatgtagtgttttatttgagtagacataaacaccgtctaggtatgccttgaatagaggggattataggaaacctggtatcacaaaaggtcattagctagcccaataacatcttta

SEQ ID NO: 148058 - DNA, 410 bp, Zea Mays
ttttcacgcatcacagaggcgatggacaactttaccaaacatttaccccgaaatgcttgatgaaggacgaacacattatactcatatgaaattgtgctaaaatatttagtaatacttcgattaaatcgacccctcttacatatgagagtctttgaaatttgctttgccatgctatttttgcaaattatgtgatagtgcgaagatgatgtgttgcaatgatgcaaatgatgtgaataatgcagagtgtgagttggttccaatgaaattgtgtcaaaagttataaagaatcccgccttcatacgaaggtcttcaaaatctgactctgtattcccttaggaacgacctctgagcctttgacacctttactttggtgctttttcgaactatgcattcccttaggaatgactttt

SEQ ID NO: 148059 - DNA, 441 bp, Zea Mays
ccattagttagaaaatatgcaatcaccatatatgaaaaaacaacaaagagatagcttattactctcttgtacggccatgcgatcgacatccgatcagcatcacccatctcctccaaataaccatatgggcgaggtagaagggcatcccttttcagcacaacattctcaaataaatcccttctgtgttcagaacagaacagaatttggcgacagcgtttggagctggtttcctgaaacaggtcagttcctattagatgaccatgatcatgcctgccactggcttaattctgttgtgtcctaagaaagaagatccgaaattggaaggttaaattcctagggccagacaaagagtccaatctcattcatcatatcagcaggtgcaaaacatgacacccttgctacatgtggttcgttggtcaacaagtagttactcagatcttg

SEQ ID NO: 148060 - DNA, 315 bp, Zea Mays
ggactgcagacagacttgaaaaaagaggactaaatcatcctcctagatgccctctttgtgaccaagtgcctgaaaccatcaaccatcttttggtttcttgtagcttttccagagtatattggtacatcactcttcggaaattcgggctccacattcttgcccctacccaagatgacacaaactttctgcagtggtggaaacgtattgctaatattgtgtcaggcatgaccaagaagggggtaaattcacttttgattctgggagcctggatgatctggaagttcagaaacagagtggtgtttgacgggtcccccc

SEQ ID NO: 148061 - DNA, 359 bp, Zea Mays
aatggattggtgaaggttttgtccatgaagaacaagggaagagcctatatgaagtaggtaaggattatattgaagagttagttaacacaagtatgttagaacctgtcgggattggccatgatggtaagaccgtatcttgtcggatacatgatatggtccttgatcttatcagtttcttgtcaaatgaggagcattttctaacaaaagtaggtgggcaacaacccgtatctcttgatctgcctaaaaaggtccgccggttatccctccaaattagccaggaagaggaagccaagcagctagctacaatgagcttctcccacgtaaggtcacttactgtgtccactgaagttttccagttg

SEQ ID NO: 148062 - DNA, 319 bp, Zea Mays
ttgttttgatacactttgtaagttctgtgttttacattagtccagttgggttaagtttttacttcgaaaggacaggcccaaactgatgtaaaacagtttgaatctataccgtctttacattagtctaacctttggaagtttgtattgataataaacaccgtatggattttttctgcaagataaccattatcttgatagcgtattgttatttacttatttttccagtttgaatctgtgaagcttgtggttattgacactaaagtggggtgtcattcttggtcaatatagggttgtccatcaaatccattttatttaaaac

SEQ ID NO: 148063 - DNA, 406 bp, Zea Mays
gttgaagcagaggccgaggcggcgccgttccgcctgttcctccggtgacagccgcttcaagggcggaccctctggtcgcgacaggggcgcgcccgctggtggtgcagggagggcgagcagcggctgcttgggcgccggaggaagagcgcgaggggctcccctggcggccggtggcggtccccgtgccaactccagctgctcggcctgacgggcgagactcatggccccatcaagtgtttccgggttgtggatgcgaacgacgtggctcaacgggggaagaagaccgcctgtgtagagttggacgcgctggccctccgtgaggcgacccgcgcgcggcagcagggcctggaacaagttggagtattcctccacggtcccggtgcggcgacactccgccaactcgaac

SEQ ID NO: 148064 - DNA, 1384 bp, Zea Mays
atcgttgaagacaccgcggcgagaagagagaaaccgagagaagggagagagcgccgccgcgcatgggcagagcgtgtccatgcggtcattggggcctcgggaccgagtcaaggggcgtcgccaggccgcgctgaacatgactgtgacttcgcctgggcggacttgcgctccggaccaccggaatttctcgccggaatcctcgtgccgccacaccgcgtggtcgggcccctctgcgccataaactccggtaagttttccccatacagttcgctttgtcctgctctgcgtgtttcgccggtcggttacgagttcgggcgctgggagcgtcgggttgtcgtgccacggcgatggcgccgccgcggtggtgttcctcgccgctgtgggggtcgttggttgaggaagacacgccctgcccgttgaccgcttgatgaacgatagggattaaatcaccaataccccccttcaccgattcaatccggactgctgatcgaaggatggacgggcagggtcagatcgaaggattttaaatccttaatcgtttatccccgatcggacggctcacattacgcaccggttcgcgcctcggttgatctaatcgggaccgtgcgtgtttgatccaacggccagaaaacatgcgtaccccttcgtcgcgtcgattttgctaaagagcccctctggtctttataaataaacccgccctccatagtaatagaaagaccattacattcaggtcccgaacttcatgaaatcgaccctgagtctgttcaaaatagtgcccgcggtccctggtctaatataatatatgggattaaatctggaaaatagatttctgctgtaaaaataattgtaaaacttaggaaatccatatcttattcattctaagtccattttagtccgttcaagttgcgttagtttcgtaataaaattgcctacgcagtgacaagcattattttttaatatcacatacttttatagttagatttttattaaccctatgtatagtagattaatctttctaatcaaagtaacctgtctataattataatttgactagaagatgatctctaaccaagatataacttatattaaagttgaattagttatttatttaatatatatctcacatgatttataaaatcaactaagaatctagtttttcatagttaatcacatagatcttcgagaactatatcttttcaaccgtaactccgaatttagtgattctcaaatctacgatctcgtagcgacgcgtagaatattattgtgtgatttatttccatgttttggtttaatgttatcatatccattattatttttatttgtatgtattgctacgaatagaagcaaggtaacgaggagacctaaagcaccaactttggagaag

SEQ ID NO: 148065 - DNA, 437 bp, Zea Mays
tcgacacacagatagggctcaagatggaaataaatgggcaaaggcataaaatgaagcctatgctaggattcgtacttgaaatatttggctttgatactttgttagagtggatgtactaaccacatgaagctaaaagattaagccatatggagaaggtacgcaatccactcatacactttaacattaccatgtgaactgcttacaaccattagcaaaagtcatttgccaatatcagcgcacaaaacaggaacaaactatcactccatagctcttctctctgatgggcaatacagggggatgtgcctctctttagtgcaagaataaaatatatgtaaatattgatgtattatgagcaactgcctactgtacagtcaaaacctttccaaactttgttcacacacaaaaaagaagtctctccaaacttccaatacgatata

SEQ ID NO: 148066 - DNA, 401 bp, Zea Mays
acgacgtcgtgactacctccactacgatccttcccctgcttatggagatgacagttccaagcatactccaacatctctctccctacacgcacaactagccatggccgcgcggccactgcaacccgtgcgagcacaccctgcgatgcacgagtgttgctctgcacaaccgctcgacggtcgtcccccagagcttccccatgatgcgcgtcgtgaagcccctcgacgaagaccctaggaacacctgcaggggtcggccatcgtgcacaggtgagaacccactcctctctctccctcgtcccgccggcgtcgtccctccgctcgcgtgccctttctcggcgcgagcgcgtccctgcgcagcggagctgggtggccgtgctccagcccctcctcccctcacctag

SEQ ID NO: 148067 - DNA, 427 bp, Zea Mays
gccatagttggctataacgggtgctctgccactgcctaaggccacattcttctaagagctctagccccagccataccccacaaaatagcatcttctctgatgttctattgaatgatgctacagtttggagatgccccataaaaaaatacatgaattcctatgtttccaaagataccatgccactaggattaccaaggaattgaagcccttttctgaacttttggtacctggttctctgctatgctccaccactcttgtaagactgaaacatccatccctggagtcaaatgctgcaatcctactaaacttagcactttgaaccaaatgtctctagcaaatacacaggacagtaagatttgttgggctgtaagattgaaacttatcacctcctaccccagttttttttagattcacgtcatttatgtta

SEQ ID NO: 148068 - DNA, 539 bp, Zea Mays
tagtcctggaccgtccgccgtaggtttggggagtggaagtcacgtcgtaggcggtgtagggtgcgctggacgccttcatggccatcatcatgtatggcggtgacgagctcgtggaggagtggcgatgctggtgggatgtagaggcgtccttggaacgcgacgagcccatcaaccagcgaccatgcgcccgtgcgttgtcctgctatgagttcctccttgagggtgaccagagcagggtcggtgtcgtgagcttggcgtagacgctcgacaaagttgaaggtaggacccgatatggcgaggagcaccggctcttctgtgtcgtgcttggacagagcgtcggccaccgtgttggtgctgcccgctttgtactccactgtgaagtcgaaacccaggagcttgcccacgcagtgatgctgcggaatggtggtgaggcgctggtcgagcaaaaatttgagactgaagtggtcagtgcataccaggaagcggcgtccccaaaggtacggccgccagtggcgcacggcgaggactaggtcgataag

SEQ ID NO: 148069 - DNA, 707 bp, Zea Mays
aacagacaataaatagtagtgtggacgtgctaacgctacagtaaaatacaaaacaagataaaatttgcaaaaaataaaatgaataatcagattaattaaggttcacgtctcatatatctagttatactcatatatctaattatacaaacgggcgaacatttaaatctggaaaactctgtcaccagcaagttcaggtacatgaaagtacaagcctaggccaattataatgcataacaaggcaatagtaagtcttatttcgcctcaactatctaataccagatttgctaaagtacgccatatggtccttcagggataatgtctttacattcatttgcactgcacttcaaaatgtccactcgttttagagaggcacaaaagtggcacaatataattttctctgtaaatgaaactggtaaactttttagaaacagccaaatatgtgtcttctgcgaaaagcatcgaaattcattttcttatgcaacatgacagggagataagataaattaccttggcaaatgctcaatagtacaacggaccaaccttattaggtcatccagattttttaggtcttccacagatttgaggcatcctcatcgtcactttcaccatattttccattgttgcttgtccaatcttcatcacctttgtcttccctttcagattctgagccatcatcctctgactcagcaatcagcatgctcatcctc

SEQ ID NO: 148070 - DNA, 545 bp, Zea Mays
gccaccaggtcgatcaagtattagtccgctggtctgactgtgatgaagcgctggacacatgggaggatgaaatcactctgcggcgtcaattcccagcagccgctgcttggggacaagcagcctctaaaggaggggggagtgtcagctccaaggaaaatggtgcacgtgagggagcaggaagacgtccgattggcggtgagaatcagaaacagctgaagaaagaagtgttgggccgccgtgtgcctaggcccagtgggcgatatccatcggacaagtggtccgtgtaagagtgcaataaggaatacttaaactaagactgactacagtgaacgctaggaaatgagaaaatactattgctctccttccatctcctacctctggttctcctctgtaccgtagctgtagtaggctgttaacaggatagtatatgatcattgatcctaagttgtcaaaatatacatcttgagaacacacttcgtggacatttttgcatagctgccaattgtaccgtgacttccgcaaccagtagttttcatggacgtgtg

SEQ ID NO: 148071 - DNA, 571 bp, Zea Mays
gcagccttcggcgtaggttcagccgaggcggccagagcagtagctttcctcttcttcccttgcccccgcagcgggtagcggtagtcggggtagacgaagccaagagcgtcaaaaactctattcaatctattcttttctcgacttccgaaggctgtggataatgcattatcttctgccttggaatatgatccaagtagttcatcacttgtaacttcgatgcattttagccagtcatcgtttggttcatcgaatttatccccatatctgaatgtatacttcagccggaccaattcaccttcgctagacttggtgacggtctccttctgcatctcccagctctctacaagcagccatactctgaatgctatgtgctcttgaattaaatctcttgtaccaataaagaagcagacagtaccaaatgccttctggcatgcttcggcggcttcatcaatttcaaccttcggctttcgaaggccgaagtgggaccatatggggcgcataataacctccttgatgtcctccctcgctatcaagtcatccttcacataaaaccattcttccatccaatttc

SEQ ID NO: 148072 - DNA, 736 bp, Zea Mays
gactggcagaggttctccacaataaaccactcgagacgccaccccttgatgctatccttaagagggatgtcgaggtactccatcttcctcccgcgacgcatctccagactcgcaccaccaatgagctggtgctatccccctgccattccaggccgacaatgatacaaatacttccagaggccaaagtgggggagaatcccgaggtaggcctcacacagatgaacaaagatggaaacttgcaagacagaattagggttcaagtgggtcaaattcaattcgtagaaatcaaggaggccgcagaagaagggagagatgggaagagcaaggccgcgaatgaggaaagggacatagatgacggattcatgggtgtcttctgttggaactgtgaccccgcgacaaattcacctagagcagatctctttcggcagtaaaaccccaacatcgacaaggtgaagaagatcgaactctgagataatggacatatggttacccacgaaaggcaactactgttggggtcaatggggggaatgatggccacggcggaactttgcctcttccgcttcagtgccatcgcaatcttgacgacggaacggataggagcaatatcctagggaagtagatgagtggttcgaggcgaaaatatgaaattagggcacagaaatcaaaatgcacatcagcgcgagtataaatggggctttcccgggtcaggtgctatttctaaaagtgccaagtcatc

SEQ ID NO: 148073 - DNA, 1218 bp, Zea Mays
ctcgtggccgactccttccctttttatgtctctccctctctcctcttcccttctcagactcattttccagccgccgccaccctcttgttctcctctctctcaccttcacactcctcgtcaaaaactttctcgagccctcactcttttggaagagtggttggagatccgttcttcccggcgtgtttccaccatcttcctccatctcattgggagatcttgaccaaatcttcggatcgaggtattgctctatattatttccttgtactcgatcctacgcgttcttgattatcatatgtatcattcattgggtacattttagtttaagtgattgcaacacttagattatcttcattttgtcacaaacattgttagggattagcgatttgatattgttcgttgtagttgaaccgctcatatgaacggttgaagtgcatgctcaatatcttatgcgtttcttctcaaacgtgtttgatccttgctcatcataggttctatttcttatttcttatttcttagaatggtgcgtcgaatgaacccgtcggtggtcgaatccgactcctcggatgaccaggaaatccacggagataccccacctcgctctcgatccaagcgagggcgcggaagcggcaatgtcatgccgggtgctgaggcctccgggtctcaaagtgctcgcggtcgaacatcccggaatccttccggacggtctcgacctgcgacgaatctgcaggcgtgggagcctacaagtgatgatgatggcgggaaggacgatgaagtcgatcttcccccggcccacgctcctgtgattcgcggcttggtcctccaccgggcagaggctcggcgtgctggcaatgagccagtcactgactttactgccagtggaggctctgctcttctccaggatcttcgtttccaaaatcctgtattgcgtattcgcgatgccaggatcgatggaaatcgcttttggactcttcaccacgtggatttctataattccgtcattctacccaagaagcatcaacccatcctgcatcaacgatatattaactgggaaggttgtgaagcgattggggacccagaaatgtcacaggcactgagggcctgtgaaaggaaacaaatgaagaatatcatgacattccaatatgattggaatgatgaagtgattgctcaattctactccactctctggataaagcttgctgacgaggagagtcattacaa

SEQ ID NO: 148074 - DNA, 395 bp, Zea Mays
gccgaggattgtgttctaaaatgttgcaatagcaagattttggatttttttccagggagactttgtttcagttgattggtttggtactttggttcattccaaaggtgattaaaatattgttgctgaggttcctatgttgcagtcttattttcttctatgacttctttttgttgtgagcgtgactgtccaagttgctgtgggcattatctatttgtgacaagttagtggactaccttatggccgagctgggctgcacttatgatctttgaagattgtttaaccgtccaaacctaagtacccggaatccctttttgtcttcattgcatgtttatgtcacactctagaattacccttcctctttaggatgctctgttactgtgaagtataggaatctg

SEQ ID NO: 148075 - DNA, 281 bp, Zea Mays
ctaagccatcgctaatcctcagccaaaaccctaatctacatcctgagaggcacctatcgcctaggtgtttgcgagtgactagaatcattgtgatctatggcgactgacgaccacgatgccccaacggacactggatccaagcctccacctctacaggtgaaccaagacgacgctggtgaccatgctcctccaccaccatcgctttaggacatgataggaggagggagatctactattggaggttcatcggcgaccgatgcagcagcactggccaacctcac

SEQ ID NO: 148076 - DNA, 712 bp, Zea Mays
cggagaatggagggcggccgagggcacccaacccaaccctagcaccatctgtccataaataccgcacgggtgggggtagccatctcgtcttcccgatccgccgccgccaacaatttctttatgtttttctgttttcttgttcagagaacacgcatgttccatccatgcccacttgcgcgttttttttgttgttgcagttcttcctcgtttgcagttcttcctcgggatttgatttgattgattggattgggttggtgcgggggcatgctgggggcagatgacgacatgcttacgaagcagaagctgctgcctccgtgacgaggcacgccgtgttgctcgtcttccatgactctgatgcctgcctgcttcgctcccaccaccccacaccttaatcgatggattaggaattaacctgcagcgcccgtccaggtctcgtgagagatttatatgtttggatcagattttagtttcttgaggcagatgacgacatgtgcatcctgcttgagatgcagaagctgcctcccagaggcttagccatgttgctcctcttccatgactctgatgcctcctcgtcctctcccatcatttgtgttttgttttgtattggtttttttttgctgtcttgctgtcagtgatggcccatcccctagcggttaaagctaacaaaacaaaacaggcgatgtttccttttcttgtcgtcactcaggccttg

SEQ ID NO: 148077 - DNA, 390 bp, Zea Mays
ggctagtcgaaacctcggcttcattaccgctacttcttccattccacgcaccctggctctacgggcttttggaagctgaaggccagctgttaagcacaacacaccatctaataacgtctcattttcagtggagccgtgaccctctaccatcatggataagcacaaggtcattattcaaatcaactcgctttctcgttgccttggtaatacttgcagtatacaatagtactattagcattccagtctgaataataaaaaggataactagggctcttgtgtgctgtgcccaatgcggatgtctcatccctgtaccgaggccaccaacccatcagcatcgcaccacacaatttgccaaagcaaacggcggtggatcgattagtttattttggc

SEQ ID NO: 148078 - DNA, 408 bp, Zea Mays
atttttagttgaccagggcaagcgacctcaagagcaactcttggagcactaagcccctaaagcaccagcagaacaccataggctgctctaatacacaatagcctgcaagacaacttcgaatctcggccttactccttcaaaaacacaggcattctgatgcttccaaagttcccaagcaaccaagataattagggaatcaaagccttttttgacttccttagaagccccctttgcagcactaaaccaccagctagaaaatatagttgcatctgggtttggcgcaaggttggccatgctgagtttatgaaaaatcatggtccagacttgccgtgagaaaacacaagagataagcacatgctggattgtttcatcgcttggtcacaaagcggacatacagcaggatgagga

SEQ ID NO: 148079 - DNA, 1091 bp, Zea Mays
ctccaatcagaagccttgccatttccctctcagctgcaacttggagtggtatctggaacttgaaggtagggtcttcatatgttcctctccgtgctaccggagtagagtttgtctgaataccatactttatctgagtggcatttatatcttgaaaatgtaaagccccagggcaacgcattgggttttgaaacaaccaagcatcaacatcatctggagtcctaaaacctaaaacctgaaagaatcactgataaccaattagatgacgtgttgagtgattgtcaattctgggttgcagtcacagaacttgattaagttttggctagtgcacatactccctcaagtcataaatataagctgttagtattaacaaagtgactcaaagactttgttgcccttcatttatacactgagaaagatggagcgcttatttagaaatggaactaaagcaaaaatagggataaaagtgcttagaaattactgattggctgagctttacagcagctgctgttgtggctgcacagcatgtgctacagtgtttcataggtgtgaaacagcagcagatgctgcagcgagcggagtactataatgaaggattaattatatacatgttactcaacttctacaaattaatgagcaacgttagggaagtacaaggaaaggtcaaaacgtttacatgtggattcgggtattatatttttcagtttaccatcagattcaaacttatgtcaaatgacaatccaaagagaactaaccacgcttcattgcacacttcgtgagtgtaggaaagatgcgcggtagtgggcgggcacatagattgcggcaggtggcacggtgttgaaaactggtgctccgccctgatcttgcataactaggtgatagctctagtggaattcagtgtttttgttttaaatgatgtacccttccttgtaacccctagtggggatgatgcgagccgaaaaaaataatgaataatgacatgagaagccttgaatgccatattttttacctgattagcataaaaaacaaaaaaatcacaagctgtaagtaaattaattcagatgactacataatgtacccatgaatgtctggac

SEQ ID NO: 148080 - DNA, 1090 bp, Zea Mays
cgggggtgggcgcgggcgggggagccggggcacagcgaggcgtccacctcgggtctgctggcgccgccgcaccagcaggaagggcaggaggccgagtcgtcgtccgggggcaggaggcgagggtgcaaggtggcgccggagcccaaggagctggaggaggggaccgccgcgctcccgtcgatgcccggctcgccgagcttcaggtactactgccagaagaagacggcggccgtcgataggatcgtggctgatgccatcgacgccgatgacaccgtcaggatcagaggtacttcaacttaattcgcacaccgcgacgcgcgacttgctcttcacttccatgcttgccgtctcgtgagctccattgacgctgacacttcccgaaccatccttctccccatctcctcctctgcagcgacggcgcgacagctgagcaataggagcgaaatcacggcaaacaaggcacaggactccaacgaggtacatgatccatatccttcatggcatcgtgcatgagctctcctattgacatctgaacattaaacgttgcttatgcttatgcacttgcattgcagctgtggtatacagaatatactacatctgctaatttctgataccttaattgatatgcaggtctctcaacctaaaggggggaccaaatggcttaggttcagtggcttgtcgatcgtcgctgccgcttggcacaagcacaacttgttcagccgccaaagaagcaagccttcgccgcctcctgctgccgcttcagatgcaagctcccaaccctgatcaggcagcgctatatgggatcttctacattttactacgtctcagcttataaaaacacacacgcatggctcattcagtcatcgtttatgatgcatcgatgctggctttgcatcattcgctgatattttttcagccttggttagtccctgtaagctaaagctgattctgtaaatggtgcaaattagtgttaagaaaggagggcaatctggaaatccatccaagctttgcgtcatttggttatgtgtactgttgaattctgcgtggtcatgtagcagaaatgtttccgcaagatgcatgtttgttttag

SEQ ID NO: 148081 - DNA, 283 bp, Zea Mays
tcttcgttccccatcctcctgcagattccaatcccttcctccagatacatacagcatagggcgagagtggctgagtgagtgagggacacagtttcgttccaggaaagcctgctgcacacatgtgacgccttgaggctgtaagttgctctacccatatctgccgaaggatgcgcgtgtttgcattgcagtgttcttgcttcctcctcctcctccggtggctgctggctgcggcacgcatggccgtcggctgtctcgcgattcccggtagttctctttctctgcg

SEQ ID NO: 148082 - DNA, 330 bp, Zea Mays
tgaaaagcaagaatgagctagatcgctatttggaagaagaaactcttcctcatgatgagaatgagtactttgatatccttggttggtggaaggttgctggtactcgttatcctacactgaggttaattgctcgtgatgttttggctattccaataaccacaatagcttctgaatcagcttttagcattagtggtagggttctaagtgagcatcggagccgtctcacaccacaaatgttagaagctttgatgtgcactcaaagttggttttgtcatgctcttaaaggtaaagaaatgtgccttgctaatattctaagtgaatcaattttct

SEQ ID NO: 148083 - DNA, 346 bp, Zea Mays
cacccattgggatcagctccagtaaagagttccaccggtacttcttcagcagcaggagcagaagggccagcatcctgatccaagcacgacactcgccgaagccgtctctttttctttttcttctcctcggtaggtgcagttggatgactgacctagcggagacgtttcgggcgagtaccctcaagccttcgagtatccaaggttttttcaggctctgggatagttgcaatagccattgtttcagcagggaccgagtcagaagaatccccagccaacatgtccagcatagcacttatctctgcatcacccggactcataggcatctcaaagtgaacttgcctctcat

SEQ ID NO: 148084 - DNA, 507 bp, Zea Mays
actggaagaagggcaagggcggatcccactccggcggcggtcccaggtttcctgccgccccctggtactgctaccccccctggaccgccggggtgcatcagcagccctggcgtccgccggcgccgaccccagcctggcgcagtcctggcatcctcggccccttcactcaggcccaggcgcacattgcgctggcccccgtccggtactccgacaaccctgctccaccaatggcagagcagggcggctgggatcaggctggcctcatagccgcactgaaccagatgtccctccaggggtcctctccttgggtcctcgacaccggcgccacaactcacatgtcgtcttcggctggtatactcctgtcccgtctcccccctccctcattaggcatcacagttggaaatggcaccaccatacctatcaccagtcgtggcacatccacactctcctcccccacctctacctatcgtcttaacaatgttctggttgcacctgcatttgtgcgca

SEQ ID NO: 148085 - DNA, 477 bp, Zea Mays
gtggctgatgacatcctgcgaggagtaggatcttcgttaacttaatgtgacggcagtatttggcgtaggagaacgaaggacaaccgaacacatgtaaaactgaggccagcttctccatagctatgaaaacgagcaggtgaaggtcgtgtccagcttcagtatcttctttggcactgcaaatggccattaggcactggaattatctcttcagaaacttcgtgaatgatctcttcagaaaccaaacgttgcttctgatacaactgcttgagaagtatctgtcgccattttttctgttttgtctgctttttagttggaggcattcttgagaagggaagcaatatagcttgatattagtttcacactagagatggcaatggagatgcccacgacccggtactatgatgggcatgtactccattagggtatgtatatggactaaatatacccatggttctcttattggacaaaaacattcac

SEQ ID NO: 148086 - DNA, 800 bp, Zea Mays
cttgtactgggttagtgcagataacatgcagatgatgagataagctccacagatgtaagcaacaaaaagagaaacaaagatttaaggatgcagagaatatattttttatgatgctaaaatttatgccaaatgagaacacaggatcgtgctaaaattttgactaataatttgttacaaaacatcggattatttccggctattttcgtttaaggtgacactctaataagagctaagcatacataataaagcactgtagaacagttcaaagttgattcaaagctctgcctttaggttgcaaactggatcgacaagtaaatgagtcatgttattgtctagcacaggtaaagcagtccagtcacaatcctattattaccccctcctgtccgatttacaaggcacagtttaacatgacacggtttcctaagttacactttgaccgttcatttattttacattatattgtttgtagttataaacttatggttattagatggtatatttagttacaaatttaaccatatcatgtttgttttataatagttaaaacttgttagccaaattattgcttattaaagattgtaaagtttgaatcttggtatgtgcaaacaccttataaactggactagagtagataagaattatataagatgcgtccattgcctatttaccaaattatacaagctaatcaataaagtgataataacattaatcaaacccaacttaagagtctcatcctgtctccagacaaagcacaatccataagattaaccaacacctgcatagcgttcacaacttatagc

SEQ ID NO: 148087 - DNA, 496 bp, Zea Mays
gtaagtgtggtttgattgttagccctgaatttccgaagcaaggaagtgtgggttcgagtgctcggtttgcactattttttgcacggtgtggtagctgcacgggcggggtcaagtactgggtaggcacattagctgcgcggcatgcgtggggcggacccagagtgtcagcgcggaggagtgaagtcatggtaacaacaggtgcccacattaagttcttaatagagtattatatatttcatggcatttatttcaatttaactttgctatgactggatatgcagaggcatgtctcttttgtaacaagagaaaaatgcaatagtgcttacaggactatgctagagagatgtaagtaggttctaatctcaagaactgatttaagagtttgtgttccctgattttgtgtgcacagcagcacaaggcctgcaaatgtagatttaagatctcgtacaccaagtataacttaactatgctcttaggttattagtttattgtgttt

SEQ ID NO: 148088 - DNA, 427 bp, Zea Mays
tgcacatcagatagattatcaggtagctcgagttgataggtcatctctccaacttgcctaaaaactcagaatggtccaatatagcgaggggacaatttgcccgtaactttaaacctcctcattccacgaagtggtgacatcttgaggtacacataacctccattctcaaattccagtggtctccctctattatcagcatagttcttttgcctggtctgagctatcctcaaattctcccgaattatacatacttgttcttctgcctcttgaataagttcacgtccaaagaactgtcttcctctagtctggtccaaaatagaggagtcctgcatttcctgtcatatagagtctcgaacggtgacatctttgagactggcctggtaactattatatgagaactcagcataaggtagactcttgttccaac

SEQ ID NO: 148089 - DNA, 627 bp, Zea Mays
taacaattttaattgtcttagcctgctgctgatgtcatctttctatagcctaatactatttccctcttttgtatcgaactagagcaaaataccacccctacttgttacagaatagactcctgtcagcatagcttcgccatattttgcatctatgcaaaaatgattgtttgtatgtttcagggaagaaatttctagctttatttacttttatcaaacaattagtataagtatcacagcgtactgaatgaaacctgctggatttgccaagaacctgcaactttgaaagtgctaaggatatacccatgttcatttctgctaaaaattagcttcatatgcatcattgaaacttcataaatcagttcatcatctacaaccattcagcacacccttgccaacattcatgacacagaaagttagtgtagaaatatatggcagggctagaccatttcagttatactaccaggtacagatacacaattattttctcttgtcactaacatgtgttacagaacagtaaccatttcttttactttacaatattttcttatgcacgatatctttgacgctactggatggctcgcatgctcaatttacaggcattagaaatttttagtgcattccaattct

SEQ ID NO: 148090 - DNA, 745 bp, Zea Mays
cggcgagctcggcgagctgcgcgcaggggagttgggcgccgagcagagggcagtgagatgggaactcgaccgtgggagagagagagcgagctgcagataggagcggccatggcaggaaggggaagagcgcgcgtgggacagggaaaggggcgcgctgccatgggcgatctggagagagctccagccatggagtgagatggggcgagcatagggaggaacggctggtgtctggtgagcgagctgggggaggaagagcagggaacggacatggagaggcaagctgcacggctgggagaagcgctcggctggagaaatgggaagccgctcggctgggcgagggagaaaaatcagcggctgaaaaaaagtctgccgcaggggataacgacggctggagaaaaggtgccacggagataagcgctgccagaaaaaagatcaacacccacggcggttgatatttttccctttttttatttcttctcttttttataccgaaaatcgcagatattttagatcacaattttagcgatgtatactggatcgacagtacctgtgacacggtttgattcgattcgaaatctgataaattttatctgtagtctgaacacctgattccatggtcacgggcaatttgtgtgataatgggatctcaattataattccttgattatcaacatcgcacacgatttttctcagacactgcgcaattcagattattttgcccgaacattttagtcgtcgagttcaa

SEQ ID NO: 148091 - DNA, 417 bp, Zea Mays
tgaaaactgcatagaaactgaaactgacaaatggcatacaatgtgctatctgaatttcttgaggtgggggaagcactgaatgtagttcacacaaactgaagctgcacacaaactgcacacaaagtgcttactaattttgttgcttactaatgcttactatatgctgctgcttaccaactgcacacaagctgaatgtagttcactgaaaactgcacaaactgcacacaaactaaaactgaaaatgtcatacaatgtgttctctaaattgaatgcagttcacacaaactgaaattgcacacaaaatgcttactaattatgctgcttaccaaaaatgtgtcaagttccattccagaacttaagtggcagacaattaatttcttcgaggaaccatatgttgctgcaaactaattatttagg

SEQ ID NO: 148092 - DNA, 525 bp, Zea Mays
ggcatgatgaaatggtgacatgccttcgtagtcatcatgtcgtctactggtgacctaactgaaggtcgtagaaaagggtcgattacctgtgtgttattattgtcaccttgcggtcctgtatgaattgaaatgtgaagtagtaggctctctatgtgatgctagatgtctaggtagactttcgtgaattgtggtgcttggaccatcgagatgaaggttaagtcggtcgatgctgattaagtagttaaaataattaatggaatagtcatagggttaaaactagaaactagtgttctcgcaccgtttgggatgttgtagccccattgcgcatggttacgatcgcgggtaaaaatttgtaatgctcatgtggtgtctaagctaaaatgtgaactagtgggtgaaaagcgctttgatatacatatatgacggatttgattattgtggtaaatgtgttgattaattgtatatggtaattatagcacatgaagtgacttgaataaaatttataagtctacttgttggtcctta

SEQ ID NO: 148093 - DNA, 745 bp, Zea Mays
ctatagatttctaaagttctactgaaaaagaaaaggaaaaaggttaaacagtattgggctggttttagcccagacggcccaacagtgggcagaagtgcgcccgcgcccgtgacactttgcacaggggtccctgtccttttgaatatcctgaacaaggtcaacacactattgagacgagtcactgacaattcccagaaaggacccccgggttctactcttttacaccgaccaacccacgacgatgaacaaacctcgccgcactccggcgagcttattccggccggacgacgctacggctagagttcccgtgcgacagaggtgcaattaaacctttaccgaacacttcccctccatcaatttcaccaagggggcactgaatcgatcggttcacggtgaccgggcggatgggcaagaggatgaacatgttccgaccaaacgacggcgaggagaccaaattggggctggggaaaggtccacgggttcaccagggtctacggacatactttgatttgggcagaacaagaactgaagagcgggtcgacggtgagggagtcacggcggcgttttacaaagcaagggtgcgttccggtgatgggcttcggccaaattccatttgctcaatacagagagcaataggagactatacacgagctagaacagagagtaattgagaaattaccaacccgaagagcgctgtccgcggtgaagttcttcacggcagaattaggaacatggagaaaggaaa

SEQ ID NO: 148094 - DNA, 295 bp, Zea Mays
ggaacagagccgcgacgtgagctgtacccggagcaacaccgccgtgagggcgacgaagagggtcagaggtgccgtagcataagctgtgaagacgagtcgatgactcgtgaaatccaaagagctggcgaatctagctggcatgaatagtgacatcctctcgctcaaaacgaaacctcatccagtggtgatcagggtctatccatacagtcgcgtagaaaactcggacccattcctcaacatacctgccgctggtagacaaaagagtcagaaggccaggcagatatgagaggtgcac

SEQ ID NO: 148095 - DNA, 589 bp, Zea Mays
ttcaccaagctcaacctccgctccggctatcaccaagtgtgcatggccaccaacgacatccacaagacggcgttccgaacacacgaaggcatgtacaagttcctggtgatgtcgttcggcctctccaacgcgtcagcgacattccaggcgctcatgaacacggtccttcattcgttccttcgacgcttcgtcttggtcttcttcgacgacatcctcatctacagcagcacctggtccgaacaactgcatcacctgagggttgtcttcaccgcgctcaaggaccactccttggtgctcaaaagatccaagtgctccttcgacgcagcgtcggtctcctaccttggccacatcatctcgacggaaggcgtggccatggacgctgccaaagttcaagtagtggtcgattggccgccaccacgatcggtccttgcactacgcgggtacctgggacttgcgggctactaccgcaagttaataaagtcatatggtgaaatagcaccacccctcaccgcgctactcaagaagaatggcttctcctggaccgatcaggccacaacagcattcctccacctgaagaaggcactcacca

SEQ ID NO: 148096 - DNA, 351 bp, Zea Mays
cctacaattaggttattctcaatggtagtttcatacacatttaacagtgtgccacatcagaagttttgatgatatgccataacatttaagataattgagtttcacgggatgaaattagttttatgggaatgaaaccatgtaaagtcgttcccaaggtctttgaaaccgtgtgaaacctccattgagagtgatttgtttcatctccacatattttactaacttctgttggctattgaattgcaacatttaataggtatgttagtctataatgaagtgaaagattgcactgagagacattatttcattcatagtttcgtaacatctttgatgatgtggtagtgttgggaagcg

SEQ ID NO: 148097 - DNA, 342 bp, Zea Mays
ggaatattttctgctgctgtacattgcgttgcctttgcgatcgatgatgatgcgtcaacaggttcttagataggattacatagatttattcgtgggaactaaactactacaaaactatcagttgtccactctttactttactatgtacacatctggttcaacaggcctactacaaagagagcatttatacattattcttaagaagaggcaacgatgaatccatccatcaaaaaaaggtatggtactggtaccttctaaaccgaattaatcagaaacaccaacaactacaaacagcagccaccgtgaaacatttttggctcgccctattacctgcacatctgc

SEQ ID NO: 148098 - DNA, 454 bp, Zea Mays
tttccgtcttcccacttgccgatgtttgacgccacaccgcaaaaacatgtatatgtttcagctttgttttatccattgttatctcaattatggattatatttaattgacacatgattgaggcttaaaacatagtaccattgtttctttgggtcagggaggagacattggtccatctcatgacactcctactttcacgggcccccttttcgatcagacacctagtggtcatgtaagtaatccagttatacatttattgcatgcttgcttctcataactcattcataatttactatactctatacctgcattgtgtttcaggttgcagatggtgaggaaacacatagcttgcacactacacatgaccactctgtgccacgtttaacagaattggactgtgctcggtcgcttcgtgattttttgtgctcctcaaaagctgacccaaacaggtttttc

SEQ ID NO: 148099 - DNA, 525 bp, Zea Mays
cttgttctgagcagatccacgagcgggggtgttctggtcatttctctgagtattgtttttctggggtgtttgctggttgcgccttggacagttgttggcatagtggcctagttcaccgcacttgaaacagccgttgggttggacaggtgcgttgtttctggcctgagtgttgttggtgccaccttgacggttctgagaatttccaccagacctctggttggtctgggggttgctcctttgttgattctgactttgattatttctctggccttgctgtccagagcgttgcacttgataattgtttccaccctgatttccagagcgggactgcgaaccttgagcattattcgggcgagtgttcctgcttgactgaccttggaacttccttttatggtcagataattctttccttttgctctcaaggccaattgccttgttcagcagtgtctagaagttggggaatgtgtgactctgaagttggtagttcagaggtccaatcaacccttccaggaaacgctcttggcg

SEQ ID NO: 148100 - DNA, 633 bp, Zea Mays
cggctcaccatcgtctggccccttaacaatctcgcagacatccccagtctaaaggtcatttgctgtcaccaaatgtttccagccctcggtgaagcccacaaataacgggcagtggtggtggacgacaggccataatctcttcttggggtccttcagcattataacatcacagccatgccttctctgtctaactgcattagaaagtgcacttctatctgctccgtgcttcccggcccgatcctgccccggaggcgggtttgggatttctgtttggggagtaaaggagggacacgaaggtgggtttgggctcaatttcttttgaatcaccttttctccaagttcccttattgatggaaccagtatatcagactaacagtatatccctttatcgatggaaccagctgtgcactaggtacctactaggatggatgtggtctgcaccggtgcgtctaacaaagttgatgaagacgcgaccaaacttgaatggcagacaacgagcagctccggtgaagggagcggggaggatagttctagtgacgacaatccttgtactcctatacctccaaggaagaaaaaacattagatgagcttgatgccgactatattcccaacgatgaagaggtaaaaagaaat

SEQ ID NO: 148101 - DNA, 790 bp, Zea Mays
ccccaattaactgtgtcgaaagccttctggatgtcaagcttcaggaagagcgtcggatttttctgcttatgtagtcttctaactacgttatgcacataaaggaagttgtcttgtatacatcttttatggatgaaggcactttgtgatttggagattagagtgttgaggagcggggccagccggttagcaagcagtttggagaagatttttgctatgttgtgtatcaaactgatggggcagtagttacccactgtcaaagcatccgtcttcttagggataagcacgatgttggcagagttgagtaatttaaaatccgccccattcatgctatgaagttggtgaaaagcctcaagaacgtcctccttgatgatatcccagcatactttgaagaataaacctgtaaaaccatccgggcctggtgctttgtcactcggcattgagaagattgtttcctttatttcttcgagggagaacgacgcttctagcgatgagaggtcatgctgcgctaaagctagagccggctagttgagggtgatccctctctccggggctgtccctaggtgagatttaaagtgttcatgaatggtcttttctttttcctcatgggctaccactaagtttcccattgggggcggcagacaatggatgaagttcttacgcgctctggagctagcagagaggtggaagaacttagtgtttgcgtcgcccaacctaatgcgagtgaggcgagccctttgacggatcctcgatttttcaattacagcaagtcccaaggctctgactttgagtg

SEQ ID NO: 148102 - DNA, 315 bp, Zea Mays
ggtgcccgtgcgttgcaacggcaataattatgaaaacaaggcacgtaactatcgctaccctgtagcgccttcgtcgccacccgcttcttctaggcgcaaatgctctgcaccaccacgatacgcaagcgagaacgaagcagaaagtggtcattttttgcatccagatagacatggcacccaattctctttaaaacttttgctaagacttaacaatacattttattctgggggctaaattattatcctactaacttgaccataaattagcaacaattattattatttatatgaaattagcaccatacttataatcta

SEQ ID NO: 148103 - DNA, 484 bp, Zea Mays
ctcccttatttcacgaaaaaggcccatatatgctgctgagattggatgtctagttcctttttatgtggatagttgctgccgacgatagacagccaagtaaagaaatgcaagttcaggaaccaatcgagtccaatctatccggacgcatggctgctagctccagatcatgccaaatacggagtaacacagccaatcaaatgagccgtacgtcaggagaaccgtgatctagttggatgcatacatgggtactggtctgcagctgatgacgctctcgggtctctcggcccatcgttgtagccgcctgcagtttttgttcgtaccgtagtccatatctgcttgtctagctactttttactactactttggcagctcccgatgcatacatgtggatagttggacacaagcacaaatctaagctcaccggctacgtcctctcagctcgcacaagccatacaaacaaaatgtcgccgtctttcaattatta

SEQ ID NO: 148104 - DNA, 366 bp, Zea Mays
gtgtcgttttaagacattgatgtggatgtatggctgcatccaaattcgatgttgtgaaatcgtagtgttgattgcatttatgacttggttttagcttcattacatgttagttcatgcttgatgtcaggtggtgtagtttccttagacatttagtccgaggtagaagttcttgtgttagttaagaccaataatggacccatgttttggaatggtggtgctatatggggtaccttggatgttttgtttggagtggacgaattcgaggacgaattctttttaaggggggtagagtgtaatatccaaaaataatgttgccaaaggttgatcttcggtgcgtggatgtgggaaaagggttgtgggccgttg

SEQ ID NO: 148105 - DNA, 662 bp, Zea Mays
gtttgtcagagctacttgaggatatcaatgaggtatggctccgctggttcatcagtattcagtaattacaaggcattatgagttagcatgctccctcctgctgagctagctaaatgtgttatcaggtctcaataagcatccatttttaaaagtataaattgttatagccatacatgcaagtctttattttggaaataaccaaaggttctgaacctgcattgtgctaactcgtcaatcattcctgaaatgcgattcttttttttcattcagagttcggttggacaaattaagatggattgagatcttagttgttacggtagaagcaaaagcaccaccactgaatcctgtactttaaatggtgatagcagcagttgcggtcttcgatatcttaattagtgtgttacttggtgatagcagcatctgcgatctccaatattctagggcatgtttgcctccctcttctaaacttagagatctaaaagctttagaatgttttagctttcttttgatgtccaaatctctaatgtaaggtgggctaaaggttaaagccaactttagaccacctgatgcatataaggaacaagggtccacatgcaccattctctgtggcatagcaaaatcgagctcgatgtccttgaagattgatcgagataatattagtc

SEQ ID NO: 148106 - DNA, 494 bp, Zea Mays
ttgatccggttcgtcccgctttttgccaaaaatgtggggttgatggacatcatgctagaaactgtttcaatgctctttggtgtgatatttgtcgaaaagatactcatgtcacagctagatgtgtgttgccaaaacagagcaaaccgaatatgcccatagtaggcatggctgctgatggtcttggattctatctctctcactttgctaaacctttttccaaaaaaccaaagagggttttcattggattggttaaggtgattgagggtttagtatctgctgatgagttggtgaaggactttggtttccattttccctggggtaaatcttggaaggctacaaagtgccattctggtttcttaatgcaattcccctctcaagaacgtcttgacgagatgataagctttcctgaacttaagatgaaaatgtctggagctaagatagttgttgtcccatggagttctcgtgctaaacctaaatctaggttacatactgcc

SEQ ID NO: 148107 - DNA, 423 bp, Zea Mays
tgggatgccggtcatatcatctctcccggcctccaaaaatagctcgtcctcgagctgaatgttggggtagaggcgtcgaaaattcatccacccaaattagtccctgccacaacgtcgtggtcatgaggacctgttgaagcagagacattggccgggatgtcatcgtcaatgaagtcggacaactccaagtagaagaggcgttgacagacgtggttgcggacatatggttcgtcgcagttgtagcagagtccttgacgcttgcgctcttgttgttcagccggggttagccggcagaagggcctcgactgtgctgaggaggcgtctgaagttgaggatctggtcggcgacgtgccccctggcgttgtagcggtcaagcgatgttcgaatgctcgagctagatacatggctttctgcaagtcctga

SEQ ID NO: 148108 - DNA, 416 bp, Zea Mays
aaaaaagatgcccttggtaatagaggttatagaaacaagcatcataaccgagagtaaagagataagacctagagagaggtgataagagaacgatgttggtgtctgtataagatagtgtattatattccaagtttgaactgcatagatggatatgggtgacgcgctaagtaattgttttcataactctggtgatgtggaatatcttcctgtagcatgcctagctcctatagatgggctttggtataccgaatgtacattaaaattgttccggatttgatctgtatatttgacgtaattttacgagcgaagttacgatttgaatgtaaaaaatgacacaacattaaaccaatataatgttgtaaatggaaaacgtacgggctaaacgatttgatgttccacgtattcattgatatgtc

SEQ ID NO: 148109 - DNA, 1230 bp, Zea Mays
gccccctccgcccagagtaggacacgatgaaagcggttcatggagatttgggtatggtagtagggaccaagagagaatcttggactttgcgatagcttttgacttgttgatatccaagccaacacttcttttaggaagagagaatcccatttagtgacctatagtagtggctaacactcaagttaggttgactttgtcctcacaagaagataggattaacgagcatgtttggattgtgaggtgatacctaaggagtgtgttgtctctcaacataagcttgtggtggcgaacatagtgggttggatacaaggtgtaggcccaataggaacaatagactctaacccttagccacaatacatgactatgaagcttcagaagtttccgaagccaacacgtctcggctacaccattagccaaaacacaatattcggtcttcgcactcgagcggaggacgactggctgccgcttcgacgttaaggagatgaggttgttgcctaggaagttgacgtagccaaaagtagaatgacgtgtggccaagcaacccacccccagtcagtgtcgaggtaggtgatgagtactaatgttgaggagcatcggagaaggtcgtagtctagggtccgtcggaggtagcggaggatccgcttcacagaggtgaggtgccgctcctagagatcatgcatatataggctcacatgctgaacaatgtaggagatattcggcctggtgaaagtgaggtactggagagcgccaacgaggctctggtacatagtggggtcacttacagcctgtgtatccaccagcagcttgcaatctggcaagctagctcgctcaagtagatccaaagtgcacacctactgatgaagaaacatgtcgtgggagtggtgctcagcggcattgtaatgaagttaacctagatccttcatagaaaactcccatgcaagacagtgatggtccgctgcaagatggtagggccagaggccgtgagaaaaatgttgtcgacctgcagaattaggtatacaatgtcaccaccgtggcgatagatgaagagtggtgtgtccgacttggcctcgacaaggcatagggagactaagaaggaatcaaagcaattgtaccgagcatgaggttcctgcttcagaccatacaacgacttgtgaagcttgcagatcatgtccggatgagtagaatccacgaaatcagtcggttaatagcaatacactgtttcagtttgag

SEQ ID NO: 148110 - DNA, 376 bp, Zea Mays
atgacccagatgcaccaagcgccaagaataatagcactattaaggttctttcggaaatctttaggaacactgtctcctactcttctccaacactcagcaaaggagtcctcatcgtcattaatggtcagatgaccaagactgaaagggccatgatgctgtacccaaattgtcgtgctagactacaagaagtcaggagatgctgaatagtttcatcagcttggtcatggagaggacagtgctcagggtgtgaaagacatccgttttctaattttcaactgtccagtatttgtctctaatagtcaaccaaataaaaaccttgcattttggaggcgcccaagatttccataaccttttccaaggttcaaatttaatggag

SEQ ID NO: 148111 - DNA, 495 bp, Zea Mays
gtgataacagcttcattaaaaaatcggtaatctgtttctcagcgtggacgtactcaatatccaccttcctatcttcaacacactcccaaataaaataaaatcgcacatctatatgtttgattcgatcatggaaaacgaaattcttactgagggctattgtcgattaattatccattttcaacaggaacgttgtgcgttgctcgctcttcagccctgcaagcaactgcgctattcatacaccttgatagtttgtcgtcgtccctgaaatacactctgcttcatagaaagatagcatgacaaccttttgcttctaggactgccaattcatagaacacgaaccaaggaacaacaactcactagtggtgcttttccttgtatcaacatcgccatcatgtcggcatcactatatctgagtaacttcaactccatttatcatgcttggagtagcagccatagtcaatcgtgcttgcgatacagcgtagaatctactttacc

SEQ ID NO: 148112 - DNA, 320 bp, Zea Mays
gtttgcagttttgattgtgatggaaggaggcagtgtacggggcaagggaaaagagccatgtattggtgaatcatcatctgatgcagcctgtgaatgggtggttactaccgatggtaaggctttctaccattagattagcactattgagttctcacatgcaaactggaagtagaaattttagttctctagtggaaagtcatgcctagattacattgttaatttcatgccacataactttgtttattgttttgcgtcatttatttttatattactaggaactcgcaaacaactacaaggttcaattgatgacccatggagtc

SEQ ID NO: 148113 - DNA, 589 bp, Zea Mays
gcgagatgatcctcctagctacccttccaagacagaacacaagcacgcaacatatcttccaaggtttggatagttcgctctgactgaccatcagtctgagggtgaaaagcgacactaagagagagcttggtacccaatgcacagtgaagactctcccagaatttggatacaaatttggagtctcgatctaaaacaatggacttaggcaccccgtgaagcctgattacttctttcatatacaagggaaccaactctgaagctgaatttgtggtattcatgggaataaagtgcgcagacttagtcaagcaatccactaccacccatatagcatccctgcctcgaggagaacgaggtaagcccaccacaaaatccatggtgatatgctcccacttccactccgaaatttccaatggcttcaataaacccgcaggcctcttatgctcggtcttcacgcgctgacatacttcacagggggccacatacttagaaaaatcaaccttcatcctcttccaccagaagttttgcttcaaatctctgtacattttggtttcgccagggtgaacggtgtaaggcgttttatgagcttctc

SEQ ID NO: 148114 - DNA, 667 bp, Zea Mays
gccgtggcagagttgttggacaatgcggtggatgaggtgattaaacagatcccattgttgagccatacaatttgattattaggcaaatgtgttactatttttttttcaatcaaacagatagaaactggtggtgctacaacgatattgctggacaaactcatcgacaaacggaatggatcaccagcattactaattcaaggttctgattgctacattatatttaacgcgacaacatttttaagcgatatttgattggacaataaactaaaatacaaagttataaacatgaccgtctttttatggagtttgtagcaactagagagtttgctcatgcttgcacttgtaaagaactaggcaaatgtggatagacgtgtgaatttgaaactgacagagtgcataatttctggtgaccatacagatgatggtggaggcatggatcctgattctttgaggcggtgcatgagctttggattttcagagaaacaatcagggtcttcgattggacaatgtattgccaacttttgttttataatctgcaagccatttattctcgcctgagacccatcgtctaacagtttggtatttatcactttggatagacggaaatggattcaagactagcacaatgcggctcggggcagatgctattgttttcagtcgctgctgc

SEQ ID NO: 148115 - DNA, 521 bp, Zea Mays
ttaaaatattcatcaacggatttctttccttgcttcaataattgcaatcgatttcgaagatcacgttgatagctggaaggaacaaatcgactcttcatcactcgcttcatctcctcctatgtattaatatgtcttagtcccaatctaagttgatgttcttgcagttgattccaccaagtaagagcataaccagaaaactcgactgaggccaagttcactcggtgttgatctgaaaaattgtgaactctgaaaatttgatcacattgctcagcccaattaagatattcatctgcactttctttcccagtaaatttaggaatatccaacttgactcggccaatatggtctggatcatttctatgacgacgcccatgataatggtctctattttcaaaatcagcatgtcggtgatgatgtcaccgaccaaacattccatcatttgcaaagggattctcatcagatccttcatcacgatcacggtcttcatactcctcatcttcaaatcttactcgatgtccgtg

SEQ ID NO: 148116 - DNA, 404 bp, Zea Mays
ctctacactaatctcattgtatgattcttggctccatgaaatataatcatgtagcacaattttgattgtcaaccttactcgtgatgttttattccagagtcattttagctatccttgtgtggcattttgtgcctgaatcacatagcaatcaatgttatcaagtcatcttactaatcacgattagtcggactgatcaatgtcacggtgatcagttatgtactacaataaatcacaattagtcaggctgatcggtgccatagcgactagggttaattagacgatttgataacattgatagcaatcactgcaagcttccatgtcaatccaaacttgctgtaaaatcctgcagttgacatgaggatgtttttctgcgttggagttatgctagttgaattttgtacacc

SEQ ID NO: 148117 - DNA, 460 bp, Zea Mays
ttctcggccatggcttctccgtaccagagctggccgccaccgtagttgcttcggttgggcgattgtaggagatgaggtgaggggatagaatggccgtctggtgtataatcggcggaaaagatcaaatcccgcattcctattcgctgcggggaatttcagccgttgatcttgcaacctacggtggatattagacgtaggcatacccattcattccttagatctgcgtcgttgatttggttggttgcggctcggattagatcgcgggcttattaaaatccagggcattggatcgagattgagcggttctgcgaggtctgtgggattcaaaatgcactagatctaattcgaatcattgggcgctgatccaacggcttagatggcctcgtaccccttcgcggatacaatttgccaaagagtccctggaatactactgaataaacccgccgtcctcaactggggc

SEQ ID NO: 148118 - DNA, 707 bp, Zea Mays
cccccgcccacgctctcccgcgatcttcgccgccgcgtcttcaccacccaagcccgtgatctccgccgccgtccgcacttgggtcaggtcagatctgcatttggtggcccatccccatcctcatcctcatccgcacgcccccgcccatgctcgccccggatctccgccgccgtgtcttaaccatcctcgcccgtgatctccaccgctgtacgcacttgggtcaggttagatctgcgtttggtggcccgtccccatcctcatactcttctgcgcgcccacgcccgcttcttcatccccgcccactcctgcggtacgatgtggtggtgtgcctggacatactacttcatccctgtccacttcatcaagaggaggcaactgcacttgggtagtacgatgtgctggtgtccctggatttttatttgtgtgtggtcgagttgttcccaggcccgttcaaggccatgcgtgcctatctgtgtgccgagggtaacatggagaacaccgtccgccaggctggctggcaagtcgtccccgtagcttcatctccattaaggggattgggaacaagaggaggccactgcacttgggacttcgaatagatagttatgtaagtttctaattgcttatttgtttaatttctaattgatatactataatcttctactgttgattcatacaacacagggaacctgagagtcatggggcttcac

SEQ ID NO: 148119 - DNA, 606 bp, Zea Mays
tgtggtgctggtgaggccccgcacgaagagaagaagaaaaattcatccctgttctcccgtctcagccaagcggaatgaacgcacgacagaatggaaacacactgcacacacgcacccgcgcggcggcgcgcacatagagacacactatgacactagcggtttcaagattctagccacgccacgccacgacatcccgtcgggcgagcaggcgtgcgcggtgcgcaggaaacccagaaaaggacatcggtttcgcggagaagaggtggagggccacgcagacgggaggggccaagaagtgcaccgtacggtaggcggcggagacctaacgcgccacgctgcgcgggggccgggaggcgattgggcggaggggagccggggtgtcgaggcgcgccgcttgggccttcggtttgagaccccagacagccttgtttggccgcggctttggcctccgatctcgccgcgtttgaagcaatggaggtgggaattgggagcaggcgagcagcctagcaggggggttttggtgtcgggggctcctgaaattaggtggcgcgcaacttccctccaaaaccaaaaacatcgttgccaaacgggcaaagtggggagggg

SEQ ID NO: 148120 - DNA, 379 bp, Zea Mays
cagaacctttcatcggtgagcagttggcttctctgctctacctggagccagatagtgaacttacggtaggctatgcatttattgcctatttatcttgtttccaacgttcccattacccttctgatctcatttgcttgaagtgtctatttcctgtgtctgatatttttggatatgggttcaggctatgctaatcgcagcagaggccaaacgacaggaggaaaaagcaaaaggagtcagtgccgacgaggcagctgataatcaagatactgtgatgttcgacgataatgaagaagacgaggaagaggaaagcgaagaggaggaagaaggcgccgaccgagagcctcaagggaggggaggaagaggagggagggggatgata

SEQ ID NO: 148121 - DNA, 594 bp, Zea Mays
aatggcggcttatatggtaatatttattacagcaaactttgtttattccctgattatcacatatatgtcatgcttgactactctcaacaataggtaatttcaaaaggatctgcgagacagagattggtatcatgtcgcagtgttgcttggataaaaatgttagaagagcaggccctgcatattttgctaatgttgctattaagatcaatgccaaggttaatctcaacttgatctcttcacaaaatttgttgagaagcatggtactaatgtattcattctttgcagtttggaggaagaaacttagaatttgctaatcccaaagaaagcttaccgggtgttacaattgaaccaacaattatatttggtgctgatgtcactcaccctgccgctctagatgataccgccccttccattgcttctgtaagatcttttctgtttacagtagggatagtatcatatcattataatctttactacttattaagacagcaaggggtaggttgccattcctggttctgccattccctgttctgccgcttccattcccgctcccgcatagcctattcccattcccgcttgcccagcacacgcaca

SEQ ID NO: 148122 - DNA, 397 bp, Zea Mays
cacggaccgggcgacgaaactgagtggatacccaggcgaagaaatgtgtgagggtggggaatgtgtcggacttcaaccgaagcgggaaagtccagagaaaatgggaaaaatcatccaaaatcaccaaatagtatttataactagaaagactgagtacaggggaggtccaaagatcacagtgaaccaggtcaaaagcctgctcagcccgagaagaagaagtagtaaatgggagacgagtatgtcggcctaactgacaagcatgacagagaccctcaaaatgtcccctactacatgaaggatcgagactactggtaatcttggtcatgacgtcgggtcctggatggctgagacgacgatgccaagtggtggaggaggtggtggagaccaggacaggagg

SEQ ID NO: 148123 - DNA, 420 bp, Zea Mays
ctcaatcctcatcctgttttcctcaacacactccctgatataatggtaccttgtatcaatgtgtttacttcgctcatgaaacacaggattcttggacaactctattgccgatctgttgtcgatgaagagcatcaccgattcagcttcttctcctcgcagctcagcaagcaaccgtgccaaccaaacaccctaacaagaggcgacagctgctgcaatatactcagcttcgcagcttgacaaggccactattttctgtttctgtgattgctaagtaatgagactgtcaccaaggaagaagaccacccctgtcgtgctcttgcgagtatcaacatcacccgcatggtcactgtcactgtacccggtcaagcctgctggtttcttccttctctgatagtagcagccatagtccgaagtacctgc

SEQ ID NO: 148124 - DNA, 734 bp, Zea Mays
aaaccagtatgtgctattggcttttggatctgggatccacgacccaaaatcaattcaatgagatctcctcgggtccatccgatcgaagagctgcggtcagatttaactcgaagcgtaagggtatgggatcatctaatctggcccgttgccgttgatccaacgactagcgcattccttcaccaaccggatgctgaaccgcggcagcgcccctaagccggtggcggcgcagatgtcggcgactgcgattcccgcgcccccaagctttaatctcccgttaagcaggtgagacatgaagatgggggaagggcgacacgataagcgcacatacctatgatagaggatgctaggatgggctggccatggtgaatggcggcacggcggaaccagtgaaatccggcgaacaatcacagaggccctggtctcccggcgcccattgatccccacccaaaaccttcatcaacacccgcacatccacccggttcccctcacaagtcaaatcgttggctgaccggagctccctgcgtcatggcactgctcaccactcttcttccccacgcggtccgctgctgcgctggactcaccgaatcgcctagactacacggttttatagcccttgagctatgatgattgaccagttggcaagatgagggggttgcaaccgaatcgcacaaatccttgggaggccgctacgctggcacgtggtcaggccgtgatggctttagcgcggagtactc

SEQ ID NO: 148125 - DNA, 356 bp, Zea Mays
catggaagaatgaaaactcgtgactagagttgatgccatgtgtgggagaaattacactaactaatgtttggcaccataatcaatgtcactgataactggatgagacatatgactctggctccattaaacagtgtagtggatcacaatgacatagtttggcagaacatgttttgatacgtgacttttcattagctagttttccctaagtcatgttggaaatatctgttgcattacaaaaatgtgagtagatgccaaataaaagccaagtgagagaaaataaaagagcaaccattcgataacagttgtaaccaatagtctgatttaccaaatggtgcaccaagtcttttggatctggt

SEQ ID NO: 148126 - DNA, 290 bp, Zea Mays
atggcgaagtcctggtcttgctcacgtgccctgtgcttgaatttctcccctaatatacttattaagccaataaatgcacgataattttgtagatcgacggttaggttatgtccagtggcagccacatgggcaatggaaaacacgaagtgtgaatgcgcgtgcgtaaacaagaggacgcctctatctaataaaaacgcgtatgcagatggcacatatagacttgtggagaagagataaaccgtggatttgaagtatgggaaggagggcactcatttttcgcatcctcgttc

SEQ ID NO: 148127 - DNA, 291 bp, Zea Mays
attaggtgaccctgctcatttagcaccggcggggcaaacctgcaaataattttccccgtctctgtgttgtccggtgggttttgggtgtcctgtggccatttggaaactgtttggcttgtgcaccaatggaaacggtttggtgaggacgagaaagagataggcgtggggctgtggggggcacacaaaaccgatggtccaatgagtggagccctatccctatccaaaccggtggtgcgcggggtaaggaaacctacatgcagcgcttccaaacgcgcagacagcgagggcgtg

SEQ ID NO: 148128 - DNA, 1129 bp, Zea Mays
gtataacgggtaattttcagatctgtcatttataattaactgcaaacaaatctaatggttgtgaggcatcaccaggaaataatctatatttcagacgcctgaaatattgcagaacccttattctttagttgctactactgctgctgctttcttgggtttatgtcttaccatcgcaaaactatttttagtgaagtgaactctgctacccaaatgttgtcttctaccatctaattgattcggtgcctttgttccttcttgcgtagatagcttttgacggagtttgcagaaggctactcgtcgctgattccatttgggaggttagttccttaccgtgcttttacacttctcgtcgctgattccttttgggaggttaattccttgtcgtgcttttacacactaagcttaggttatgtcagtgatatacttgttttcagtggcatagtattttgtttatgttgttctacacgctgaacacgctaccgtgacttctttcttgctacacacactgcgctaggactatgtcagtgatatacatgttttcagtggcatggtattttgtttatgttgttctacacgatgcacatagggtgtgttggtgttatgcttgtgtcattccggtgcagtattctgttctcgttgaaatagcttctgtttcggccaactgctacaacgacagggatctgtgatcttggcacgcacacattgacagacacaacaaggcaaatcaatcagaggccagccaaggttattagttgtaatgtatgggattgcatcatggactggctgcaatgctccaactgctaagactgaaagatctagcctgaaatcaggtgctgtacgcaatcatggcttagtatttgccatatgcttgatagatgtcctttttgacttgcggtcttggccgaactttttttagttggtgtgtggatcatgcccacctctgattggatagggtgaccttaaacctacatcagacctcctttataattccccatggccagctgttggggtctctgagtatttgccattgttaatgtgggggcattcagggatcatgcaagaaatcatctaagcattagaacacggtccaccaccaagttgctgattggttctcatacaccaagatatt

SEQ ID NO: 148129 - DNA, 313 bp, Zea Mays
cgcggcagaacgcgcccgcttcgtttgcaaatctccggcgagcaattcactccaatcccatagacccgagtgccactaactaaccccactccgcacggtgcgtcccgacaatgggtccaggccagcacccaagggccctacgctttgcaatcggatttccgcccacggggaaaggttctgtggctcggcggagaggttcacggtgatggtggggggtcgtttctgcgtgcgagttgcggccgggctacgaggcgcatgagggcgaacttataccccggttggtggcaacaaccccaccgagggtgacgcgagt

SEQ ID NO: 148130 - DNA, 531 bp, Zea Mays
gaaaatgctgatgaagaagaggaggattatagcattctgatcccatcaaaacccaaccacttgaattttgaaaaatctactatgtctgaaacgacgtgcccatgatgatgaaactaggctacttcggagaggctgaaaagaagcttgttcgctttgccggagaagaaaccactccaacaccgaaggatgacgaagtagtagttttcaaaagctttttcagggcaggattacggtttcccttgaacgagatgattggagaagttttggataattttgaaaattttcttcaatagctgacccctaacgctatcgttaggctcaacatcttcaactgggctcttcaaagccaagggatggatccaaatgccgaagcattctgccgagtgcatgagttgcattaccaaatgaaggccagagaagacgggctacatgaaaattttggttgttataacttcgcgtatcgcaaggatacgaaggctccggtcctcagctatcgcaccaagtggccaactggctggaagagtgagtggt

SEQ ID NO: 148131 - DNA, 314 bp, Zea Mays
gagttattattgtcaacatttacacctttgaagtggcatccgagtgatgacaaagccacatcagcgttggaacgactgatgaccatgtcggtgcttttagaggtaatagccgagtggcttatgatgacgttggcgttttagagttaactgccgagtgactggagacgacgtcggtgttttagagataactgccgagcgactgaaggcgacgtcggcgttttagagataactgccgagtgactggagacgacgtcggcgttttagagataactgccgagtgactggagacgacgtcggcgttttagagataactg

SEQ ID NO: 148132 - DNA, 281 bp, Zea Mays
catgaataagttttgataatgcatttatttggacatgtaggtgctaatgtattttccaaaatcttggtcgaagctaaagtagtttgactcaggacaaaccgcaaatgaactaccatttgaaacagaggcaatatttaattggatgaatttgataagttgtcccactaatattttttcatctcccataaccatattagtagaaaaacaatggatgtggctgtgatcatccaccaatgttataggttgatgccatgttggacaaatctagcctagtatgaagc

SEQ ID NO: 148133 - DNA, 394 bp, Zea Mays
gcccttgctgcctgctgttgcctctgctgtgctcctgcttgttgctgcggcggcgcttgctgctctgcctgcttccgactcgacgacgaggcggctgcggcggccgatgacgacgacggagacggcccggcctccgctggcgcactggttccttggccaccagcaggcccgtcgggaccaggctccatggccagcagctctccgatccctgcctgttcctggtacctgctgtttaagtgtagcggtgtaggtgagatcagagagcgatgctaccgcctacccggcatagggaatcaagctactacggacgatgggggaagaaggtagaagaaagcaggaagaaagaatgaaacaagcggctagctggttggcagtgtagcatcctttacggctt

SEQ ID NO: 148134 - DNA, 281 bp, Zea Mays
gtgaactcggcgcatccccacatgcgattgcgatgcgtattgggctggaaattagtaggaagtttcagacgtacaagccacccctcactagtcgctactcaactcagtgctgcttgctaccagccaccgagctggacggagcgcagagaaggacgaacgaatcagatacgacgcggccaccgctttctctctgccagaacaagaataagcgcggacggccgtcgtgcgtcgtgttccacgccacaaaacgtttatcagataaactctacacactggtctta

SEQ ID NO: 148135 - DNA, 437 bp, Zea Mays
gtaaaaaggcaaaatgtaattggcatgtgggcagtaccgcaatagtacgaaaatttggttgccacgtaaatttgatgatcagataacagaatatgtttatatctacaccaatcatttcctaaagtttctcttcaacattcttataagtggtcgaagtgaagggctatcagatttcagatcatcatcattaagaacggccacgagaaagatggaaaactcacactctttgaacttggcatctttgctgttattcatgccataggaagttgggaaatgcaagtcatgccttctccgttccaccgtattttacgcgcattatgctgtagtgtgctttcagaaactaaaaggacaagtccaactacctgaaaaactggacagttgcaaaggtagtcataaccttgcaaaggtaatcatcatgccatgcttgaatgtctttg

SEQ ID NO: 148136 - DNA, 453 bp, Zea Mays
gtccacatgcaccattctctgtagcatagcaaaatcgagcttgatgtccttgaagattgatcgagataatattagttagtactgaatttaattttaatgacaagtttgtaatgggtaggataataagggatatgttacaggttgttggtttcttagatgaatatgctgctgcatagggttaggcctgaaaggagaaacagaacaggattggtttttgtagctctcctcccctcatctctccatgggattggaatatatataactttatgagtttatatggaaagcaatagatatttgtttatttcctctcttctctgctctcctctcctctttatgccatattactgcttttaaactaaggcgacactgctagaggcactattatatgtcaagttcatatattaagaatttgaactctagcctattgatgatgatagttgttcattgtctaaa

SEQ ID NO: 148137 - DNA, 379 bp, Zea Mays
gtaaaactgtcgtggcggcgtcagctgatgtggaactgtactggacatattgaatgccggctgtgcagaagcaggagttacactcaccagcagaattctgaacaaaacagggggggagctacagctactgctgtgaaaatgctctgtctctgctctccttcagtccttttatcgtctgtacgctcgtcccactttcccagtggcgtctccttcctcctagctactcattcttctgcgccaccgccgctagctttccggccggcgcgcacgcgcacgtgcgtcgtcaccaaccgctggctaccggggtccattcgtaccggccggcgccgagcggcagcccgcgtgcgacgtcgaaattgtacctgcgtgggagagagaa

SEQ ID NO: 148138 - DNA, 390 bp, Zea Mays
atccactaatcacaaaaagtgagatgagaaatgagatgaggagtatgattcaagaactcatggggctaggtatgattggccacaagactttgcctatctcatccgaattaaagttggaactcgttccaaatgatatgaagctagaaggaagcaagaattacttgagttggtctaggagagtgcgagtgctcttaggaggtaaaggagtggagcactatttggaagagggttgtgttgaacctgttgataggctcagtcctgaatggagggtttggtataccaccaactcgattattatggtgtggtagttagcatccatgtcttcgtctgtaagtaagatggttgaagccatgtgcactgctgcacaaatttggaagaccttgagcaata

SEQ ID NO: 148139 - DNA, 771 bp, Zea Mays
tcctgatcagaatttctgctatcctagctgttacaaaacctggcttgggccttgtagcccaggtacagtcggctaggctatgtaccttggactcctagtccggcacgtatcgtagattgacttgtatttgcaaagggatagcggacgaggacagttctgtttatataagccagccctatccctacctatatatacatgcactataatcaatctactatacttgctgcatgcttttgctttcactagcctgtgcccccccccggtctaattcccttcatgtcatgctatgtagccatctgcagcatggttatcttaccaaggttcacagcaagtcacacatcatgaacttttttgtgtataaattgaagcaaacagcacaataactaacaaagaatgcatcttgtgcactgatgttatcccttgatgacagaagttcgccaattcatagtttctgaagcataaattacggtattggtataccctatgcaaatatctgctgcaaaaagtatatataaacactacatgcaagccaattggaaaatggcagaagtctggtttaatttaaacaaagtttagctctttgacaaagtagcgatgactttgataatagaaagggttacaaaagattataaacacgcacctgaagttgttttgcagatataccagatataatagcagcaatagattcttctaggcaagaatctttcttttctacatgatcctcatgtagatggagtgcccttcttgtgcatttcattaattctatacgtt

SEQ ID NO: 148140 - DNA, 450 bp, Zea Mays
tagcactttgcgagctgcgcgtttatttgctaacctcgagaagtgcaccttttgcaccgaacgagtttcgtttcttggctatgttgtgactccacagggcattgaggtgcatgaggccaatgtgtatgccatttagagttggccaacaccttcgatggttacacatgtgcagagttttcttggacttgcaggcttttatcgtcgttttgtcaaggattttcagcaccatcgctgcccctttacatgagctgaccaagaagggcatttcgttccattgggggcagccacaagaggattcctttgcacttttgaaagagaagcttactcacgcaccgctactccaacttcctgattttggtaagacttttgagcttgaatgtgatgcaagtggagttggtattggtgctgttttgttgcaaggaggtaaacccgttgcttactttagtgaga

SEQ ID NO: 148141 - DNA, 1365 bp, Zea Mays
cactggaagaagcaatgttgtgggttcatttgttgaatcaaaccttgaaagcaacatccaagcaggaaaaaacggaggatggcaatggaatttcagaagggcattaacataatcacctccaagcatactaatgcacagaactggtacatcaggaagtttttggaagaattctgtcatatgtttctcaatatatttgatgtcccttgatgacaacctgacaaagaaatttagattttactacacatttgcagatgcaatatgatcacaagttcagctgctacaaaaaattctaaacctgagaaatttcgagacattgtcatctgtctcatttctgaaatctttataggtgtcctgaaaatgtgagtagataaggataaatgatacagaatagggaactgttttaatccagctcttaacttgctaagatacaaacctttggaaccttttcctcggacgatgcttgtaagctagcaaagtaatgacaattgagattagttcccacagaaacttgatggaagtatgtggcccagtgattcaaagaaagagattctttatgagaacccaaaggcagttgaattgaggaatctgtagttgatagcaagaatatgcatgcaagtaacttgcaaacctgcaatgggcaattcgatttttaagacagaaacagaagccacaagcagtaaagcaagaatatatctaatgattaaagaaaacgatagtctgacataaaaatagaataagtaatatctactaaacattataaatagtccacagtacaattgcacaagataacatgacataacgaacctcctgaacaagtgaggggctctctctggatagaacaaaagctttgagcaaccaggggacaacgtctgccattgttacactagagaagatacagcagatgtccctgcagaaaagtacgacgaaacgaaagacaattaaacaggtaccatgaattgctacagccagaatgttgtatatgcatgtgttggatgttgcatagcaggaacttgatgaaacaaaccttgactgttcagaaagggggctttttagcaagaagaagctcatattgaatagtatttctgcacactctaaaggaagaaaatcaccaatgctcctatccatgattagtccaattaaataaggcccataagtcctacagcaatcttgtggaagggacctgaagaacagcagtgatatgcacttccaatagacactatgaacttcacagtccccattgctatgagatcccaaggctctagctgcaaaaagagcaaaaacgtagctgaaccaacagatagctcaattacaggaatttgatcaaacttcttaagtagcaacacatgcaagtacccaacataagaa

SEQ ID NO: 148142 - DNA, 984 bp, Zea Mays
agcaggtatcgagttgttttgtgattgtatatatgggtatatgtgtatttatatgtggttttttgttgaatgagtatgctatttctgtagatggcgcatgatgaggaggtcaaagacctcggggacttggagagcacgcagcccgagtcattgggtgcgaaggaagggactagggggcagctggcgccgccgttcgatgttggcgaaggccccgtgatgacccctgcgctgacctgtgctggcgaggaccctgtgtcggccgctgcgcccactggtgaggacacttccgtggtggcgggcgaaccaactgccgaagacccttcagcgtcggccgacccttcacaggtggcggggtaagggctagggctatcagatgtaggattttgtttttgtgatactgaaactcggttgctgtgcaggttccgacgtatgggcctgcacaagcagccgctgctgacgatactaattttgtggcggctgcaaccgcagtgcctgccaatgacaatttatctggttttggatctgggtctttttcgtctgatgatgagtttgggagtccgttttccgggactgaagagtcttcggataaagacttggattattttgttgcgttagatgtggctgcggcggagtcctcgccgcgggtggaggttggtgaggtgtctgatcttcctagtgcgaggaccaagtgccatcgacgaagggtggtgtcgaagcatagcgtgggcgaggtttcgcgaagtggtaggcgccgtcggatggggatggagcgggaccgtcttcgagtagatcggtttggtaagcgagagctactgtcttcgccgattgggacgagcattggtgagggtgatctgtggaatctttttgagggtgaggaattgaaaataatgttgttcaattatagggaggccgacatcatcccaaaggttgagcctatgtagtatgtggtgccctcgctgagtgtatgtaactgcaacttgtatt

SEQ ID NO: 148143 - DNA, 362 bp, Zea Mays
tttcctttttaggcatctgtttttagatcaagcaccgatgcttgtgtggccttccttgagaacaaggataaagtatcttatgctagggtatcattcaatggaatgcattatgatctacctccctggtccataagtattctcccacactgcaaaacaacagtctacaacaccgctagcgtgagattgggcacctgattctttttgttcattctacaacttccttttgttcttattttaattgggttgctttcttaaattgtatggtttccctaatattgagttcatacaacatttccttggtgctattgtactgtataattcttggcgaaaaactgtttatgttgatatgtttatacaggttg

SEQ ID NO: 148144 - DNA, 318 bp, Zea Mays
cccccgcagctgcaaaagcgcagttgtccatattatgttctgaagcatgagccaagcgaagaatctgcacttccgggggctttggttttccatgtgttttcagctattatggatacagtagttccctggaactgcactgcatatgcagactttgccatgtactgaccatcaggcgaatgtagccaagcgaccgtgccttcttgtgattgcagcagctgtatatcctgtaggtgcacccataaggccacaaattccgtgatgatctgctggctcatattgtgatccacatccatcacccacttgttggctatcaatgcc

SEQ ID NO: 148145 - DNA, 343 bp, Zea Mays
tgaatttgtcgattgctaccagtacatgagtgtatcctccctgagccttcttgaaaggtccgatcatatccagtccccagcacgcgaagggccaagtcactggtatggtctacagttgctgtgctggtaaatgttgttgttttgacaagtactggcaagcttcgcacctctgaactaagtcagctgcatcacttttcgccgttggccaatagaatcctgacctgaaaaccttcccatctaacgtcctagacattgtatgtattccacattgcccagcatggacctcctccagaagtcgcttcccagtggatgggagaatgcacttcatgacgacgcctgatgc

SEQ ID NO: 148146 - DNA, 514 bp, Zea Mays
cttatttcttgttttgctttagccacttcaaaatcttcatccttctcggcaagctttttctttaagttttcaatttcggctttatgagcttcgaactacgcagcaagattggcttcgctagccttaactctatctaccaaggaaagcagaattttatctttctctacggcttcattcctcagtttgataacttctgaccgaaggttactaagagctatttggcagctttcatcctcagcattcttttgtgcccttaaagcgttgcttagaattaagccctaaaaaggggggaaggatcagcataagggtaaaagatacaaaaataatctgctcataagtcaacaacttctgtacctttagactattgtaagcgaggttgtctgcgaggtcatccttcgacatagcagagagaccaacttcgagcttcggaaatcctatgtttcttgtcatctcccggcaaacagatatttccttattgtctgggaggaagtacagaaagtcatcttcattggtg

SEQ ID NO: 148147 - DNA, 886 bp, Zea Mays
gccgcctcggcgcgggcgcggtcggcgctgggccggaagacggctgcgcgcaccgccccgccagccggcgtagcgagcgccagagatcttggcagtggtaactgacatccgtcattttggtggaccaagcggtctagtatcattagcactagaagtagacggcatttggagttcttcagtccgaaaaaaaagaaaatagatcgaaaaaacagtttgggaggtatcctgcgtttggagtttgggacacgattgggtgggaggatagtttggtgagctgattttcgcttcgtgaggccagagagtttttttgcgatcaacaaacccgtccgctttggtcctgtaaattctgtccgccgcgtggttttttttttgctccgtattaatccactgtactggcacatttgttgatctcatgctctcagtcgttcagatcccgactcccgagtgagaagaaaaggtgctgtaaaagctttgggtgcatgcttcgcctgttcttttatcatggcagattgatgctctgcgattacctgttcttccgtggcttgcgaactgaaaagcgaaataaagaggaagttgatggtgttaatcatggcgtcatgtgtcgctgttactcaggcagccatgcggccatgccatgccatgctcggtgcacgcacttgggcagcggtaactttttgttcggttccggtttcactttctactgtatacgacgagtacctcgcccgcatgcgcccgcccgaccgtcgctccctgcgctccctgctgctgtgaattgatggagatgcccgtccgaacaggggagccggagccgcctggagcgcctccatgtgtggtgctgatcgggaactgtgcgccatgtgcagctatccatggcggcccgcgtaga

SEQ ID NO: 148148 - DNA, 705 bp, Zea Mays
cggatgaggtaaaagctgaattccggctgtacatcctggctgtctggcggtggggcagtttcgccataccagccgcgcgcggctattgttggcgtggatgcccccaaccccagattcttctggccacgcacccgaaatccacacctcacaaaccacgcagcggaggcgacccacaaaaaacacgcgcggcaggaggaaggcgaggaagcatccccttgtgcgcgcccccctcatcctctcaatcccacggattcgccggggtaatctcgccacggccgtgctttgacgccgaattcgtgctctgtaggttcaattgaccccaccaccgcccgctgctgcttcgtttctagctcgagagagtttagtgggttgcttgattccgaagctccgagctcgtgggattgaattgagcccccccaagatcagaattggagcagcgggttttggtttcctgcttggtgccgctgattggagtacgcttcttttgtggtggttgagaggctgctcggcttccgccgaccatgtccgtgccggcgatagccgtgtacaccagcccgcccggcgccgtctacgcgccgccggagctcgagtccagctcgcgcggctcggcgccgtgcgcggccgcggcgtccccgtcagcgccgagctcccaccgccacgcggccgtcgcgggcggcttgtcctgcctattttcgtccccgtccg

SEQ ID NO: 148149 - DNA, 447 bp, Zea Mays
cgggggaccatgtccgggacgatggcgtaccatggggggcagttgttgcagccggagctgtcccgtcgtgagtcacagtcgtccgctcggtggcacggcggcgctgagggcggcaacgcgtggggtatggtcttggtgaccgcgagccgtggcggtgagattcgggtgtaccagaacttcggcctgcctttgaccaatctcttccactagctagaaaggatagccagagtttgctggtgctgtctcgtttctggtctaatatttccaaaggaatagattttgcagatgagctgatgtacaggctgatataccagaagaacattttcaggaaaaaaatagacgggaaggatagaagtgcagtgtaaacccctatacctgagagtagaaaatttgcgtggcattatatttgataacgtaggaagaacacatagattacatgtcccaagc

SEQ ID NO: 148150 - DNA, 472 bp, Zea Mays
ggaagtgccgagtcagaaaagacctgcagtctcaactgaaactcgcccgcttcgctaaattgtcaacatcagtagctgccacctaaaccttgattcagctctttcataacatgtccaaaggatacaacacgctaagccaagttctcagaatcagacccacttcaccataattgggacctagggcagtttgtgttgatctctgtgtaaggtgtggggtttatatcaaggttggttcccaaatttggcgtattgcaaaatagatggcactatggcacccatggctggttctgaaatttgccacgttgtgaagtagattgcaaccgtcaatttccccccttttttctcgtgttgctggggaaatcagtaagtagctaattagtgtcattcttctagacaacatgcttcagttccagattctaggaacaacttaactgattgattgatttttttttgctgcttctgctcgaaacat

SEQ ID NO: 148151 - DNA, 281 bp, Zea Mays
gaaatagtttagactctactcctatagaacaggtcttaacttagttcaccctgcactaaattaagaatgacagatcgacttggccatatgcaactaccttaaccatccgatagttgcataacccctcaattttaacctagcaagaagattctaacctacctgcaccatataatccatcctacacacatatatcctaaccatatgtccttaactcggatggcaactccaagatgaaaggccaaaggagaccaaccacgtcaaagaaagataagcatcaactc

SEQ ID NO: 148152 - DNA, 553 bp, Zea Mays
gccacgcacaccgtctgaactgagacactacgcctttttttgggcatgggaatcacaaggtgccgtttggtggacagaaaagactgaagtggaccaacatgtctgtaggttatagagcaattgcaatcaatctgtacagagaaaatagggtagctcttacttgtaactcttagtggaaaactactagtaacagagacaagtgttgagatggtagtgtctattccaaccattccacaatttagtgcttaccaagtacagtacaagcaccttgactagccagcatgtttcaatgaacaaagcattaatctctcttactccccccccaagcaattatttcgagcgttgactgattcttggcgaatatttcaagcacacaaatcattgtatcaaggtcaaaagatgttgacatttaataacatcggtccaaataattggacaccagtttgtgttggacattactaggcactccttttgtcatgtcaagttgctatcaccgataagtggtaacagccatgaatgttagcttaatggcaccgattatgatctacaggct

SEQ ID NO: 148153 - DNA, 345 bp, Zea Mays
acgcgattgggcgacccggagcccgattgaaggcgcaactaaatgctcaatgacctagagtatgcaatgaaccgaatgaattgggttttaccctaaacagcgacgactgagatgccgcccacggcgatctgtggcccactggggaggagggagatcttgagcaatcccggcgactccgagcgcacactgaccacggtgaagcttcgaacaccttccacgccacactgcgaagctcctagtaccgcactcgagattggagctccgatgcggacccgatttccccacggcggcccatgctcaccgacctgatggtaaactcgacgacgatttggttcggggggtagg

SEQ ID NO: 148154 - DNA, 637 bp, Zea Mays
ttcctgatggatccttcaaaggttttgttttggaatgtaaggggtctgaacaaaaaggcaagaagagactcagtgcgtgttgtgattaataacactaagcctgatattgtatgtttgcaagaaacaaagaaagcatccatttctcggcatatgattctctctctgttaggttctgattttgaagagtatgttgttcttccggcgactggtacgcgggggggaattattttagcttggaggatttcggtctgcaagatgctccaaactagaatagacaatttttcagtctctgctcaaaaccagcagcaggatggtgtggcttggtggtttacgggtgtttacggtccccaactcgatgagcataaaattcaatttcttaatgagctgcgcctgattcgatcacagtgtcttggtccgtggatgattggtggggatttcaaccttatatatagagctgaggacaagagcaatgacaatcttgatagagctatgatgggaaggtttaggcggctgcttaatgacttacttctaaatgaactgcccctttcaggtaggaagttcacctggtccaatgaacgggcctcacctactttggttcgcctggatcggattttctgtacagcagattgggaggaca

SEQ ID NO: 148155 - DNA, 444 bp, Zea Mays
taaaaccacgcctaccgcctctgggattggagcagggtttcccctgagagctgaaggggaagtcgttagagaagaaagtgaaacccacctccccgcacctccaccattacccttagacctagcccaagttctagccaatcaaacccgactcatcgaggtcctcactcgaaatctggaaaatcaacggccgaatggtggaagaccacaagacagaatgggggatttcctgagactcaaacctcccacgttcgccggatcaagcaaagaaaactggaagccattggttgcccagaaaatcagcgtgttcaactggctgcccaccaactttctgggatggccttagcctggtgggacaccttcaatgtcaccatcagagatgctacctaggcggaattcgaagcagccttccgggagcaccatgtgccccaaggactggtacagctt

SEQ ID NO: 148156 - DNA, 322 bp, Zea Mays
cccctcaacagaccctaaaaaggcccaacaaaaaactaccaagatccacaacactagcaactgaaaaacttcatacccaagtagcaaataactgaaaacacttgattctaaaattgaaacaaagaacgtgctctaactaaattcttcaaaccaaacctaagctcagatacaacattcaaagtccaaaccattccctgatcattaaaaccaagtatcattgctaagcagcaatgaacacgacagcagggcggcacagctatctcctgtccacattcaactaagggctagtttggaagtacaaaaaccggaggggataaatatt

SEQ ID NO: 148157 - DNA, 465 bp, Zea Mays
gtagaccgagccaagaatgaggaggccgatgctctagccaaggcagccgccaggggcgaagccctaacctccgacgtgttctaccacgtcatcggcatgccagccgtccgcagccctgaagggctccaaataaccaacgacagcgagggccaccgcataatcaacctcatcatgaccgaagactggcgggcaccaataaccctatacctacaggggtactatcacccaatcgacagcaatgaggccaagcgcctcaaacaccaaagccgggacttcacactgatcgagggccaactttacaagaagggggtcagtcaaccgatgcttaagtgcgtcaccgagaccgaaggcgtacaaattctgcgcgaagtccacaatgggacctgcggctcccacgcagggcctagggccctagcggcaaaggtgattcgccaaggtttctactggcccgccatgatttgcgcc

SEQ ID NO: 148158 - DNA, 670 bp, Zea Mays
ccctccccaacctgctccgccccgtccgcgtggacgtcgtccctcgtcgtccttgcctcgccgattccctgctccatcccaccgggcgtccctggggtccgcacccaagacgcctccccgttgtcctcacttcctctctccaacgcctgttgcctatctcactccacggcatggatctggaattgtgaatccctcactgaggccccgaatccaacaaccaatgctgccttcttctcccccctcccctctgcacgacattgcctccccagccggcggctgaggtgcagcgccaagtggccaagtggtgccgccaatcccccatgtgatcacatccctactcggcaacaacctcctttctcacaccactgacaccgcacatcatccacatccacgcctccgtgccagtagcagcaccgtcggctcccgctgccagatccaggtatccagccacgcccactagaggccaagattcttccgtggaggaggcgcacgagaggagcaggcagatcagccagcaatggtgaaggtgatgtttagataattcttcacacccttgctaaatacttcaaaaatcttggttgaactctagagggtagcctcaacgcatcaaatgtcatcccaactgctacaactaccagagaaaaaaccctcctgctcattcgaaaccaat

SEQ ID NO: 148159 - DNA, 522 bp, Zea Mays
ctggtccttcggttcctgctgctgaggaagtgtctgtgcctgaatttaccgacgctgaccccaatgggtgtgatgcatctgtcgctgatcccaatgggtgtgctgtctgtgttgctgatgaaaacgagggggaggaagaagatgaggtccctttgactcggaagaacagtcggtgatacgtagccagtggggaaagtagtggagttccttctcctgctctgtcagccctcattggtctacaagaattgtctctggcgaactttgattagactcttaaagatatggttctagaggatctgttatcagagtcggcggacggtgacacgatggatgtttgtgctgatgtgttcgacgccgggttggggtcatcccgggcagcgtcccgcgcctcatcgaccttggagcgcggtcttgagggtcaggaaactgacttggatcgtcttgctcccatggaagtaactgagggaccttcagccttagaggtggccgccgcagaaaacttggccctcaaggatggtgttg

SEQ ID NO: 148160 - DNA, 401 bp, Zea Mays
caaagagttggcttgctactgtatagaattgtgagtaaaatgcctttgagtatgatatgtcatacttggttgtgctatagctgtttcagttgtctgaaattggcaaatcagtgtaagtagttgatcttcgagccctgtagcttgggatccatacatcattggcccaaggttgctatagcaaatttgaagagctatgtatggtgaacaagtttcttgtggagtattgagtctggtgctgtgtaaaacctgcagtaaagtgctctcaaatttctgctaccaatatgtggttatttcagttaactaaaactaaaattcagtgaactgtgttgactttagggcattataacttatgatccatatgtttttggccctgggatattataatcaacctgaagatctat

SEQ ID NO: 148161 - DNA, 2886 bp, Zea Mays
ccccaccgcagccggcccgattccgcgcccacccgcggcggattcgactcccagtcgcggatctggtccgtggcgcgacggggaggaacccgagcgcggttgcgacggcgtagagagcatagcccggcgaccgcgcggattccatcgacgacggccgtgcctagaaggagctctgtccagccgccagccaccgatccactccccgcatccttccgggcctggagaagacgtccgccgcaggaacccgtgtgtagcgagggacgtccaaaggccggcgcaagctcaaccacacacgagtaccacttcagcgcgacggcaacagcaaaggcgcaggtaaaaaaatcaatattttagctcatgaggtctgctcgggccttcggtttctgaagccttttctgcttaaggccctctcagatcgttcttgctacgcgcgaggtcggctttagctctactgtcgctgtcctaggaccttgttatctccaacctccttgttttgcgcactccggatgctgttactgcgcctgcatggaagccgtgaccgcctatatttcatgtcgcgaaaaatgcgggctttacctggatccttgcagaaacgagtgggcaacgctgtcacagttaacacagcagccttgctggcatatacacatgcatggaagtttagtcgtagtctgccttatttggtaattgacgttgcgttgttatttttacacatgtagtctgggaatggtttcgttagaggtacaggttgtattcattcattcctcccctttgttgcggtgccggccgtatggctcgtttatatatgctgtcttctattccatcaaacgaaataaggtctatattcaatcaagcatgctagttccttattcctgtgtgcgttctctatcagcgtactagctatctctttctgcagtctcgacgaaacaagatgagtcatgtaatgcttgctgtttttttttcaggtctgttcaaggtgtgtttggttcggttccaagatcactagactgaagtgacaaagttgtgttgcacgctgtgcttctaacaaatggaagcagctgctcttgctcgtagaactagagcagtggaagaactacggcgtttatctacagttgctgaatctgatgacacaccagaacagcgcctatctacagttgctaaatctgatggcatgccagcagaagagcaggaatgcgatcacttctccctgaggtaaccattttctatattcagtagatgcctgtattttttcattgactgtcattcaaacgatgcatttctatctaccagtgtagctagcactgtttagtgggtactgtttgagcatggttaattaaccatacttattatacagtcatttgttgtatgcaagcgtgatacattggcactattgtgacaacaattgatcaacgtccaggtgagcttggtttatcatcttgctgtcctatacagccatatgttgtctgcaagcatgatacatgcatgttgcatgtaagaagtgagatagtcaactagatcaggatggcatgttcaatttttgtattgttttttagattttttgaataatttgataaagtgtccagacagtccagatttaatattatatattccctctgttagcctttccatttggtaataattacaataaatcctttattctccttatttatggttaatatgccatctagctgttgtctcactaatatatttctcccactaaagtgcaagtcacttttttcacagaaagtttcaatcacaagcaactggatttgcatatattgtttcttcctttgatggatagtatagatctggcatgatggtctagtatatttatgctccacacaactactttttgtagttgacattagtattgtcctcaaaggagcccatacttcaaataatgttacatatataactttgtatttattgaaatggttcagtttggtctctatactttaaacttggtcattgaacccatggtttcaaacgcgaggcgacgagtgctgggtccacctggatgcctaggtggcaaggccgccactgttcaccatggcgatatgggtatgcctgaatgaccaggcaacacctatgaatcgtgggttgaacccataaccttccgataactatctttatctctcaatttgaaaatttctgaggttatagttgatgattttagccatatatagttcttcctttctgtttaataccagttaagtagaaatgaacgaatggtgtaaatgtttctttctttgtttgtttgtttattacacattcataaagtgagaggacaaaatgagatccatgagtgaaacttcctatgcacaacctatggttgaaaattgcttttggatattggtcctttctttttatatagaggaaacatttgatgatttgtctatgcatatatcataaatcttattgatgattgatgcttttgtcaggggttatgttgctatgcttcagaagaaggatccaaaactttgctctcctcatattttccatagccagccacaatatgatgagcaccatggttcgtccccacttttggtgtcaaagtatcgtcgatgggattgctcaaaatgtcttgaaagagtgaaagtttcaggccatcgacctacatctggaaatgtttctatcgagcaggatggaatgaatgatggctgctctatttcaattgttcggattttgcctaatagggttgatcccagaagaatgttttattgcaaacaacaatcatctcaagggaatgatcaattgaccctttcaaagaccgcccaagaatgcaattcaaaatgcagttctcctggcaacaaagcaattactgcgatgaatattccagtagctgaagaaaatgttctagaggcactcgttgaaagaagtgttccagcg

SEQ ID NO: 148162 - DNA, 673 bp, Zea Mays
agatccagatctaagggtccaaaactaatgaaggccaacctatccgcacccctccgatctagatcggacagtccacgacgcccgatgccaagaggccacccagatctaatcgtgcgcgcccaccatggatccaacggctggcacgccatcaccttcctccagccgcgaccaagcacagcggcgaacaccgccgcggccatgttcacgccggagatgttcctacggtgactagagcgcataccgaaaagtcttctaagcaaaatgcgaataggagaacaaggttaaacgagtggggtgcttcataccgtgaattgatgcccgggtgatgtcggccaccgcaccaggcggaaccgtggtgaaagaggagcgccggtgagcgattactcacgcgtagacggcacaccgagcccaatgacacaacatccgcactccacacgaagtgccgaggccccagacccatgctccgaagacgatgcaccaacaggggcgggaatcctcggtggcgccctctcatctctcttctcgatttctctctgcacatatacgcggcacagaggcaactcgcttcggcttggcgtatccacagaggagcggcaggggttatataggggcggcacgagcccgggctcaagaatcacaaggatccgcaacaacccccgccagcgcaggtcac

SEQ ID NO: 148163 - DNA, 333 bp, Zea Mays
cgttgacactgatttggatcacagactagtaagagttagtacatctctgatcgacacacaccttgaacacgaggaacatagtggatcgttgaaatcgatcgggggggtcagttaggccgatgttgatcctgttcttcgtctggtatactctcgagcacctccagggaagacctatcggggaggagcacacaaaggttgtcctaggatcagcaaggccacctagaacaccactaaatcttttcggaagatgtgacaaacaataaggtagagaggagagagtgtgtaaaaggtctagtagattgatttttgacgattgaaagttgggatacttaa

SEQ ID NO: 148164 - DNA, 576 bp, Zea Mays
cgttgttggaaatgcttctctatttatctgattggttgcccgcatcgctttatcctaaaccactgcgtgcattgactttacctgagcgtatgtttggttgtctgcacgtgaaagacatgggttgcacgagtcgatgcaaaacaagccatttgaaggccaattacctgcatccactctaccgccaaagcgcccggtatccgatcagccaggctcagacgatcagccacggacacaaggaaccaatcagccggacacgtgcctcagtttttttctcttcattttcttaggaagcatggtacaattattttttctctatgttatactaatcatgtgcatgctaagagatcaaattcatatccattctccaagcagaagaaagatgtgagtggaatgtgaaagcgagaagggtgtgggaacaatccatttcttaaacgaaacaccccatatcatgcaattcggttctttttcctgtctaatgtgttaacatttttgccaggctgtagctgtaggactcgctccccatatgtgcacagatcatgcaagtcacagagctcattaagcacggatgatcatctc

SEQ ID NO: 148165 - DNA, 544 bp, Zea Mays
cgtttctcttgaaaattacttctccgatcatccttcttggtcgtccataattttgaaaagtacttctccaatcacaagatgctgtttttttttctttgatgcatgtatctcgagctttattgaccagtttccacggataagcttagatatgtttatgcctgaaagactatcagttgatcatacagtctttgttgcctttgcatttctttgtcattcccccctatctagtaccatatctaacaccaaaatgctactgatgcagaattgaagaattcatgtttaggaacttaattgcacttaagctacttgtgtttctaagtcacgcaatcagaagatggcttataataaaatctgcaatgatggcggttatggacactcacccttctagatgctgttagtgtgggtgtgtttggttgtaatgacgtgataggataggacaatctcttaaataagattgtttggttcagggttcggacagaactattccagtattgtctcttaaaattagagagacgagagaggacgctagaggatgtccatgtcc

SEQ ID NO: 148166 - DNA, 343 bp, Zea Mays
attggaaaggaaaatttataactgacaaggacaacgtaatggatgggatgggatcggatgaaatggaacagaaaatatcataattggttagcattcaagtcccacttgtctttgcttttatctgacaaagttaaaagttcacttcatttacagtgcaagtttcctaaatttcaatctgccgaatcgcatgttacggttcttcatactttactggcagaattgaaacaggattttcagcatctgcaggacttgcttccaaaagtttcaagctaactcgtattccctctggttggtaatacactgtgtcagactggaggcttgaacaagcagcaagcaatcctgg

SEQ ID NO: 148167 - DNA, 354 bp, Zea Mays
gctggagttaagcacttcccacaagatggagggaaagccatcgtgagaaaggaagtcagaactgaaacgagtgtctcctccactggcgggggtgggtgaattcatctatggaagggtatcaaaggtaaagattatggtggaaggaaaaaaataaaagagcccggatggtttttaaaggaagtgggttagctcaagttttaattctcttttgtgtttataatgcatgcatgctggaagtaatgtctcctctccaaataatagggtgctcttagggcatccttaaaaagtctaagtactggcccatggggcctacttaattagccacctatttctccctctatgcctaaggccttt

SEQ ID NO: 148168 - DNA, 532 bp, Zea Mays
tctacaaccagatcattacgaaaattgaagatgagaatcatttggaccctagccattgtcataataatgattttggttgccccaaactataatgatcatcattcttcttgtccaaacttctagcgcctcgacgtgtcagagtcgaactgttcaaccttaactgaaacctcgaatccagtagtgctttgtgcatctatcgaacataacgatgtcctgctaatgtgatccaattcagaaaaccgttcctatacctatgttcaaaaggtaaaagagaaatcatcaaagcacaagttcgagatacaataccacttgatgaaaacaataaagatacaaatgggtttgatagccaaaagaaaaggcaacaaactctaccgaactaaagttccaacaacttcaacattaataaaagaacctcgattaataaacaaactctgcagaactgtaagctccagacttcatttgtactatcatctacatttgcagcatgagaacttggtcttcgatttatacctttattagacatcttatttgc

SEQ ID NO: 148169 - DNA, 487 bp, Zea Mays
actagacggggaaacaacattcttgcgcttggaggaccaggaaacaagattgtcacaaataaagattgcataactggaagtggatcgtcgcgtgttaggacaaccagcccaatcaacatcagtgtagatggtgaggtgaccacagagcgccgaagaagcaagccgtcctcagaagtgccacaaaggtatcggagaatacgtttgagagctgtgaagtggggctctcgcgggtcatgcatgtggagacatatctgttgaactgcataagcaatgttaagacgagtgaaggtgagatattgaagagctccagctaaaccgcaaaaatgagttgcgttctgaacaggaggtctgacatcagctgaaaattttgcctgaagatcaaccggagtggaaactgatttgcaattttgtagactagcccgctcaatgatgtcaacaaggtaatgccgttgatgcaagaattggccactatctctgcgttccattg

SEQ ID NO: 148170 - DNA, 777 bp, Zea Mays
gtcttgccatggggtaaagccacgcatgtttgtggtcgcttggttgtctcgtattctttattacggactgcgcgaccaacgtgggcctgagcgctatcattcgggctatgcgacccctggccttcgtaacctggggttcggtgcagttcgtcgtgttgtgccctaccgatgacttgcacactcaggcctagttcagataagtcatgagtgtgccactggccgggggacgtgcggaccataaatgtttcgtagtccgagaggctcgtaggtcatgagtgctctgcaccccatggagctcgtaggtcatgagtgggaggcagaccgacgcctccgccgtggctcagcgctaggcgaagttaatgcggacggtcatttatgacaacccggtcttgggccaagcgcgggatccacttaggtggtttcactttggcacgcttggtcccctgcctggttccgccacgcccgaccctggactcggagccgcgggggttcgtccaggggcgggtgctttcagggtagacattacctatctcctttgactggccagtgggccctagttgctagaggcctcttccccagtgtgctcgctgaccaattggcccaagggaccagggtcgtatccccggtagtagccccaagcccttaggggagaatatttccccttgggggctttccctgggtcgggcgttgccttctatcctagcgtgtactttcgcggttttgcgtatttggtgtcgaaacgatgcctccttccatgtgcggcgcttggcatctgac

SEQ ID NO: 148171 - DNA, 669 bp, Zea Mays
tcttcttctccgctgccgttgaatatcaacgccccttttggatatttcaaactctgggcataatattgagcttctcgcttttcttctgcagataaccattttcccgaagcatgtcgtacaatataatcgagagcttcggaagatgcttcgggaataggaatggcagttttttagacagaatttgttctgcagattctttttccgcttcttcttctccgatttccaaggatttctccttggcgggctctgaaggcctagcttcggtctcggcatgactttgtgcagcttcggcttcagtttgttttgtttcaattcgcgtttttgaagcttcggctgttttccctggagtagagcttgaagtctttattttctccagtacatccagcacattgaccatccttttcctcttgggggtcgttgtaagatccttttgcgccttcggcactgtcacctctgccgaagggcttataacttctaatatttttcttttttcgatctctgcctcttcaatattaatggcctttggctcacctgatttggctggtgatgccttcggcattgtagccggttcttcattcctctgtgtgagggcagattcttcggctttagtagccgaagaggtctcgccgccaaattcgggcacttcggccggttcaatatatcgcggcc

SEQ ID NO: 148172 - DNA, 1853 bp, Zea Mays
gaaagtagttgcccacttgtattccactaacatgctgcagtttgttgaccctggaaataatccaccgcaagtccacaaccattgagttggctctcatctgttccaagcataaaagagcaggtactgcttactctatccccttttgctgttatgttcctattatattgcgttcggtgatatcgacctcaacctgcatgttaggtgtatattgtttgtgttaggtgttggcacccagtcagatctggatcacttgttggttggcttgccaccttgttaagaaaccaggttaggtgctgtctggtgaaggagcaaaatcagcagaacggtacacgagtccctttgtttttaagataagacttggttgtctttcccgtgaagcctagtgcccaacacggatctgctgtgctgatggtatctgagtttctactctctagaccgtcgattgtattggaggaacaaattaaagcacaagctttgccttgtaataattggaattccatgcttgaataatagtttttgaaaaaacgcattattgaataatgctatgtatgtcagactctctagtagataaggtaaaataggagatgcggaacttacagggtggagtttgaaatagtggatctgctggagataggctcagagcctgcctggaataagtgccaacaatacagttcaatctgaaatcacctgtagccaggcaattgtatacggagtatgtcgtaggagctagtagaacagtcctgacgaaaatacagttgatgttttagtcattatatataaaagacaatcaggatggaggtacggccattctgaaatcttatcttcttagaatatacaatgacacagaaaaaatgataggcttgacatagtggtgagaaaaggttttaggtcggacgcatcctctacaaaatgcaaggataaaacatgcctcggttatttcttttagacttatgttcatgtggggcagtgggagtcagtagcactgagcctgtcctttctatacaggacacacaaaaatatcaatattcatgatacaaatatacaccatcaaattaatcaaaccatacattttttagtaagcctgtttggatacacaaattttaatattattttctataaatctagccaaacttgaaattagttgatttatataaatgcgagatgtgcatttgttttaggactggcagagtatttgtaatgctttacactgacatgtttgttttgtctcagcaaccctggactacggcaaaaaaatggttagcctgctccagacatctaacttgttactggacgggacccactctgagcacttttgacccagccacgctttctactgatcctgctttttgttgacgaaagggacctgcatttcagtgtgtccgatgtttgaatcatcatatctcctcgactactatgattgccgagtccactccggcctgctgcctaaatctgatggagatggtccctgcaatgcctacatgatgcatgatctgtttttatgaagggatagatgcatgagctgtggacctggcaacctgaagcatccttcctcatcgatctgtttcgttggtatgatctcaattgacaaagtctgctgaagtggtactacgcgccctgcaatcctcattgagccgttctgacgtaggctctagctccatatatttagggcgtcgtcctcaacagcctgcacaaatctctagctgacaatgtcctggtggtggggaaacgaaggaagaacaaaattaatgagctgtggaaatagatcaaggaagttcactatggtgcaaacatagcgatgaagtgcaccctagcgacgtcttcttttttcttatctctcctccacgcagacttcc

SEQ ID NO: 148173 - DNA, 327 bp, Zea Mays
cgagccaaactctccaccatcccgccgccagacaccgccgcgagggagcgattcgcgtcgctaccgtcgccgtgcattgcgtcgccgtccgaggtctgctgggtggtcagggtcaatcgagttggaagtgctggtcacgtggaagtcgggcatgggcgcaatcgaagaggggagctcaccggagctcacgaaattccttgccggtgttggagaatccgcaggttcccgtggccagggctgtccgcgctaccaaccgtggtgagaaccccctttccgtaatcgccatcaccccctctaggtttggcaccgaccaattttgagtttgga

SEQ ID NO: 148174 - DNA, 945 bp, Zea Mays
agaactgcgcatgttatatattagagaggaatagaagccttacaaaaaaggagatgttgctgagcaaatctcccaaggaccctacatatacccgaaggtaattacaaattggtaccgtaacttgacccgacctcgcccagagctgcaactaagccaaggctctcaatctccttagctcctgctattgcccagctaacacactcatcagttgtgagtgcctgtgtctattttgttttactgaaaattgtgctcaactggtgtatgggatgtaaatacctggagcaggcagctctgctgatctgttcatgctccaaagaacatctaagaaatagattcagaaataacaatttgaacagtccagttttagtcaagcatttgggttgctttcaaggtgattggcaaaatcagaagacggttcctgtggagaggaaggaaataagttatgggagggcattgtttagtggctttgagcaaggttactagaccaaaagaattgggaggtttgggcatctcacacctgcagaaaatgagttgggcccttagattacgctggctctggttgcaaaaagctgaacctggccggccatgggcatcctttaaactaaatgttcatccttcggttatggccttcttctatgcagcggtttcttcggtggtggacaacggtacgaacaccttgttttggacagataaatgaattgatggcctgagtctttgtcagctggccctcatctggtcaagttggttttctctagggccaaaaagagaagtgtccatgatgctctcacttcgaggaactgggtgcatgacataagaagtgttatcactgtaaatgttttatctgattttctcaaagtttgggacctcactgcagactgggccctgcagccggaccaggaggataaacatatatggatgctttcaagctcaggaatctactctgcc

SEQ ID NO: 148175 - DNA, 378 bp, Zea Mays
tggagcctaagaactcaacctagtcgagctctacacggaaatactcctttcttcatggtctatgggtcacaggcagtattacccgctgatctcaagtttggggcgccaaggttgatctttgagagcatagcagaagccgaagctactaggctggaggatattgaggtgctcgaagaagaacggctgaacacagtaattcaatcagcacggtacgagcaaactctgaggcgctaccacgataagaccatgcgacgacgatcctttgcagtgggagatctcgtcctccgccgaattctaacgggggagggacggcacaagttgtcacccttatgggaaggaccattcatagtagtagaagtcactcggccgggatcatat

SEQ ID NO: 148176 - DNA, 1236 bp, Zea Mays
attagttcgagggcaatcgattagcgctgtggatagaaattgaagctcgggttcagcagcctcgatcaaacagcgccagagccagagggctgcgagagaggacaggactggacaagaaaactgaaatgaaaacatgaccaagaaccctacccaacacgagaagccccaggccgaaattaccgaagcgcccctcgccatttaaccatctcatctcctcacctcctcgacggcgcgactccctcgacctcgccctcctccccccgccttgacgctgtcgcctggtcctccgcggtcggctgtctcgattcgatcggtaagcgccgatttcgttccgagcgcctccgttcccttgcccagcaggccgcagcccgcgggaggcccgcgcgtgcgctgccctgtcttacccgcggaatttatggggtgatgggtgtactgatgtgattgcggcggcagaggctcgtgatttgtgcctggttttgtttttttttggggggggggggggggggggcttatttctgttggctgggaggctcggactgcagttcttcattgccggggctgttggcctgttggggccacgggatggtctgcacaaaatcacctgttcagtcttgactcgaccaagagctctatttgtcaagcggcgtaattggtgaaattctatctggagtacagagtggacaattgaggtcgataaatagagaggaacatttctggggcaattatctgttggaatggtatggctgttaggtttgtttgtttgcactcctctttgggagcaccggagcagcatagcactgtgaatcattttattgtttccaatgataagagtgagccattgagtttgggtagatcggtagatgtattgatgctgtcataccaaattcacattggttttttagtctgtatgggatttgttggtcgccattttgtggaaaatatgtagatatgtcattctgcttgaccctatgtacctgtgtttctctggcttgcaattgcaattgtagctgggtcaaaccacatctctttactcacattttttcctgcttatattgtttgttctgatcgacatgaatttgtattgaaagagaatgtgacagtgggttagtctgtatgaaacttcagctaatggttgttgctcaatagtttagatgtggtatctcttcagtaatagcagtttacttcgatgagttttactatatccaccatctggtaacaatttagtgatgtttaact

SEQ ID NO: 148177 - DNA, 289 bp, Zea Mays
atttcgttgattcttggctctggcacgtcacaagttcttttgaatggggttccgggcagacgctttcactgcaggcgtggggttcggcagggggatcccttgtcccccctcctctttgtcttagctgctgatctgctacagtcaattattaacaaggccaagaattgtggcatcctcaagctcctgatcccgctctcctgtggatccgacttctcgattattcaatacgtagatgatacaattctgattcttggagcgtgccctagacagctcttctttcttaaagcaa

SEQ ID NO: 148178 - DNA, 1054 bp, Zea Mays
cgaggacgccagcgccggcctcaccgaggagtgcccgatttgcttctttgtatgctcggtcacccgttccagataatattggcgcctcccattttctacctgtttgagcaattgcgcgtgacactttatttattaattaatctctcgtgctaactgtttgttgttgttgttgtttgctgtgcatgcagttctacccgagtctgaatagatccaggtgctgcggcaaagggatctgcactggtgagttcaacttccatcttctcatcagtgccttttctttcaccgatatcacaatactgacgcgtcatgcttaacgaatgctatgtccatgttaaagcttgtagccactgaattgcttcatgttgcttctgcctgcagaatgcttcttacagctgatgccatccgaggcttctaaacttgtccagtatcctactttgcgacttctgatttgaacggttggcttaacatctgcactgtagtacaagtacattatatacaggtgtccaatagacgcgcgagaaacatctcctgctgtacataaaatttcagaaatgatcagcgcttcacgcttgtttggcgcagctggtcttgaaaaatacgcattcagtttgatttaagcattagacatgtagtcttaagttaagacacaaatcatacataccgtagatgaaaataatagttttttttctctcatctcaattcttgggtccttagctaataacgcagctgccctttctgcaaaactaaggcctatgcaattgaataccaaggcgctcaaatgacaagcggcaaggaaatcaaacaagaggtatgctttctactcctgtagattctgaatttgttacagtactactaattatttttgcaacctgacctcgtgcagggagaaccgaacgtcaatgagactaaaccgagtgtgttcatttgaaatctcagattaccggcggaattgttcggccttagaattagctagtccaattttacgcttccgcaagttttctgacctgacgacaagttttttttttcttttctggactgccatgatgactcatcc

SEQ ID NO: 148179 - DNA, 845 bp, Zea Mays
tggcatattattaacatttacaaaaggtaaggcagagtggcagtaatcaaggtcatctggatgctctcaataaaaaatgaaagtggactcataaagttttctttgttcataggataatttgtggcaaaaaaactcatcttatttatttcaaactctactgtgtatgcaatctgaatatgatcagagataagactcatctgccacgttaaaaaaaagactcgtctgccattttgacttgaccgctatctatgttttttcccataagtgacagatattatcagtcagcggatgaattgaagcatcatacaggtatactatcagtcagcggactagatagcaaatgtgagtcagtcataagcaccaatgcaccattcactatggtgtctgtccgtctgaataatgtcaagtaacctcacgtgctatggcactgcctaatggaccaattggtatgcccccaatgctaaaacaggtaccttttctgaagtttggaccttacataactggaaaatactaaaatttcatttctgataagacacgcacttatattcctaatagaccaactactactctcccagtgccaacaatggttatttttcttggactaaaatatgtttccacttttgaacaatggacctggcataagcaagatgcccagaatgaccaaaagctctttcttccatcctccactccgcatctgtcatcgccacaactacctccttgcccacctccacctcccggtttcctcctcaccacttcatgaccggtagaaaccaacaatttaaaggttttcaagaagtagaccccacctctgcttcataaaaactgccgctaactgaccaccatcc

SEQ ID NO: 148180 - DNA, 437 bp, Zea Mays
tggtgtggctggagaagacaccatgcctagcttagctagtaccagaattcagttgacttgtgataacctggtggtgataggaaagttgggagcagcatgggtactgttgctggtatggcaagcatgagtgatggtggtggacctggtggccacaggtgcacctagattttttctctcttctgctgctgctgctggtggatctagcacagatgatgcatactcctacatgattgctactccctctgtctgaacaaaatgacgttctagttttctccaggaaattacagattatctcatgtttgacaaaaaaaacaagacaaattatcttatgtttgaccaagtattacgctaaattgaagtggagcatggataagatgtgggatgctggcgcaataatatacgaccaacgaccagtgttgcacgcaataatatatatg

SEQ ID NO: 148181 - DNA, 419 bp, Zea Mays
tgcaatgcactcaatctattaagttgtcatcagttttgtatgtgccaacttttcatgtcaacttgatatcgctgagtgccttggttgatcaattggattgtcgcattatccttgaccgagataattgtttaattcaagagaggcaaacagggaagaaacttggaacagctaccaggcgtagtagattgtggtatatggatcatgaggggactaatgatacaatatgcactatattagcaacaagaatggaagagaaggaggttgcagtgatgcttttgcattatagattggggcatatttcttttgataagatatgcaaagcttttcctgatgcaatgtgtggggtggataaaagcaagctattgtgtcgtgcctgtgagcttgcaaaacgcacaaggacatcttatattagtcgaggt

SEQ ID NO: 148182 - DNA, 1025 bp, Zea Mays
ctgaaatggatcaattcggaattagaatggattttctatgaattaaataagtttctgaaattattttaacactaaaatcattttctaattgaatttatttggtttcctactcctctgtactgcgcgcatcaatccagagaactgtagggtgccatctgtaaattcttgggccatcgtgcaattacttaagaactgactaggatcgcgggttgattagccaattgttcagggtctcttttacaaactcacccgctccgaaggggtatggggtcacaagagccgtccaatcaccatcgaaccaccctgatcagaccccgagggtttatgaagctgtaagcaatcaaggtcgttggatcaacgaccaggcgcctggattttaagtccttaggtcgattatcacgcgccggatccacatcggacgaccgagaagagttcaggccaaaccagaatccgggatcaaatcccagcccttcatctgggattgacggcccatattccacccccatcgcccaagcctggtaacggtggcgctgcctgaggccacggcgaggcatcgccggtgagcctactggatggcggtcctgtgctctagatcccaatccggggagcgctacacggagacaagatcccaacaacagatataggttcacgtaccaatggtgaggatgccgatattctccgaccacggcgctagtggttccgcggcggagcagcggcatgggtgagaaattctggtggccacgaggtccttctccgccccccgacgacaacgcaagcatcgaagctcgccgtcgaccaacgaaccgagtgcatccatcccaatacctcgcgcgtgaagaagatccgtaccgccggtcaccacggcatcttccttctctccttctctcttgccccagtcggtggtggtggccaacacagcagcggcatctggctttctctctccatctctctccgctgcttgctcggaggcctcacgagtctcgacgatggccgagggagtcacaacccgcgtatatttatacgcc

SEQ ID NO: 148183 - DNA, 279 bp, Zea Mays
atatgatttctaagttagcgtgctagtctcaaaataatcaagatatagaaataggctccccctagagatatgcaccaagaatgaaagaattgggtggatgcactcattttttaaaggcaaatagggagaagcactatttatctttgatcaaggcttataagatctgcaataaacaacttaagccttgtattctcacaatgaaaaagatttagaatactcacaaccacaccattgatgcttttgacaaacttattgtccaagtaggtgttgtttcactta

SEQ ID NO: 148184 - DNA, 279 bp, Zea Mays
tatttgctgccagagaccctcagtggattccaacctccaaatccacttcgcaagcaaactgaaattcatgcatcttaaatcaatcacacccagccctccctggtctttggggagacaaacaatattccaatttgctaagtggaacttcctagaggtattacccccttgccagagtagtctttttctataaatgtccattttgtttatcaccccttctggcgctgaatacatagacagcatgtataaagggatgttagacaagctactattcaacaagag

SEQ ID NO: 148185 - DNA, 668 bp, Zea Mays
aaagaaagcaaaaataattacaaggaggccatgcggagcaaggccggacagaaaaataaaaaccacccaacacgggaccaaaaaaggagaaaggaagaaataactacttcgatccaggtgcccaaagggcttcagcgatactaagcctgccaaggtgctttgccccagccataacccaacagcctaattcattaaggaaacaatgctgcgccttggaaatagaaggtgaatccctctcaaaaacagccatgtttctttgcaaccaagggcatcaggctccaaggatgatagtgcaattaaggcctttccttttatccttgatgaccctgcaattcatgtctcgccatcattctgcaaaggaagaggcagaagaggagggagcaagatgccccaaaccatagggggagagaatactaaaccaaaattgcctggcaaaaacgcaggaggttaagatgtgttgcactgtttcctgggcttggtcacatgaagggcaaacagcagggtgaggcagccccctcttttgcaatctatcggcagtccaaactctgtcccgaattgccagccataagaagaacttgcatttggggtgcccaagacttccacaacctcttccaaggttcaaacgctatagaacctgcgaagagggccttataagaggatttagccga

SEQ ID NO: 148186 - DNA, 515 bp, Zea Mays
atcagatacttcaaaatcccctttatcatctagaccaccagccatgtcttgaaccaaattggctatgtcatcttcatctgaattgtttgtagcctctatatcactatagtcatgactgttaataggcatagagtctgtttctccatgataagtccaccttttgtatccctcttgaaaaccatcacatatcaagtgtgaacgaacttcattttcatctttccatagagaattaacacattttctacaaggacatagaattctatttccacctatagaattgctaaacgcaaactcaataaatccagctaccccatctatgtagaccttcgtgtgcctataaatattaggtacaaaaacgatatgttggtcaaaggtgattactacaaaataatggtttatagtacattgtcagaaatatacctaggttcattcatccaccttttatccatgttgtaccttaacaaataataagatgaaatgtacccttcctagcctcaaagtagaggtggaaaaag

SEQ ID NO: 148187 - DNA, 421 bp, Zea Mays
attctgctcttaatcagatgatgccatcttggccggctttttttttggcagttggcacgacagtttgcaatctgagacttggcactcgtgagtcgtgagagaaacaagtcgatgtctaggcactcacgtgaaagctttccggtcggcggtgaaatagcggagtactcgttagacatcatgctcacgtgcatggcagtgtgtccctgccaaaaaagaatggcggagcatcctgcttttctatgaaacactcggtaaaatttcatactgggatgcagatggaccacgcgttatcgtcttataagtgcctgctaaaaaaatgttgaagataagtatggtgtcaccgctcgccagctgccgccgcatgctgacttgcatcatgtacgtgtccctggacagctagagttattttttacaaaaaaaa

SEQ ID NO: 148188 - DNA, 343 bp, Zea Mays
atgaaaccgagcgaccgtcaatacaagacccatcgagaggaaaggtagctgtgggtgtggacgtgcaggacccacgagacggtggggacggtaggggagacgatggtggcgatagcggggttggtgcaaattcggtaggtggggattctggggctggtagagattcaacaggttggtctagatcatctcgagtaaggaggaaagtacattttattagcccacctctggagcgctaactacgcgaaaaagcgtgaaacacgagcgagcgtgtgatatttccatagttgcatcgatcactctttgtttttctcatataaagggtcatgcatgccttcactcatat

SEQ ID NO: 148189 - DNA, 423 bp, Zea Mays
cggcacgaatcgcggcggggatcgtcggcggcgagttgagctggcgtcctaatcctttcagatactgtaccatggcgtccttcattcagttggcctgatagcccaagtttagggttaaatttctcttaattttctgtggcaacatacctagagttctgcagcaaagttgtagaccaaagattcagctataattttgccacaacaactatagccaaattcctactgcatcatgtttgaatttgtacccaaagtttctgtggttacactgtcagtctgaaattcagacttcaacagcttgtcaccccaactttgggtgagtttttcttccatttcttcataacaaccatgcttacactcttaagcaaagttgttctcctttgataggtctacaaatttgatgtggtgacctagggcaaaaacctt

SEQ ID NO: 148190 - DNA, 674 bp, Zea Mays
ggaaaagagtctaccttatgctgagttttcatataataatagttaccagactagtctgaagatgtcactgttcgagactttatatggcaggaaatgcaggattcctctacattgaatcagactagaggaagacagttctttggacctaaacttattcaagaggcagaagaacaagtttgtataattcgagagaatttgagggtagctcaaaccaggcaaaagagctatgctgataatagaagaagaccactggaatttgaggattgaggttatgtgtacctcaaggtgtcaccacttcgtggaatgaggagattcaaggttaagggcaaattgtcccctcactttattggaccattctgagtttttagttgagttggagagatggcctatcaactcgagctacctaatagtctatcagatgtgcataatgtgttccatgtatctcaacttaagaaatgtctctgtatacctgaggaacaattaccaatggatgagctcggtgttgagggtgatttgacctacatggagtatctcgtcgagattcttgatgttttgactcgagttacaagaaataaggtaataaagatgtgaaaggtgcaatggagccatcatgaagaagatgaagctacgtgggaaagagaagaagagcttcgtatagattttccccatctttt

SEQ ID NO: 148191 - DNA, 510 bp, Zea Mays
tcgcgtgattggtttctttctcaggacgtgcagttgtatccgtggagatttaaagcgcagtttgtttggtttccttttctacgcacacagactgaagagatgcagaaacagaccgtcaaccaggccagtgcgagatgctggagatctacgtacgccggcatgcaggccgagccaatgcagtagctgcatgtagcggcacataaacagaaaattgttttttagattattttccattatatcttacaaataaaagatttaatcaccgaaacaattttctattcttgtctctgagatttttaggaataaaactagacgacaaatgttgtataacatttagagatttatttatacacttttctctagtacacgtctaaggcaaacaaccaaacacgagcggtatctatcctgaatgcatcaatacaagcaaccaaacacaagcatacgcacggatttagcctgtacaccggagacctggctcctcatatacaggtcaggctaccaccatacaac

SEQ ID NO: 148192 - DNA, 421 bp, Zea Mays
ctcccctatgcgaaccagtacgtatccttagtccttggatcggagatctacggtcagagacctacgtgacatctaaatcgcccgatagccaatcgacgaccgaatctaactgccgtgaagaggtatgatcatgcgctaattagagccacccatcacgacatcgacggcccgcaatccttcttccctatcccgcgcccagacgccacggtattgcctgaaccgcggcgggcacccaccgacgcgacgaccaacacgcaatttgcgacccaaaccctaaatcaatgatgctaacctaaccccggggctacggtgatcagggagaggcccaaacaaccgtgcccaacggccaagagagccccgcccacggagttccacgctccgcgacggatcctcaacgtccagcgagcaattccccgacagc

SEQ ID NO: 148193 - DNA, 325 bp, Zea Mays
ccagtgaaccccatgctaacccacggcgcgcaattacctgatacgctaggtgcaaatcgaggctaagacaacgacggatccaggaaggagatttgtactcacgattggcttgatgatgaacttgcccacggagcggggcggctttacggcgggaggtaagggacggcgagcaattcccctcacaccgcgggtccacgcacccgattccccccgacacacgatccacacccccgtcgggctgtccgggagcgcaccacgggtgttaaaacggggacggcggcggcagacggctatggcggcctccggcggcgttcccaaatccaaa

SEQ ID NO: 148194 - DNA, 554 bp, Zea Mays
gaagaaagcactggcgcacgtgaattcgtggctaacggcgtggcaacctccccggcgacgatgggatggcccaagggagtcatgacgacgcggtataaaagcttagccacgcggcgcacagccgggaggcggcggtcgccggtgagctaatccgcaccagccgcaaagaagaaggggcagccatggtgagtcaccggagttatcctcagggggtggcttttacctggcggccttatcaggtcatcggcgacgcgaatccgacagaggtggcgtgaatcacggcgagggtcgtcggcggtgaagatttttctgccgcggtcgatctgatccacaaccgagtactgtaccatggcgagtgttcgtcagacagcctgatagagcatcttcagggcaatttctctctatatttctcttgacaacttcatcatccctctgcaccaaagttgtagaccaatgttccggctataatgttgccataacaacaatagccaaattcctactaaatcatgttcaaatatgtgctcaaagttcttgtagtacactgtcagtctgaa

SEQ ID NO: 148195 - DNA, 464 bp, Zea Mays
tggggtaccaccatggacatagcactaagctctgtgggcatgcatctagatagtgcatccgcaacacggtttgcagcaccgtgccggtatacgatcttataatgaagactaaaagttttgtgaatactttgtgctgccacgatgtatgcaaacgttgctcgttgagttgcgagaggctttggtgatcagtaagtatgatgaactctccagattgcaggtaaggacgccactgttgtactgctaccagcacagccatgtattccttttcataggctgagaggcccctagattttggtcccaaggctttgctaaggaaggccaatggatgacccttctgcataagcactgctccaacggccaaggaactggcatccgtttcaattgtaaactgggaagaaaaatccggcatagacagaacaggagccgttatcaaagcttgtttcaaagcttggaaggaagtagaa

SEQ ID NO: 148196 - DNA, 712 bp, Zea Mays
taatccattgaaccaaatggatacactgcttagagatagaatcgataaaatggcgtcatgattcttggaggaagagcatgagatcgaccagaattgagagatttaggtaagatcaacatccgatgcttgggaacgggttataggagataaccagataatagggcagattcataggggatcccgagattcggatgataaggccacaacacgattcacaaggaaaaagagtactagatccaggtgaaaagagagatcggcaaacaggatcagctaggatgatcaacaggaatgctatgaagttttaggggcaaagatttatggaaagaaatgtggccttgatagggtttgcgcaactaggcaccaacaacaaatatattttttttgacacaagtgcacaaggagacttgggttggtctagcggtcaagctgtgggggtctataagctgtgcaggtgtaacttcaaaggtaaaacactcaagggggctagaaaataccaacacaagtaggatttttttttaagaaggtttcacttgctaaactcaaggttgtttggagtggggggtctttttatgggcaaaacaagcaacatttttttttgcaaaaagggttaaacaattgcaataccacctagatagcaagacaagagaaacacataacacgcctaacatgatttaccaatccaacacaaggtaaggcatttcttatagttcct

SEQ ID NO: 148197 - DNA, 307 bp, Zea Mays
gttgcaaagctgacccctattggcacaattactctgtttctatctgctcccaactctgcacattgaatcgtttcccccctgattagaattgtgccaaatcctcaggcatgaacaatagcgaatccaccgcaaaaaatatgtgtatctccttcagctgccctaattcatctcttccccatttgctcccttgccctccacacgacacgtccaagtgaagtacaactccgatgagatcggtccgcccattgagcccaaatgccagagttaccgctcctagccgatcgttctaggacattgttttaagccc

SEQ ID NO: 148198 - DNA, 423 bp, Zea Mays
agggctcgccggagctaaggggtgtgtctggccagcgagggtgagcgcgaagtgaggtgaggtacatccgggggtggtcttaaaggcgtgggcaaggggtggttcttacatgcgctcggggtgtgcgcgggcgagcgccagtgcgcactctggcgtctgggcacggcgtcgagcacgaggcagcgcagagagaggtcatgttcaagcgcggattggctccaaatctttgagattatggccatgatcccgttgagagatctattcccctgacattcctttgtcgtttgtgtgtggaggcttatgggtttcgctgactggatcaagagatatggaggggtgaagttgggtttgtctcactgctgaacaccgagagaagatcccgggtttgacgtgtctagggctcgtgtcccaatgccatattca

SEQ ID NO: 148199 - DNA, 445 bp, Zea Mays
tgtaccagaatcatgcagttgcttgatttcaatcgtgtgtattggcaagtgaactcacgctgaaaatgacagaactgcatcctatactttaatattataaattcactcgaaggagaatcataaacataatcaatcttaacccacaaatcaattgttgtttccttaattaatcagagataaaagaaccaaagaagaggcagaaccaactcccctaggccacctggcaccttagtacgatactaacagcaccacacacgggaaagaaacacacgagcaaaaaactatcagaagcctaagcaactaatggcaacaacctacataggaggtgttttaatgccttgtccagcaccactggttacactcgtcatcataaacttcaagcagaaacttttgaaagcaaggactacattagaggcaattatgtatgtactgaacacaaatttat

SEQ ID NO: 148200 - DNA, 397 bp, Zea Mays
tgagcttgagagcctgagtgtgtgggactccgagtctaagtgaatgtgagagcgtgtgccttgtaacgttgtgtgccttcccttttatagctcaagggaggcacatacaaggatactgagccccgacatgtgggcccaggggcaaaatggaaggaagaaccgatgcttgtaacgcctgggcgatcttcgagcgccataatgtccgtagtccatatagtattgatatgtcgcgctgcttcctctataacgcgcgagtcatgatgagtgtagtacatgtggcagtatggatgtgccgcctgccaatggaatagacaggcacgccgcctatgggatggtctggtcgccgcctgccagcggagtggtcagggctcattaaatgctgaggcggcacatcgcc

SEQ ID NO: 148201 - DNA, 596 bp, Zea Mays
cgtcgggcgttgggcacttgggcggctggcgctcgctctgccgttttagtgccaaactgttcgctgaaggttacggcaccagggactgctgctattttagcagtgagggtagcggctggtatgaatcacgcagctgcgcagtgggcacaaagcgaactattctttcgccttttactaaagaataccgtgtgtccgctgcaataagcagcatacgccaacaagtcaatttaggttttgtttgaattaaatttgtgttacgtttaaatcaaacgttgatcagaaatattttcatatggtttgtttaaaggttaacataaaagtgttgtttgaattaaatttgagttatgtttaaatcaaacgttgatcagaaagattttcatatggtttgtttaaaggttaacattaaagtgttttggctttaatcagtttaatccaacatatttttttttgatgttactgagccaagggcttcccccatcccgtgggggataaattcctaagatccccatccatgtagtttatatgccattaatgcaaagttccccacggggataaattcctagatccttatacacattatcataggtaagagacaa

SEQ ID NO: 148202 - DNA, 426 bp, Zea Mays
ggagtgtgacctgggccttttgtctagatgcaacaagggctcgtgacagctcatttcgttctaggctttggctcgtggcgcctgctattccaaggatgccatacatggaccgctagctagatttgaggttaaagaactctggtgtttttctagcctgtagacatcatcgctgatcaaagatcttacagtttgtttcggagtgaagttgtgagtaaaaagtggcgcaatatataaaatgccctgttgattgggggtgaccaattcatgtcaatgctaatggagagttggagactaatatccaacatctcctcttacatataactttgagacaaatggaagctaaccggcaaatcgactaagtaaagtaattattatgcccttctgatccacagtggaacctactatcagctcaacatcatgtacatc

SEQ ID NO: 148203 - DNA, 565 bp, Zea Mays
gattttcgttaagaaagaaattctactaaacatccaaaaatcgaatatgagcaaacaaaaattattctagatgcaaataaaaatcaaaaattaggaagaaaatttattaccattaataatctaaatgcattattttagttgatggtttttatagtgttatatgaaagcactttggttttttgaaattaagcaatccagcttttccccgagcctgttggccaagatctttgtcatgaacttagcaaaactgtgaatcaggctaatggggcgaaaatcagcagcaccatgagcgccctccctttttggcaacaatgtgataaaggcagagttgaggaggcgaaggtttctgaagtgaaggatgaaagatcacatttggccacagtttctgaagacaactctgaaatccaacaagattccccgagcattttgtctactgtagacttactccatgcgtgagctgggatgccacaaagttccacatccaccaaaactggcaaggaaacaccagtggaatgagcaaaccgtgaccatttcttgaacttcaactcaaaatccgggcagtgaa

SEQ ID NO: 148204 - DNA, 607 bp, Zea Mays
gtaaacgcgagcttgttgcactgtcttaagtcatcaccgacttaaatcgattgctccgttagtagggtatagtggtcaccctaagtcaagtaagcgtgaacatgttgcactgtcttaagtcatcgtcgacttaagtcgattgctccgttagtagggtatagtggtcaccctaagttgagtaagcgtgttgattccaagtccaatcgaatcgaagtcaagtgatagttaacagtttgaatgcccttgaaaatgaaacctttattgacgatgtattatcccattatagagtacaatgttgctccgatagctttcgaggttttgctaagggtaaaactttctaagatgctctatgttccatgaattccctactgccgtaccatccatttgagtaagctggtatgatcctggccgagtgacctccgatacaatgaatggcccttcccatagtggtgacaactagtgtcgtccttcccttgttagaatttggcgaaggaccaagtctcccactacgaaggatcaatgtcgtatagctttatcatgatagcgcctcaaggtctgttggtatctggctgactgaattactatgttcaatcgctcttccactagc

SEQ ID NO: 148205 - DNA, 410 bp, Zea Mays
ctcagatctgcaggtggtcggctgcttctttgcgatcagacatcgaccaaaaaccaaaatcctaggcaagcagctcaaactcgattaagatggatatgtggagtacaccgacacaccattaatacggttggatcaggtttcactctactgctctttgattatttgattttgcttttcaagtgattaatgttcatacgtataggagaatcttctattccttggtgagttttagtagaaaccatgaacgttcagtaatcgactcagtttttcttagcattgtagtgagactgagagcatcagcttcaagcaggaaaatcgttaaggcaaaatagattattactgttttctactaacaccagatgcatcattgatgagccaaagcagattaatctccgtatctatgtcacaac

SEQ ID NO: 148206 - DNA, 2083 bp, Zea Mays
ggcggtgccgccgcctgcttccgttgcgactgagtattcgtattcaggtggagcgcattacctccgtgctttcccggagtcggttgggctcactgcagtctcggcgtcacctctggcgatgggcatcccggctcaaaaccccatcctggttaggacagagcagtcgacgttgccgcctcatcaggttgctgctgtttatgcagcagcaacacagcatcagccgcctcaagtgaccacttatgtgcaggagcagcagcagcagcagcctcaaggcacccattacgtaccacaacagcagcctcagtctgctgcttatgtgcagcagatgccgcagtcgtatatagagccgcagcaggtacactacatcaacgcccaacaatttggtgtgcatggggtgccacaatctgtcaactatgtgcctgtgcaaatgagccaattcatgcccaacattcctgtgacgggctctatggcgaccactgctgctcaagtgggaaagttgaagcccgcttccgcaggtgtagaacctgttccagagaccacgcagttcacaaggccagtgcaagctcaggttgatcagagttaccgggtggtgcacactccactgtcacagcttcctcctttgtcttctgtgcatctgcagacaaatgatgcgcagaggcagaaatttggtgcccaacaagcgatgacaagcgcagtaagcatgccagtggtgaccagctcaggcacaattcctgttgtggttagctcggccactgttccatcattgaggtatgatggttgcacaatgtgccaaaaagcattgccacatgcccattcggataatactatccgggagcagggaagttcttgtgcaatgggcaaccttgaggcagctccaatgttttacagcccacatcaaggcaccgcatccaacaaatctaatccaggtgcaagttcaggaacactcacgaactatgtggcagaaccaagagctgggaacacagcagtgatggcacaatttgattcgactcttcctgccagaaaacctgcagtccaggcgactgcatatgcggatacagttgtgccggttcaacccaccattattgctttcccagtgtctagtgcacctgctccaaaaggagtatttgtgggtcattctccttcggctggggctgaagatcatgtcaggtaccagcagcaaccattctcttatagcatgcaaccgccgctagttccagtgaatgtcccacaaggcattggtgccagtgcatacaaagattcaaatcatgcagcagtggaaccgcttagagaatatgcccgtgatcttcctcatgactatgctagagctattgatgctcgtatgcatgcagttcatttgggtcctattgcaccaccagaatctagtgtgcaaggaaatccttctattcctcatgttgtcattgatcatgccaaagttgggaagccacctgtaaataatgatgttacttctttctgcaaatctcaagctggagggtatcatatggggatcacaaatgcctttactgctcctgttttaacccaagaggacaacattgccaggcacagtgagcagccaccttgtgattttgatgttggtgcacaaaatgtccaacctgacataatccagcgaccaccactcaatctgcctgtccagagcaaccttagagttccgattgaaccacctgtttctaatgaaaagttcaccgttcaaccatctaactctggtgctcagcttcctgctgggcctcctctacagcatcctaaggaaatgcccaatcacttggtttgtgctctccccaatcgtagcagtaaatttcaattgcaggctactgttggaattgatcgtgttgaagctacacaagaaccagcatacactgattcacttttctcaaatcaggatccttggaaagcagtgggcaatgcttctttagtgcctccaagaccaagcaagttaactaaggaacctgttgtttctggaggtcaatatgctgatggtcatatgcctgatatgaacacacatgctgccttactctttgaagaagacccaagtttaaaggatatccacacagttaaattgaacaaaggt

SEQ ID NO: 148207 - DNA, 628 bp, Zea Mays
gagcaaaccttcttcctctgctactccggctagcgaggcttcctgcaaaaatgctcctgcacagtgattcgttcggatgagaaaatattttttattgagttagtatgggtcggaggcagtgttatcgcagatctgatctttgtagcacccagattaacattcgaaagcatagccaaagcagaagcaactaggctggaggacatcgacatactagaggaagaacggctaaatgtggtcattcaatcggctagataccagcagaccctgaggcgcttcacgacaaagcagtgcggcatcgatccttcacagtgggagatttggtcctccaccgagtgttggtgggagaaggacgacataaattatcaccaccatgcgaagggccattcatcgttgcagaggctacccggccaggatccgatcggctcacttaaatggatggcaccaaagtgggaaattcatggaatattgatcacctcaggaaattctacccatatcgatgcatcaaagctcttaggggcgagttgtactttgtaagcagaagatttcattatcaataaagcttccatggtccaaggcataaaagttcttgatcaacaactgacctatctaggtcgggctcaacttaaaa

SEQ ID NO: 148208 - DNA, 466 bp, Zea Mays
aggagatgactctttgaggttcagacgaaggtagaagatccaacactaaaaggactcatccaatggtaagtgcagacaaagagatgaactagacaccagcaatctagaaccctcgctaagaaccaaacgagaatggagggctaagagaggtctgattagtaggtatctaagcttatgtccttctcatttttgtgttgatgatggtgaatctatcatactcaaaaaggatataaagtattacatatcttgtggcccgaaaatatataaactgaccatatgctggtaaccaagttgtacctagtactatcaggtaaaaaaagggccctcgatcgataaaaggtgtttcctttggtcctcatgccgtcgccagaaacgttccttcttcctgctctcgtctctccacccttgcattgcattccccccatcagtggatccaggcggcaagcaaactctgtttgacggcgcg

SEQ ID NO: 148209 - DNA, 527 bp, Zea Mays
gcggttgggcccaagctgaccaattcggcccaaccatcccttcactccgcgcggcccaagtctacgcgcggcaaagtgctcggctccaggcgcctctgccgtgtgggtccatcatgtcaggttcgctcccatgccgcgcgcatctttcttttcgctggcacgtgggacctctgtgtcggactcatcccctccaactcaacgaacacatccgagatccacgctcgtgaatgacggacttggtgcggactcgcccagctcgggggaggttgttggggcatgtggtagcgccgcttcctcgagactataaagatgagatgcgccatcgtcttgccgtcaacctctggaatgagagagaaagaagcagagagaagaatagcgccgccgcgggctcaattcgtggtgtgctcgcgaccggtcagggtagctagcctgtgcactccctcccgatccctgcgagccgtgcgtggtctcggctggcacgattggggcgcaggggaccggcaattgctcgccgtggtgaagactcc

SEQ ID NO: 148210 - DNA, 368 bp, Zea Mays
tcttggtaggtcaaggactctcatcttgtgtagattgggttcactaactattgctcctcggctggagagtctcgcttttccaattggtgatgccaaccaatctaggggtttgataaaaatatgagaaaagggctgaattctttaatcatcttggtcactcgggaaatatggacttaaattcgcaatgcttgtgtgttcgaaggagctcctccgaatgtccaattggttctacaacctgtggctaacgagagtgctctgtggtgcatggctggagcctctgctcttaatgagatgcttcttcaactgctaagcacacatacctgatgtgagctgttttaatgtgggggtgtttttccttttagttttct

SEQ ID NO: 148211 - DNA, 491 bp, Zea Mays
cgtaatctctactactacttaagtgcctaccacattggtcagtggtgcacggttttgtcagttccgcatcccgcccgcacgccgcgctcctttccatcgatgtcgtcttccccacgcgctgcgctcgcctgccatcgccagctagcacgccccctccgcaccatgtggttctgcccttgctccccttccgccgcctctaaatcagatcgtcgtcgcgcctgccccttccatgcctcgctgtgaggaaggcacgcaatcgtcgcccgcgcttcggctagaaggaatctccgtccttgcccaaatccacgcgggtatccacaactgtctcgccgaccgctcaaagaaatcgccccaatccacgtctcgcccatggaaggaatcgccgcatcctcgctcacttgccctacccttcatctgcctctcccgtgggccacctcctcatcaccacctctcctttctccctgcgatcctcactctcttgccctcccctt

SEQ ID NO: 148212 - DNA, 418 bp, Zea Mays
cctacatcgcctaccttggccatatcatctcggccaacgacgttgccatggacaacgacaaggtgacggcagtggtctcatggccacagccgcgctcagcgcgtggtctgcacggttttctcggcctcgccagatactaccgcaaatatatcaaggatttcaggagcatcgcagcacccctcaccggactgctgaaaaaggacgcctaccagtgggggccgaacgcggacgaggccctccaagccctcaaatacgctctatccaccgcactggtactacagctgccggcgttcgacgtccccttcatcgtcgactgtgacgtgtcaaggactggcttcggcgcggtgctgcatcagggcgccgacgtcatagccttcttcagtcgcccctttgccccgcgccatctgaagctcgcggc

SEQ ID NO: 148213 - DNA, 373 bp, Zea Mays
gtgtggctccgggtatagctcacgtcgcggctctgttccgcccgcccttcttagatgggtcgtgacgctcactggcagattttactacaacagccaagttcctatttcagcttatgagacggacacttctgtcgcggatgggatacagggaggctaccacacatatccagctctggctccttggtgccctggtctctcactctgagtttgacgttgttgatttccttatttgtgagatcgaggacaccgtattggatggtatgcgtgctcgtcgtcagctgccatatgctcactacttgtgccacatttttgctcagctgattcggcctccacagttccagggcacacttgaggcctcacgccttgtttttgg

SEQ ID NO: 148214 - DNA, 435 bp, Zea Mays
atcgtgaattgatcgtttctgaatgaaggcgttctgagcagtagatacgatctcgttcattcgcggtgcaagcctgtttgccagaatttttgttatgattttcatgaagctattgataagactgataggtctaaatttgtctattgtgtcagagacctctcttttgggaagcagaatgatgtttgcctcattaactaggtgcaagctcctgcattttaggtgataaaagtcgttaattgctttggaaaggtcgtctttaaccacgtcgaagcagcatctatagaacagcccaatgaagccatccggtcctggcgccttttcagattgcaaccccataaccaccttcttgatctcattatcctctatcacattgtctaactcggatagatcaaatggcaaacagcccaaattatccaaacgaacagccctctgtct

SEQ ID NO: 148215 - DNA, 346 bp, Zea Mays
cttatttcacgcacactcgtctctccctcgccattgcgcctagttgttggtcgccgcaggcttggtcgcgctcttgctcggcttccccctagcacgccagtgtctcctcccagctcggcacgcaggccagcgtcgccattcactacaccctcttcctccagctcgagctctctcctcgttgcgactccttcgtgttgtgtgggttgctcaccacctcctcgactttatgggtggcggatctcctcctcaacttcgctgtggtgctcgaccacgccatggacatggatgccagcgtcctagccacgttctccgacggccttattatggccagtctgtgcgtctcctc

SEQ ID NO: 148216 - DNA, 461 bp, Zea Mays
taatagaagaagaccactggaatttgaggaaggtgatcatgtgtacctcaagatgtcaccacttcgtggaatgaggagatttaaagttcagggcaaattgtcccctcgctttattggaccctttagagtttttaggcaagttggagagatggcctatcaactcgagctacttgataatctattagatgtacataatgtattccatgtgtctcaacttaagaagtgcctccgtgtccctgaggaacatttaccaatggaagagcttaatgtttagggaaatttgacttacacggagtatcctatcaagattcttgacactttgactcgagttgcaagaaaaatggtgataaagatgtgcaaagtgcaatggagacatcatagagaagatgaagcaacatgggaaagagaagaagagctttgtatagattttcccatcttttccctagttctttctaaaatct

SEQ ID NO: 148217 - DNA, 762 bp, Zea Mays
aacctcagccaaatgagacaggaatgccatagcctgaacagttttgccaagacccatctcatcagcaagaatgccattcaacccctgcaattccaaaaatttaaagtaaatcaaagagtagtgctcatactaaatggtcaaaatgtatgtttctttaacattaacaatttacctgttcataacaattaaccagccattgtaagccttttaactgatattcttttaatacacccttaaacaactctggtgtttgcacagatgacttctcaggcattgttgaactaaaaataagatagtaccaaatcaatcagttctagagaactcatttataatgttgtaaatgataaagaaattttcaagcagaacttacgggtgtaatagatcaatcttactaggatccatgctagatgaatcatcagttggaagaacagactcagaagtttgacgaagcctcacagtttcactatcaaatgcattagtcctcatcttttgttgagaaacggcatgctgagctgccctcaaggcctctcttttcaattgagcttcttcaggatcttcttcctcatcttcatcagggacatcttcctcatcaggtggcgctgagccaccagccttgttctgcatgaaatgactataaagctccgtttgtgacagcagaaagtttagcctctgttgttgtcttttggcttcacgaagctcctcctcacgttttaaagcttcagcagcttctctttcctctttttttctcaactcatactgata

SEQ ID NO: 148218 - DNA, 533 bp, Zea Mays
aaactaataaaggttttagagaaacaaggaatttacaacacaataatagattcaagtatgttactaaggggtgtcatgcccaatcatcattataaagagacaacagaacttaacacagcatcactacctacctcagcgaaagtaactatatcaatcaagttgtatcataaggtgtcagcagagacgaaaaaaggagaagcatggatacaataatacaaagcaatccctatctaaatgtatttcagttctaagaaagaatttgtgttgccactacagtaacgttcaatattatagcaacataaggaactcgatcaacatgctcagtatctaaaatgcaaaaggtctgttactaaaggtctatgtacacagtcctaaccatagtaactaggttaactagtttataggattgaggatcgagaacgtggtacgatacttacagattttaacactacgggacgagattattccctcgtctctatctatgatccatggcctaacaccatcccatatggtcggcctcgtcagtagtctca

SEQ ID NO: 148219 - DNA, 634 bp, Zea Mays
cgaaggtgcagttgaactacgacgaagatacaatctaaaccagcaacacgactcgactacggacatgaactgaacaaagccaaactaaaaacaaaattgcaaaggctaaacaagggttctaggacagcgtaatttttttgtatggcaattttctggagttataggatgaaaaacatagactaaactagggtaaacctgacggtaatacccaagtctttgaataccacttgattggaacgggggtgcccgatcttccgtcaggtgaaggtaactatcgatttggtggagatgtcacacagacgatccgacttccaatcaacacgactagaaccccgcaatcgcagcatcacttctcctctggttatcaaccgtgcactgcgcgattgacctcgccacgaggactaattcctgcctgagaatcgaagacacaagcaagaacaagaaagaacacaatctagaatattgcggaagacgattcaccagcggggtcactgctgtgtcagggccgtcgggtggaagacgatgccgtcgccgtagatattgagatgaccggtagggattagaataagtgtttggcaaaagataactgtgggatcgttgatatgcggtgcagatctaatcggggatacctcct

SEQ ID NO: 148220 - DNA, 583 bp, Zea Mays
ctttgattgagaggagttaatctagtagacataggttaaataaatatctaactataaaagtatgagatatggtacaaccaatgctattactgcgtagtaaatatttgtacgaaaataaagcaactaaaacggatcaaatcggggttaaattcatcaagttatgaatttttccaagattaagacattatttttatactaaaaatgaattctgcatctaattaaattaatttaccggtggattggactgcagccgtgattaatgagaaatccggggttcaaactataaataccaggggcctatattaaactctctgctatagttctaggacggcgggttaatttgcaaaaagagcaggggttcttatgcgaatccacacagccgaaggggtatcgttcactatgagccgcccgatctgaatcctacggtcgtgattagatctcagccccccaacactcgataactactcagatccgtccatcaagagaccaatggtggtgattttaaaatacgggagatcagttcctgatcgtggataaacggatcaacggctgcgatcccctggaccgaaccggtaccccgtgc

SEQ ID NO: 148221 - DNA, 540 bp, Zea Mays
tcttccccccttctttcttcttcggcattccccaaccgctggaagttggaaatgtcttgtttgccaaatattcttgtactagatccctagtactaattttggcagcaaccaccctaaactcaactttggctacctggcatggagagccaagttgcatatggcacaagggcctggtcatcccgaagcttagtttcataggcttcatgaccatagtcatcagcttctcccttctcttctcgtctactttcacaaaaaaccattcatttgtccacccggttggccatttggtgcgatagcaaatcactggagcctttgtatcttttctataagcaaagttgtagcagccaaagttcttatgaagaccatctgccctggccttcgtctgataatgcagttcatgtacccggcaaaaagcttcggcattagcatccataccctggcttcgcagagcccatataaaaacactgagcctaacgatagcattgggtgtcaattgatgaaggtatatctcaaagttcttcaaaacctcccctatcatgt

SEQ ID NO: 148222 - DNA, 566 bp, Zea Mays
cctccttttttggcaaaaagtattggacaaaattgaactctgaatcgtgtttttgccatgctttgcaaacctgtaaattctggcatctgcatcaattctccactgcactgctaccaagaaaatctgcagatttgcttcgctagtgctacgccatattttgcttctccaatatacacatcatgcaacctctacgaatggttgctgctatgtgcaacagtaaataaatgcaaagatatgggcaagacactacaatttggatggaaatcatttattcaaaaatcatttgcatcaatgctgctttgtagatatgtaactatgatatcctcactaaatttgtgttttagcccctaataacatgcataataatttgtaggttattttgtagcccaagtcttctgtatttatttcagttttactttattatgactgcttggaataggtatgaaggtatcttttgttacaagagataaatgcaaccaatacatcatatagctgatgaaaaaagaataacttttaaacatatataaactatatgtggatagctgatcttcacatttagctaaaac

SEQ ID NO: 148223 - DNA, 1516 bp, Zea Mays
tatacatatagtatatacatggtatatatatgcacatggtatagtattttatttaaacaatttgtatcaagatttgtcgtcgtattgtatatagttttaccgaattgcataaaacattttttgtatcgcatacctagtggtcaaatcctaggtccgccactggctcctggtgtctggttcgcaggcttctaaagcgacttgaccagcgagagccgtagaaacgtgcgtcaccacagcctcctcggaccaaactgggggcgatccaacgtggacatccatagaagcagcagagagggagcccgctccaacaccctcgggggctgggtcgctaccagcgccaccctcgcgggttgggcctttcgcagcagccacctctagggttgaagatcactcagacacgtccataggagctgtaagacccggatcaacgcttttgcaaggaagaccgccttctaaggtcgacgaggcacgagataccacccgagttacctcttgcccagcagaatcatgcagcataataccaccatctgggacctctgaacagatggttggaatgtcagcctcaggaggctatgataaaatatcttcgggaacaacctcttccagtgcttgatcaaagtctgatattgaaagcccttgaaggctgacgagtgccgacaaggcttgggagggaatatcgctgcccccgtcgctgcctctgtagtgacgactgttcttgcggatcagcggaatttcttcttcttcctcttcatcctcgtcaaacacaccgccagcagcctgagcatcatcacaaccttcaacattgacctcgggaatgacgtccaccaggccgtcaccaaggaataatgcagaagggctaacgtcttgatccaggcatgacaatcgccggagtcgccttttcttcttctcctcgacaggcgcagtcgggcggttcactcggcgtgaacgcttctggcgggcaccttcgggtttctggatttccacatcctcgccaaactcttgtccagtcgcaatggccattggttcggtacaggtagagtcagacgattccccggccaacaggctaagtacgtcatccatctcagcatcatcggtgctagatggcatctcaaaatgagtttgcctctcagcctcggggagattccgaaggggagcaatcaaggcttcaatatcctcaggggagggccgcactctatggcccgggctaccatttcgagcaggaggattggagacaaattcagagaagggcctattcggaggcaggttccacgtagagtaagctaagggagcaccagcattcgagaccctacccctcagtatcatatccagtcggctcaacaagtcctcattgggaatctgtctgtttgtgacccgggtggaatcattgatgccggtatacaagtaagcagggtaaactctgtccttcaaaggttgaatattcttgaagacaaagtcggcgaccacggcctcagcagtcagacccctatccttcaataagcagatttcagcgagcaac

SEQ ID NO: 148224 - DNA, 582 bp, Zea Mays
ataggccctcgctctcgctcacatgtatcacatcacgaatgagacaatctcggacactctcacaccgtccaccgcctccactactccaccacatgttgactggagcgagctcaggccggtcgtcggcatccgttctccgcgcgggcgcgaacaaaaattcacttttttcccggtgatgctacagcacatgcgctgcttaacaacccggagctaatggcgattaacaaggtagctaatggtagagtagagtagagtagcagcatgcgctagttaattggtcgattattaattagtacatggcggcgccgactccggcaccggcggcggccccctcgccgtcggccttgttggccgtcatgtcgtcgtcgtcgtcttcgtcatcctcttcccgctcctccacctcgccttcctcctcgatgctctccgacctctccctcccgcctccgccgccgatgctgcctcctccggcgctgccccgcccttccgatccgggaggcgagcccgccatcgccgccgccttgctgtacgcggcctgctgcggcggcggcggtgccgcggccgcacggtgcaccatggcggcgg

SEQ ID NO: 148225 - DNA, 1492 bp, Zea Mays
ttcatcaagcttttggagcggcaaatggaagtgggagtgcaactaagcatgtcctagacagcacgtgggattaaattgtttcactactgcagcaaactaatgggagaaatcaatccatggccaatactagatgggatgcagagggcttggatcaagggtctcaacgcagttcaaaacttgggacaatcaaagagctccctaagccaactcatttgcatgacaaggtgggatcctctgcactacaagtggtaaaagaaaaggtgtcgttttgtttcaggtgtaaaacaaaaggtcaccagctgagtgaatgcaatattgagttgttttgtgaagttttgatgtcaagacccacttaacatcgaaatgttcgatggttcgtgcttgcagaacttttgcagttccttgtgggtatgcggttgctggcttggagttttattatatacctcagcccatcctagcaaaatcaaagcatgatggttgtaatgggacagtgactattgtggagggctctctgacagaggagcagattactagtgagctgaaaaggttggtggcttcggattgggaatggagtgtgaagtgcttgggaaacaatgtgttctcgacaagttttccttcagttggtgaacttcatcgaatgattgaatggggaacagttcacactaaatttggagctaaaatgcaagtcaaggaagagggatctagagaagaaataaaatatgtgatgccaaaggtattggtgcaattcacaagattacctagggaattaagagaatacccattaatttgggcggttggctccatgctaggcatttcaaaagaggtggatacagtatttactcggaagtttgacagggcaagactgcaggtggcagtgcttgacccaaatctaattccacaatatgttgatgttgtagttggtgattatatttatgagctgaaattcaaggttgaagtggaggtcgatggcgatcagcctatgctgatggatatggatgactttggggcatacgacgacggtgattttcaggatcaaagcaaggatgataacttgggtgaaaaagggagcaggggatcagattcgttggatccatcaaacggaacaacaggtgcggttgacaaggcttcaaccgcaaagcaaaacagcaacaagactggggctaattctgtgagagatgggggcccggctgccataccttatcttgcacagatggatttgggacagccacaggagaccgggtcagtggttggtattgccatcattgaagccttgggtggaattccagaagtgacaggaagtgtgcatgatcttcgtcgcagtaagcgtcgcaccgattcggtgagcgaagactcgcttgttcgggcggaaaagcttacggcgggatacaacctggacaaccagtcttctaaaggtaacggcgatacatttgttgatttctcagatagttttatttatgagtcctttaaaaccattggtattcttgcgggtagc

SEQ ID NO: 148226 - DNA, 510 bp, Zea Mays
gagttattaccgtggttcgggacggagaagtggttgcccacgcaccgcggcggacccgcggcggagcttgcacgacgacaagcaattcgttgaaatgtggtcgccaatcgggtctcccaagtggaccacacgcaccaacgttccacagcgaagatccacgaccgctacccgaggccaagcagaggacaaggccgcgaatccacggtggcggcagctctcagctcttccgcacgcccgcagcgacgatgggaaatacgacgcgcagggagctgggtcagaggtggcaaacttctaatggcccgaataggtggagcatgacggcatataagcactgcggctcataccggtccaagcagtgccgccgatatccccggcgccacccgcgcgagacccgcgccattcagttaggacggaggcgaatctggcgtagagggcccacgagtcggcgagtgtaacagagatacgcgcaagcgcgtgggaggctgacgggcagggcccacttgtcggcac

SEQ ID NO: 148227 - DNA, 1570 bp, Zea Mays
ctgggggatcaacaactgcagtctgacctacaaaggaaggcaatggctagattgatgggtctgcagttccaaattgtatacaaaaagggcaaagaaaatttggtggctgatgctctctccagggtgggaactgtgatggcattagctgctgtttcggaagtgcaaccaatctgggtgcaagaggtgatcaactcatatgtcacagatgcagaagcccaagagctcatcacacaactgttgattaagagtccgaatgaggaagggttcagtttgcagcaaggcattatcaggagggaggggaagatctggattgggtctaattctgccctgagaactaagttgattgctgctcttcatgacagtgctgcagggggtcactcagggatgcatgcaacataccaaagggtcaaaggagtgttctggtggaaaggaatgaagacagatgtcattctgtttgtgcagcagtgtgcaacttgccagcaggccaaggctgagagaactcatccagcaggacttctccaacctttacctattccaaaaggggcatgggaggatgtcactatggatttcattgaaggtctgccgaggtctgaagggtttgacacaatcatggtgattgttgatcgctttacaaagtatgggcacttccttccactaaagcatccttttactgcttcaggggtggctcacatttttctggagcaagtagtgaagttgcatgggttgcctaaatccatagttttagacagggataaggttttcactagctctttttggaagcacctgttccagctcatggatgttaagttacttatgtccactgcttaccacccacaaacggatggacagagtgaacgtgtgaaccaatgtcttgagatgtatctcaggtgtgcagtcaattcccaaccctcaaagtggaaatcttggttggccttagcagagctctggtataacaccacttttcatacagctcttggttgtactccattcaaagctctttatgggtatgaggctcctgtgttagcagttcggtatacaagtgtggtggaggaccggtctgtgcaagactggttggctgataggactgaattctctagtctgctcaaggaacaattggccagagcacagaatagaatgaaacagctggctgacaaaggaaggattcacagggagtttcagataggtgaaaaagtgttgttgaagcttcaaccttatgctcagcagactgtggtgaatcgaccatgtcccaaactagctttcaagttttttggaccatacacagttgtcgctcgcgttgggccagttgcttataaactggggttacctgcagatgcccaagttcacccggtgttccacgtttctcagctcaagccttttcatcccaattatacaccggtattcacacatctgcccaggttggctgatctctctaaaacaggggtagttcctattgcagtcctggatcgtcgtttggtgcgcaaaggcagtcaggctgttccacaagttttgattcaatggtcagacattccaaaggaagctgctacctgggaagactattatgtggtaaaga

SEQ ID NO: 148228 - DNA, 324 bp, Zea Mays
gaccaatagaggtcgtggccacgatagagtttcttgtcaagagcgcaagccatattgtgtattttcatggcgaggacgtcgggcacactaccaaggactataccttcactaaaaatacaaagaaagaatgacaataacgaactaggaataagcatcgaagactatcgtctaaaccttgtaccaacatacatatcaacctcattaccaaaatctccaaccatactacccacaattcaccctagctcattaacagccacaactactacaccaagaaagactacaactcccaccccctacactccaactatcacccctccacctcag

SEQ ID NO: 148229 - DNA, 2663 bp, Zea Mays
cggccacgttgaccctgcctgcgccccgcgcggccacgtcagtttggacagctgacaagctgcaaataggggcttggaccatcctgaaagatgccccttgtgtgatcgtgatcaggctcaagaaactttaaatcatttattgaatgggtgtgtctttgctagggaattatggtttaaattgctatctcaagtgaatatccaaaacatggcccctcagccaggcgatgtagctttcatggactggtggcatgagatctgtaaccaggtccatggtgtggcgcaggaaggcttgaaatcattaatcatacttggggtgtgaccttgtcaaagcaccacaatgggtgtatttttgacaaaaaaggcctagtatggaagctgcccttgaatctgcagaacaggaagagaattgtgggtgttagctggagcaaggaagttatccctgttaactagccctatccctggtttgcaagatttctagctagtggctggtttgtttggttctgttttggtcgttctttctttttttatttgtagttagtcatggacgggttcatgtacgcttgttggtggccgccgtaaggaggcctctattgtggtactggtccgctaggacctctctatttttcttcttagtataattacatgcagttctcctgcgtttacgagaaaaaaaaacagttggtagatggtatgactgcttctactacgaaggttgtaggagtggattatctctgtacggggtctagaggaatgaggtcgtgcggacgccgtgctgacgcctagcgaaggttcacgcacagcaaggaacagaggaacacagttgaggcaagtcacaatccctttctttagtttgatcttgcttaagatttccgggttacagactcaggacttatatctcgtccattgacacgcctttttttgaacaaactctaactgtaatccctatctttattctaacaaactctatcttattcatatgaactaatctatttcttctggatctccaatatcgggctacttagtgggccggcctagaggctgcttagcccttcgcttataagttatgcctgtcataacagtagatgaaaatggaaacctttcaattaccttggcctgaaagcaatagcccttgtcctgccaaaaagttctgttgaaacaggtatagatgccactgcaactaagaaggcaccagaagtagatgactgaggaatagtaacatttgttgaaccactggcagggacaaggaggaagggatttgaccaatttcgccgagttgtttcagttccattattaggcggagaagcattcaacttaactgaaagttcagttgctggagtgtgcccatcaggagcaaacatataagctttaacactgttgtccaaatctttctttacagactcactgttacgtgtacaacttatatctgaagaagagcagtgtccatccatcaaatatatctggggcattttgcctgtaaagcatctgcatgagaaatacaaacacaaaagtgttagaacatatatagaaacagaaaagaaggtgaatttctgaaggacagaaagacacttactgtacagaaggattgacaagagaaagaccacccttttcaagcatatgtcttgcatatccatccaattcaaaactagggggaatcacaagagtaggcccactcctctcagagctgctttcagtgacagtaagcaatagatctgtgcaattgtacaacaagaatggaacagaaagatacaactctcttgcgccagaacgagcatccattgatttttccagcataacattaagaggaactgcagaacaaaatagcatcagaactttattacagtgggcttaagtttatttaaaaaataaaaaaaaatcccaaagtacatacaattagacaaatttgagtagaaagtaattgactcagttatggagaatttgaagccatttaacttggctgtagttgagaatgattcagcccggggaaactttatgttcaaggacctataatcttgaatatcaattgtaattccaagatcattggagggatcaacaaacaaaatagaggcagaccctacctgtgaatatgattcagtcaaaaatttaaaatgaaaaaacaaaccagctgaggtaagatatatgcatggcaccataagcttacctcctttagcgaaattacccgcgcagacccaccattatctattgccaaggaaatgtaaacaggcagatagttctttatgagaagcggggtattaagcttgacatgccgtataaaatgtgtccttgtcaaattttgcttaaaagtatttggagtagaacttccagaaacttgtgtgttcaatctttcactgcacaactgttttttcttggtactaacagatgaagggacattgtattcttcaacagatacacaacaacgaaatgggtcattactagggtgagaaggataacaaacagatgatttcatgaacccaaccctgttttcacgtgaaagcaaacttgacaaggagcgggtttcactccacaagtatgttctgccgacagggtgccacctaatctggccagcttcagacaaatgaaccggcagtggaatctctttgtttggaggaatgggcccaattacctgcagagtgaagtttcttgagaaatcccatatctggttcttt

SEQ ID NO: 148230 - DNA, 363 bp, Zea Mays
tcgtcgtcgaccttgttccataggccggtccgagtcactggtggcgcatgggcggactgcgtggtgtaatttcgtccccaaggttcgccgcacagccatcaccgacctccgcgggagcagcggaccgccctcaccgtgtaacctcacccttgcggtcaccttcaccttgggtaagtcacccaagtcatcttccacacctacgggatggattacaactcaccagattagaaattgcggggccgggtcgtgaactaattcctcgtcagagttcgatttcgctgaccaatccttctcaccataccggagtcgtgctcgtccttatcggcgggattgagccctccctacagtacgctattgtccctg

SEQ ID NO: 148231 - DNA, 884 bp, Zea Mays
gaaaagtaggtatatgaaattatattttatggttgtagaagtgatataagggagaaatttagggggaaccgctgcggatagcctaatccccttcaccgaaaatttctcggctcctcaaaatctcccctctctttccctcaaataaaagggatcaggcagcaatttttctcaatcctcttcttactcctctcactgatatctgggccccacgctgacactgcatctccgcaaagaccaggcaagctggcgtgcgggctgtcacgccgtgcagagtcctgcgccacccagccttgggcaagttgccaccacatgccccatgccgcactgctccctgcaccgggtaagctgtatccgcaggccgcagcaagaggagaagagggaatctggagaagagatatacacgtgtgtacaccacgtataaaatggatgagtgtttctcaatctgctagagcacatatcccctatacattttaattcagttttctcaatccgctatatacatgattttaagggaaagagggaaacaaaacactgtgcatgtatgcactttcaactgaatttttggcttgctgtatggtatatgactagctcactgtaaggagacagcagcagtcctgaatatattgctgggtcacttgattttgtacagtcagtagatgagaattggcaagtaagagagtgcggccttgctgaccttttctattcggtactgtcagaactcagaagtcctttttgaatattaatatggatgtaaaaacacaatgtttcagaaaaaaaatggagtataaagacctactcaacctttatggcttattatctgcattatctattgaaattgacaactcttttctctgttttgtagtaactatataggttttcctaac

SEQ ID NO: 148232 - DNA, 581 bp, Zea Mays
tgcgtaacggataggcgagactgagaggaagctcagtttcaagggagtcaccacaacggtggtcaattggaccgctgaatcacgacggtggcgatagcccgaggagttccatgttagcctgaacggtgtccacaggccaataacgtggcagacttatcgtggaccctttacgatggtgcaacatgagagcctccaaccagctgcgtggacgacctggagcgtccggtggtttgctacggcgacggtgaatgaaacacggtgaggacacgtggtgtccatggctagagcggaaactcgatcaccgaatctgagccagagatccttttaccccttcattgatccacgtctcagcggcaccaatcgtggcgcaagctcgaattacggcggagggaccaatcgtggcgcgcacatggaactcaatcttgttcagttcactttatcatggcgatgttcattcagcgcacctgacagggcgatttgaggagttcctttctcaaatttttatgtgacaacttgtttatccgactacatcaaagttgttgtccgtcatgccagcttcaattttgttataaggttcttgc

SEQ ID NO: 148233 - DNA, 943 bp, Zea Mays
gaccgaccgtggcgattcgcgttctcttcctcgacgaactcctgcggaggcaatttgggtttcgtttcgggagaaagggtgggggtcgggcggctggcctggggcaggttagtagtatgggtggtggccgattgcgttggccgttggggactagttttctcgtaggtgggctttgctgcttcgaccggatccgtcattggagtcttctgcactccgaattccccaaatcaggattagctgatgcttgcatatttgttctgttcaatttgctgcgcgtcccgtgtggtgccagtattttgcattcctttgtgttgcggaaagctttctttcccatctgtaagttcatcgtggagtcgtgcttgctggtttcggcttgcaaggatgatggagaataatacttcctgtatttagatatctctctctcttagcatgtgttctgatagaacagatcaattgcatgctggacattatgtttgaaatatgctgtatggcatattggctacctaacgatcacaaaggaaccttgaattttatcgtctatgtggaagagcatatgcacatggtaacatggccatggatacaaatcattcacatgacatcgatgaaaactacaaaattacataatcagcgtacactttttttgttgcagtatgctgtaatctgttgtgctaactcagtctttgttatactcatttagcgtatgagataattgttccaaatcaggaatcggtattttgtcaccattggatgtgctaagaatatcttaccatatgatgccctgaggaaccatggctttggacaactgcgctagtatcctctatgttgttttttgggcaaacccatcattttgcaaatttctcagtttttacaatttgtattaaggtaagtgtaatgaacactacatttacggccatatattgtttggtctgttaaatcatgttag

SEQ ID NO: 148234 - DNA, 540 bp, Zea Mays
gaccggagacagtgacgaatcaggaagggaaacacgcacccgcaccgcacggagcaccaaccgaccagctgtcaagctacaactcgatccgaggaggcgaggagcaggggcactagtgaggcagtgagccagtgaccatacaaggcgcggagccgcggaccgccggactggagacagtgaagaatcaggaagggaaacacgcacccgcaccgcacggagcaccaaccgaccagctgtcaagctacaactcgatccgaggaggcgaggagcaggggcactagtgaggcagtgagccagtgaccatacaaggcgcggagccgcggaccaccggaccggagacagtgaagaatcaggaagggaaacacgcacctgcaccgcacggagcaccaaccgaccagctgtcaagctacaactcgatccgaggaggcgaggagcaccagccgaccagcgaggagcaccaacgatgaacgagcatcaccaatcaccagatccgaatgggattagggtgagggttaggaatagggagacagagggagggag

SEQ ID NO: 148235 - DNA, 364 bp, Zea Mays
gcggaaatcgcaacaccgatgagcaatcacgcggttacagtgacgtcaatgacgaaattgatgacggtgaaagcttctagagtacacggcgcagcggccggatgctccacggtggcccaagtgtccgcggttctcgagttcaacggcggcggcgagtttttcccgtgcggtgcacaacgacgtaatgatggtggcgaggagttggggataaagaggggagaggggaaaggagcgcacgtgttctacttgtacccagtccacgcgggagaccgggtcgattcacgcccgtgaattctgcggtggaggaatcgcgccgccgcattccacggcaggcgggcggagctgatggacgtgcggaattgag

SEQ ID NO: 148236 - DNA, 325 bp, Zea Mays
ctacctcctagattcaatcacgtgaaaggttatcgtggcatctaatctgagtcgaccagcgcaagatcaacggcccaggcgtgtccacccatacccgaccctaggcagaggcggcacgccagctccagcacggcggcgccattgccgcacagatcgcccccacgctattctaccctatacatcgattcggtgggacaaaacatagagaaggagacgaacgcattaagcgcttacttggggtaatccgcgacggggttgtgtcctaccacggtgcttggcggtccggtgtggttgaaggaaattcgacgggcaattgtcggagttg

SEQ ID NO: 148237 - DNA, 373 bp, Zea Mays
gaatttttgcacttcaaggtggaaaattttgacgcgacacatcatgcaatcatcgaaagacctaggctcaccaagttcatggcaatcccctattacgcatacctagtccttaaaataccatattctaatgggatgatcatggtcaatgccaacctaaagtaatcatacatctgtgatatagaaaggtgaagcctagttttgttgcaggtcatgcatgtaggtagagtttgatagcctaaaggagtctctccggctgagtcatccagaggtaggacgagaggaggatcttgaacctccactgaagaaggcatcattgcaggccgagtccaagcttactaagcaattctagttagatcccaatgactcttccaag

SEQ ID NO: 148238 - DNA, 395 bp, Zea Mays
ggcgcgcctcctagcaattgcaagtcggggaggcaggccgccttcaaacggtagatctagccgatgtcgtcgtcgatgggacacgagagtagcggtggcggcgccgacgaggaggaccccgccggcctccagcgggtcatttggttgcggcagatgctccaccgctggcagtcctccagctccaggattgccgccgagaggaggtccagcgccagcgacgacggcgacagagccaacccagacgacgccaacgccacgacagaccaaagcagcaacggcgaccccacgcctgccgctgcagacaatgccagcagcagcagcagcagcaggaaccagatgctgccggcggcgccgcatggtgcggcggacgaggaggacgaggacgaggaccggcg

SEQ ID NO: 148239 - DNA, 737 bp, Zea Mays
ggaggagtcttcagatgaggacttggattattttgtaacgttggatgtggctgcagcagggccttcgccgctcgcggagggttccaaggagctcctgggcgcgagtactgggtataggcggcgaagggaggtggcgaaacagagagtgagtgaattgtcgcgaagtggtaggcgttatcgtagtgagatggagagtggtcgtcttcgcgtggacgggactggtaagcgagaattgttgtcctcgccgattggagtgagtgtaggtgagggggagctgcgaaatctttttgagggcgaataattgaggataatgctgttcaactacagggagatgggtatcatccgaaggttgagccaatgtaatatatgatgccctcgttgtgtgtatgtaaccgctatttgtatgataaggctgcgcgccttcgttgatccggtcgcgctcgtgggcgacttctgcacggagagtcttttggaaagtacttcgattttgcgggcctattattccggctgcacccttaggcgacttttgcacggagagtcttttggaaaagacttcgattttgcgcgcctattattccggctgcacccttagacgacttttgcacggagagtattttgggaaagactttgattttgcgcacttgttgtgctagtctggctgcacccttaggcgacttttgcacggagagtcttttgggaaagacttcgatattgcgcacttgttgtgctattctggc

SEQ ID NO: 148240 - DNA, 436 bp, Zea Mays
ggtgagggggatctacggaatctttttgagggtgaggaattgaaaataatgttgttcaattatagggaggcaggcatcatcccgaaggttgagccgatgtagtatgtggtgccctcgcgttgtccggcggtaatggagggcgtagttgtctttatttgtgcggtgggtctagtgaccattcgctgagtgtatgtaactgcaacttgtattataatgtggcctgatggccttctttgagtgagatacttcgtatcacacacttgttgtgctaattcggctgcacccttaggcgacttttgcacgaggtgtccttttagtaaaaaacttcgtatcgcgcacttgttgtgctaatccggctgcacccttaggcgacttttgcacggagtgtccttttagtaaaagacttcaattgacgcacttgttgtgcttatacggc

SEQ ID NO: 148241 - DNA, 722 bp, Zea Mays
ctgcgcctgctccttatttggttaattggtctcaataggcaaggatctccctgataggattgtgtaggattgtttccttttctgtagacatccttgcctatatgtacttgagcctttgatcccattaatcattatcatattttctgccaattcattgtctctcgatatttatatcaccttcaaacatagctatcatctgagccatttatatcatacaaatagactagtggtcatccttactgttggctggagcaaactattctctattgtcaagggagacaatgctttttgatacaaacatacatacataaatacacttacaaaagaccccgaatgacttaaattcgttaagtcatttcagggtgggtgatcataacctagggtgatattgccatgcattgaccttttatataggtgaatgtaggatgatggtgtaaagttgagacgagagcaattactccaaaatccaaattacagtttgccttcaaccttgttgtgtagagatagttgtgtaatgaagatcagtagtacatctactcagtccagaaaagttcacgtaaatttagcctgttagtctaaagtcagtaggaatttttattttaaaatgagaagttaaacaattacaagagacacagcacagcctttgggctgaccctagatctgcccctgatgaagtttgcaagcttacagcttgggtaaatccacaaatttcatgtaggatg

SEQ ID NO: 148242 - DNA, 461 bp, Zea Mays
ttcgtcagtatgtcagccagctgcagttttgtgtccactgattccacttctatccgaccttcgtcgatgcactcccttatgtagtgatacttgacgtcgatgtgcttgctgcgatcgtggtagactggatttttgctcaattgaatcgcggactggttatcgttcttcagggtaacattgccaggctcttctcccttcatttctgtcaggagccgtgctagccaaactccctagcacgaggctgtcgtagctgcgacgtattcagcttcacagctggacaacgccacaaccttctgcttctgagactaccaggtcaccacactattgccaaagaagaacatgatgccggtggtgctcttccgtctgtcgacatctgctccatgatcgctgttgctgtagcccagaagcaaagctcccccttctttcctctaataatggcatccatgttccttcgttcctac

SEQ ID NO: 148243 - DNA, 632 bp, Zea Mays
aggcgttggaagccgagaaggtctgcagcatggcgcaccccgcgatggcgtcggggatactccatggattgagagggaggttgtccatgctgagtttgagcagcgaggggagaccctcgaggaagtccggcggcagggcggagaaggcgttgccgtcgagaacgagggtctcgagggaacccattcgggccagtgagggcacgtcgccctccagcacattaccttggagctgcagcgactggagggaggtgaggttggcgagggacgaggaaagggtgccggataaatgcagcttgacgaggttgatgccggtgacgcggccggcgccgtcgcaggtgatgccgctgaaggagacgccgccgcagacgtcggtgccggtccaggacggcggcgggttagtcagcgacttggcgaggtccaagatgatgcccgcgtccgcggtcatggccgtcgccgcggcggcggggccggcgacggcgaggaggagcaggagggggaggaggagaatcctcgccctcctcatggcggattcgccgtacagggggcgcaaatgcgacggattgttggctgaggattttgatttcttgcctaggccgggaagatctatttttggcatctccggccgtggttat

SEQ ID NO: 148244 - DNA, 333 bp, Zea Mays
ctgctattgggttaacctagggtgcatgcagacaaccagttgcactgtgagatctaatcattcgtgtttatggtgccgattttagttcctcattgtcgcttggtttatctgggaggttttctccatgagagaaagaacaaaaacaaaaggaacctaaaagaatttctgttattacatccaccgtatgggttgtaatatactatgtctgtttcattggttcattggtttttttaggtttatggcacgatgattcatctcagagtttctgattcttatgttttgtcacaagggcaagacggcaagtcattttgctgctaaagtgttaatatgcaa

SEQ ID NO: 148245 - DNA, 280 bp, Zea Mays
tgcggatcatattgttggtggtgcggagcatgcgttcggctttaccgttctgcggcgatgtataggggcaagacatacgaagcttcacaccattggtgagaaagaaggtccgggtagaggagttgtcaaactcccgaccattatcacattggacttgcttgatcgtgcgcccaaactgagtatggacataagagaaaaaatgagaaatggttgaagaggtgtcagatttgaggcgcagaggaaatgcccaagaataatgtgaaaaattgtcaaggataac

SEQ ID NO: 148246 - DNA, 390 bp, Zea Mays
tgcagcaatttggcctgcgtggccagagtcttcgcctgcgcctccaacgcaccagcgagaccggactccgtagaaccggccattgtgttcgtcagacgaggaagcgaagccaggagttctggaatctgataccaattgttagcgtcctacctctagctaaccaagagacaacaggaatacaagaggaaggaggaggaagacgaggtagtcgggtggggaaatttccattagcatcatcgtaagttcttcctttggctgttctccagttataagccaattacaaggactcaattggtccacacatcagatggaaagcgcccactgggcctgcggactcgacggccacggcccatcagcgaatcgttgtcttgaaccacttcttccttctca

SEQ ID NO: 148247 - DNA, 349 bp, Zea Mays
gtcatttgttggtacccatagaaggttttttttcacgtgaacatgctaattattgcagaacttacaatttcctcctctcatcgatcttcctctctgatatatattagcaggcgtagccaagggacatagatatatacatccatttattacgccattacatcaactgtagcacgtcgtctttttaccactccattaagcattattattactggtcacgcgatttggttcagcttctgggacgacaaggtttctatcgcatcgcctagcggccatgctgcgtcgacgtagtattctccgtacttcacctttgtcaccagcgtgaactccttggtcggctccaaacctgttt

SEQ ID NO: 148248 - DNA, 584 bp, Zea Mays
gtatgaccgagctatgaagacaaacttcaaaatgcatgtttggtaccagtactccatgcatgacttaccggcgtatgggctattctacacctggtgtgttcatggtaagttcccatgcccagtttgaaaggaagctcttaggttcatttggttgaaaaagggtggcaaatattcgtcgttcgataaacatcgacaatttctccctcctgaccatccattctgcctagacatcaagaactttacgaaaggtgtcatagtgacagaccgcccacctgcaatgatgactggtgccgaaattcgtcaacagacagatgggctcatggccaatacagaaggtggttttgtgggatatggtgagcaacatatgtggacacataagtcgggcttgactcggctcccctattatgacgacatgctccttcaacacaatattttcgtgatgcacactgaaaataatgttgtcgaggcactttgggcaacaattatggacattcctgataagtcaaaggataacgtaaaggcaagagtggatctggcagcgttatgtgatagaccaaaccaagagatgaagccacctagtggtg

SEQ ID NO: 148249 - DNA, 680 bp, Zea Mays
ctttcagagagcatcatgtgcccctagggatcgtccagctcaaagaagaagaatttcgggagttaactcaaggagggagatctgtcggtgaatacgttcacaaattcacagaattagctcgctatgcgcctgatgatgtcagcatagaagccaagaagatggcccgtttcttgaaagggctgagaccagaactcaaaaccatcctcgccagccaagatttcctcagtttctcgcacctctcaaacaaggccatacaggtggaaagggctagagaataagaaaagggtcacctcaagaggaagtttcaagttctccaagctcagcagcaggacaagcaccagagagtccgatcttttgggtttcctcccaaaggaccgagcttcaacaagccagaagggtctgctccgtcacgtttcagccagccgagtcaaagttccctccatgccccatctgttgcaagcaaccaacctctagccaatgcttgttggcactgcggagaccccagtcactacaagaataattgtcctcagttgaagacatccgtgcctacctactccaactcggtgaatggccccaagaatgctccagcaactgcctccaaggcaccctcctccaacagccagctaagcaagacccagtttcatggcagggcatgagtgaatcacgtcgacgctcaagaa

SEQ ID NO: 148250 - DNA, 353 bp, Zea Mays
ctacatttggacgtttccgctccgcctcaaatccgagacttcttccacacttgcaatttttttcacttatattcgcacccaatttggcatcaccatcaagagcgtccagtgcgataatggtcgtgaatttgataattctcaggcccgcacattctttctctcccacggcattgccttacgcatgtcatgcccctacacttctcagcaaaatgggaaagcagaacgttcacttcgcaccataaatgacattttgcgttcccttttgtttcaggcaagtctcccttccgcttattgggttgaagcccttcacactgctacatatcttgtgaataggctccccactaaaacccttg

SEQ ID NO: 148251 - DNA, 370 bp, Zea Mays
acggagtcaacaccaaaggagcacttggacctcttgacaaagagtcagtgctggcgcagggtgttgaggacgacgtgaaggtgccggaggtggtccgcccatgaggtgttgtatatcaagatgtcgtcaaagaagacaagcacaaaccggcggaggtaggttcataggacgtcattcatcaaagcctggaatgtggctggggcgttgcacagcctgaacgacatcaccaggaactcgtagaggtcgtcgtgggtgcggaacaccgttttatggacgtcctcctgccgcatccgcacttggtgataccctgaccgcaggtccagcttggtgaagaggcgtgcgccatggagctcgtcgacgaccggaatca

SEQ ID NO: 148252 - DNA, 272 bp, Zea Mays
ctgggcttccgttagtgggggaagccccagccaggacgccaaccagatcgcggtcggcccactgtacgcaagcatgcgtcagccatgcatatgatagccacgattcccggatgagacgtgacaggtgatatacgcacacataaatatatgtagaaatgtgcataaatcatgcatagaaggaatcttttggaccacgaatcacgggaacgaatattaccatgtgtacaccgtttacgactgcaataacgctgtgtaacataatagcgtaaacc

SEQ ID NO: 148253 - DNA, 350 bp, Zea Mays
cacgacagacggacagtgcctgcagggcatacgaaaaatgtgtgactcgacgatggcggtccgactcaacaggagcggtccaattaagcgagactgcgacatagcaatcacatgacgcagtcaatgcttagccaatgccataactcagtcaattaacaacgcagtctgttcggcatgtctgagtacccattatacaatttaatcgttcaacgtgagtccgaaagctcaaagcgacacaaatacttagagcaatttgatttatgcgtagtataaccttcacatgtatttcaaataattttctgctatttactacaggaaataaagcagaaaaataaataccaatattaatg

SEQ ID NO: 148254 - DNA, 448 bp, Zea Mays
ggctggcgctactagcaccattgatgatcaagacttgcaataggggttacaagcgggcgagagagggaggagaagctcccaagtctctttatcggggtggaagtggagcttaaaatctatagagtggagtcctatctaagtcttggctaggcggcggggctccggcctcctggtcctcgtcggcgctcctcttcctgttcatcggttcgtttggggctcgtgcttgtgggtgcgtgtccaagtgaactcaactctgtccactgtcgtctctatgtttcgtttgtccgcccctgcccgaggtcaagccctcccttttttagaccaggagaggggtcggccaacagtggcttccttatgaaggagccgtgaggcaagggtaaaaccaatgttcttacctgtggtaaaaccatgcgtactcgtggaccccggggccgcctgataaaccgac

SEQ ID NO: 148255 - DNA, 500 bp, Zea Mays
cagcagcattgtgatcaagaaactagtgtgtagtgagtcttttctgtatttttgtgatatagtaaaaatgagaaggaatttagaggtcttatttcatcttggcctctatgaagcaaccatgggttgaagctatcccaaacagaccttataatttgagtgtactccatccttgctaattttgctgcttctactttcttgtttatcttatatcaaactacatgttttcaatcttgtgaatacttttgatggcgccactgcaatattttaataggttcatatctttgatgatgctttcagttagtttaggatcctcttgtatgcctgcatctatgcttcttattgattttgcaattctatgcatccttgtagagcattttgagtttcatctctttgggacagctctaggtctttacgtgcattgttagctgctagatgttttatgttttctaatttgctatgattctggtgtccgcaaggtcgtggacttcgtagcctataat

SEQ ID NO: 148256 - DNA, 1120 bp, Zea Mays
ccatcctatttccgccgatgccgccttcctcgaaccttcgtcgcccgctgcacctccccgccgcgccccctacaaagccagccagcagctaaaaacctcctcattctcatccacttcctcccgcgcaaccgctcttccccaacttcgccgccgccatgggctcctcctacgacccctacccgtccccggccgccgacgacctcttcctctacctctccgacctcggccccgcctcgccctccgcgtacctcgacctcccgcccaccccgcagcctcagccgtacccgcagtcccagcagcagcagcaggggagcaaaggccccacgcaggacatgttgctcccctacatctccagcatgctcatggaggacgacatcgacgacaccttcttctacgactacccggacaaccccgcgctcctccaggcgcagcagtccttccttgacatcctctccgacgacgcctcgtccccgaccaccaccactggcaccaccaacagcagcgccagcgtcaaccactcctcctccgacgcgtccgccagcgcgccgctcaccccagccgcggtcgactcctactccccggcccccgccgtccagttcgacggcttcgacctcgaccccgcggccttcttcagcaacggggccaactccgacctcatgagctccgccttcctcaagggcatggaggaggccaacaagttcctgccctcagaggacaagctcgtcatcgacctcgatccgccagacgaccccaagcggtttgtcctccccacccgcgccgcagaaaacctcgcgcccggattcaacgccgccgccgccaccaccgcccctgccgccgtggctatggcggtgaaggaggaggaggtgatcctcgctgcgcctgatgccgcgcttggcagcggcggcgtcgtcctgggccgcggtcggaggaaccgcttggacgatgacgaggaggacctggagctgcagcgccggagcagcaagcagagcgcgctgcagggggacggcgacgagcgggacgtcttcgagaagtacatcatgacctgccccgagacgtgcacggagcagatgcagcagctgcggatcgccatgcaggaggaggccgccaaggaggcggcggt

SEQ ID NO: 148257 - DNA, 580 bp, Zea Mays
accgcctgcgggtaaagttgctcaccgtcatcgtgccatcgccgttggccaccgcgtgtcctaaccgtgccatcgcatcgccgtgactccctctaaactccccgtcgaccaccggagttactgccacggtggtgaacacgtgttcactgcaccagcattcttcctcacttccgaccgacgtgtgtctcgtccaaaattcgcggccatcgctcgctccacctataaattgagccctcccctagctgcgtaacatcctcacccacccagccaccaacaatcgttagcaaccgtgcctccgagagcttgaattttggtttctccccaatccgggtttccgccaccgcaaaactcacatcaccgcggtcagccccaatccggttagttcatctctctctctcccttgtttgagcactctggttgctctgtgatgcttgccgagccatcaattgaaactaagagaccaccaatcgccgggaacacgacgatctagccgccatgctctctgtcaccgtggccagagctccttagttggtcattagtgcaattaagttaggggaaatactctttaggtcacggattt

SEQ ID NO: 148258 - DNA, 592 bp, Zea Mays
catggttgctggtgtcgaggggtaggtgtacagcaacaccagggacgacgaggccttggtgacaggcatcggtagatcgatgacggtgatacagcactacgacgatggtggtcggcggcgcacggcaacaaggagacacgacgagcgctgggaaggcaatgcttggcgagcaccagcaacagcacaagggcacagcgaggggctaaacatgggcattcggagatggcggttggcgaccaggcagtgcggcagggagagaattgagcagggagagggctccgtgtgggttttatagagaggaaagggagggatttaagtctagattaacgctcctttgatggctggttaagcgctacattaatcattcggaaaacggcagtcgtttatgctccatcaatggccgtaacaaataaagaaagagggtgatgcttggggtgggagaaacgcctgcagttatgtcaatcaaggagagcggaacggttggacgcgaggacgcagaagccgagcggcgcacacagtctagagcttgatgatactactgacgagcgggacctatctgcaagagacagagagaggggcgaggggataccgc

SEQ ID NO: 148259 - DNA, 372 bp, Zea Mays
cgcaggaaccggggttccggaccttctggctcggagtgatacggcgactggacacatgcatgaagtgggatctcgatacgaaaggcggttctgggcagatgcaggagcttgtgccgcggatgctcaagcggatgatcatggagatgaagtcgaagggggtgctggtgccgcgggaaggcgatgagctctgggagattacccacatccagattcagtggatcgcaccggccgtcatggacgagctattcccgtagtccatagatagacagctgactgacttggttagaagtttgggagttattgattgtgtcatttaaacttggcgctacacattatcacatggaataaaatgttgcggatcaggatgagaaa

SEQ ID NO: 148260 - DNA, 633 bp, Zea Mays
cgcggacatcgccgagagccacccgatcccgaacaaagtgcaaatcaatctcaatgtgcttggtgcgctgatgctggaccgggtttgaagacatatagactgcactgatgttgtcacaatagaccaacgtggcacgacgtaacgggtgacgaagctcggccagaagctgtgtgcagcagggaggcacagggggtataggggcccggagctattgcacctgacgatcacgttccgagatagtagatccttcacagagcaaccagagggatcaaattcaatggaacagtgattatcggtagtaaactggcgaacggaaatgaggttcttaataagtttaggtgacacaagaacattgttgagatgtaaagaattatgtaaagtagtggagccagtggaaatgacaggaagaagggagccgtcaccgacaataatggaagaaggtgcagtaagggagggagttgaagtgttggatagagtaccggcgttggaggtcatgtgggaggtagcacctgtgtcgaagtaccagtcagtctgctggggcggagtcagggacacagtgctgaaagcggatgcaagggactgagcgtcccaagatggagtagttggcggagccagcatgccgtgggtagcgcc

SEQ ID NO: 148261 - DNA, 313 bp, Zea Mays
ggaccaatttcattcctccaggccacaagaatcccaccactatttccaactgagggaagacacaacttgtgcacaaaattactcccaagagcagacagggaggcatgcatagaaatttcagccatcttggtttcttggatacacaccacattagcattaaaggagtttaccaaattacgaacagagtcttgccgagctctagagtttaggcctcgtacgttccaacacacaatatttgaaggattcatgataacaaatataagaagatcccgaccaacaggatagaggcatgaacagccgctcaacacaccgc

SEQ ID NO: 148262 - DNA, 474 bp, Zea Mays
gccttctccttatctgtggaaatccatggagtcgctaacagcgggcccctctgctcagcctcacacttccatcacgcgcgcgggccccggtcacagcctctcctcccttccgcgcgctcgtctcactggcgggtgggccattgcggccatcctgtcccgccctctatgttcgcgccagcgcgttcgatccccatcgtcgctgccacctgggtcccatatgtctgacccgtctcccaccctgggtccgaagcaacgaatggctgatccaccgccgggaatctcgcctctatctcacctaacctcctctcatttcctgtgagaacctctactactacttagtatagcaattatcttttgatatgacaggccggtattgggccatgtaatcttggaggattaagcccagattgtaatagctataagtactcatacttgtgaaagaagaaagacaggaaatgaataacagaaatccac

SEQ ID NO: 148263 - DNA, 515 bp, Zea Mays
tgggccgaagctgaatttctcggcccaaatagctctctggtcgacccactttccctcctctctcctgtcggcccaccctaggccgtctcgctgacatcgggagcccccctgggcagaaccatcgcgcgcccataagtcaccggccatgtgggccgcgttgccagccaccttgctcgcacgcgcgcttactctggtgcactgaccgctgggccctcccgaacggctcgtcttctccaatctgccgccgcataacagcttccgctgaacaacaggcggatccaccgcggtgatcctctcctggtgatttccgtgaatctcggcgatgcggttccctggccggagccttcttcttcagctaactccgacgtccgcgctcctcgccgcgcacgccgtcaccagtacatggtccccatggccgaaatctcctcccagctctcaaacgtgatggaccccaacagaacccgccgccgccgccgtaggttgttagggtcgagttcggactcctaccctcatcc

SEQ ID NO: 148264 - DNA, 583 bp, Zea Mays
ctggatatgattggacctttcaagaaagctcaaggagggtacactcatgtactggtagcaatcgacaagttcaccaaatggatagaattcaaacccattgcttccttaacctcagccaaggccgtggaattcatacaagacataatattcagattcggaataccaaacaatatcataactgacttgggatccaactttacaagttcagaattcttcgacttctgcgagtaaaagggcatttagatcaagtatgcttcggtagcacacccgagggccaacgggcaggttgagcgagctaatgggatgatactggaggcactcaggaaaagggtcttcgaaaagaatgaaaagttcgctggaaagtggatacgcgaattgccctatgtcgtctggagcctaagaactcaacctagccgagctctgcatggaaacactcccttcttcatggtctatggatcagaagcagtattacccgccgatctcaagtttggggcgccgaggttgatctttgaaaacatagcagaagctgaagctactaggctggaggacattgatgtactcgaagaagaacggctgaacgcag

SEQ ID NO: 148265 - DNA, 589 bp, Zea Mays
gcaaaatcgaagtcttttcctaaaagactcttcgtgcagaagtcgcctaagggagcagccggaacagcacaataagtgcgcaaatgtcgaagccttttccaaaagactctccatagagaagtcgcctacgggtgtagacagatcaacgaaggcgcgcagcctcatcatacaaattacggttacatacacacagcgagggcatcatatactatattggctcaaccttcgggatgatacccatctccctgtagttgaacaacattatcctcaattcctcaccctcaaaaagatttcgcagctccccttcacctatgctcgccccaatcggcgaggacaacaactcttgcctaccagcccggtccacgcgaagacagccacactccatcccaatatgatgaccacttcacgacgattcactaactctccatttcgccaccgcccttcgccgcctatacccagtactcgcacccgggagccccccggaaccctccacgcgcggcgaaggctccgctgcagccacatctaacacaacaaaataatccaagccttcatccgaagactcctccatccacgaaatcgaactcccaga

SEQ ID NO: 148266 - DNA, 469 bp, Zea Mays
cggatccgtaacacgacatcagggaagaagggtatggaaggttggaatgcaacgacggagtccaaccttgcggaagacctagcggcggcgaggtgaaaacccttgcgacgtcaacgggggacgagcggatacggaagacctggcggcggcgaggtcaaaaccctagcgacgatgcagccacgtctacgggggacgagcggatacggaagacctgccggcggcgaggtcaaaaccctagcgacgatgtagccacgtctacgggggacgaccggatacggaaggacctggcggcggcgaggtcttccgtatggacgatgcggcgaggtgaaaaccctagcgacgatgcagcgggggacgagcgcatacgcaacggaatggaggaatgtacctgctgagcgaatgccgcggaaggggagacaggagtgtggtcgaggccgccgcaccgatgcggcggaggagcaggcggcgg

SEQ ID NO: 148267 - DNA, 580 bp, Zea Mays
aattcaccgtgaacagttctaataactttccatgaaggaacccttgtcaaaatggtaacagcaggaggttcatgaccttcagctttgagcacttcatccacccactgaattcgtctatcctcaatagcggcatcattatcagcatttgcatatgggctctcataattttccagaactgcagaaacaacctgtgaaatcattgaacagcagtggctaagaatagaggagcagtggtaactataatgacacaacattctacacttccaggcttcctgctctatgatgccagaagggattgatattacaagttaataaccaaagggaatggccaaatgcttcagcttgcgtgatttggacaaaatttacagggctacgaaccacaaaggatatgtccaagctaggccaccataaggtatcctatctagaactctagatctatttacaacatgaaatactggaaattactatgggttactgaattattcagaatcaccaaacataaaggctttggttgggctaacaagtgtttacttcacttcttaccaaaatcaactaagcagcttaaagggggaggcaaaat

SEQ ID NO: 148268 - DNA, 396 bp, Zea Mays
cccaccatggcctataaaagaggaggtcgaccatgaagacaagggagggacccaagaggacatgagatagaatacactcgatggaaggtgaccacgcacacggtgagaccaaaagacctagaggttagagccaaggcttagcgtaggactccagttccatattcttagggctacaccagcataagagacttgggagcccttcctccctctctcgcccgcttgtaactcgcttgtaacccctactacgagcatcgagcaacataggtgtcggtagcgcgagctgccgaagacaggatgtagggacgttctgcctgaaccagtataaaccttacgcccatcgagcacaccgtccggagcccagaacatgctcatagaaatttacttgttggtggctcc

SEQ ID NO: 148269 - DNA, 644 bp, Zea Mays
ggtccagcctccgccgcactagattcctctaggaatacgcccgccgagatcccgcgatactccctgaaccgaccgagcgccctctacggcacagacggccagaaccgcggtggcggcccgttttccccccacggcggcacaaaattcccaacggtggaggcgaggtggatggtaaaagggaggcacgagcggattggactcgggatggcgccccacgttcctggtcttatgggggaaggcggccacaggttgatcggagcagccacggcgcagcggaagaagctccggtggttgcggtcggtagttgaggtgagggactgacaaggaggccccacgcgccgtgatcggtcttgcgcgcggggggctgaccccaggggcccgcacgtcagcggaggaagggaaggagcgagcgtggtgtatgactgacgggcaaggcccacatgtcggcgcagtgatccctgtggcaacggagtgggtcgtcgcgtgtagcataggcttgggccaaattcaggtctttcggcccatttagctagttttcctttttcttttatattttctgttttccccactactttaccaattcaaatttaaatcctaatttaaattcaaacttgtgacagatttacacttagattacatggcgc

SEQ ID NO: 148270 - DNA, 3489 bp, Zea Mays
ctcacaatgaaaatccgctgaagttgagacacaacaccagcaaactttacatcttgatgttccttcctttctgagaccttgcaatgtggacagcgcatatatattggcaagtttctgttcatcagtgaaaatgcttctccaccatcatcaattgtaacgcttcgaaaataatgctcccaccttttggcattctgtggatctgaaagccgaggagaaggctgtgaggtctctgcatcaatcctcagctgcagtgattgctgctggctgtttctccctgatgattccaatggcttactgtttttccgtgcactgtttatgtccactgcagatgctattaaaccagatgcattttggagcaacttttgtgcatgcttgacttctgcttctttgtttagatgaggtctttgatactgcaaacaggaagactcgatctccttcatatgtttctctgacagtaagaagcgatgaccatagggacactcatgctcaaatccaatatacacaacaaactgttgtactggctgactagtttctctagtctcatttccagcaatcactggtactatattgctccctatctgtaaaaagggcttcccatcagcattttcactactcttgtttctgcttgcttttgccgattcagtttcagctacagacccttggctgacagccacatgacctcggccattagtctggtctactatattcatttgacgctgctcatcttttcgaccaccaggttttggtggccttgtctgctgaagagcaggaaactcggtatcttttgatgtggtgccagcaacaacttcagaaaagggctttttcatagtaaaatttggcagacctttaccaaaattaatgcctaagttgctcactggttcaacttcagcttgttttccagaattttcaagctttgcatatttaatttgtgctgtgacttgggttatggcagattttacttcaccagtgactattgggggagtctgcgggttcataccagatcttgcggatgaagtaatagtattagaacgaatgtcatttctcacttgccccttatgaacagatacaatccaccttagaagatacctctccttggagctaaatccactttgaaggagtccttttgttggcttgtagtaccttgctcctccaagacgcaccaagcaccaagaggatactgaaaatgaaccatcattgctgcctcttggaagcgcaagggtaggtaataggtcatcgcaattttggaaacaattaaaagacacgttggctgtctgaaagtcaaaaggatcatctctaaggcggcgtgaccggccacaggaacatgcatggaggaagacatatccactagaatgttgctccattgcatctgatgaaaagaaatcgccatgcctgcggtgcttacatggtctgccagttaggctaacagcgtcacattgctgccttccagattcccatattgcccggcactcatcttctagcttctttgagaataccctgactgctggtcctttaaccattgagccaaaggaccgcaatgccttctgtagctgcacttcatgcattcttgtggggtaaaaggcaggcaaacctttcaggtatatctccttagcagctggaagcaccctttgacaccatgatgaagaaaatttcatgttcagcccattgttactttccaagcacgataatgcgatctcaatagcattagatcctacaggaagttggccattcttctcagtaggacttgtatgagtcttgctttcagactgacatctcagcacatttcttccactcaacagtgcagttagaatagaggtacttatggacaaccatttatcaaaagtagggaggtcaggtgcattaactggtttcccagatgcagctgatgctgcagctgctgcagcagcagcagccaccatgccaacacctgcaacagacccggcacttgcattgcttgaatatccccctttccctctcagcgcatcagactgccgaaatataaaatccttgatcaactgaaagtcatcatggtttgttggatggtagttgttttcgagcgaaagaatatccaatggcgatttggagcacaaagaatcttcaaatagtcctgcaatggtgtccagtggttcctgtttcttattaatataccgttccaacagtgcaactaccctcgaggtatcgagtgagaacaggggtaaatgatgactcatgttacttacgccccttgggccaatatgtccaggctccatgcctgcaagcaccctgcacttcttgatcaagacacggatctgtccctccagtgacgaatgcagttttttgcctgaactgccctcagatttgtttgctgcccgggaaagcataattactgaaccagaactttttgaagctaagctctgttttggtagtccatcaggggtagaaccctgatttgatgaagatgcatcacctatatcatcgggacttgctgcagcacttgaaacatcaaccgcatcatcctcaaagacaaagagcaatacaggaatgcattggcctggcaagacagaaggagttgaactggttccagacataagtgagatagccgaggactgacgcccagcgtgacctcctcggcgtgttggaggggagacggaagaagccctgtgggttgctcttgttggggtgtcagaggcaacagttctggcaggcattgcagctgccaccaatggcttgacaaatggagcgagagcatgctttgaagattgcagcagtcggaacttctttaaggtttgtgtgttaaatctgaagccttgttgcagaaatataattacgtggcagacctagaatgttgcaaagtaaaaccaatccatgaatccttcattttgtcacagaaaaccaaagaaacaagagaccatagtagtcatttgggtggtcaaaggcccctgctattctagatatatgatcatgaagcagtgaatctaaaaaataacaggcaggtaaaaatatgacgatgaagtctaaaatttctatgatcagagaaccagacattagccacgtttgaacacaggcaagaggaacactttgcacgtttatttagttgtaaaatgtcaactcaacatagacaatcagtggcagctattacaagcatgtatagaaatctatgaaattttaaacgaaaaaacaaaaacaaaacagcatcgtcaggctgtgcaggtgttttaagtgcatcaaatcgtcaatagctagctgaaataatgcgatagaacgacgagctgaagctgatcctatataaagggtcagaataggcggaggctttggggtcagctttggcagttcgattcccaggatagcaaacctaccgtataatgtaatgagcaaaaggagggtaagaatccgagctcacagagaacatgaagagcatctccggtagttcgccgtcatcgcagcatcctgccaccgcctcgagcggcgcgggcggcggcggcgtgaggtgaaggaacaccatcctcttgccgg

SEQ ID NO: 148271 - DNA, 485 bp, Zea Mays
taggtcccttgagcatttgttgatactgctaaactaaatatgaacatcattgtgaagaaattgagaaggaaatttcttctaccaagaaacagtttgaagaacaatcttgcattattgcccagtctcaagctgaacagaaacaacaatatgaggttataacaaaattgcatgcaagaattgagggcaactgcagaatgggttgcttggtagttataggtcccttgagcatttgttgatactgctaaactgaatatgaacatcattgtgaagaagttgagaaggaaattttttctaccaagaaactgttagacgaacaatcttgcattattgccgagtctcaagctgaacagaaacaacaatacgaggttataacaaaattgcatgcaagaattgaggagctagagcatatggaacatgaacataagaagattcaaaggcagcttgatgcatacaaagagatgatgggcaacacattaagatatgct

SEQ ID NO: 148272 - DNA, 422 bp, Zea Mays
ccgccccccttccgtcgcagcgtcctccttccacggtgaagaggagcgaccgcgcgaggacacgagacgagacccctgttcaatccccaatctggaatggtgatccgcgacgagatctgagagagagcgcctcgcaagaggcccgccgtccgcttcccccctccccacggcagccttccacgcgatggcgtcctccgcggcgccgccggcctccccgtcgtcgcgatcgcacggcaatgcggcgggcgccggcagcagcgccacggcgatgatgctcccgggccctccggggcgcggcaacggcggctgcatcgacctcagccccgcgggcctcctggcgcacggcgccgggagcagcgtcgttgtgtccgacccgcgctccatgcagctcctctgcgtgctccccatgccctcctcctcac

SEQ ID NO: 148273 - DNA, 585 bp, Zea Mays
cgacaatgtccaggccccagcgctgaaggggccaagtgtgggcgattaactttgtgtaccgcgaagggcttcctgaacgtggagaaaacttctggcaggcttcgcatgaccttgtcacccgatttgcggcgcagatcatggcgagccaatagaagccttgtcggatcacctttgcggctagggccctaggccctgcgtgagagccacaagtcccgctatggacttcgcgcaggatttggacgccttcggtcttggtgacacatttaagcatgggttggctgaccccttcttgtaaagctagccgtcgatgagtgcgaagtcccggattcggtgtttgaggcgcttggcctcgttgatatcggttggatgatagtacccttgcaggaacagggttattggtgcccgccagtcttcggtcatgatgaggttgactatgcgatggccctcgctgtcattggttatttggaggccctctgggctgcggacggctggcgtgccgatgacatggtagaatacgtcggagggtagggcctcgcctctggcggctgccttagacaatgcgtcggcctcctcattcttggctcg

SEQ ID NO: 148274 - DNA, 314 bp, Zea Mays
acaaaatcaggcttacatggccgattctaaagatctcaacggtgcttctccaaacagcaacacaaggctgactaatttatcggccgctgagcataaaagattagaagatgacatgaagaaaatagacgaggaggcccatcgacaaaaggatcaggtgctcaaggtggtggataagtggtacctctcgcacttcagggtagactgccaccagaagaccgtccaagagagggagataaacgccgagtatatgttagccgtgctgcaacagctccccacgataggtgatgccaggtcagccgatgatattccatcta

SEQ ID NO: 148275 - DNA, 423 bp, Zea Mays
caagtcccctacgggcacggccggatcagcgaaggcacacagcctcatcatacaaattatagttacatacgtacagcgagggcaccacacatcacattggttcaactttcgggatgatacccatctccctatagttaaacagcattatcctcagctcctcaccctcaaaaagacttcacaactccccctcacctacgctcaccccagccggcgaggataacaattcccgcttgccagccctgtccacacgaagacgaccaccctccacctcactcaccctacgcttcgccaccgtccttcgccgcctacgcccagcactcggaccgagaacttcagcatccatcacatgcggagaagtctccaccgcagccacatccaatgccgcaaaataatccaaatcctcatccgaagactcctccgtcc

SEQ ID NO: 148276 - DNA, 312 bp, Zea Mays
aataagtatcaaaataatcctcctctttcttttgagtaaaacccttagccacaagacgacccttgtacttttcaatagtaccatcgggtctcctcttcctcctaaagatccatttgcagcccacaggcttgcaaccagccgggagatcagttatctcctaggttccgtttgagatgattgaatccatctcgctacggacaacctccctccagtactctacatctggagatgtatatgcatctgtgagggagcgtggttcttcacccactagataaataatataatcatcacccagagacttttttagtcctt

SEQ ID NO: 148277 - DNA, 591 bp, Zea Mays
aactctctgatccactttcctgtgaacttttcattcttgtcgaagactttcttcctgagtgcttccagtatcattccattagccctttccacctgaccattagctcttgggtgtgctactgatgcatatttgatctggatgctccgttgctcgtagaaatcaaagaattcagagctagtgaagttggatcccaggtcggttatgatgctattcggtatctcaaacctaaatattatgtcttgtatgaattccactgccttagctaaagttagagaagcaatgggtttgtactctatccatttggtgaatttatcgatggcgaccagcacgtgagtataacctccctgagctttcttgaagggtccaatcatgtctaatccccagcacgcaaatggccatgttataggtatggtctgcagctgctgtgctggtaaatgttgttgctttgacaagaattggcaagcttcacatctctggactaactcggctgcatcactctttgttgttggccaatagaatccagacctaaagactttcccaaccagagttctggatgctgcgtgtattccacactgtccgacatgaatctca

SEQ ID NO: 148278 - DNA, 423 bp, Zea Mays
aggcagttctttggacctaaaattatacaagaggcagaggaacaagtccatcaaatatgggagaatttgagaactgcacagtcaaggcagaaaagctatgctgatacccgaagaagattattagagtttaaggagggtgatcatgtctatttgaaggtgtcaccactccggggtatgagaagattcaaagtcaaagggaagttgtctcctcgcttcattggacccttcttaatcctaaagcgagtgggagaggttgcatatcaattggagctacctgatcatcttgcggatgtacacgattttttccatgtatcacagttgaagaaatgtcttagggtacctcatgagcagctaccaatggaggaccttagtgttcaagatgatctgacttatgctgagtatcccatcaagattcttgataca

SEQ ID NO: 148279 - DNA, 1153 bp, Zea Mays
tatcattgatatctatattcatgcaagtgcatgtgcattatttctcatgttgttcaaattgtggttttggttatcatcataacaaatatgctaacaacgtcatgcccatatctatgtgcttaatttaggggcaaggttattagaatgctaatcactaagcttactatttgacatttttattcaagatactcttcgtgcacaagatatgcagagcatgcgagggttcgtgaatagtatttctagcctctaggaatgagtgcaaaaaaaaacaatcatgttcttgccttcactcctctcaatcattttctttctcttaaagcaatgggggttggggaattcggtgcttgtgttacataccggtgatgaagaaaggtggtgtgaagtatggagaacttgaaagctcgctcttcaccttaactttgttggcatgtcctaatttagaagttagcatatccattgtcatggttgtcattgtgtttgcggactcatgtcaagatacttaggcagagcatggtgctaacagtacgagtaaagtcgactgtggttgatgggattttttggggtagggcaacattactgtccccctccctctcatttattggtgtatgctgttgaaaggatggccatagaaagcaggcctcaacagtgcacctatgctaatgcttagatgagtcatgagacacacgaggtaaaagggtcaaagagcattgcaccatggagcctgcttaacaatggcctattggtgggctcacagacaaacctgtcgcgtcctgatgttcaatgccctaggttcattgtctccacaacttggacgacgtgggtcaatgtttggggcaagtgggatagtatcttgaacattggcgtggtaaagccatcaatgttcacagactctagatcccaactaggcggagaactttgattagggtgtcacgcatgcatgtctccatgtaggtgataatggttggggaggcacgctcagtggatgaaggattgtagcggtggcatgatatcttgttgtccatgtctgtgtgagatcttggttcttagtgccaacatcacctatcagtgattagctagcgttgagcctaacaaactcaagtgggcttgtatgttgaacatgcaaaagctagattgcaagcttattttgtggaag

SEQ ID NO: 148280 - DNA, 323 bp, Zea Mays
cgctgagcctaacaatggcgttaggcgtcagctgatgaaggtaaatcctgaatttttccaagacttctgtaatcattccgtgtagaggaaatctcaaccctgctttgaagaagctcttaaaaactacaacttcatcattttctgatttcgggatagtctcttccctgccaaagcgaaccaaccccttctcgacttctctgaagtagcatagcttcgtcatcatagtcatatcagcttcagacacagtcgatttcccaaaatccaaatggctgggcttcgatggcataatgatgttataatcaatctctccttcattagcatca

SEQ ID NO: 148281 - DNA, 622 bp, Zea Mays
gtgaaggatcttgtcactaggacccttctcgctcggtgtgacagccccggtcccctctacacgcttcgcctgcctgcttcccctacatcgacttctgccccgcctgtccttgcagcggtcgcatcctctgtgacttggcatcgtcatcgtcatttctggctataagtattatttactcgttctcgatgacttctcgcactaattgttgacttttccctacgtcagaagtcagacacctttcccaccttgtctcacttcttcacttgggtctccacttagttcggtcacaccatccaaagtatccagtgtgacaacgggcgggagtttataacaatatgtcccgtgacttttttctctctcacggtgtccacctccgtatgttgtgcccctacacgtctccttagaacagtagggatgagcacatgattcgcacagcgaacgatgtcatgcgctctctactctttcaggcctcccttcctgctcactactaggttgaggccctcaccactgtcacctacctcctcaaccgtctgcccaccaaggcggttgctcaccccactccttacttcgctctctttggcacccacccctcctacgatcatctccgtgtcttcgggtgcgc

SEQ ID NO: 148282 - DNA, 432 bp, Zea Mays
tcggtatatggttctgttcgctaaacttagaggacattgagctcctttacgcgtccagcaacggacggtaaagcgtccgctaaaaatagcgcacgtcacaggacacgccaaatctgaaggttctcggacgtccgctatccgccgtttcctctttctcccgcgccgaggcggaaccttcccctcgtactcaggtcgcatcacaggccaatctcctcccactcctgcaccgccatagattgcaagagcaagtctagcaaggtgccgcgagctcagcagcgacgttcatggacgcgctctctactgccaccgacggcaacagctcagacccaacgacggcacggcatgccaccgttgcatgaagcctcccttgccttgctgggttcaatttctcttttttgcagctacggtcccagatccaaatcgttgaatgaa

SEQ ID NO: 148283 - DNA, 300 bp, Zea Mays
tccatggacccaacggtcttgccaaaataaggttgaagatccattcccaatttcagtgagcatggcagtgtaaaagaaggccttcattttgttagaaaactgcataggcagtgaggaccaaggtttatccggatctgttttgctcagccacaactatctcattcttaaggcccatcccaattctttgagactagaaataccaagtccgccgatttcaagaggtctacaaactctgccccaagccactaaacaatgtcctcctctgacatctttccttccacgccagagaaatccttttct

SEQ ID NO: 148284 - DNA, 593 bp, Zea Mays
atcgtggaaggagtgggcagtttggagggagatcgtgggggattcctttgcgcgggcgtttggcagtgagcgggtgctcctgagatggctaagttcgacgatgaacaggagagcacgggacggagacggcgctagcaggaagagctagagggcgagggatcgctgggcagagaaagcaagggagactgaccctaaagccaagctaggtcagggtaagaagcgtgagacctcctgctagctacttgggccgcaccaaagaaacacagcccacgcgacctatgtcgtcgtcacggcttgcacatttttatgaccataccggccagccaacgtagcttctaccggcttataagccttccttcttcagagaaagcaatcgtggtcaaatgctcctgccagtgtcaaattgaggcaactttttgcgcgagcagacgtgggcctggtgtgtgcaaaactaagggtggctgtcacgtgggcgctcgtagtctgcaatgtgggcccaacgtccgaagtgtgtgatggcttgcacagtaggaatggctgaatgggaatgggggattttgtcacatgggaccggagtgcctcagtagttgctc

SEQ ID NO: 148285 - DNA, 952 bp, Zea Mays
cggaccctgccactaaccggacttgagacagagatctgcccgccgtgagatcgatagccgatttaacggccaggggcctcccttcctcccgaccgacctgggtggctctgccgtgcccacaaattcacagatgaacggtcacagacctctgggacgaagggataaggtaacaactaatctcagccgtccatcacagaatcaaagggcacccgggcgtcttcaacctttcgccgcccaggacgccatcgtgccatacccggctccctctctcctgtcggccaaccagcgctctgcccttgagtctacagcggcaccccgatagcatgccagccccacaggataccggagaccccccagaccccagtcacggcgagttgcaacttgcaatatggtctctggaatacgcgctgaggaaaaaaaatagtaaaactcaccggagatcccgtgcgccagccaccgattgatgtggaagcccgagcttagcgagggagcggcgacgttcgatcaccatcactcacgtccatggaacttgaatcaccaccgacgtgaattcccgacggcgactctcccttactctatctctctcttctgcgcaatccttgctcccacggacgcccgtggtctgccaatggtggtggtcgcgagaggcggaaagagggtagaaaggagattttgggccgtggcttcttaaataggcggtagtcggatcgagcgcagaaaccacccgcgcgactccgccgcgattccgccatgcacggcgctcgttagaagagagctacgcacctggacccacgtgtaagcgtcgatggaggggctgagcagagggcccatgcggtcagccaatccgaggaacaagcgcgcctacagactggaattgctagcactgggccgcgtgaagtaaagccaagtgggccgagcgtgcgccagattcggttggatggtgaagttagat

SEQ ID NO: 148286 - DNA, 463 bp, Zea Mays
aaaattttatataaatctaaacaaaactcgagaaactttgagcgacacatgaatacaatagcataactattctggggtgaaaagagtactagctagcaactagaaaaaaaattaaaacagcttggaataacaggcaaaacttggtggcagtgctcaaattaaactggcggggagccgtaagtatagaaaagaagctgtagcaaattttccttgtcggtggcctagctgcatatcaagttatcaacgatgtcgtccaacgtccatgtccgcgagaccgcgaacagcagcccggagccggaggccaggatcctcctccatcctcagcggcggcgacgctcgtgctcctgatcgatgtgcatgcacatggcgcatgcgatgagactggatctcggacgagtcaaagggcatctgggagtgctgcgactgtacagggaggcaacatcgatccggacatccggtattt

SEQ ID NO: 148287 - DNA, 896 bp, Zea Mays
catggttacacccattggggtcaacttcaacaaggtcacacccattgggatcagctggtgcatggtcacacccattggggtcagcttcaacgtgtacaccaccattgggatcaacctcagtaaggacctctgctggtacttcttcacaaacaggagcagaagggccagcatcctggtccaagcatgacagtcgccgaagccgcctcttctttttcttcttctcctcaacaggcgcagttggatggctaacttggcgagcacactttgggcgagtaccctcaggctttcgggtgtccactgttttgttaagctcttgtccaaccgtaacagccatcggttcagcatgggccgagtcagaagattctccagccaacatattgagtacaacatctatttctgcatcatccggacttgccggcatcgaaaagtgaacttgcctctcatcattgggaagatcacgaagaggagcaaccagagcttcaatgtctttaggagagggtcgcactctaagacctagaccactatcaatagcaggagggttggacacgaaattgaaaaatgacctaggagatggcagattccaagcagaataagcaacaggagcacccacatttgataccttgcccctcaggatcatgtctagtcggctcaccaggacctcagtaggaattttcctgttggtaacccgagttgagtcagtaataccactgtacaagtaagctggatacgccctgtctttcaaaggctaaatattcttgaaaatgaagtcagcaaccatagcttcgatagttagacctctctccttcagcagacagatctcagcaagcagaaccctagcttccgtcacctccaaggcagtgggagactcaacccaactcggagtgcgtacatctggt

SEQ ID NO: 148288 - DNA, 909 bp, Zea Mays
cggccggcaggcccatgcagtagtcgcatctcggcgcctccttgctgccggccgcgtccgcgtcggacatggcttccgccacctgcggcggatcacggcagcggacaagacccccgggggatctggttgggacgagcgcgatttgttgcagtgaggacggaggaggcacaggattgatggcgcgaaagggagaggggacgatagaggcctacaactcgcacggtcgtcaccctcactcgtcgctactgtcttgtagttgttgtaggtcgatggtgggtgccagtacaaagacactctgtagtctgtagatggccatgcagcagcagcagcacgccgccccgtagttgagcgcgaagcccgctattttggctcagcgtttaccagagctgtatgtattctacatatatgtctactgttgatatttgattttctaaaggtgtcgaaaacaagttaagtatttggaccttcgtcctttgatttaatgcgtaggatgaaggttcttaaaggagatggaaataaaaacgataacatgccatataagccaaaaagataatatgtcatacaatttaatgaagagagatataagagagtttaacgagagatgtgagagtacgataaaaccctccaataaaaattgccttagaccgtctccagcaggcgagaaaaaatagtgaatacgaaactgtagatgacattgtttacagagtgaagtttaaaataagaaataaaattgtggaggatactgtttacaaagtgaagtttaaaataaggaatgaaatagaaaatctgctggagatatccttagtaacagctattgacagagacgtaggagtgtgcaactgtcagccgaggacccaattatacagtggctaagctaaatagtttagcaggcttttcagctccaactaa

SEQ ID NO: 148289 - DNA, 1089 bp, Zea Mays
cgctagccacatacgcactcgcacaacctccttgcatcccgcatctgagcaaccattaagcacatgcaagttgaagaaaataaaaccactagtgggcctatatacatgcatgcaaccgagaacaacccagagaaatcgtttcttgtagccacaccaaatcccattgtgtggatgtgcctcatgtgacccattgtgtgtcacattttcaagccaataagattacacgacaccatttaatctgtgaattattaaatactgagcagtatcatttgtgttagatttccaatttaattcattcaagttgtgttagttttcttataacatcatctacatgttaataatattgtttcatcatagcacatgttttaattaattaattgattgcttatctactgttgattaatagcgtgtcgtcggggtttagatgacgttcgtctacccgtagacgacgcccgtctacctcgtctacccccttcacgtgcgcatgttcgcgccgttcgcacgtgtcgttgttgccgttcgcgtgcgcggtcgatgcgcgccatcaccgtcctttcgcgctttgtcgcgcacgcgatccgcacacattagttggttgtttcgctataatcgttcgtgcttagtaattaatcgaataattgataatagcttacacaaataatttatgctaactaaaatcaacttagaaaatatagtattgcttcatcatatcaccgattttaattagttatttacttatttattcaatgcttatcaggttgtcgcgctagttaaaactaaattatagttatagttatcatcccgagctttttacaaatagatgtcaacccaaattaatgtaatgttatttttaatatctatttggtatttagtataagcacgacatgtagttagtgattctcgcgtaccgcactcgcggttttgcacgtggttacgtgctgatccgcgtgtcgttcgcgctcgtcgtttacgttgtttcgcacagtcgcgcgtgttattaagtccgttacggcccttttcgcgttatgttaatttcatagcaatatcgtcaacatattaataatgttattgcatcatgtcacaagtcta

SEQ ID NO: 148290 - DNA, 521 bp, Zea Mays
ggcacttctctttttattcttgttctcggccgctctgcttctgtttgggttctgagggcatgttgtgctatagtgccccctaacatggcaggtttggcactctcttatgccctgacccccactgtatgtgttgtatggattagcaggttccacactatttttagcacatttagccccactgcagacttcctacccttcgtgcgcgacattggcggttcagtcaatgttagatcagcgaggcagtttgcagaacctggattgaggcccgattctggtggtggtgtaggaccagtgggcatcacaacaggttccatattgttgtcagaactttgttgtgttggtgcaatgggaccaatattccgccgtccatctgcatcttgctgcaactcagtatttgttgcttcatccggaccaatctccgctgttcgtagaagctcaatcccaggagttatcatgtcgatgtgcctgatagttttagtgtatgctctatcagatttgcttcccgctcttcccagacgcat

SEQ ID NO: 148291 - DNA, 396 bp, Zea Mays
caccaacgcactaaacacatcgagattgacctccattttgtccgggagcgtgtggctgctggggctgtccgtgttctccatgttccaacgacttcccagtacgccgatattttcaccaaaggcctgccatcttctgtatttttggagtttcggtccagtctgaacgtttgttccaccgacgttcctactgcggggggtgttagacaggagatctcaccttccatcattgactcctgtaatctcgtgtgattgatttggtgattgatttggtagattgatttggttgccctcccgggttctgtttctataaaccgggatgaggctttgcctatataaatgtaacatgtacgcatgattcattcaagcagtactactctcccacatatctgtcttcag

SEQ ID NO: 148292 - DNA, 383 bp, Zea Mays
catcaatgaaactcacatagtatttgtgtccaccaacagagtttggtgctggcccccacacatcagaataaataagttctaaaggatgctgtgaaacagtactagaattaggaaaaggcaactgatgacttttagccttctgacatgcatcacacaccgaatgtttgtttgaatccaacgaaataggaagattaaattgtctaatgactttctccacgatcggagtggccggatgacctaaacgatgatgccatctatcaaaggaaacttttgcagcactataggcttgctttatttggcgcccagcaggaagaggatagagcccatgatcacaccgtcctctaagcagaagtttcttcgttgcctgatccttaattaaaaag

SEQ ID NO: 148293 - DNA, 518 bp, Zea Mays
tgggttgccttgtctcttatgtcatgtactctatataaatcgtataagggctcaatgtaatacataaatctttaatagcaatctcccttcttcataagcatctttagtcaccaaaaaggtcgttactcttttaatgagagtgtgcagtgactaaatataataataaaatctcaaatataaactacaagataaagaaattaaaaaataatatatttgagatacaatacttcaataaacgagacattttagcatgacttatgtagcatcagcatcatcacatcttgtagttttcttctacaatcccgtgattgcaacaaattcctgtgtttgaatggataagtgacgcaccacgccttttgcctagtttcatgtaggtcatagaatgtggaggttatagaggatggcggggcgccatgcaaatagaatgtctatgactgttttcaaaccaatatatcagacaaaaagtacatatcaatcacaattaaattagacatataatcacatatatattaaattca

SEQ ID NO: 148294 - DNA, 369 bp, Zea Mays
actctggggcgttgggagcgttaaccaccggcgaaggcgccgccgtctggcctggtctcgccactggccggagtagacaggggagagggaaagcgtgtaggggcgctcccgatcgttgatctggtattcaacggctaggggtagatggagcagtgagtgaaggtgttagccgtaggatttttattgagcgacccggatcggatcttggtgccgtggggatggacgcaaccggggccgtccgatctggatcctgtagcctctattccatacccgttcgtgtactgcgtcgatctaaccttagccctagatttcgaatcgggcggctgagaataattgataccccttcggccaccactttgcaaataagcc

SEQ ID NO: 148295 - DNA, 1973 bp, Zea Mays
caatgtcatgctgctctttagatttttgtaggctagaaaagcaaccgtttccaattgtaatgctatgggggcttcatgtaatctcaagcttgttggtagcacaaatatttgattagtccccattctctgtatcattaaattatttgttttttcctggtgttccttcttggaataatttcagggaccttatgtttgctcattttccagagtatgaatgtgttccctgattcatcttggaatatattcaggctggtatattttgccgaatttccatattgtagatggatgtatatcatgttcctcgttgggttgggatagtttgagtccactgttgtggtagccgagctatggagagtttacttccttgcagtgctctttgcggtggcagctatgcaaagatccggagtttgtgtttgctatggaaacttccatacattttctggtgctttgtgggcgttgaggttcatgtttattttcctcaagttggacgaaatggtggcttgtctgaacaaatgactagtggcccctggtgttcatttggttaacggttggcctgtctgaacaaatgactagtgacatttggttaactgtccaagtagccgcttcttctcaagacttttttcaggtcgaaactctacgtatccatgattttgtcccgttatattctgtaagtatatgtgctgaaatggggatgcatctttattttttgttcttttaattttcctcaagcttttttttcttcgatattaacgaaaactcagactttggctcttttttgctaaaaatgttggtcatacgtccattaatcgtgagtgagcgttttctattaattactcaggctttcatgacataaaccacattatttggtttttggtggagaccatttatcgttaaaaaattcatatgtgttagttttcgatattaacaaaaactcaggctttggctgttttcagccaaaaatgctggcatatgcccattgatagtgagtgacctattacttaacctcacatatgtttacatgatataaaccacattattttgtttttggtagagaccatttatcgatcaaaatctataaatgttagcctacgatattacaaaaactcacgctttcttttttggcggataccatttatctttcaaaaattcataagtgttagcctttgataaaactcacacttcatccgttttcggcgagaaatgatggccacatgcctattgatcttgagtgagagtctcctattacatacaatacacatgtttccttgtcataaactacattatttagtttttggtagacaccttttatcaatcaaaaattcttatgtgttagccttcgatattagtgaaaactcatgctttggttgttctcttccaaaaaatattggtcatatgcccattgatcatatgtgagtcacctattacttacgccacacatatttgcatgacataaaccacgttatttggtttttggtggagactatttaccggtctaaaattcatacgtgttagccttcgatattaaagaaaattcacgctttgctcgtttttggccagaaatgatggccttgtacctattgatcgtacctactgattgtgaatgagagtctcctattacttacaccacacatgttttctcgatataaactatattatttggcatttggtggagaccttttatcggtaaaaaatccatatgttacgatattattcaaaactcatgctttgttcgtttttggccaaaaatattgaccatatgctgattgatcgtgtgtcagtctcctattacttatcacacacatgttttcttgacataaaccacattatcttgtttttttatggaaatcatttatctgtaaaaaaacattggtgttagcctttgattaacgaaaactcacgctttggttgtcttcagcaaaaaagtgttggccatatgcctattgatcatgagttctactgaccccacacatgtt

SEQ ID NO: 148296 - DNA, 536 bp, Zea Mays
cttcctctatgctgtttgtccaccatcttgattgcatggcaccaccatcatggaagctaactctgtcagtttgaaaatctagtgcttttaagaccaatttttgcagaataagtaaccacacctgcacctcccttgaagttgcgccaggttactgtagttgcttttctggtgtaaggtcgtatgatcaagcgtgctctgaattagtcagtggagcatgatatactaggtcgattcatgcttattgctgcatagttaatttctcgttgtaatgcaccagtatgtaattgtatcattctgtttcctgattaacttcataagttaatagcacttgatctctcaatgaatttcatgctgcaaaccaaagcatatactggttggttagtgtttcaggttttctgtacattttttctagctttcgatcagatgtacccattctattaaggacaaacactgcaatcatgctaaacttcttgcctgagaatttgaaaatgatttgtttgcttctccttttgattcggtgctactttttgtcatct

SEQ ID NO: 148297 - DNA, 720 bp, Zea Mays
gccatttgttactgatactattcatcaaggcgcgtagaaaattgcttgtgcaatttgatttcgtatttgacagcacaattctatcttatataagaattaaattatttaaaaaatggttttagattttgatcagcgaagtgtagatacgctattagtcatgtatgtctcttaactgtggatcttgtctcaacacggtgaggttctctctggactgttcgttacagtcctggacggaaggtggttcgattccaccaagatcctgtagtccttatttaaataaatacacaagataatataccatcagaggtttgaggaattcagacacatgatgtgcttggaagaattcttagacgtgggttcttggatgttgaagtagattaaagaagaaaacttggagagctagaagcatgttgctcgtccaacaagacaaacaagataagtgcatcatttaaagacaacaatcaagaagacgattgaggtctcttcaagtgaagatgaatcaagcttcaaagttgaggacgagttagacttgttcatgacgaaattcaagaagcacttgaagaaggaagatcttcaattatcaagaagccattttctagacctgttgtatcagaatagtttgtgtgcatctattttggatgtgaacaatgttttttttctattgcaaaaaggtcctaagtattgttttctatttaagaaaaagaataagcttaaaagtag

SEQ ID NO: 148298 - DNA, 368 bp, Zea Mays
tcgatcgtcggtgagtttgagtgcctatacgtctgatctgttttataatgtgttgtttgttacgggccgattttttcaccagtgttatgtgacgttcttccatactatgcgatgtatagagctatgtctgattctccatgcgtgcgtgttgcgagatgacacgaagtgacgcccgaggcacaatgcaattgcacagggttagtcctcacaaattcgctgctttgtttatgcatgcgatggccggtacccatcctaatttgcaatgcttctcttgcagaccaaaaaatacgcagcctctttagattgcccagtctttgagacaactgatggccatcacattttgcatggtgaagacgaagtagacccat

SEQ ID NO: 148299 - DNA, 463 bp, Zea Mays
ggagaaggaactccactactttccgcactggctatgtagcgccgactgttcttccgaatcagagggatttcatcttcttcttcctcctcattttcatcagcaacacggacagcacacccattggggtcggcgtcagatgggtcacacccattgggattagttttagtaaattcaggcacgagcacttcctcagcagcaggagccgaaggaccagcatcccgatccaagctagacacccggcgaagacgtcttttcttctttttctgcccatcagcaggagaagcaggctgattggctcggcaagggcgtttcaggcgaacactgacaggcctctgaatatccaaggctttactagcttctgggagaggcgccaccgccaatgttccagcaggagcggcatcagaagaatcctcggctaacatatcaagcataacacttatctctacatcactgggatccaaag

SEQ ID NO: 148300 - DNA, 1727 bp, Zea Mays
atggattattaattaaaaacagaggttgatcaatgataaaaacttaggtgccattgtgtttaacaaggaagaaagatatcagtgccaacaccaagatgctaaattaaaaatgccatccaatatgaggcggataaaataaggcctagaatcacatgccagtgaagcattgatgctattttccacaggataacccaaggcaagactgagcaatttgccccccaaaaaatgcttaaatcagtatttaagcttaccaaatgtataagtcacgggctttctatcacggagagaacggccggtggtaagtccatctgatgtcaagtagctatcaagaaggagagcttctctctgttgctttttgagcaacctctctttcttctgcatgaatcagaaacagttgattaataagctcaaaacaatcaatcctctggcaaaacaaatctatcaggctgtgtgttagaactacatactttatggatcttttctatctctggaagatattcaatcttcagcttctttccaagtgaaacctctgtcctgttccgacttgaaaagagtttttcctacacagcaaagaacatgaaagtagccaatataaaaaacagataagaatacaaacaactgactaacattccataccagcattttcttccaagcacactatattcagtagccaacctattgttacttgattgaagcttacaactaaaagttgatgcactattgagtattgatacattatttagatgtcgatggatgggttgcatgacatgattataacatggctggcatgaacagtcttacaaacaagtgtgttgtgtagacagcgaaacacttgatggcaccctaggaaatggttccaataagttcaactattaatgtacatgtccatgtgctactgcaatgtattataaaccagtcacaaccgcaaagttttccctttttatcttgcatataaatcatggattattaattaaaacttaaaaaaatgaaatgggcattgataagatctaagcacgctggaaaaaatgctctagttcaatacaagaaatagaagaaaggaaaactccagcaagataaatactggcgtattttagtcaattattgtatttttcctctaagttgatttattagtgtttgtgcagactaactttaaaatgtgaattttggctaacacaacaaggtctacttccactattgttcctctatattggtcatgtccaagatttccactgtagtagtagtagtaacacaaattttgagcagaaaacaaatagcactctttgggagcagatatgaggaactcaaaagtcaaaacttactgccacatcatcaaactcgtcgaaagtggacgcaacagtttcccactggtaggacacgactgaaatagctgaagatcctccttttcccctagacctctttcctggctccttcttgacctgctctactcgtctaatttcacgatacaatctatgcccgagaatctcatcatcttcatacctgttttgcatggccttgcatgaaaataaaataatggaaattctttacattcaagataaataaactagtaccagtatgagattccaagggaatcccctccaatccgatctttacgaaaggtagaaaagttctgtccatgcttaagagaactgtcaatgaagttccgaatatcctcttgctgcaaaataaattcataataagttatgttgccaaaattaacttgcagctaa

SEQ ID NO: 148301 - DNA, 368 bp, Zea Mays
ggggacgcatccgttgatcccggcgcattcggttggggaaaatgcaggtataaaacccgacagccgtcctccttgctcctccatccaaaccgaatccaaaggagtctgggctgcttggtgtggtcgttgtcccgggaggaagaaaatcgcgccgtcggtggggtctcgctggcaggccagggcgctccgcctgggtcgtgcgctgcgcgtcaggcgaattctccgttcgtgtgcgctgaccgaggaagatagagcttcttcgccgcgcgtcttggccccggcttgggacgacagccgccaagctgtgtctccgcacgaaccgggacctccacattgctggacctcggtaaggctctcctggaatctcc

SEQ ID NO: 148302 - DNA, 896 bp, Zea Mays
ggcacattgacacattcaggaagtctgactggtgttacttgacagattgttatctgctactaaaaccaattctgctgccacaaagcatacaaaaagttggtgttcacaaatagtaatcagtaaggcgatagcatgtatcgtcgaataaataaggtcagctagctaagaagtttggcaaacaggggttgggcattattgaacttacaatgacgccaagtagctgctcaaatagttttgatggctcaataacctccaatgcatcaaagatgctctagctaagcctgttttaacatgttacaaaacaggaagctttaattgtacacttaagggcatgaatagattgcattgcatgtacatacaaataatgaaaatgcaaatatttggctccacaaatgccagatgacattaaaacaaactaaaccagtttatgcattcatctataagtggttagaagatggatcattttccttgagccacaacagtggaagctaaaaaggaccataatgaccaggaaaaaatatgaagtttctaaaaactcacacaacagccaagtacaattgttgtcctttaggcaaaatcatgccacaaaatctgaagtgtaataaatggatatataacagtcacacctaacgaacgtagaaaacttcacatcactatgcagttggcttaagccttgctgagctcctaattatattcctttaggtgcagtttgaatggtattatcatactattgccagaaatatttgctaggaggaaagagtaaaaaatctggagaataggaaacacttttccttgaagacatgcataccgagtactgaagcacacacttgaataaataaaatctgaaatagctagtagtccgatggcgtttgaagaggaacaggggtggagggaat

SEQ ID NO: 148303 - DNA, 860 bp, Zea Mays
ccgcctctatgttccacccccatcaccacgccgggcagcagcacgcgcccgtgctgtccaacgcgctcgtcgccgcgttcaagcgcgcgcaggcgcaccagcgccggggctccgtggatggagcacagggacaaccgccacagccggtgctcgccggcaaggtcgacatcgaccagctcatcatctccatcctcgacgaccccagcgtgagccgcgtcatgcgcgaggccggcttctccagctcccaggtcaaggccaacgtcgagaaggccgtctcggcgtcgtcttcaccggagcatcagcagcagaacacgacgataccacccaccagccgcgcccacgcggcgatctctccaggcggagcagcttccggcgacgccatgcgcgtgctcgactgcatggcgagcggaagcaagcggagcgtggtggtcgttggcgagagcgcggccaccgcggaggtggtggtgaaggcggtgatgaacagggtgagcaaaggggagctgcagcagcggcacgagcggctcaagaacgtccagttcgtgcccctctcggccgcgtccttccagcggatgccgagggaggaggtggaggccaaggccgccgacctgcgcgcgctcgtccgccagggctgcgccgccgggaagggcgtcgtgctcgtcctcgaggacctcgcgtacgccgccgaggcctgggccgccgtgtcagagacgagaaggaggagcagcggcagtggcggccgtgatcacggccagggctgctactgccccgtcgagcacgccgtcatggaagtgggcagcttggtgtccgctgctgccggaggcggcggcagaggcctggacaggttctggttgctagggttt

SEQ ID NO: 148304 - DNA, 569 bp, Zea Mays
acggtcttcgacattcgaccaatacaaagtcaccgcgaggggaagcgctagctaccctccgcgtgcgacaatccgcgcaaaagacgcctaagggtgcagccggattaagcacaacaagtgcgaaaaatcgaagtcttcctcaaaaagactatccgcgcaaaagtcgcctaagggtgcagccggactaagcacaacaagtgcgaaaaatcgactacaggcgcgccgaaccgacatataaacacactagaccaactgcgcaaggcctttatgagcatagccaaacgtgcgaaggcgcacatcctcatcatacaagctattacatatgtatagcgagggcatcacaccttacattggttcaaccttcggtatgattcccatctccctatagttaaaaagcattatcctcagctcctcaccctaaaaaatactccgcagctcccccctcacctacactcgcaacggccggcaaggacaacaattcctgcttaccagccctgcccacacgaagccgaccgccatccgcctcactcactctacgcttcgcaaccgcccttcgccgcctacgccca

SEQ ID NO: 148305 - DNA, 782 bp, Zea Mays
gagagccgctggtccaagatgaacttcaaactgtaatgatctgtccggactgtaaatgcacgtccccagagatatgggcgccagttgcggacggccttgaccaaaccgatcaattcccgctcataagcgggcaacttctggtgatgtggcgcaactgcacggctgaagaaggcaattgcaccatcaccttgatggagcacagcgccgaaccctgcccctgaggcatcgcagtccaccatgaagcgcttggagaagtccggcatttggaggagtggtgctgtcatcaaggagtgtttaagttgcaggaaggctgcatccgcagcgtccgaccagcgaaaggcctctttcttcaagagggttgttagcggggcagccacctcaccatagccggcgatgaatttgcggtagtagccggtgaggccaaggaagccccgcagcgcccagagagactgcggtcgaggccatgcctccatcgcctcgatctttgctggatccatggcgacgccagccttggaaatgatgtgtcctaataggacaccgtttcttccccgaagaaacacttggagcgcttcaggaacaacttgttgtcgcgtaggatttggaagacctgtttcacatgctgcaaatgttctgcccatgtcttgctgaaaatcagtatgtcatcaaaaaataccaggacaaacttccgaatataggctttgaggacgtcattcatcaaggactgaaaggtggagggtgcgtttgtcaacccaaagggcatgacgaggaactcaaattttccg

SEQ ID NO: 148306 - DNA, 730 bp, Zea Mays
ggtgagacctagccaacgatgcctgccaccaaatgtcctacgccatgaccacttcccccgccgcccaatccggcaaatctggcggccacgttcgccatggcagtgttacgtaagtgaacctagtggaaggatttcggaagaacataggtagtagctaaggagagcaggtaaattgttcagaagcaagttcatatgttctctcttgttaccctctctctctcctttccggtattatatatatatacttggcacgcacgatgatgctcagcaccattctggcgcactaagccgcacattcgcccgacgggccctattactcctgcgaggcctaggttcctttgcgtctgtagccttcgtgccattctcctcgtccttctggtttagcatggccacctccttcgccgcctgctcatcatgtacatcagtagtggtagcagtagtgctcacattccccctggaagaaaacctgcttgaccccaagcacacacgcttggaaatgattgatgaagagctgtgtaatcttcccatgttgccaaggacacttgcatgccagaccatgtgatcaagacttgaagacatccggctgaatccagacacctgcaaagaaccagttctggcacttgaaggccatccaacctcactggtaattgagcaataggagtagtaggtgggaccacatgcttcaactgttagaaatataggcattttccatatcattttaatttcataa

SEQ ID NO: 148307 - DNA, 698 bp, Zea Mays
atagttatgatctccttcttctggatggatctcattctctgcctgttgaatttcttcatcaaactttggttcgtcgtcttctggatcactgtctgattcccactcacctttttcattcaacaacattgttcttatacttggacattgagcagcaatgtgcccacgaccatggcacttatggcacacaatttctcttgtacgggtacaagaaatagcgactgaagcttcagtcgggtctgatgtactagtagcaggtcgctgcttatttgcagggaatgaccctatagaagccaccatctttgatgtaccattggatggagaagacctagctgcatttccttgggaccatcctccaccaaaagaagcaatggattgctgtttgtgccatgagacaatattataatgacttgcataagattttccacgtgacacttgctgattttttctctttgtatgcattgcttgatcaactagatcttgcaaggtatggtatgggaacatctcgacaaatccagaaatctcttcattgagtctgcctagaaatcttgccatggttgacttgggatcttctctgattccagtccacactaatagcaactccatcttcttaaaatattcatcaacagatttctttccttccttcaataattgcaatcgatttcgaagatcacgttgatagctggaaggaacaaatcgct

SEQ ID NO: 148308 - DNA, 681 bp, Zea Mays
gtgatcgacaggatccatggagcggcagctggactggaggcagtgaacatgagcgagatcctgagcaagttcgcgaacgacatggtgtgccgcgccgtggcagggaggtcgttcagagtggaggggcgggacaggatattccgggacctcatcgcccaagctttcgacatcctggggggcataaacctggagagcttctaccctggcctggccaacgcggctggtggcgtgctgctgtggccagctctccgcaaggccgagaaattaagggaccggtggagcgagctccttgacaagctgatcgagcaacactcgagcggcgaaggagccggtgaggatgagcaagagactgacttcatacacgtgttgctagctgtggaagaggagtatgggctcacgagagacaacatcaggggcatcttgtctgtgagtatttcgttcattcttctcccgttttcatctatgtttggttgtacatgtcttgggagttgggagacaggacatgttcatatatacatctgctttatttgctcgtcttgggcaacagaacatgttcgcagcaggcacggacaccacattccttctgctcgagttcgccatggccgagctcatgctgcaccaggatgtcatggccaagctacaggccgaggtgcggaagagcccaccgaacaagggacaaac

SEQ ID NO: 148309 - DNA, 781 bp, Zea Mays
ctgcttcaaatgcacaccggggcatacgtattgtcataaacatttcattaactcattcagaagccaaaaataatgtaatagggtaccaatagttcaaattaaactagaagaccaagaagaactatagcatatggtacgaagaagggaaattgttctcttggcgttcttgctcaaccagtttctaaaacatataataatgtttttgcaccagttcataatagaagtaaatagataaccaaccttgcttcatcgagcacttcattaatttgtattgttcggcgaatcaaaatctatatatcgaaacactctccctgctactagtgaccaagctcagctagatagaagaggagacagataacaaaagctgccataaatgctgaatggtgcaagcaacagaacatggttaagaaatatggagagaataggattagcagctaacgaatatggctactgacagtggttggtgccctgacagttgaattaggtacggattaaacataggaggtagaaggagaaggtgggaagcaactacattcaacctcagtgagtggtacatgctacaatgattcaggttaatgaagtggagatggagataacagagaagcactattaggattattagttaagttgcttgatgaggaagcaagatatattataccaaactattatgattcgtgaatgcctcatctgaagagtttggtttagaatacataatagagagcatgtaactgtggatgctgtgaaaaaggcaaaaccaagcaagacaaaaggcaatgacagc

SEQ ID NO: 148310 - DNA, 358 bp, Zea Mays
gtggtggtcgagcgcttccagcgggatcctgccgatgattagtagctagatttgcagaaacagggcaagggttccactggggtgcggcttgtaatattttctggttttgtaagatacttttgggaagtattaatctaacagtgacagaacttatctgtatgctatttgtctttgctgtgtgcgtcgttaccaccttctccctggtacttggcccccctgggatgtaggctcgacgtgtcgaggctggatgccagtatacttaagaaagaatttggtgacctggcccccaggaggtagtctcgactgggacccggacctgcacacagccttggctaggaagctttagtagtgcacccat

SEQ ID NO: 148311 - DNA, 567 bp, Zea Mays
gatcgttggaggcattatttgcaatgaggataatttgaaatcagaatcgatcactgagctctcagttttcggggaaatcaagagttacactctaaacttcaacgtaatgccatgtttaaactcaagggaatggagtttaaagtagtgtataaacagggcaaggataacaaggttgctgatgctctctcttgtgtgggatattttatggatgtcacggtagcgagtgttgttcaacctgtgtggctccaagaggttttgaattcttatacttctgattccgaggctcagacaacgctgacgcaattgtgtgcgcatagccctgatgagcatgggtactcactctctcaaggcgtgattaggaagggcgatagaatctggttgggaaacaattatgctttgtgaactaagattaccgcaacacttcatgatagtgccctcggtggtcactccggggtccacgcaacatatcatcatatgaagaaacttttctggtggatgggtctcaaattggttgtggagaattctgcgacgcaatgccaagtctgtcggtaagccatgggggggaag

SEQ ID NO: 148312 - DNA, 813 bp, Zea Mays
gtactccaaggaatttctcgccaaacttctctaccaacgagcttccgccctgtgttgcggcccacgtcgccgacggattctacgctggtaattttcccttcccttgtgctcgccctactccgccgtatgtgtagcacgggtccgtgtgtggatttgtacgcgggcaccacgctccggtgagcttggtcgtcggtgggcagggcgcctccaccgcggaccggcagggagaaagaagtgacgctgcattcggattgaggaagacaaccagtgaccgtcgatgcgtaatgggcggcctggattaattggattgtaccgcttcggttggagcaatccaagccgttggattggctaaggaggggtgggattagatccgggttccggacccttggattcagatcgtgtggtccatgtcgcgtaatggttcacttaaagatggatctaatctaggccgttcgtctatgatccgatagatgtgattcatggataccccttcggccgtgcgaaggttgcaaaaaggcccttgacctttgtctaaactaacccgccatcctcacatgcataaagataattacacttagaccctgtttttcacgatttagcccctgaactctcgggattttgtttcctcggtccgagcactattaaaataaatcccagaaattgtttctaggtataaaaataatatttatatgtctagaaacttgcaaaagtcatatcttacccattctaactccgaattgacccgttccagttgcgttaggttcgtataaatattcactatgtagtaatagcattggttataccatatctcag

SEQ ID NO: 148313 - DNA, 1132 bp, Zea Mays
gtttgggtttgtttccagcttcgcatgggtctcttggggttgggtgtattgacaggttctcggtttcttgatttgcagcacccagtttcttggggatcaccaggtgcggccacacgcggccaacagtggcgctgggtcaccacgagcaggtggtccacgaccatggttatcgatgacggcgcagggtaactgtgagcagcagctggccagccacacagtgcccacaacttgcaagatgttgaacgcgtcaacaatggtagttaagctcctcctacaatagtatctgttatgtctacaaggtgctcgatcaattgccacgtgcatgaaaaatcatgctacagtatgtcaagagtgcataggtatttggatttctggagcttcaatttgccctgcacaatattgcctcccaacggcgaggtttttattacgttgagtttgatctaaacacatgtgcagtttagaagactccatgacaaatctattgagaagacagaaaaaggctatctagaaatattagtggtagtttatagaactacaactcatcgcctttgtatatgtatttctccattaaattgttgacattggagtgaagtaatttttagatgaaaaatagcatagctggtttcagagattgatttataaggagactgttgtttgttgattgttactcgagtgttgatcataaattgttggtggtatctagaccaggcctcattgttgttttttatgtgtatgaaattagatttacttagtgaaaataatcataaataaacaaatgtaattctttgtaacttccagacaatccaattgtgtcaatttttgaactgttgataaattccatgtgatgtaaacacaaataatcatatctttacgcgttcaataataactcagcctgaactctaaagcagattagttccgttatttgcaccaaggtcttgcagtatcctaatgttttggttgatcggtgtttacaacacgaaagttagccttgccatttcacgtcaccttttcctctatctacctgaacccacctgatacaaatggttctttcctctatttacactaattggaaatgtttcttggatctgcatgcaggaaggtgctcagaattgtattaagaaaggagaaaaat

SEQ ID NO: 148314 - DNA, 354 bp, Zea Mays
ttctattccatccactccaggcatgattacgtatcagtgtgccgacccagcctcgtcgttgggagaaatctccgtctcgctcaagcccagcctcggccaacagcaccaacagagaaacgcacgacacgcttgctctcccatgaaccccactgaagaaaggaaggctacaaaaaccacaaggccggtgtccaatctgctttttgccttcccagatgacgcacatgccagattaccacatactttccaccatgccgaacgctatttcaaccactacgactcgacatacttataaacgtctcatctgcacccctacacgagatgggctcgggcatgcttccgagccccccaacccag

SEQ ID NO: 148315 - DNA, 397 bp, Zea Mays
ccctatctctgccccgttgaattgtaccacccctggatagtgaaaacgagctatagatcccaacactgtgttgactggtgtccggtgaaatttgccactccatgccacctccacccagctcctctctactgcagggtttatgaccctacgttggtccaagggttgtgtcggtggaactctaagggaccgccgaaacctacaaaattgtaaattgtgcactggtaataatatcaatccaacaaaaatagaactcatcgtcaaaataaaaatacctgaagtttgttgcctgtgtcgttgtaacaacctcgtcatcggcctctccatcgtagtcctccccatagtcatcatcatcacgcatcggtgaaccttggcctgccagctcgtcctcctgcctagg

SEQ ID NO: 148316 - DNA, 414 bp, Zea Mays
gtcaatagaggtccattcatggatatgctctttgcttggcactccatgttccttatgctgttcaatatattagttgttgggaaattagttttgcttcctacttaggttgtctccagcagatcgtgcatatggtcgtgcaaaatactgttttacactttagattgcactgcttacatagtgacgtttgaaataggagataagatgggagataggatgagtaagctgttggagacaaccttacagtgagataatagtatactactcatataaactgaaaacccacattcgtgcaacatagaacatacccactcatggacgcatcatgcatgcacatgtggcatgcttggatagcatcaccattgggcatttggataatgaatctcatgctaagtcgtacttaatgtgagctctgtg

SEQ ID NO: 148317 - DNA, 760 bp, Zea Mays
ggagagtgtatatatagaagtattctccaacgacgaagagaacatatataggagtatactccaatatggcaatggcgtgcctgtcctgcgagtctgcaagacaacattttgtttctctctgttaattaggtagcctgtcaacgtctgtggttccctatcactagcgatttcaattaggcacaggtcccagatcttgatctgcatctgagtcatgcgaactgtgcccctaacacagcgaacaggcaaccgcccctgcatgcgaactttcattctactaaagaacacttccattttgtcaggtcctatcatgtctacatatcaatcatgtgcccctgcatgcgacacggtgaagaactgaagatcggctcgtgagtcgagctacgctcagttgttgcactacgggtgcgactcagaatttcaacagtgaagtgatctaacgtttaatatatagagacggcatggataagctgtctagacaattagggccaggtgtttaatgtatgtagagagagagagccataagtaatcgtcgaggacttaagggctgtttggttcgtcactaactgtgccatctaaagttagatgtccgagttgaagaactgacggcctagaaacgcaccagcaaaagcctggctggccaaagacagcctaactgacgggctcagcgtcaaccagaacatggtgcaacaatacagacttttttgcatggacaaagcaagagggataatatccaggatgcaaatatagatcccctacgttt

SEQ ID NO: 148318 - DNA, 566 bp, Zea Mays
cgactgaaatccagccagggcgcgttcggtcggggcttgttaaagcagccgactgaactcaaccgatagagatccggttgactctggtttgaccgatcttgagtttgtcgttttgtgggtatctcatagattgagtttttcagaaaatccgatctgtacacccaatgggtgcgcccaatggttgtgtatgccatcttgtctgcagaatagttacctgaagtgacggggcataataatgcgcctaagcggttgatttactggtctctggtgccgtgttacgccaacggatgacaaaggcatgcagtttcttggaaatttaaacggctcttgaaggcttgcgactgttcgtcgtacggatgagagccgaaagggcaccctttggcttctttaaataaaccgtccgtctgcggcgtacttctgcactcgcctttgcttcttctttctttcttctccaaaaactccgatggcgggaaagaaggacggcaagggcaagcgcggcaagagcagcgagtggaagcgccctccgaccctgccgtcggaggacttcggagactccaagttctcgg

SEQ ID NO: 148319 - DNA, 596 bp, Zea Mays
aactctcactcgtctggtcactttagaggccagtgacccatacgctaggagtctgccgcttgctgacgaggctaaggtccctccgagtcgtgcctttgatatcgttgtcgttgacatcccctcatcaagcaacgtatcaattctccctgctttgggccttcctttgttcctctccaatcttcaggtaaatcaacttccgtttttaccattcacgctggcaaactagcttttttgcttatcttttcataattacaggaagttcttggttctgtatctacccaactgaagtcctgtggggctcctgtcccgaccaagtttcatctttgatgcagtggaactctctactgcttcaaaaacatatagatgatccgaaggcgtcaaacattggttagtgaactttcttctgctgctttatcatatttggctcgatgatgctctgatattgaagagaagtatacccagagccaggccgacttgagccaaaactctactttcttggacggtgctcgctccctgaactcctctctaaatgcacatcttgactccgagaagatggcacatgaggtaaactttcttggctgcttctgtcttgcttc

SEQ ID NO: 148320 - DNA, 450 bp, Zea Mays
attaattatatgctcagcagaatcgctaggcaaggcacacaccagcatttattgcgtgctctcgatccgtcgcctccaattatcaactcattaaagtgagtactaattaattgaaaaattcagaaggatgaagaatcgaagacgaagcaccacgtcgacgatggatggatttgatgagttgttgctacttgttagttggagggtacccttcgctcgcctagctaggaagacgagtagaaaaatacactccctgcgcatgcggatcgtcgattgatggatgcatgcatgtccatgcatgcgtgtagcagacacacggcgccaagcctggccaaacgaacgcgagaggtgctcctgcgtcctgcctgcctgccctgtagactagagtatactccattctggttggtaggctttgcacatcagtccaatttccatgcaaccaaacatgccggc

SEQ ID NO: 148321 - DNA, 585 bp, Zea Mays
cgaacactgacaggcctctgaatatccaaggttgtaccagcttccgggaaaggcgccaccaccaatgtcccagcaggagcaacatcagaagagtcctcaaccagcatatcaagcatagcacttatctctgcatcactaggatccaaaggcacctcaaagtggacctgccgttcatcatcaggaatttctccaatcgaagcaaccaaagcactaacttcttcggtagagggtcgcattctaaggcccaaaccaccatcagcagcacggggattcgacacaaaatgagtaaagaccttggaaggaggcaggttccagatcgagtatgcgacaggggcgccaacatttgataccttgcctctaagtatcatttcaagccggttcaccaagtctatagcgggaattcttctgttggtgacccaggttgagtcagctagacctcgatacagataggccgggtatgccctgtccttcaaaggctgaatgttcttgaagacaaaatcagcaaccacagcctctgcagtcagacccctctccttcagcagtccaacttcagccagcaaagcccctgcctcagccacctcctgg

SEQ ID NO: 148322 - DNA, 862 bp, Zea Mays
tgtggcatcatatatttatataaatcgccaaggagccataacaactatatcaagctctatagtgcttgaataatctgggaaactaaattgaaatacaacagaacttggataagttaattctctgctctctcctcatgcataaagttttacccgaagtaacccgaagatatataatataatgcatgaaaacctttttggcatagaagatatcacaaattgggattatattaataagcaaaaagaccttaccaaatgatttaagatcagaaatatcagtcatacattgctcaaccagatgttagcacattgctctctttgtcgctggatgacatgaagcaaactatgagataaaaggatatgtaaccgctagcaacacgatgttgcgagtataccgagaggttactctgaaaaaatttcactatgttggtgtgaaaaccatagtgtgttcccgtcgaaccactttactcgtcctatctagaacctctatgcttgtgtcgcatacatctctcggaattgtaaatacttatagtgactaaattgacttgggatagtcctttgacaagtttggtatacactgtaaactaaatggtaaaggtcggtcctgaatggacacatacctggagtttatgtagcaaaactacattgaattccaccctttgaaatgcttaccgtaatatatctctgatctaccaggagtaagaagagtagaaaatagccatgaaatcccatattaccacagagcttgaagtgaaattgtgcatttatatgtcattggtccttggcgccggaagatccataattcttgacctataagctattggtgatggtaatttgtgatagaaatacgaagatcttgtagaga

SEQ ID NO: 148323 - DNA, 588 bp, Zea Mays
ctaaatgaagggttaattataaagaaacttttgtgattatagtaaataagataaaaagtccactaaactaaaaaattgtgtgggggcatgtcccactactctaaacgtcggtccgcccctgcctacaacccagactactttgaaacatatgttaggctaaactgtgatcatgcatacattatatatcttctgaatttctgcacaaattaaatgatagaaacagccgtggattgcgccaaaaagcaagcaggggaaagctggccttttcgataggtaagttctctatctcaaacttttgtactgaatctccgaaattctcagatatgggtgtcctgtaagatctctttattataggcaatagctattttttaattatccggtcttttgtactaatatgattgcttatgtgacccatgaggaacgaagatcaccctcggaagtcagcagatattaccaccactcatcagttagttgctttctatataatatgtatagaaaaagtgttatcatgactgctagaataattgtgataactatgcagcatgtgaaaaaggaaataaatttcacgaagttctggtttcttcgtca

SEQ ID NO: 148324 - DNA, 397 bp, Zea Mays
atgggaagcgtccttgagagactaccaggtgctgatccaagaactgccggagaacgaggacgtgaagaaggctctctctgaagtcgaagccaagctcaaggaccaaaggaacggggctgcagcagccagatctcagcactgacgtcctgtaataagtacatgtcacttctccacttcttcttgcagctcgttttctgtgtttataaacagggaaaatattcaaaaccgcctgcagaataggagtgttggattttgtttatacactgattcaagaaaactacatttaaaagtgcgcactcgtattccttgggctaacgatttcaagtgtcggtcctgacaaacttcagtgccctttatctattcaaaatttaactggttaataggtggtagatgggca

SEQ ID NO: 148325 - DNA, 898 bp, Zea Mays
cgcgccgccgacacctcggcttccgcggctgttcgaagaacggccagggcagacgccggtgctccttcccattccccggccatctctatccccagcgtcgaccctccatcttcctctcctccccactcccctcttctccaggccggtaacggtcgtagtaatggccaacgccattaatggcgtttgatggttgtcagccgccattcatcccttcccagcgtcttctctcctccccactctataaaaccccggtcgcgcccttggagccttgccctaaccacagccacctcgcgctctcctctctcgctgtgtagctcgccgacagagccccgccgtgcccttcaccgccgaccggagccagagtgtcgttcaccaccgcatcgttgaagccgcgaccccggtgaccaccactgcccatgccccttgttcggccgtcccgctcccactcgccgagctccttgcgcacaaaagctagccagaggtagaagatgaacattttgtgttttagtccctggctttgtgtagatcttgttcaggtatttttcagttcagaaaccattaaaaagagatccatgtttctttcttgctactccctgatgtatacgtttaattgtgaaccagcacctgcagcaatatttcgatatgggcattttatatttcgaatataaataagttatgttatgatttattaacttcgtaatctagtactagaaacatttgcaattaacttctcgttttaacgcatgaaataatattatgttagtagttgttaagtgtagtgttgtagataagaaattgaaaggggcactaggccacatcttcttcgtcaggttaaggtttagatttttgctagtcatgatacatgtgttcatacgcatattgcttattcactacgaag

SEQ ID NO: 148326 - DNA, 385 bp, Zea Mays
tgttcatgtttccttcaaatcagactttgctagcagatacgtgaccgtgtatgatgatcttgacatctctgcagtcccatcgctatcatttattgaatggaaacagaaattatatattacgctgaagaaccgtatctaatcgttgacgtggtctgctgaccggttcggtcccactcacaactagggccacgtctgtccacaacaaatcggataaaaaataggggattattaaattatttatatagtgaatttcgagataggagttaagataagataggtgctggagacagtctcaagtgtccatccgttagcattagtttgatctagaccggtcgatatcaattggatttgtatgtcatgttagctacctattttttaaaccgtt

SEQ ID NO: 148327 - DNA, 375 bp, Zea Mays
atgcatctatgtagattagacaactacagatttggttcatgtaacttgtgaagttgatgtcaactttgtgtacctcattgatctgaaccatttgaatcaatgctatttttaactgacaaataaatgtctattcttgatgatcaactaggatgaatcaatgctattatgatgcatctctatagattagacaactacagagttggtgctgttttaatgcagtccgggcacccaatagcttatttgagcaaggctttgggaactaaatctcaagggttgttcacctatgagaaagaatatctggcgattctggttgctgtagatcattggcgccattatttgcagttgaaggagtttcacatttacacggatcatcgc

SEQ ID NO: 148328 - DNA, 696 bp, Zea Mays
gaacttcggcaccagtcatcattgcaggtgggcaatttgttactacgacacctttcgtaaagttcttgatatctgggtggaatggatggtaaggagggagaaattgtcgatgtttatcgaacagagaatatttgccacccttcttcaaccaaatgaatctaagagcttccttgcaaactaggcatgggaacttactatgaatacaccagacgcagaatagcccatacgtcggtaagtcatgcatggagtactgatacctaaacatgcattttgaagtttgtctttgtagctcggtaatatgtttatacccattactcccaagcacagaccaattcattaatcaaaggctccatgtacatacccattttaattcccgggtgtggaggaattatgaacaacacgactatgttctatctttgaaagcatacaccggggggagattgatggggataacaaacatgggcccacatgtgtacggggcaacaatcattccatagggattgaacccatctatggccagcgcaacacgtacattacaagcctattcaactttctcatggtgaatgacttcaaagtgtttccatgcttcatcatcgtatgcatgcaccatcttgtcaggattgtattgtttgccatttttgtgacatgtcatctatttcgcagattcctcgttcatgtatagacgctggattctcg

SEQ ID NO: 148329 - DNA, 588 bp, Zea Mays
gtgaaaacaaagatgttggagaagagtcctcaagtaactgttttcttacaatgatacaaatgctacagtacaacaagtccaatatgtaggaggatatccactactcttgaaactgacctgaaactgaaagggcatcagaagaaaatccaattttcctagtccagatatctatcacaaaccgttgtgctgctgtcctgtgaaatctgacatcattggcatggcggcgagagcgccaccgtgtgctgctgcatgacgagcacggagcccatctctagcgactcgtgggacgccaggatctctcccacaggccctatttcgctgccggcctccgaccaccactccagcccggccatcagctccaccggctgccgaccgccccgccccagcaccaccagcgagaacattccggccatcccttctagcgtctctaccacgtccgcggggctctccaccaccttctccatgtacatggccagctctcgcgacgcgtagttctcgtagaaccgccacaggaaccgctcgtccacgtggccttccttgaacggcacgtcaagctcgtcgccgccggccgccaccgccgcggcggcg

SEQ ID NO: 148330 - DNA, 639 bp, Zea Mays
aaggagttcttttgaatattgctagtttctttctgctgattcgtagttcttgctcttctctcttcttagtgatttggaagatatatcgggccggggtgatggatgaactcaacaaatggcggcatttgcatccggtaagactgctaagaactagcacgagacctgaaaactagcttgagtgcttcgatctaatccttggttcttgcaatggcggccctttcaggaccctgaggacgagctagcatacatgtacaggcagcaagaagaagatcatgccgggatgcaacagcaacatcaccatttcgctgagcggctgcccgagcagcagcagtactacacaccaccaccaccagcagcagcgccgcctacgtcctctagccccttccttcctcgtcttcaccacacctccagtttcccgggctttggggacccggcagtaccacctcggctgccgttccggccggccaaggaagagccagggcagccgtcatcattgagcaatcgcatcctctccttcggcgggcagcctcctagcacgctcaacttctcaggaagcgattggacggaagccggcgttgaagcggtgcaacagatgccgccggagaggcggagccggatgcactggaacacgcaggagca

SEQ ID NO: 148331 - DNA, 547 bp, Zea Mays
tgcctttatcatccgccataaagaatacgagaccacctaaccacccagacgctcacaaacgaacatgacttcatcggagtaaaacattcgttttaccatcacttggtgaatccttcacgaggaagccaccgatggccgacccctctttggcctataaaaggaggaggtcaaccaccagatgaactgacggactagtgagaggacaaaccaacgaaaggaggaaggacacattgatgaagacccgaagactagagccccccgccaggctaagacttagttatgactccaactatgtagcccttagctccacctcatccacacaagagacttgggagcttctactccctaaacccctacttgatcaacaaaggtgtcgataacgtgagccaccgaagactagatgtagggtcgttctgcctgaaccgatataaatcttatgcccaccacacacaccgtctagagcctagaacacacacaaatttacttgtcggagctaggtttgaaacactaatagttggtgcgctaggtacgagcttgcacgttcttg

SEQ ID NO: 148332 - DNA, 386 bp, Zea Mays
acatacagcaactggacaagtctgcacatggcgtttcgggaaccacgagagggatcacaagaagacaatagcgagtacacgttggatccctaagaaaggaaggcaggccgtagtgttcgggacatgtcagacagcgtacttagctgtcctagctacaaaggtcaattatatgtgatgtaaaagcagatcatctatagtcgcaagaaacgaagacatatataattaattagtgtttgtcaggatctcgatcaccgtatattgccagtacgacgtcttgttattttagctttgttctaagttaaatataaaactcgcctaactttaacaaagtgtatagataacactcaaaatattgtctgaggacgtatctattgaacttaggatat

SEQ ID NO: 148333 - DNA, 477 bp, Zea Mays
cttgaaagggatgcgggacgcgggcatggcaccggcaccacgggcgctggtggctagggcatgggaaacactagaacctggaatcgggcgtgcaattcgggcgcggggacggggagggatccaggccttagggttccgcctcctccgcgagcgccgcgtcgggattttaagcaagctcagtgggggagttcggggccgcgagcagggggttggggatttggagatatgcggggctgcgggtggaaggcggaggcggaggcaacgcgccgacgcggggctgaaaatttggggaccctcccccgagtttcggaatacggggaattgtggtgttttcaatatttcgaacgcaatgcggtggtcggaggaggcagggggcggactgcggaggaggtgtggtggggaagacgacggggtgcgagtgtgcgacgcggccaggtggggtggggccgtggcccgtggggggctgagggaacatgg

SEQ ID NO: 148334 - DNA, 2437 bp, Zea Mays
aaaggctctaaagaagactttcaagaaactagaccacgatgtaaatattcaagactttctaggctcgcggtaattctgtcattttaaaaaaatagaatgctcgtagcaacatatagatgactagttcgaaagaaatcgctaacatattgtttctaaatccactgcagggttcagacagtcgaggtagaatatgatgagtcgacaactgaaagcgagttatgtgatttcatttttccccccccttcatgtttctaatgctatttggatttcaataatttgacaggagctatcagcagagcttgtctcgttgcagggtcaggtggcggagcttcaaaagcgtgtcaggtgaataacatcagctcataacatattcagcataaggaactatattgataaatgctgtaggaatgcatatctcttttgaaatctttccacttagtgtcgctgtgattttcctttcatgacacatgatcctgttaaatgttctccacgttgtgaatctatggcattgattagcctgtcacagaaataatgggcaaaccaaaaaaaatttgagagaagtgtaacggcaaggcgatttgttttgttcttcagtgattggagcgatcctgagaaagttgacaatatcgacaatataagagcaatggagcaatctctcaaagaaactattaatcatatccaaatccataaggtacacatctgtaaccttatggttaactactttataatctcaatatctagttaacattattatctgaattttcaatatcaaatcagattagttctgacctttgcatctgtttgggtctctgcctctccaggggaacttcggaaagcaacatctaatcgggctacagtatgctgctacccaggtaactaactaactaacctaccacagcttcaggtgcatgtgacatgagacgttaattttgttcagattaagatgttgctttcctgtcatgccatgtttcagttccagaccgacatgcagttgcctctaggactgcccggcgagtcaggcccttcgtcgtggttccaaaacggcggcgctgatgggcaacaagccatgatgctaacggacgagtccggcctgctccatcagaggtgaattcaagctccgagttgtgcattgctctgacgaacaaactgcccttcgtcgttaactgacgacgagcaaactgatcttggcgcagagacattgcgcagggctatccaagctacttcagcacggtcaagcaggatcccgacaccggtggtagcagcagtgatcacgggcaggtggtgcttcaccatccgcagccgcccgacttcagccagaccgagtgcctgacgtcgctgcacctgccgtcgcagcagttcccgtacccacccttcgaccaccacggcctttacagcgaccgaattttcaggccagacgcagttgagctgcacgccggcggcgtcgccagtatggactttctcagcggtcagtacgacttgccgaggcctggcgatgatgccagcttccataactgggcgtcagctgcagcatgtagtgcaaccatgttcgaccagcaacagcaacagcagcatcagcatcaccagcaaccacaatcttcacctgcacaagtgagtgcataattacaaaaccaatctttcgactgttcgttctgccgcatgtgaacttgcttatctatctatttgctgtcacaagtttatagctccgctgaaacattttccgatacatatttttttttctcatctcacattagttgacccatttttatccatgtttattaagacttaattcaatccacagtccatatcaaactgatttaagttctgagcaattctatgggcgatgagagctttccaatcattgtttaaattcatttattaaaatttaaaatcatgcagaaagaatgtgcagttatgatttttttttttttttttgcctttggcattatatgttttactgatttcggtatctcttgtggaccatgactgaatctctaaccatcagcttcctgcagcaacaactctagcaactgcctcgttcgatcacgccgtttatcacagttcatctcagcaccaacaagtcatgatcggttgatcctatatatggtaaaaaaatcggagataatattgccctccaaaaggtgctaccctaaactaatcatcaatgcaaaatgtgtataggcaacactgtcgatgtaaaatatatatttattgtagctaattctttcttgtaagtatctatctgtctcctgtatactactggtatagctttcataaaaggattgggcacttaactattagttcataggcattcatctttgcatgaatgaatatatttgaaattttggccaccatgcatggcctttcctttattgtactggttcacttgaatctctctttttaatataatgatgatatgcagttctcctgcatgttcgag

SEQ ID NO: 148335 - DNA, 508 bp, Zea Mays
cggagagggagagaccagtctctcctcgagcccaagtacgaaagcgtatcaaaagaagaaaggaacaaggtgggggaaaaaaactaggggggccgtatcatatatctggtgccgaaaaacgcccttggaacggagaaaagcaaggtcgcggtgaagtgtgagcagcctctcctctagtggttctgctgggacgacaccaccagcactgcagtaccactactagttagtaagtacgctgctgcacacaacaatattcttttttctctccataatactacaaatactgcagtatcaatgtggctgtccctcctcttttccgctgatggagttgagatgttctgcactacttttccaccccgaatccggatggcacccgtaccgtagtgcttgtatgccttctttccctttcttctacttgtacctacatgctactacaggtgtactacgtattttgctccccccacttggttttgcaagcaagaccagcgtaaaagcagaggagactgtc

SEQ ID NO: 148336 - DNA, 494 bp, Zea Mays
taaaagagagtattgatggttgggatgagtggtgttagcagaatgatatctacattcattgattataggtaccagcacctcattctttacaaaaaaaaacaggtgcgaacttggaacattttaatgtgaggaagatgggtagatatggttgctgtggcagggcagggcacccaagcaaaagcatagatgcgaatgggatgaatctgggatagctctcttcccctatttattaaagttggagggatacactgcttctatggtttggtctgtgacgtcgtctcattaaaaaacatttgcttggattggatgtcctttcctttcctttctcattagagaacttacactgagcacatgctcggctgatgcgcaatgtatgtggcaagcaaaagcaaatactatcctattaatatgctcctactaacatattttccaattaattatgtatgttggcttcttacagggaatgaatatatcttcaatttctatcaagtgtg

SEQ ID NO: 148337 - DNA, 384 bp, Zea Mays
aaaaaaaacaaaacaccatgtattgccaggctgatagagttgaaatgcaaatgataaggttgcggtcggatcaatagacatatacaatactttgttcatctattgccaaactggaaagtttgaacatttttatccatgtaccctgactctgaccgggagaggtgacctgttcactgattcggtcccaagtgtgcttgaaactctggcggattttgcccatcaaattgaaacagcgtattgagacggcaaaacatctgtcaaatttgaattttatcgcggagcctactgctcaaagaagcacatacaacgtcgaaaatagaaacacatagtattattgttctaaaatctgatacatggtctttggagtattattttcgttgtttt

SEQ ID NO: 148338 - DNA, 880 bp, Zea Mays
tttacctgaaaatatgtaattcaaccaattatgatcaatataataataatagcatctccttctatatattgtcagcaccttaccaaatattttgtgagagtaaaatcattttgaataaacaaatgtagctaattggttgtaatgtttgttttctgcagtcctaaacaagcattcaaaatacagcctcagcaagcttttagatgttactaaaaatattttttaagcaaagttccttcagatacaataacaaatgccattgtgctgaataattggatgatacctgtgcaatgcctcttgaaagtcggaaatccaagcttatagattttgatgactttgaaatttttgtagcaaagagtgcttgatccagtgaaatagtttcactttcatcagtactagctctgccagttacaccttcagctcggccatttatttctttcacagcttttgctttgtttttcttatctagcttcggtgccttcttgggagcttgagtccctgtgatgtctttcactgaactgctagagactttattatggtccgcttttttattataattcgtcaacttggtatcaccatttgatgaaactttggaactgccaatggcctcttcacagacaacagtttttgtatcagccattgtagttgcagcgaacgacgtgtcagcaacacgatcttctgagataacaactttggtatcacaagttgatgcatccatgacatggtccgcagactgggttgtcccgcaaattttaacagaagaaaccaattcttccagatcaagcaattgtttcaagtctgttgtgtcacggacagcaatttcatatccttgcttccaagcagctagagcatcctcttttttatctaatgaagacagtgcctt

SEQ ID NO: 148339 - DNA, 493 bp, Zea Mays
aacaaattgaattctaaaaccatgtattcaaaatagaatcacctggattaaagttcttgtttctcctttgccttatggcaatttcatgtccaaatgtcccttgttgatcttggtacatgtagagttcttcaattattttgtcttgtgtttcttcatcaccaatcatctttgtaatgcaattaatcactccagctctaaaggatccatcatgctcaattttagacatctttggataataaaagtaaggattcaagtagtacccaactaagtgaagtggagttttgagcttgctatcccaccgcttatcaataatatcccaagcaactttgtagcggctctcatcattgtcaaacctctcagaaatttctttctttgcctcaagcattaatccatgaaagaatcccattgctggtacatcactgtccagtctcctcaacacatttgccaatggttcaaaaaaatttacagctatatcaacatttttccaaaaggt

SEQ ID NO: 148340 - DNA, 401 bp, Zea Mays
ggtgtttggaatccggtgtttctaaaatatctaatacattcaccatccttctccttctgggggttatggcaaaacttttctctgtcgttagcactgttgcttctgtcgaaggacttagaatcccgaacatttttgttgcttcttcagttttcgatctttcggtcttatcttcgtcaaccttcgtttcaaccagctcggtcgaaggtgccttcggcactgtagtcggcttttcaatcttctgcgtgggaggagcaggttccttcggctcagtagctgaagacgtctcctcgccaaacttaggcactacgaccggttcaatgtagcatggtcggtgggtaaggaccttcaattttttaccgttcggcgcaggctcgcttggagcagccgaagcaacaaccttt

SEQ ID NO: 148341 - DNA, 517 bp, Zea Mays
gtgaagtgggagtggatgtcctcaacacgcctttcgatgttgtcacaacgtccggcgaacttctcggagagccgtgcttccatcaggcgcatttcctcgagcacctggcggttactggcgtcggtgtactccatcgctgcggctgtggcccgagtacgccgtggaccgttgccgctcggatccagaatgcctaaatctgataccagattgttagcacgtgtggaggagaggagtagcagaggcagggattggaggtagaagaagggtattggggagacggcggcggccaagacagccaacccccaggtactcgtattatctttctgttgtttgatgccctctctgtctcagcgttcccaggtttatacgccttattacaactcagcccaacaggcctacacaacccactccggcccaaatactttcacgctacgacgctttactcgttgtggacgcgcagcggcttcctcctcggactcgccctccacgtatttgtctgcacgaccgacgtcctggc

SEQ ID NO: 148342 - DNA, 737 bp, Zea Mays
gaactgctgcttgtacgtgagcaataacaataaatttacccacaaaccgtacttctcgttcggtaaataaatccatgtgtgactcctataaatatagtgattttttcatcatattatatacagagaaactctatctctcctctcctctatctatctttacgctttacacgattgagaccaagaaaagccaatacctttagctcttgccatcaggattattataggctaactctacggtgcatcctaccaacatgggaccaagggctgaccacccaacatatcgaaaccttaaaaacgctcttatcgggtatcgtaattaggggtaactggatcacacacctaaacgcgcttaacccctagagtaccgtcatacatattccctcaggtcaagaaagtatgagccatgattcgtccgagccctcactcgggggtcactcgaaactccgcctcgctcgagctcaccctcaggcaagggcagcgctcgaggaaatcctcgtcccatccgaggtcccctctccacggaaccgtcgtttcaatgttatgaaaggcatgcccgagaacttgagcattcaatgtgtatacctaccccacgtgacatcgtgtcaaacaggggcgataggactgcagtcccgtccactttcaccaactacgatgacgcatgcccgagaataacgactactgctcccccatgtcgtttgccaactctgaatgggaccctcgtacgtcaaagcatggtc

SEQ ID NO: 148343 - DNA, 287 bp, Zea Mays
cgcaccgcggggaagagagtgcagagaggagagcgaggacaaccaaacaaatcgagccggatgttgcgggaatatcttcctggttgatcgggcgggaacggggaatctgtccaagtgctctccagatctggagtcaaaggatactgccctatttggtctgtccatcccagcctccaagaatacaagcagctgtagaccacgaaactctgcttcgatagcaggagcagcagagagagagacgcacgccggctatcagttcagttcttctgggcatctctcaactcaag

SEQ ID NO: 148344 - DNA, 913 bp, Zea Mays
agggaaagcatttgagataaaggatctgggactacttcggtatttccttggaattgaaattgctcgatcatcaaagggaattgttctctcccaatgaaagtatgtcctcgacttgttgacagaaactggaatgttggggtgtcgtccatgttgctctcctattgataaaaatcaccaaatccatgctgagttaggggatcctgtcaatagagagacatatcaaagattggttgtgcgattgatctatttatgccacacaagacctgatatatgctatgcagtaagtgtggtgagtaggtatatgcatgatcctaggacaggacatatggatgttgtttatcacatcttgagatacttgaagggaactcctgggaaaggattgtggtttaaaaggaacaagcacatgaacttggaagggtactgtgatgccgattgggcaagtagtagagatgaccgaagatctacatctggatattgtgtgtttgttggaggtaatcttgtctcatggcgaagcaagaagcaagcagtggtggctagatcaactgcagaagctgaatatagggcaatgacattaagcatatgtgagatgatgtggttgaagcgtctattaggggagttgaaagtgttgaggaatggaactatgagactccactgtgacaatgttgctgcaataaatattgcaaacaatccagttcagtttgagcgcactaaacatgtggagattgacaagttctttatcaaggagaagatagatagcggggtattaagattagagcatatcaattcttgtaatcaattagctgattgccttacaaaaggtttaggcccaagtgagaacgagtcaatatgtaacaagatgggcaattgggcatggttgatatcttttgcccatcttgagggggagtgttgttgg

SEQ ID NO: 148345 - DNA, 707 bp, Zea Mays
ctttggccatggcgcagataatggttaagctaggctaccaggctaaaccttcctcgagcggagcgagagaaagacaaagaagggtatgtcgtcgcggcaggcgatcctcgcgtgcacggccaggtctgagcgcggcatgtggtatagaaggatagcaggagatcatgatcgtgcgcgtgcgagtttccatgcagaagaccgtctggggatgcaagatccctcgtcgaagatgcaaagctgtcgatctgtttccagccatatgcaacctcgccttcacctctacaactgtggtgagtcacccgatctaatcatggccccgcggtgcgtagaacctcttgcatgaaatttagttcgctggaaaatctgggtcgtgggattggagttggccggcaatggcaccgccgccctaggcgctctcatccctcgcgtccgtcggccggagtgaagaagacaaccgggatccattgatccgggagcgtacggctaggattagatcgtgtatacccgttcggccgggacgcttcggggccgttagatccttgttgaaggacagggatcggatcgcaccgtaataaaatcatggcctttggatctggtccgtgggctggcattgcatgcgcttcatgatctaatctggacggtcaaatagcgatcggacggatcgagttagacggtacaccttcggcttgagtttttacaaaagaacc

SEQ ID NO: 148346 - DNA, 610 bp, Zea Mays
cacaacacgatatgggattgagccgatacttcacgaataggtttatataggtcaatatgagtgaagtgtgtgcttggtttgaatttaggcgaagaaatagggtttggggcactcggctcggaaacgatcgcgcaaatcgggaattttggtgaaatttaagcctgggatctcggattggcgtgaaatttggcaagtaggttactggaagtgtggtgaaggtgcctgaaaaatttgggttcaattggagcaagtttggctggcttgggcatttcaccgaacacttggtgtgcggggagctagggtttcagggaaaaggctgtttgaggtgggaatgccctcccgaaggagctaaaaatttgcagggatacacaagagagatactgaaactcataccaccaattggattcacaggaattgacaggaattcaaaaagatttggaaatgcatcaaagggtggtgaactgctaagaacacagagagaaagagagacaggggagaagctgaccgagagagagggaaggacgagcccaagtcgcaagagatcgccggagcgcggccggagacggaggacgccggtggagatcgccggcgggggagtcggagtcgccag

SEQ ID NO: 148347 - DNA, 313 bp, Zea Mays
atatttaggagatatgtggcagtaccaagagcagcagcctagaaagtgggagggatgctggcttggaagagaagcgtgcggacgacattattgatggagcgaatgatgcgttcggccttgccattttggggggaagtgtaaggacaagacatgcgtaaaagaactccatgggtggagaaaaaatcgcgagcgttgaggttatcgaattcgcgaccattgtcacattgaacaccctggacggtgacaccaaattgtgtgcgaacataagcgaaaaaatttgtaagggtggaaaaggtgtcagacttaaggcgca

SEQ ID NO: 148348 - DNA, 391 bp, Zea Mays
ggggtcttcgctgagcgtctagcctcggaggcacaatctagtgccgtcgtctctcgcctgacttctgaaaagaaggcgttgtctcatgagctagagcgctcccgtgctgactcttcagacctggcgcgaaggcttgaggcggcggaggccgagagtcgcaggttgcttgcgctgttggcggagtccaataaagagagagaaagcctttgccgggaggtaagagaattaaaggcctcagaagtagagacctactcagaagaggggcacaagagagaccttttctccacgacaaaggagctggacgatgcccaagagccaaatgcgtcagtcaaagggggccattcgcgaggcggcggaggcccagcctatcgacaccaagggtgaagacttc

SEQ ID NO: 148349 - DNA, 859 bp, Zea Mays
gagataaatctttcactctaccaataaccaccaacttggcactgcgaattatgcaggtatatataaagaaccggactaaacaaatggtttgaacatctaaataaatggttacatactaaaaaccaatcattcttgatgcagggtttgaaaatatcccaattctgctttgtgggaacgaggttcacctaaagaatagacaggtgaaagcaaaacaagtgatgttccacaagaaaaaagcatgcggtactatgactcagcagctacaactttgagaagcctttctttgtaccttgcctggaagcttgctgggtgagtctcgtttagtagccttattttttattttactggaccaggaccaagccaacgtattttgttgtgtcagtgattccaattgtctctttgttgaaacccctgctctcgcttctcttgatgtcacaattgacattgctacccagcagcaataagtgctcggaaaccataatttctcactcatttgttgaccctgaatgaatcttcatactacttggccttttcaggcatgaagccgaactggcaactgcggcagcccaatcattaccagatgacaatgacgacctgatcgagtagatgttgcattatactactttatctacatgtctcgcccaatgagtcttcttataagttctcgtgtcctaaactttgggatgatgaagtttttttagctaaccgtcctgattagttgggttccatcagatgtgatgaactagcttcattgcaatggttatttgcttaattgctttgattgccaaataaaatgcatgttttctttgtgtttttgtatttcacgaaatagtaggcatttattggggatagatggaga

SEQ ID NO: 148350 - DNA, 527 bp, Zea Mays
cgtgtggacagccctgtcggcctcttcattctcggtaagaaatccactacctgcttcgtcctcatccaggaatcgcgtggcacatgcccctttcaaattagaacaccgtagcgccgggcgtggtgctcgccgaagtacagaggtggagccgtcgtcgtcgatacctgcatatccagaccacatagggcaggcatggggccggggtgattcactgtgccctcggaattgcactcgtatgcttctcagatggggagctgggcggcgttccgtgcgtggtgggcggtcaacagaccggttgccggactagcgccgctgggggatggccctgtgccgctgtgtcggtcgcctggggaggaagatgggctccttgtcgttcgatcgtgatcggacggtggtgatcaagctagaacgtactccttcaggcggtgaatcccaaccgttggcgcgtgatcggacgggagatagtgcatcatcggcatggatgattgttaaccgtggatctcggatccagtggtccgtattcaata

SEQ ID NO: 148351 - DNA, 296 bp, Zea Mays
gcggtttgtgctatcttgctgcagaggagcctagaagtgtagatgaagcattagaagaaaagtgttggagggaagccatggtcactgaaatgaattcaattcaggataataagacttgggagcttgcactattaccacctggacaccgagctatagggcttaaatgggttttcaaagcaaaaagagaccctgatggaaagataaataagcacaaagctaggttggtcgctaaggggtatgctcagcgtgagggggtggattttgatgaagtatatgccccagtggcaaggattgag

SEQ ID NO: 148352 - DNA, 750 bp, Zea Mays
gctgccaatatcaagcctgatgctgatattgatgcattcatgaaggcatgcagtcctgaataaatccagttgtttttttttatcgtatactatgtttccatgaataattggcctatcataattaaaactaagtatggttttcctgcttaatttaattaggcggctgcactgggtgggcaagatgctaatgtggtcactgactatattctgaaggtataaattgcaacttttagcctcaaatcgagcaattttagatttgacatactcaaatctgtcttaattatttatactctacttgctgcagatattaggactagatatatgtgcagacacaatggtaggggatgagatgctcaggggcatatctggtggacaacggaagcgtgttacaactggtaaaaccttgttttatacacatataggtcaagaacatgggctttgctgaagttatttctgaattatatcatttgaatgtttcataaaggtgagatgctggttgggccagccagggcgcttttcatggacgagatctcaactgggcttgatagttcgactacatttcaaattgtgaactcgctgaggcagtccattcacatcctcggtggcacagctgttatctccctactgcagccggcacctgagacttataacttgttcgatgacatcatactcctctcagatggtcaggttgtctatcagggtcccagagaagaagtggttgagtttttcgagtctgtaggtttcagatgc

SEQ ID NO: 148353 - DNA, 2127 bp, Zea Mays
taccgccgatactcattgtagtgattggcgcccagatcggtgccaacagttatctagaagaggggagtccatgaactggatcagcttgtagaggtctctagatctgaggtcaccattgtcatcgatgagagggctcagtcgttggtcggggagatccgaggtgttgacattgaggagagcagcttgaagtagttccagatcatgtcttgcaaccgggctcagatgcggggggaggtgccttgtggtcccatcagagagaacttgatgcacagacgcagacggatttttggcatggcttgtgagggcaggaaggcgatctgtgataggaccaaaatcaagccagtcatcagaccagaaactggtagttctcccattcccaagcttgacagtggtgatggcggagtacaggaggagcaacttttggatttgattcaagtggtctccagatggtttgacaccgatctctgattgaacccaagtgacccaagaagaacaagctggctacaacatcttgtgaaccagtttcaacataagacaagtattatgagtctgcatgtgattcacacccaagcctccatgttgtctcccacggcaaactttgtcccaagacacaaggcatttcatcccagatgtatgatcgctacccggaccagaggaaggagcgacgacgtgcatctatcgtctcgataactttgattgggatctttgttgcacacatggcgtagacgagctggccgctaagaaccgagtttaccagctgagtacgaccaacggtgttgagaagcatggccacccattttacaatcaataagaaacaggtgtgtacggtgagaggggatcaccttttacaatcaatccaggggcctgggcagccatgaagcaatacatcagattttgaactggagagcatgtcattgatccactggcaccacagagtggggaagcccctagctgacataattttgtcgagagcactccaactcactgtgtcgaacgcttttgcaaagtcgagtttgataaccaaagctggtgtcctgcgctgcttgtggcaagtctggatcaattctaaagcataggtgaagtattctgaaatggaccagcctcggatgaacccagattgatcaggatgaatcacatggctgatctgatgttgaagcctggtggttagcatcttactgaggatcttcacactgcagttctgaagggatatagggcggaagtctgagggatccgaagcggtctctttttctaggataagcacaatgaacgatctgttgatcctgccaagatccgcaactctcgagtggaaagcttcagctagtgacatgacagtgccggcgatctggttccaagcagcaaaataaaacccaggaccaaaccaatatgggcccgaggtgctatctttgttcatacttttaacaacagtctaggcttcgaccccagtagggtattccgagtagagttcgtcaaacaacaagtgattggaagagattgcagcggtgcccaattttaatctgaagaagttggtgagcctttgtgcgaggtcatggagatgtcgtcgacaaccagacgttggatttgattgtggtgtagtctgatggagcatctggcatggaagtagtgagtgcaagcgtctccctgcttcagagctttggactttgccctctggcgccagtaggtagcatggtctaggacagcagaggacatgcatgattgtaaaaaagttaaggttctgtctagggtatgttcggtagagctggctgaagggctcttcaatacactaaaaatgtggttctcctggatactctaggatgaattctgaaagaagcaattttcagactaaaaatgaatctctgtaattctcatacatacaacgactgtgtatagtaaatccactgaacagtaagtcaagagatgatgctttttttcacacaccaagaattattatttttagaacataaacatatatgcatgtatgtatataggtgggtatataagcatttatgcttttggttgtggaaaaggagggagtggagaagatgcagcctagcaacccgaccaggcggcccttttcctcccctgtgcagtccaccttctcctttggctcggtccaatccattcctccca

SEQ ID NO: 148354 - DNA, 477 bp, Zea Mays
gtgcggcactgcaccgcaggagcatgtgcctgtcagcctgtggtggtagtggcacatcgcggtccatggtcagcagccggccagaagcccgagtctgaacagccgggttaagaatcaacgagcaaaccatgtatgtcgatccctagaccagcaaagccacgaattagaccaaaaggaccggaaggtggtgtacagtgtactgttatgatacgctggcccaaacctttcaggctttcacaatcatgtcggcggtggtggttagccagcttttaccgacaaccggaagcaccgacgggaaaagggaaatctccccaattatcttgtcctgggggcatggactgtaagtacaatcgactttacatgatgctggtggctagctaaacatgagtttacttacttacctcacgaacagaagctcatagggtcttcaggcccagggacagggactcgctatgaactggtactggtagcacacag

SEQ ID NO: 148355 - DNA, 951 bp, Zea Mays
tgtggcttaatagtcatggtataagataagtccacgcaacatgcgcaacagacacaattgtggctcgataataatgactgacgaacaatgcctacagggcatgcaaaaaatacgcgactcgatgatggcatccgactcaacaggagtggtccgattaagcgagagtgcgatatagcaatcaaatgacacagccaggttcgtacgacacaaataatgtgttgtgttgccagggcgcagccaatgctcagccaataccataactcaatcgattaataatgtatcctgatcggcgcatctgagtacccactatacaattaaatcgctcgtgtgtgagtccgaaagcttaacacaacacaaatatttagatggatttgagtatacacaatatatactccacatgcatttttaataatttgtctactatttacttcaggaaataaagtagaaaaataaataccaatattaatccataatcataacacatcgggtgttaaaatgtttttccaatatttaagcatgcaattttctactaagtatttacaacagcaaatatttaatcaaaaggtgaagactccaacataacatatcaatcgtgagttcgcatgcatgtggcctgtgtgcgttgatgttttatgcatgccgcacagtgcatgcagagcacatccgcacagtgcatgcagagcacatccgagtgtgagagcgcacgacgcagtcttcgatccggtttcccggaagcgcccatgggagcggtttttattcacactcatcaacaacaaccttagcgcatcaactgcaactactggatagaagatttaggtgtgcttcaagcgccgccatccatttttctcgcccttcggccatgcttgggttgggcttggggcagatgccccgtgtgcctggtagacgccgtgacccacgcacaccacgtcaccgtctgggacacgcgaccac

SEQ ID NO: 148356 - DNA, 606 bp, Zea Mays
gaaaatagtacaaaggaaatgttattcattaagtgcttaagagtttattcaaaagaaaatgtgacttgatggcttgataaggtgaagatcacaaggaaagggcattaggggtactaaacaagggtgaatggcaagagatatggcttggtggctaaagaacctagctaaggcgaaaaatagaatacttgcatatagttgaggtactaatcaagctatgagggccatgttgatgtagaggataaaatcattggaaatgtaacttttatcgagaagcaaaatcttaatcgaatggtttaataaactcaaagtcatggctcaaggtagttcagctcaagtcattgaaggtattgaaagtccccaattgatcaaaatcgatgaagtgatattggccatgtttgttttggcttctaggcggattctggccatcagaatcgacttctagtagctaaacatttcgcttctcagactttttctatgagaatcacttctgtgaaaatcgctcaaatcaatgtgaatgcaaatcatcgagtcgttgcgaaggggggaattcggtgcttcctaaaccctaaacagtgcataccccttcatcttccttcgcatgcaagc

SEQ ID NO: 148357 - DNA, 804 bp, Zea Mays
cgtatttcatgtgtcacaaccaccgtatcagagaaggttgttactggaggacacccccgaggccacgaatcagaggaggtcaccgccggaggacacccgaggtgcatcggatcagaggaggacgtcgactgtgaatgcatggccaccgaagccggtcgcgcctcacgtgtccaccgctgctcgcatccgatgcttgctgccgtgccgaccgactaccctcacagcccactgcccgtcgccactggccctcgcacgaccgtcaaagttggccgttcctcgcatggccgtcgctgaagccagtcatgcctcatgttgccgacgtcatcgaaaaacctaatccatgatagtcttagtcgacttttatagacagcctatgccaggataggtggtgcagttggaccgaaaggcatttttggaccagggcttcctctagtaattggtagcccagagctccaaattaataaactatatatacacacacgtatatgggttggaccatggtacataacacttagactgatttcaataacaaaacacgagcatatggtacccaagtagtcggaactctagccacggtggaaaggtccttggtgaagatgttgacaaactgtaagcacattggaatgtgatggacgcggatgtccccaatataaatacgctcccaaacgaagtggaggtcgatctcaacatacttcatgtgctgatgttggatggagtggtagacgacactgatgttgtcgcagtagaccaggtactcctagtgacggtactgtgaagctcctagagaagttggcacaatctgct

SEQ ID NO: 148358 - DNA, 1519 bp, Zea Mays
aatattcttgttccatgacggagcgccaattgggatcagtaagggttgctcgatatgtcctcggaatgggggacaatgcagaggcttcaaaaagagcgggaaattgaagaccactcttgccacgggttgtcattctgtggtggttgaccaccggatcgacaggaactgcaccggcaggaatgggggtgcagtggaggtcgtcggaggaggtgctggagcagtagcagtgggcgggcaacgggagtatacccgtccgcagaaatgatcagcaggagccgtcgttccatggatgtcaggaactacagatgacccgggtggcagtattgttggtgacgatgcgcctgggagaccagccatccggtcaggagactggagcatcggggcagatggcagtacgagccctaacgatgggctgatggggccagccagtgtggcaggtggctgaagcgccacctctgaaggagcgggtggcatagccggcgagtaagccaccagtgggggtggtagtgccatacgagtacctgaaaaagaagacacgagcgatagtccaaaaggagctgtaaccgggttagagtaatcatcaaggaagtcgaaggccgctggtgtgggtggattggaatcctcagaaaagggaaacaaggtttcataaaaaaccacatgacgggagataatggtgcgattggattggcgatcaaagcataggtagcctttgtggtggggggaatagccaaggaagacacaaagggttgagcgaggggataatttatgtggagtggtggcagaaaggttggggttgcatttgcagccaaaaacgcgaaggtgctcataggatgggttgcagccgaagagagcaaagtgtggtgtagagagtgcgagtgttttggtgggtaatatgttgaggagatatgttgcggtgccaagagctgcagcccaaaaactggggggaacactagattgaatgaggagggtgcgaatgatattgttgatggaacggatgacacgttcagccttaccattttgagctgaagtgtaggggcaagacatgcgtagatggactccatgggaggagaaaaaggtgtgggcttgaaggttgtcaaattcgtgaccattgtcgcactagatgctctggatagtgacaccgaactgtgtacggacgtaggcaaagaaattggttagggtggagagagtgtcaaatttgaggcgtaaaggaaatgtccataaatagtgggagcagtcatccaaaataacaaggtagtatttgtggccagacacactagtgatgggtgatgtccagagatcacagtgaattaactgaaaattacgggtggcgcgggaggaagaggtaggaaatggtagacggacatgtcgtccgagttgacaagcatgacatggatgagtactagtatttttattacaagaaattgcggatgattgcactaaatgagataaaacggcgtgaccgggatgtccaagtcgttggtgccatatggtagatgcaagaagagcagaggtcgggaac

SEQ ID NO: 148359 - DNA, 388 bp, Zea Mays
ctttgcttggcagcattggcctgatgccgtgcacttttctaccaatataaacactcacatttttcctatgtgcctcatagcacaatgcaaccagtgaatgtccttatgagcgctagaccctgatggtcattttacttgttgatctgaagtcaactaatggatccaaacgacgaatgatatgcatgagcccctgaaggatccttatggataaaatagtgttgtgcatattagtctaaatcttaatgattgactgtgcatttggtaataataacaataagttagcagaattgtaaccacgaagcaacttgttgttgcgtgtctcgctggatgttgagactaacccttcatgttgaaggacaaatatgtagtattcatgccactatattaa

SEQ ID NO: 148360 - DNA, 904 bp, Zea Mays
tgtcagacttatatcagaggagaaaggtccacaagtagtgagagaaatcatccaggatggccagatagtaccagtaatcgaagatgcttggaacaaggaatgtccaaggtcacagtggatgaggtcgaaggggcgagtagcgtggcacaaggaagaagaaaagggtaagcgagtgtgatgcccaagctgacaggcatgacaaagcgagatagtgttgccgcgaaggcaagggattgctgaggtggcatagtctggagagacgtagtggctagggtggccgagacgacgatgccaagtggaggcagaggcagtggagatgagggcgtagggtgtggcatgggcagaggaaggtgggccgaggaagcaaataagataaggggacagaactgtcgcatcgagcaaccacaacacgagtaataagatcccgtatggtgagcccctagggaacgaactccatagaacaacggttgtcagtggtgaagcgaccgaccgagagaaggttatggatgatgttgggggcaacaaggatgttgaggtacaaaggaccaggaagaaccatgtcacctaatgtggtgacaggcagagtcaacccattaccgacagttatggaggaagggaaggtggggctaagaggatgaggtatagagacaactctggggtcgggagtggtgtggaacgaggcgctggagtcgacaattcagtggtgggaggagggggcgacgatgatatgggaaaggatgagagagccatcgggggcacccccacagagccacctagggaatgctggggccgaaagtagtgagcatgctgacggtaatcatgggtgggagagaagacaaggccccgatcgtcatgcagacaaccgtggcgctggggaacacaaacggtccgatagcgtggcggt

SEQ ID NO: 148361 - DNA, 975 bp, Zea Mays
gctgatctttcgtcattgcagacaagccaaactcaagctttggataccccatgttgcccatcatttcacgacaaacatcgacctccttactgtctggtagacagtagaggaagtcatcttcgttgtttcctccgtataccgaggccccctggtggtattttagctccttagcataatgttgtgtttcagcaagttgctctgctgatagctgttttcccgaagcatgtcgaacaataaagttcaaatcaccttggggaggtgcttcaggagcatatgtcgtgggttttcctggaagactttctcccaccagctttactagcgcagcttctaaagttcccgcttcagcatgagcagaagaagcgcttgcagtgaccacttctcttgcatcttcaattttcccaccaagagtttctgcggaaacaggagtttgcgttttcatggattccaaaacaacatccaaaacactatccatcctcctcttcctcggagtcgttgttgcagtggctgatagcttcggcaattctgtcacagtggggcaactcagcaattcggttgttcttctgctattttctttggtcccggctcttctaccaagcccgcactagcttcgattggcatcacagaagctgtttctatggctagagggccagcctctccactttcaataagcttcggcacttcggccgttccaataggcttcgacctacgtgtcaagaccttggctctctttggcttcgacgcgatagaagaggttgaagcagtagtttttcttttttcccccttgttttcggacgggaaagcagtaattcgggtaaacaaacccagtaacatcaaacaccctgtcccgcctcttctccctatgagcgccgagggcaactgtcatggcctcgtcttctgtcctcgagtaggctccgagtagctcatcatttgtggcctctatagcatctagccagtcatcatttggctcatcaaatt

SEQ ID NO: 148362 - DNA, 390 bp, Zea Mays
ccaacaagaaaattcctactgaggatctggtgagccgactagacatgatcctgaggggcaagatatcaaatgttggtgctcctattgcttattctgcttggaagctgccacctcataggtcatttttcaatttcgtgtccaaccctcctactagtgatggtggtctgggtcttagagtgcgaccttctcccgaggacattgaggctctagttgctccccttcgtgatcttcccaatgatgagagacagattcactttgagatgccagcaagtccagatgatgcagaaatagatgttgtactcagtatattggctggagaatcttctgactcgacccatgctgaaccgatggctatcacggttggacaagagcttaacaaaacagtggaga

SEQ ID NO: 148363 - DNA, 1018 bp, Zea Mays
tccacaaccactaaaatgcaattcatgttagctgattgaggtagtccttctatgaaatcaagagacactatgtgccaggcatgagggggaactgacagtggtgataataaacccggagattttagtctgtctggctttgcttgctgacaaatactacaagtctgcacaaaacgatgaatagcttgcttcatgcccttccaatagaatagttgtttgattcttctgtaggtaactggagctcccgaatgtccacccaaagctgaatcgtggagggctgatatgaccttattttgcagctgcacattagtgcccaaccaaatacgacctttatatcggataattccatcctttaaggtgaaatccgagttagctatttgtgaagtcaccgccagttgactcaacagctgttgagctgaatcatcttgttcatagccttgcacaacctcctgtatacagattggtgtgcagtgagacacatgaaacaattgtccctgggtatgaggatatcgtgagagagcatctgcagcagtgttctctgatcctttcttatagatgattctatattgtaaaccagctaacttgtaaatcaagaggtaacaatttggcattcaagaacgtgtgcgaagagccagaatcaattaacaccaacaattcctgattctgcaacattccctgcatccgaaatgtgctaggactatccagactgacccaagcagccatagataaaaccatcattatttgttgttcaggttcaaaaacttcttcagttatttcttctgaacccaatagttcccagacttcctcatttgcatgcaattgcaccgtagtagcacatctgtgaccatgagaccatttctctgcacatcgatcacataagccccttgctcttcgataacatttgagtgaagctacccgatcaagcatcgaagtgtgtcaagctgtatcagaagttgctttgtccattactgctgcctgaattggtatccgttctgtccgagctgtctctgcagatgctgat

SEQ ID NO: 148364 - DNA, 520 bp, Zea Mays
gggagagcgcactgaccgagcgggcctagcgccagggggcttgggcgctgacaggcgggccagggcgtcaggcgcgtgtgcgtgaagcattatccatgatctgggtcgtgcgatgaagatcagacggaggggatcagaccggggaggggtgaacggttgcaggcgccactgctcctctccgcggcggtgaggtcgctggagttgaggcaggcgtgagctagggaggttctgaggtcgctggagttgggcagagagggagagaacgccacggcgaactcaatggcggggaagaggccacgagtctgagggcagagagggtagaacggcggggaggaggtctcgagcgggccggagtaactccagtgaggaatcccggccacaagaggtggtaatcagctgtgatagggaacaccctaggccaaagctcgggcactggatgaggttgggatggccggacaccgtgcgggcgcaacgagcaggcgcggccacacgccggcgaggccaaattggctaaacgcag

SEQ ID NO: 148365 - DNA, 291 bp, Zea Mays
ctttatgacagctgggtgtgatcctgatggagatgagccgataggagcaaatgaagaatggagatacttcaaatttgttgatggtaaaaatgttcaaccagtgaatccagtggatgttcagacaagaaggagggcaagggctattccagaatttgatttagaaagtgtccctgatgatgaggctggtttggtagatgattatgttgtgccccatacaacatatgaccatgagaatccagtaatcaaagagggagacacatttgaagacaaggctgaatttcttgaaacaat

SEQ ID NO: 148366 - DNA, 388 bp, Zea Mays
ctaggacatctacaacagctctgcttctgaggtatcatactctattaatgatctcgtcactgagatagaagagttgaacgctattttggcaaatcaggacaagttgcttaggttttctactcgtgagaggaaagaatttaaattcaagtatgagagcacgcttagggagcttgagtctgctagagctttagttgtggtgtccgacgagactggatgtgatgggtgttcccttcacatgtcgaatatcgacactttgcaaactacgtatgccaccctgctagatgagtgtgatgagttgtgatctaggtctagcttgttggatgcgtttactgcttgtcctagcttgcggactaagccatcggagagaaatgctaggatagcctcgttt

SEQ ID NO: 148367 - DNA, 704 bp, Zea Mays
ggtagccatcaccgctaccctttaccccaagagcgacgtccaggagagggtggttgctccgcgacgtacggcgacgatcgtccacctgcaggttgcagcacgcggtttcctagctcgtcgacgagtgaagcagatgttggcgatgctccattgcagggagtcgtagctgcaccagcgcggccaagcaacatggtggttgttcacctcaccgtacgagaggctgcaagacatggtgcccctctgcatcgctttgtccggcgctggccctcatctgtggcgaccgagcaactacctcgactactctccttcgtacaagggggtctggtggccttgccaccctctgctctagccacgccaccctctgtgcactggtggccatgggaccaagaggggttgcgctgcacgggatccacttgctacaggcaacaccaacgttgacctccacgggcccgcctccgaaggttactgtgtctttacctccatggtttcagctcgcaccctcctctttgttgtgcaacgtttcattgggaaacaggatgatgcttgcagttgcaatatatctagaataattaaaagatcaatcgatatgtaaaagattcatttttcgatgataggttaggtcgttacaggtcgtttgttggatgctgcagctcgagaacgagctgcttgtccaggggggtgtagtgtcagggcctaaggagacc

SEQ ID NO: 148368 - DNA, 624 bp, Zea Mays
cagagatgtgcatatatgttccaaggataagcaagcaaccagaattgatggatcgggtgcctcaccgtgtcactacaaatccgacgtcaatatatttgatcgatactgttggtgtagtgcgagggaaggcatgtggaggcaagaagtacacagtgatgttgatcgcgcgcacaaaaatagaagtgtggtagatcggtggggaaaaagtgtatgcccgcagtgttaaacatgtacatagtgcagaaaaaagtaacagttaccttagtggtaggtacccatcatagtcaaatgtccaaaatgagcacgaatcagcaggcatgctattactcgagtactctatgtataatggacaacaatggataaaccagaaatgatcatagtagcaccaagagcgtgattgtaattctatagcgtggaataaagatcattttgggtatgttgtatgtcattaaggacaaaagtaatcatatgaacagaaaaggcatgaacaggatcttagttgcgtttgtatgactgaaaggaaaatatttgttgaatatgactccctcaatggtcatatgcagccacccccaaatgatgtttcttacttaaacttgttctctagggcactgatgttcattagca

SEQ ID NO: 148369 - DNA, 618 bp, Zea Mays
aaactaactacctatactatatactaactaaactaaactatatacaaactaactaggctacatacctcggtggtggcgcgatgtctctcggtgcaacgacaaccaacacactaggaagaaatcggagctaggagcggtgagatttgaggcacgtgcggcgggggaatggggcatggctagtacgagaattttttcatggaagctttgcagtttgtagctctgagtgataccaaaaatgattgcattggaattattaaaacgcacgcacacagaacaccttgagtatgtgttgttggttggtttacatgatacggccctgaacttgtattcgatcacttgcatttcggcttgacatggaattaatctaaagtcctaaaacacgctcgcgtttcagcctctctccgtattcccgcacgacggtcctctcaccttccgacacgtacacacaccaatgcaccacgccaacgcttctctatcacggatgtgcagaacgctcgctccatgctcgtccggtcggccccacgtgacagttgcctggcctctggtctcagctccccacgcacgcatctcgcctccacgtccatcgtcgtctctcagatccccgacctgtgcctgctc

SEQ ID NO: 148370 - DNA, 848 bp, Zea Mays
ggctaagctcattacaatatgggtaattaggtaaatacaagagaaccctattgttctgaggggaagtgtaggggcacgagactcgcaactgaacaccacgggagagaaaggagcgagaggcggagttgtcaaactcgcgacgttatcgctttggagggcacaaactagaggaactgggtagagacccaagcgaagaagtgggtgagggtgtgaaaggtgtcgggcttgagctacagaggaaaaatctagagaaaacgagagaaatcatgaaaacgagagaaatcatccaggatgaccagatagtattggtaaccggagatgcttggaacaaggggtgtccaaaggtcacagtggatgaggtcgaaggggagcttgggacatagaagagaagggtaagcgagtatgacgcccgagctgatagagatgacaaagcgaggtggagttaccgtatgggcaaggaatggccgatagtcgagagaggacgtcgtggtcgaggtggccaagacaacggtgccaagtggaggtaggggtagtggaggcaagggcgtagggttggacaaaatgggcagaggaaggtggggtagggaagcgaatagggtataggggactggaactgtcgtagcgagcaaccacaacacgagtggtatgatcccgtatggtgagtccccaaggatcgaactccatagagcaacagttgttagtggtgaagtgacagatcgagaggaggttctggatgatgttgggggcaacaaggatgttgttgaggtacaacggaccaagaaggaccatgtcacctactgaggtgacaggcagagtcgacctattgtcgatagtgatggaggaagggg

SEQ ID NO: 148371 - DNA, 380 bp, Zea Mays
tggaggagtgcccgggggcgcagtccctgagggtgcttctccaggtggcggggctgaggtgccccttcccgtcagcggtctttctctaatgcagtggatgggcatgaagctggacacctttgatggcagtggtactccggttgaggcggcggattggctaacatatgtggaggataagatggatgtttttgagattttgtatggtgatcgtgttcgttttggcacacagctgttgaaggaggaggctcaaatttggtggagaggcgtgcaggcagctcactcctcctcaccaggagtcctgacctgggacgctttcatcaggcagtttgagaggaggttctacccggtcaccttcctagagaaaatgaagattgatttgc

SEQ ID NO: 148372 - DNA, 384 bp, Zea Mays
cttcattatgaatgtcaatgtcatctattgccctacttagaagaatagaattagtgagacaaacactctacgtgggtaaacaatgttgtgctatacctatttactctaacatccctcgtagttacaatgggagcaccacatatgttgagactggagaagaagctgacaagctagcatcgtccctcattaataacagtcgatgcatcacgtatgctatggctggagaagaagcgaacgagtcttcatgcaaggcaatagccctttttgtcaatgttgaagtagtcgagcttgagggtgtaggtgtcgtggtcgagtataccatgttgaagatacccgtggtcaacatagtgtctgtgtcgtggttgcgaatattgttggaatgtt

SEQ ID NO: 148373 - DNA, 425 bp, Zea Mays
gggatttcttcttgtttattcaataaatggtttagggtctcatacattataaaaccctttatatggtgaaatgtgatttcctatttcgtgaaacgagcagtgcatttttgtagtaagcgaatacgtaatgtagttctgctcatgggagacgaccaagtagacatagctgcattggcaacctgcaggctgtagatgaaatgccatagcagtagcccattgatggcctgactgtgaacaataatccaaagtaagtcgaaagccttgaggtgactggccaatgtcaagtatgaagactcaatttggtagagaaagaggtcaggattatttgagtcacaaatactgtgaaaggaactgtcagctacaaaatataaatgggatcaatcgctagaaggattctcatttttgaagtattcttttcatcatgc

SEQ ID NO: 148374 - DNA, 372 bp, Zea Mays
caaggaccggatatgtgttccttagattgacagcctccgtgagaccatactgaaggaagcccttgactctgattactctatccatcctggtagcaccaagatatatcaggatctgaaacagaagtactggtggtattggctgaaaagagatgtagttgcacacgtggttgtatgtgatgtatgtcaaagagtcaaagttgaacatcagaggccagctggactgctacacccgttaaaggtgccctaatggaagtgggaagaaattggtatggatttcattgtcgggctgcctcacaccccgaaaggttatgattccatatgggtgatcgtggatagattaaccaaagtggctcacttcattccggtcaagac

SEQ ID NO: 148375 - DNA, 340 bp, Zea Mays
cagcaaccaggcgtccagagatgatgtcgaagacatgagccgtgcaagtggtgaagctgaagatggcgagctcaagaaggtggtcaggatccgtaaaccaaacgtgcgcgtgggtggtccggagtgggtaagggcgtagaagtctggtcaggtcaccaacagaaaggttgtatgtgtgagtggttgagtcatgtaatggcttagttaaaaagaggaaagcgtggagaagaagggtatcaattgtaacagaattttgtttccctacgaaaatactcaaccacttcgcccattctctcttgttctctgctatttctgctctcttgttcttgctggagattgg

SEQ ID NO: 148376 - DNA, 756 bp, Zea Mays
gttctatccttattgcctcagccaactttgggattagaatgatcgtcccaaaattgaggctgtgcagcggtagagagcccctattgaagtcctcgaacagagccatcaaatcctccttgatcgtttcccagaatacctgataaaattctgctggaaagccgtcgggaccaggcgctttgttatgttccatctggaatatcgcatacttaatttcgtcaatggtaaagtctgcggtaagactagtattttcctcctcagtgatttgcggaatatcctctatccgtctatcatccaagtggacattggattcatctacaggaccaaagagggatttatagtaagatgtgatatgctttttaagctcatcatctccactaattattcgaactccatcctgtagtttataaatcctagtcttcctatgtttaccattcgcgaccagatggaaatatttagtgttcgcatccccttccagcaaacctttagtttttgctctctggtaccacttaacctcctcttctcgtaacatggccgcgagcctattacgaagaaaactgcgcatgtctacttcttgtgtagaaagaagacatgtttcagctttcttatcaaggatgtcaagtttttggagaatttctttcttttccttcttatttgatccactcgtgttttttgcccatcctctcaagtattgtcttaacttccttatttttcgctgccatctctcaatggcagtatctccaccatactcctttgacc

SEQ ID NO: 148377 - DNA, 1057 bp, Zea Mays
agatcgtgttgttatgctccgtcgtaccgagtctatctttgtaagctttatacaacattgttgcttcattgtcatgatcagtaaccacttgacccaaaccatcctagagagttgcaatagtgttatacttgagcttaattgtggcattggtgtggaagaattttgtgtcgacatcaccacaagttgtcaacttaatgttcacccattgtttccaatatgttttctgttgttcaagcatgcttaagttttttgataagatatctcgaaagttccattattgcatggtatattccctagcttcctcaatgagatccatgaactgcatagtcagcttaatattctcaatcgtggtggctagttttgacagttttatttatgctagctcattagagcctttctagattttttgaacttctccatattcctcttggctagatctagttggtgaatatgttgggaccaaatttcttggaatattggatagaagttatcatgttgaagccataaatttttgaatctaaagatgtttggtctaggcacattagttgcaatctctacaagccaagggacatggtctaaaatatatctggccagagtgtgagctctagttcctaagaattactgaaccacttatgtgaaatgaagcaccactccaatttttccaatagtggatgctgctgcatatttgactaggtaaaagcttgaccatgaagggggatttcttgcaaacctagctgattgatggaggcattgaattgaagcatgaactgaatattacctcccactttattgtgattctcagggctgcgaataagattgaaatcacctaaaaagatccatggttgatctggcaaaattataatattagagaaccattctaggaaatcctttttgccatttgacgtgcttgggccataggtataaataaggagccatgactgatttattaatttggtgcgaaaacaaattgtttgggcatacacattttagaatatttgttccctagagaatttagagctttgtgagaaggttatcatgccaccagacgaacccatag

SEQ ID NO: 148378 - DNA, 307 bp, Zea Mays
cacaaatcagttactctattcagttaaactcaagctgtcaagcaccattgtccactcatgcataaatcaggtaaacaagttactactacacagatcagttactactacacagtacacagatcagttactctattctacagcaagcataattgtccagtacacaaatcagttactctattcagttaaactcaagttgtcaagcaccattgtccactcatgcataaatcaggtaaacaagttactactacacagatcacaacatattagattacctctgcgccagacacgaagaactcgccgctgttag

SEQ ID NO: 148379 - DNA, 493 bp, Zea Mays
atccgcgactatggacgagcacgacgtggaagatggccaggcttggcggcggcgtctagaatcccgacctcgccatgcatccgaatcaaccacggtggcacctccggcagagtccctcacaacccgcccaagggtagcgcgccgctgcagacatgaatcacaggtagcgccatcttgtggaccccgaggtcgtgcatcgtgagcgagcggaggcgactggagttcacggcaggggaggccgccgcggcagagcaacttggtcgggcaacgcggggttcgcggctggtttatgcggcccgtaggggagagaatttcggcaaggtagcgccacaacgaccttgcggaggatccggcggcgagtttgtttcatctggttgaagaaggtggcgagaggggtggcgatttagtcagaggagtggaggagataagtccaagcactggggggtccacctgtcacacacacggtttagcgttcccagctaggtgacaggcg

SEQ ID NO: 148380 - DNA, 532 bp, Zea Mays
gttgattattctaatctcagaatctttggttgcactggttatgctcatgttaataatgggaagttagtgcctagagctcaaaaatgcacttttattggctatggttctgatgtcaaaggatatcgtttattgtgtgttgattttaagaaggtcattgtcagtcgtgatgttacttttgatgaaagtacattttcttcctctagaggtgtttctgatagtggttcctcatccacatctctacctgaatctactgatgagaatcttgatgtagatgtacctgttagtattgattctgttactcctatcacacagtcattttcagcttctgtacctccagttagtaacaatcactctattgctcaagatagacctagaaggaatattgttttgccacatcgatatcgtgacactgatagtatggctcattatgctctcattgctgctcaataaactaatgttgcatttgaaccttcttcttattcgaaagctatctcatatgataattcatccaagtggttagttgctatgaatg

SEQ ID NO: 148381 - DNA, 400 bp, Zea Mays
ggctttaatttaaaacgaaatataagacagatcgtgtcttgggctgggcggcccccattttaaaagtgaagagcccagaaaggaagaagaaacgtacacaggcacattccgcattgcctttttgccggaatggtatatatgatgtgaatccatttccattggaatcacttgaacagcagcttcgttgtgttgtgttgtgttgaaacgtactctgaccgagtggtccaatcactgatggacacgtgttcttagggattattccaccatcacaagcacaacctgcgtctgcgtccccacacccaccgtccatgttccttcatcacaattcacacgtatcacagtggagcatccggaaagcatactgcatacaacgcgcttccagagtagacatagatactgt

SEQ ID NO: 148382 - DNA, 453 bp, Zea Mays
ttaatggatcacgaggcatatgggaaaaaatacaagcaaagtgggattaacctcgtgtgtccatatgggaatttcaacacaaacatacatttgtatacatccgtgcagtttttacatacacgtatgtataaacatgttcttataaatgaattatatactctatgtttggtgtaaacatatagttagccaaataagtacaggatggagcagacgaaaattataactaaccaaaataacaaatttgttgatgtacaggtagcacagtacatagcagaagcagtacatcaatcaaccgtgttagaaataaatgctacaaaaaatggaacagtcgattcaacaacacaatgccgtagcgaagtagaagcaatggcgagatccaattatctcttgaggtaaaccttgttggcttgtttatgtgatattgttacaattattggaatccaagaaacagtt

SEQ ID NO: 148383 - DNA, 509 bp, Zea Mays
tgcattggtaattgagtaggcctttctaacatacctttgaaggtgtttgctcatgtggtgtagatgtatggacttgagtttgtccaagacttctatggacagattgttgttgctgttgcgattgtcaaatcttgggatgtctaaaggagctaaggttgggctttctgctacatggccaaggtgatgcccaagaatggaggctgacctttcatttgggacagcattttcatctatctctacaattacctttcctccttgtaatgttagtaaatttgaaagtgtgaattcccctgtaatctgtctaacctctccatttggccctgcatatatgaaaatgtaagatttcacattgtaccaagatatacaagaacaaacctgaaacttacatatgatcttaattggacttcgaggaaggtgtggcaggcggactaataaaccatcaacatcaggaggggactgtaaactttcattgttctcattatctgccacattttcgtgctcctcctgag

SEQ ID NO: 148384 - DNA, 505 bp, Zea Mays
cccaggcgacccagtggatacggtggttgcagaagtgtccgtgcgattcgagcaccaggatcagattcacccgatgcaggaccatgagttgtaacgcagggttgagatgcacttgagtttaggcgatagtgcaagatcccattgatttcatgctcaagcccccgacagcctagaggtagaagaggtacctgacaacggtggcccacccatagcgaaacatctcaagccagtacgtgtaccagggcgtcggtgaccatctaagtggctgctcacgatggatcttatctcaactccggctccgtttgttacgcaggtgctgctggaagttagcttgcttatgtcacccatgatgatacgatgatgtcattttcggcaagggaataaagaaagggggaaaataatgcatggcaaggacgtgtgggctggtttgccaaagagatggcccaacggatggagatttttttctttttctcatttctattatagttgctaattctattttcag

SEQ ID NO: 148385 - DNA, 473 bp, Zea Mays
catggtacctcaatgaatatgagttttcttctactctgaaggtgttggacctcaatcattatgacgtaatacttggtatggattggctctcacgttacagcccaatgtttattcactggtctgctaagtggctaattattccctataaaggttcttcaatcaagttatggggcatgggggctcctgatgttcaatgtgcagcaatagaagtctgtgctattgagactcttcctgacaaagatcaaactctggtgcaacagctacctcaggaacttcagcaattattgggcacttatgctgatttgtttgaggtccctcaaggtttaccaccgcagcgagaatgtgaccatcgcatcccactcatcgacggagctcgtccggtgcaactgaggccttaccggtatgcgccagctttgaaaactgaaattgaaaaccaggtggcagaaatgcttcagtccggcattatccagcgt

SEQ ID NO: 148386 - DNA, 635 bp, Zea Mays
cttctcatcatcaacatcattctcgtccatgctggactccaatggatcagcatgtagctcctgaccgaaccccaaagaaccatcaactaacacaccatctatcggctgacccgcaaaggtagtgacttccccgagagcaactgatttgtgcccggtattatccccaccggccagcttgttaaggggttgatcactagcattttccttcctgttgagaccatcttcgttgttcctatcagaacctttatcctcacttttactatcagcatcatcatcaaagaaagaatcatcatcaaccgccattgggaccgctgtccctgcgccattttccacccacaggtgtacctcgtagaagaccttggctacttcgacatccaccgcaaagggaattgcctgtggatcgatcacactgacctgcatcctacatatgccatgatgtctgtaaaacgccatatcaacatcggatgcaacccccagggtcgagccaacaccccaaatgtgaggcaccgtacaaaattcaaccggcaacccattaaactgaatccaagtatcaaccaacttagctttgacacgacctccagacgagcataccttaaactcaagagtcgccttctgcgttttagccctgaccggac

SEQ ID NO: 148387 - DNA, 723 bp, Zea Mays
gcgcctagctccttgccttccttttgcctcccgctctcagacctctgtacattgccgttgccgtgctgtggagctcgccttgctcctctgtacgtcggtgcgtgcctaggtgctcgtcgtcctacaactcccctgttgcgctcgggccacggtcctcgtccaggcaccggccgcaccgagcttgggaccctgctcgctgttttcctgctcactctggtcgcggccgtcgttaaatcgccgaactgccctgcgcctcgagacatgcccgcttggtgtgccttatggcctgttggcaggctagccaatcagcggtggcaccaaagtccatagcagcagactggcggcagagacctcgctgaaccgcgcccctgctcgacgccggtgatggccgtcatggttctttctccaggcccttcatgcgctctacttccactccaccgtcgatgtcgtcttggccctagcatcggctcaacgcgccacaccttgtggtggtgtccgccgtcgtgaagcaccgctgcgagctcccatcgccctcgcctccagtctcactctagccatggacgtcttgcgctctatctcatcgtcaccgctcgcgtcgaatatcaaacctccagatgccccatatgtgtcgtcgtcacattcatgcattgccatccgtgttttatgttcatgccggcaaaagaatcccaaaacggtgtgtagaatgaagcgaagccgcacaac

SEQ ID NO: 148388 - DNA, 1238 bp, Zea Mays
atttcctcctggctgaggcatcgctgattgccttcgccaaggccctgctgggcagctgctgggggagatggtagtgccagcaggggcggcggcgctaggggcgcggtcctcgccgcgggcgtgggaaagataccgtgctggggagcccaaggcgggggaagcagcggtcagtcgacctccatcagctcgacctgccttgccaaactcatggccgccgtgagggactccgggttgtggatgcggacggcatggctgagcggcggcaggagaccgcccgtgaagagctgtacgcgttgtgcctcgtccaaacggtctgctctcggcaggagagcctagaaacgattggcatagtcctccactgtcccggtgcgtcggcactccgcgagttcgaacaacggcgctgatcgaagaggaggcccgaaccgaaggtttaggagttccttgaatcgcccccaggatggcgtacctttgtcctcctggagttgcgtgtgccagagctgcacgacgtcgtccaggtgataggacgccatccacacgcgctcttttgccatggtacgatgctggcggaagtacgagtcgcacttgttgaggaaaagcatgggatctgtcgtactatcgaagcggggaaaatcccacctcctgtgcttgggcggatgattcgggggcggaccctccaagcggtgctcgctgccaccgccggacgatgatgcagacttctccttcttcatcacctccatgtcggccttcatggtggccatatcggtggagagggttttgagggcttgcaggacgtcggccagggtcggcttggccatggttggtgcggcagaggtaggcgatggtggtggtagggggtggtggtgggtggcgacggatgtagaggactgcatggagcgggtgagagaggatcgtcgagaccttgataccaggttgtcaagggcacggtgatccctagtagctggcccttgactgcggagctcgtaatcggcgtcagattcctccagggcagaggttatgaccctcacggctgcctgggcttaaacactagagagagagagattgatagttgatcttccttgcccctttcataatctgagtacaaggtatatataggccaaccgaccaacaacttatggaaacaaactcctattttctgggaataacaaactcctattttctgggaacaaacttctaattcatgggccctaatctctcctagccgctaggatcagacctgc

SEQ ID NO: 148389 - DNA, 823 bp, Zea Mays
cggatccagccccgactgccctcatcaaagtaactgggggaaaacttacgcctgcggcagtgcagacggaactggctcgtttcattactaaggactggacttgggaagctttgccccatagtgaggaatccttcttggtggttttcccttcggttgaggaattacagagaatggttgatgtggacttcacccttaaaaatcatggtgtgactctcactatctcggaatggaaagatgctagtgatgctgatcctagttaccagcttgatgaggtatgggtccatatcaagggggttccccatgcttggagacattacctaggattttgggctctaggctcggtgattggagcgaccttggatgtggatatgtatacatatagaaaaatgggagtgattagagtgcttgttggaatgatgaacagagatcctctcccccttaccactgacattgtctttggcactaaaggatatgagatcacttttgttttggaagatgagaaattcacccctgcagaccctgtggtgttcacagatgtcccacgatgggatggcgatggtggcggggatattggagatgaccaagatgacaaaaacccaggtcatgcaaagaagaaacaaagaaatggatggagtgttggtgggtctggtgcttcatcgggtgggggagatagtgggggaaatgatgtacctatgcttgatgctgctgctcttcccctcacaacgtctctacatggccctttctgtagtttgtttagctctgatggctcaactgacgctgcagatcactcatcaaaatattcaggggttcataacccagtttg

SEQ ID NO: 148390 - DNA, 389 bp, Zea Mays
actgacttgtcgttttcaacgatccacaatttcagtttgtattactactaatgcattgtagcagttccccataatagtgtataatccatgtttttttctgtttaggttgatgtttctatttgtgtcattgaaagtaaatttagtggctaacttttgatttcttagtctataaacaacattagctacagatagtgggtcttctggaaactggaactggaacattttgcatcaacgatttggagtatggttacacattaagcattagctgaaaacataagaagtcacgctgaaagtagaagactctacttggtgctgtaacttcaaccttaatgcttcatggcacatgtgacactttcatatgaaacgtcaagacgataagttatttgcag

SEQ ID NO: 148391 - DNA, 1460 bp, Zea Mays
tgttaacagaattagaggatatctctcaggagtattatctccttaacaaacgcacgcgtatctggtgtaatctgttatgggcaaccgggagctgcgcctcccttgatcaccgcaagtcggttgtacatgaattgtaatcatctctataaatagatagagccacagccgtattgtgcgtggcgtcccaaacattttcacatggtaatagagccaagatccaaccaataaacaatggccaccctttcttctaccacctcctccctcacctcctccagcgcttccaccatacaatctactcctgctcctctccatcagatcgttaccatcaaattaaccaagaagaattttctcttatggcgtgcgcagctgcttccttatctccgaagcaacaaactcatgcgcttcctcgatggatctcaacccatcccgcccgcaatggttcctgcgtcaacaagcgccggtgccgaactcattgtcaacccgacctatgagacctggtatgatcaagaccagcagctactgggcggtcttctgtcctcgatgacggaagaagtacttgctgatgttcagtccgcgacaacggccaaggaggcgtgggattctctcctgcgcatttatgcctcctccacgcgggctcgcacggtgcaaatccgtgttgagttggccaacatcaagaagcgggatctcacggccgcgacgtacttcgccaaggtcaaggcgctcgctgccgagatggcagccgcgggcgcccctcttggtgatgaagatataatctcatatttgcttgcaggacttgccaccgactacgatgcctttgtgacctcgatcaccactcgaagtgatcgcctttccctggatgaggtttattctcatctcatggtgtttgaggctcgactccaacgcaaccaggcggagatgcagatgcatctcaattcctcggccaactacgctcgtcgcggcggcaacaacttgcgtggtcgcggtggccctcgtggtcgcggcggtcgcggaaactactcgcatggtggttcttcgtcgcgtcctacagatccgcctggtgctcgacgtcctgccaccaccaacaacaacagccggcccctttgccagatctgtggcaaaataggccacactgcggtacgctgctggtaccgtcatgatgactcctacaacgaagatccaccgatggccaatgtcgcctctacgttgccttcatacaagcttgacaactggtacggggacacaggcgccacagaccacatcaccaacgaacttgatcgccttgcggtccgagaacgctacaacggcaatgaacaagtccaagtgggcaatggtgcaggtttgaaaatttcacatatcggtcactctactattaatactgctgcacgtcctttatttcttcgtaatattcttcacgttctggggattaccaaaaatctattatccattcatcgtttcactcg

SEQ ID NO: 148392 - DNA, 862 bp, Zea Mays
agtattacactttgaattgaatttggaacctttttacacactacttgcattgtgacatcattagccaaaaaatctagatccgcccctggaggtgcaaacaactccatcggtgtcgtcgcctcgccgccgatggcccgacgtctgatgccttcctgatgatgcgcgacttcagcggagcgggtagggtagggtgtgggagagggagcagcagcgcctccttgtgcatctgtggagattgtggggacgatgttggtcaaatatggtagattgagtcatgtctctcgcgatcatctcgcccgggcagctgggcatgtggcagagagattcgagaggtcgctcagcgttgctgcctactcacacgtcttgcgcggctgaccgacgaaaacgatagatttccgtgtagctatgcatgccatccttaaccacgggctgattcaggcatcgacgacaaaaatggaaccagatacatcatctctcctatatcttcaaatttctttggggttttaaaatgtgtattggactgtttgcgatgccaattgtacagatcaagacgcgtattggactaagtttgccgatgtcatttgtatagattcatgaggcgtgttgacgccgctggctgggctggaccacatccatgcacacaaccatgcgagtagtctggtgacggccctcattgcaccctcccattcatttctctgcagcagcgacgttcatgcatggtgatcaaggaagaggtttcttctttcctgattttcctcttacacaaaactatttgttcaatgtattttcctataggatctgtgtaccttctttaggctttcaggtagtaagaattattgggtcggcatttttaggcttcgtt

SEQ ID NO: 148393 - DNA, 358 bp, Zea Mays
cccagactcatagactgatagggcaactttgagggcattttactccttattttgcatagtaccaagccaatctctgttaagcaaacttgcacaccaatatctgctcttcaactttgctacataaacatggctccttaattccctagaatagtcgcgaggaggtttcaaagttgaaccaacaaacacctctctgacttggttaactgaacgatattcagttgacaacagaatgatagcccaactttgagcaacgtttcctccagtttttgtacaggaccaagcccacctagcttaagaacatttaatcaccatcaaatggtctttaatttgtctatatagctcacagccttaaaccccc

SEQ ID NO: 148394 - DNA, 1011 bp, Zea Mays
atgatctgttgctcctgtgtcggtgtaccagttggtgtcgacattgtaggcgttcatggcgatggcagcattgacgtggcgctcttctgggacgtagttttcatcgaaccgatgccagcaccgggacgccctgtggcctgtcttgaagcagatctgacagagcagtaggtcatcagacccactcgctgcatcagatcgttgtggccgccctccattgcgttgcttcggtgggccgtttcctcggccacgcacctggacgcgtccacgctgaccacggccacgggaattgcccgagccacggctgccattgccacgaccacgattcaccatgcgggcatatgagccaccatcttgcagctccaatctggtctcgaaactgagcaattgtgaataaagctcaggaatcgagatgggatccaatctagctgtgaccgaggtcacaactggattgtaatcagcatcaaggccattgcagatatgcgccaccagttcttcatcatctagggccttgccgacagcagccatttcatctgcaaaacctttcatcttggcaacataatctgtgatcaacatggtacctttcttcgtagtggcgagggcaagcctcacattcattgtcttggcgcgagtctgcgcagagtacattttctccacggccgaccatgcttgtgccgccgtctgggcagcgacgatctgcgcctgaacttccttcccaacgtttgagagaatgagcccgaggatctgttgatcccgagcataccatgtctcaaacgtagggttcggattggtgacggccgtgccgtccgccgccttctcgacgacctcagcatcagggggctcggtcttgctgttgatgtgcccctcgtagcgagcaccgcggatgacggtgaggatctgcgctttccatagcgcatgattggtcttggataacttttcggtcacctggaaaccgaagaagggattgctgacgatgcttgaacccgtcgccatggaacactaggctctgattac

SEQ ID NO: 148395 - DNA, 1191 bp, Zea Mays
gcgccggtgccggccggccggctctcgcttcgtgggcggagatcttgaagcttccgacccgaaaggcggatcggatgggtgatgcttgctttttcgtcgctctttagtaatctttcccggctgaaaaaaaggggctccacatcctattcacgaatcaagaaaagcttcccttcgtgcttaagcttgcagttgcaaggcactgtctatagccgctattgcgcagacttttaattcgtgaatgtatagtgcgtggaaaataggatacacgttttagatgcaaacatcttaatcagcggagcgaagtggtagcctatgtttcctttttcatcggttggttctggtacgttttaatcgtcgtatttcaaacagctctagtacgttttaattaatccttaaaccgtttgggaggaaaaaaaaggaggtggaaaaaacaaggagtatatatataggggagattttgcatgacttgcacggcagttacatgtactacgaagatagggtctctggcttgctgacttattcccgtgccacacgtactccttttccagcatttttttgaattcgagatcacggcaagcgaggctcgcgatcacacgctaaaacaaatagacgtgtataatgtcgtggccctattattctatcagtagagaatcttgtcagggagctgctcgcctcgcctcgcctgctcctaatccatatggtaaaccacgcacaaatcttctgttgttacgctgagctcagcaataaacatctattcattcgtacgtagcctagccttaagcagccgggtggaagtcaacttgcggttgcggacaaggcggcttgggcagggagcggttgacgacgtcaagccgcctcccaccctctatctaacgcccatattaatcagcgccatgtaaacttgcattggtgacaggtcaccccgtccctcgcccgtccgcttctagaaccggatcatcacgctcacgcatgacgaccgtgcttgcgttgcactcctggacgtacgtagtacgccctgtccaagcccccatgaccgatgcgatgcgatgcgacggaccatgcatcatgttcgcttcagaaacgtgccgagcctgcatggtcctattggtttctaggggaaataaaaaacaattctagctgagctgatggatggcgcagtatatcaatttttcattcacagtaggtgtagta

SEQ ID NO: 148396 - DNA, 426 bp, Zea Mays
gtgcgtccactgtcgtgggccctagaagacgaatcgctcctgtcacgctgtctgctcccacaggcaacagccacgtcttccgcgccgcagtgtccgatcgatcgatcccttctaggggaggggaattcaggacaggaggaggccaggttctcgccccgcaataggacgccgatcgattccggatcttagctcgagagcccggtgcccccttctcggtgctcgttgcaggattttcggtactgttctcgcggtggcgtcccacgggatcgcgccttccttcctcctctattttatgtttttggctggctcttggaatttggttggagagtcggggatggattgcttattttattttgctatgcaatatcttcccgacaggccaggtatttaggaggaagacctgatttgtccttcagctaacagtca

SEQ ID NO: 148397 - DNA, 438 bp, Zea Mays
atcaaaatggaaagacaaaccttttggagaggtggattcatcgtttggtttccatcgttcattttcctcttcctctttgcaagggttagtatcacaagaactaaaggaagtagaagcatcaaatgaactattatgtttggactcatcaaatttagttttaattctagtccaaatatcatgcgcatcatgaatggattcatcatagtttgatatgaaggcacgataatcttcattgctaagagaattagttaagatgtcaaaaagctagatagtttaagcgataacatctttgatcctcctcggaattaatttttccattaaaactagagggaaaaatactcttgtctataatttgttctagtcgtggatctacggttttaaaagcatttatcacactagtagaccatgaatcataattagaacaatcatcaaatagta

SEQ ID NO: 148398 - DNA, 636 bp, Zea Mays
ctcatctttctgaatgggtgaaacaacagagtgaagagcatgtgatactgatgtgctgtgtatatcagtgtagacatgtccttgactcctgagacatttaaaatgtatgtgaaaaggacaaagcatggcgtcccatacacatatgaacaccgtgcaatatatatagattgattatactacattctgttgtaactttggcagaatttcatgcaatgttctgaagaatataataatgtcatccaaataacaggcatgcaactgtaatttgtacttgctaataacgagttctaaattagtgttgaggtgcatgccttttttgggatagaattgacacaaaggtatttctcctgcctgaccccttcctgatgggtttggtgtcgagctttgaggcatgcagatatatgagatgtgaagagaggatctccaatccatcagattaagaaaaaagaataatcctctatatcagacaacaggagatcacgaaaacatatataaacctaagttgtaggtgagatgtgctacagcagatagaggattttttgtattccctttatacgtggcagaattttgtttttcctttctggagggtttgtccttcatcttcgtcgtccttcttgttcccgtccgtcgtccgca

SEQ ID NO: 148399 - DNA, 855 bp, Zea Mays
caaacccaatccagttgacacgactgggcatggattttgtctcaggacgaagcagccagacagacccacgttggtgacacgaccactcctcacacagacccgaacaactcggcctccacccaaaaacgctagagtggagtctggggaagaaatctgacagaagaatactgcccaagttcgctgagatttggagccaatggacgattgaaaacgaccgcactgagtatcgccacatgttcgatcctatgctccagtgctcggccacgcactggtcacactctgcgagcgccccgcacactgtcagctccaccccacgcatgcacctagccgtgcccgagagcgcctataaatccctccccaagtgcgcggcagttcactccacaccccgcctcacttcccagagcaaaaccccaactctagcgagctacacaccgcccgccattgtcgcccgaaactcgccgctgtggccagcccgccctgaccaccccatcgcctaactaagtgcatcagaggcttccccgtaccctcccacagcttgtagcttcgctcgattaaactctactacgtcggagaagcctcgccatcgatagacgctcatggtctgccgccggtgcacgaggaccggtcactccgaacctccaccgcccaatccgagcccggggacacttcactaaggccctgccaagctccctgggcatttccacgaaggtcaactgcaccaggccccccgattgaagctcgccgacgacctacacccgcctgcgcctgtggaccagcttgttcagctcgccgccggccaatcaccaacgcccccaagttcgtcgaacccacccgaagctccgcgacctagtcccc

SEQ ID NO: 148400 - DNA, 510 bp, Zea Mays
cgttgggcagatccggggtggtggagagctccaacgacgaattccggcctatgtgggccaagttcttggctaatgatgcaactcctgaaccctccgatcgatggcgaagctctaggtccaacccacaagcctaggatgtcaacatggtcgagttgcttcggtggcagccatggcggtccctagttttatagtggctagggtggagtctttatgggagcgttcggtcgggacgaacccgaaatcaccgcgcagtcgttgcgattcttctgtgctagcaacgatggggctcatggcggaggcgaggaaatcccatccagattccacgcacgtctccgccaggttttttgcgaaggtgggggaaggaccttacagtttgggtccacctatcagggaggtgtgtggctcaacgctggcgcgggtgggaagctggccgaagggccccacttggcaaggacagaacgagggacgaagagcacctgagaaaatgggccgcatgggtagagttttggc

SEQ ID NO: 148401 - DNA, 474 bp, Zea Mays
tgggtcgatgattgaggagcacaaaaaatcacggagcgaccgagcacagtccatctctgttaaccgtggcagtgagtgcacatgtgtagtgtgcaaggtgtgtgtttcctctccagatgcaacctgaaaacaatgcaggtagagaatatactagtttatgaccgagttatgtgaagttatgtggtcataaatgtatatttggagtacttacatgaccactaggtgtctgatcaaaaagggggcccgtgtcagtttgagtgtcatgagatgcatcaatgtcacctccctgccccaaaaatcaatgatactatgtttaaaccctcagtcaggtgtcaattacatttaatcgataattgagattacaaaggataaaacaaagatgaaacatatacatgtttttgtggtgtggcgtcaaacatcggcaagtgggaagacgtatatgagctcataatgttgcagtctggtatatgttga

SEQ ID NO: 148402 - DNA, 693 bp, Zea Mays
caaagaagaggatacgaccaagggaaaagtagataaaatacaactataaaattgagatggaagagagaaggttttggagcacaagtataatataggcatcaaggtaagatatagaggtgtcaaaggcgaaggtgataataacgaaaggcataacaaaggatagagttaaggcaagactcgtaatggcgaagtggagaaaacaatcaaggtaagataggtgatgtttcaatagaatggttgaagtaagaattcattaccgagggaagttataaagaaacgatgagatcatcaaggatgtgtgaaatagattggtcgctcatggatcatcaagaaataagggtagtcaaaagcatgttaaccgaaatgtcttaaacaaacattgggatatgaaggtaagcatatataaaaataatagtatgcaagattccaaggatacgggtatacccagacaagggaaaagaaaaaggtaaaggatgacgacttaacagtggaataggaagggatctcagaagacaagaagttcatggacatataaactagagtgtttaagtaggcgggagaaattcagatgtaagtatttgaaacaagagtattaaagaattcagggatatgagtatgtcaataccaaaggattagagttcaccggatggtagcaacttaatgatggaagaggaaagaatcccaaaagacaag

SEQ ID NO: 148403 - DNA, 524 bp, Zea Mays
cgttgctctagctagctgactcgttagatgactttagttaaacttgtagtcacgatgatttgcttgttgtagcctaaatgcgtatggttatgatcgcgggtaaaaagtagtagtgctcatgtgatgtctaatttaaaacgcaaattgttgggtgattatcgtgaagaatgcgttgttaattggttgtagtaattttagtgcactaaatgatttggataaaatttataagtctacttattagtcctcatttaattaatttaactctaaaaaatggtaaagtgctagaatgattcaagtctctagaatgcggcaattcttaaattatatagaagctggaatctattgattgctgttttgggctgcacgcattgttttcgttgtgttgtttgtttgataaaccaaatcatgttttctgtagaaaagtcatatagaagagttgtagataacatgattatcttgcttgtactaaaatttgacagccataaacctgatcgtttaggagttgtgcttttcacaagcccagc

SEQ ID NO: 148404 - DNA, 564 bp, Zea Mays
cccgcgggtggaatctcgcacccgcacccgcacccatcgggtttcgggtgggtttcgggtccccgtcgggttttccattacatagcaatatagcatgttcagcaaaaatataattggaagtaaacaattacatagaaaatacagaccactgcactaatacaagtagtccactgcactaataaacaattaaacacagaccaacagtgagtcagtgagaatacaagtgcacacaaatacataagggcataaggattgaggcagcccagacgcccagtagtccactgcactaataaacaattaaacacagaccaacagtgagcccgcagcaaatagcacagcatcaaatacatcacacggcagcaaatacagaccaacagtgagtcagtgattatccatagaaccatatagctacatcacacggcacaaactccatagtgcaagtaactacatagcacagcagcaaatacacttatacactctagcagtcaagcagaagcacctggcaagcggttgagtggctgacgggcgagcacctggcgaagtggcgagcggcggagtggctga

SEQ ID NO: 148405 - DNA, 431 bp, Zea Mays
gtcggattcagagatgacaaaaatgtggttaccagcgaatggaagctggctgttggggtcgatgggcgagatgattgcagcagcggtgctctgcctcttccgcttcggagccatcgcgattttttgggcaagacgagcgagccctgaattttagggaagcagagtagcggctgaagggaaaaagtgaagctagggctcggaaatcaaaaaggcacgtcggcgcgagtataaatggggtttcttgggtcgggcattatatctaaagtgccagatcattactcggaaaaagcaaaagccccagacatcactcgacagttaactctaaaatgctagcaacgtcaagcatatggacaaacttccaaacgcgcaaatagaaagcaacaaaacagtggtcatttaaagcaaccaaattcttgattcatactggaggg

SEQ ID NO: 148406 - DNA, 364 bp, Zea Mays
gacttaagtcgattgctccgttagtagggtacagtgatcaccctgagttgtgtaagcgtgagcatgtcgcaccgacttaaggcgttttcgacttaagccgattgcttcgttagtagggtataatgatcaccctgagtgtgtcgtgctgatttcgagttgtgcccgacctaggtcagttgttgatcaagaacttgtatgccttggaaaatggaagctttattgataatgaaaccttctgcttacaaagtacaacttgtcctcaagagttttgaggcattgctaggggaagaatttcctgaggtgttcaatattccatgaattccccacttcagtgttgtccatctgggtgagccggtaggatccc

SEQ ID NO: 148407 - DNA, 312 bp, Zea Mays
cttattatatcacacaagatctgtccaaaaccaagtttttttcaagacctcgataaggaaggcccatgataccgagtcaaaagcctttgaaatgtctagcttgagaaggatacgagcctgcttctgacaatgtaagaatctggtcgtctgctggactagcataaagttgtcaagaataaattgtttcttaataaaagcagtttgattgggggaaaccatattttgcagccggcctgctaacctgttagccaacaatttattcaccaacttcacgaaactatgaaccagactgattgggcggaaatctcacac

SEQ ID NO: 148408 - DNA, 385 bp, Zea Mays
agaacttgtgatggttgcggatcgtggagttaaaaagttaggatgagactagcatgagaatctctgtcacacccgatccccaaagttcagaaactgatcgattctattccgagagagtaaagaaaaggctatcgccaggttcaccgtcgccagagaaaaaatgtcctaatgacgagttcatcaaacctccaaggtatactgcccctttgtttacgcatagagtttttagggattaagagcaagttcgtttatctacataccagaacgaagatccaatttctgtgacattggttcgacctttgacgaagcgctgagtgccatcgataagtgtccaaaacgatcactctctattcggacggctacagctgcggccacagcagcgaac

SEQ ID NO: 148409 - DNA, 361 bp, Zea Mays
cacctaaaaaggccacacatagcgtggacctagttcgcccttggcgtgagaatccaaggacttggtggtatggtgtagaaatcacaaccaaacccaatcaccggtcttgaactccatctcccgacgtgcagcatcataatatttcttggatacctgttgtgcttgaacaagacactgacgaacttccaccagaaccttgtcacggttgtgaaggagagcgacagttatctctgtccgcgttgtcccctgcttgtagggcaagatggccaaagggggtctaccgtagaccaccttaaaggggtcacacgcaacgccgtgtggaaggatgtgtcatagcaatactctgcctacggcaaccact

SEQ ID NO: 148410 - DNA, 317 bp, Zea Mays
tgtctttgaagtactagcaatttgttttttacatttactccaaggaaaacattcctagccatctagtagttatgattatgaaaaacatagacaaagcctgagtcatccagaggtgtgcaagaaaactgccagtttaattggtgtgcaaggaaactgccagtttattagggtttaatggctttgttggtcatgtgaataagtttaatgtgatcattttaatgcagcattaggtttagcttacttccattgaatcaacactcctgccactacttgttaactggcttgtgtgattagagcaatcctagccaacactgtca

SEQ ID NO: 148411 - DNA, 716 bp, Zea Mays
cccttatgaagcttacatcgagggccatcgatccccagatcgacggtggaggctagggtttcaggtagtccggcttatcgacaggcgatggtcgcgatcgtctcaacgaaacggtatgcccaggcaccaaccagggtcgatggatccgcgacccacggtccagattttatgaacccatgatctaatatgtgctattgattacacgatccaacgggcagcgagcgccgcagctcctctcgcttctcagcgacgaccgtgacggcgacgccactccccttcacgacggatctcgccggaggcacccggtttccaacccccaatgccctaaatatcgattgaaacacttctacacgacgtagggcacacgctgcgagtatgcagggggtaacgtaccgatgattcaggcagccagaggttgctccacgacggacggtggatctgcgacggaggtgataatcctggcgacgaattccgcgcactccagccgataatcactcacagcacgctaacgtcgaccctcccagacttcttgtagtgcactctagatggtcacgaaggcttcatcggcggcgggtgattgagcccgcggcggcggcaaaactccctccccctgatctctctccccacggcgcgatgttctcggtggtgtgaaatcgatgagggttgttgcgcggggtctggagcacaggccgaccagctggcccgcgccgagcgcg

SEQ ID NO: 148412 - DNA, 312 bp, Zea Mays
cactgttttattcgatgctttccgctttcgaagggatatgaatgtcttgctcatgttcatcaactccaaagaaaatatccatgcagtgaaaatactagacaatcatccaaaagatagcttcccatcttatttcttaaattgttttttactaaaatcattgtagaaaatacccattagaagtagtagcagcagatgctgccttttttctgaaaaagagatgcaatatccgatctggcatcgggcagagcggagggtggcaggatcaccatcacgccatcatcgcgtcaggtcattaggcgatgtgttctgtct

SEQ ID NO: 148413 - DNA, 927 bp, Zea Mays
gaccgaccgaattccaaggtttcgaagccagtgtgtgctgaacgctagaaccacccaccggtggtgacatcttaacagggtgctcagcacttgatgacaaggaagaagagggtggcagcacgagcttatgtcagcggcaagcaatttgcttaattcacggcaaatcaatcgtcgtcggtaagatggagtaaaatgcgcggcacgaggaagaagcgaccgatcagaggaatgaggtggtgcgcggaaaaaagaatagccctgcactgccctaccgttatatagagcgatcgagcggcgcttcaaaaaacatgaaggcactcaccatcaaaagacgagccaccctacgtcagctggcaatgtcagtaaccaacgatcacaaacacaaaaagcaacccgttcaacttgttatcgagggcagcattcgcctgtcatctctacaagacttcgggtttgactcaacaagttgaaccaacccctcggagggctcatgttggaacaaagacagaacacccccctcgatcacaagtccacatggtcaaagttgcagaagaaaggcgaaggctgagaaataatatcgaaggcactagaacgtgacctctctttggtggaaaagtcaaccagatagactaacttacaaaggtcgctggccactatcgaaagctcgaagactcgacaaggccgaaaggcgacccgtgatgtgaatggcaagtagatttggcattaagcgacctccatgtaaacagcgcccaccctctgtgggcccacttgtaagtgactcaggagggtattaagtcttgtgtaatagagaggtttgtaatcaatcttgtaattaccacattgtatagtgcatggcgggaatatagttggtagccgggggtattacaatatttcaccaacccctagctatctctataaataccctggtcc

SEQ ID NO: 148414 - DNA, 653 bp, Zea Mays
ctcatgtgcttatactctatacctctttagaaaatttgcgtggtgatttatttctttttaatattgcttgtatgtttatttcatggttgtttatgtatggacatgactatagtatgcaactgtgttctttgtgcttatatgatattagattcgagttgaaagtcgtttcaaatcctacataaagagtatggataaatcatggatcacaagtgaggctaggtacaaagcaacttttcatagcaactcttatgtttttctatagttatattgatatgtaacataggaactgtatgtagggagacaaaggtttataaacaaggggtgaatggttttctagcttttgcatttagacattcagcaataggaaataagatactatgcccttgcaagaagtgtgttaactcatttggagagaggccagtgaagtgcgagaacacttgatatgtgatggttttctaaaagggtacacaacatggaccttacatggagaagcttcgtcctcttttgtgaatcatggtaacaatgatgatgagtttagcgagcatcctacagaagatgatgcaatatctgagttgttaaaggatttaggttgtggtttagatgatggaggggatatggaggatgatgggtcttttgaggaacccaatgaagac

SEQ ID NO: 148415 - DNA, 284 bp, Zea Mays
tgcatggattaagcatcagaaaacatacgatttccacttgtgattgggaaaaggttcctgcacttaaaataaggcatatatcctttagggcgttcatgcgctagacagctttgccgaccagccgcccacagaggccgaatggccacctcttgaaatagtagcaaccagccatgagccatgtaacagggcaccgagaaggcgagaactccccttctagtcacatgtcatacgtacagggcttaaaagcgtaacgattccataccgtaccttcgggtaggcaacta

SEQ ID NO: 148416 - DNA, 388 bp, Zea Mays
ttgaagataagggtgttcaggttatcaaggaaatgatcatgcagaaggtagagaaatacaagtgcttccgttaggacagcaagggaattttatggtttggagatcgattggttgttcccaaggaccctgagcttagtaagaagatactggatgaagctcatctttcaaaattctccatgcacccaggtagcaacaagatgtaccatgatctcagatccttatactggtggaccaggatgaagagggaaattgccaagtatatatccgagtgtgacacctgccagagaatcaaagccagtcacttgaaggcagcaggccctttgcaacccttcccataccatcttggaaatgggaggacatttgcatggactttatcgtaggattgccc

SEQ ID NO: 148417 - DNA, 797 bp, Zea Mays
ctaagattgttcttcacagattcattaggtcctaatacattactactacaactacttatcctaaatccaatcacacactctattataccttgactggtaaaacaaaatatcctagcttatacctttgccttgcatcttacttttacgattttctacaagtctctgctcctgcagcatcaatgatctcccagatccaacaatgtcaggcacttcatttgtcttactcttatcaatcttcattcttgtagagcacctgcttatctttgtggacttcatcctatctcattcatggaactcataaaacatgttagtccacctagttatattaattaccaaaactacacatagagctttatttacattgttatgaaggaagagaaagaattgttgagaataaaaattagacattgtagacacggtgtgattcagggatgacggtggaacttcaaacatcatcagggtgtgatgtttactttatagttcagtttcctgcatgcagttgaagttgaatcatttgcattgtgattatcaggctggtaaacccagctctgacaacttttagtaactacaaaggtcaaagttgtaaaaccaggggatcaagtttaagcataaatttaagagcagctaccaaaggtctaatcgtcttcaaagttgtatcatagcttgccacagaacttacctttaaaagccatttgagtagttttcataggtttactcatcttcattttctaaatctagacgtgctaaatgacacaaatctacttctacagcactaaaacgacagtataaattacaag

SEQ ID NO: 148418 - DNA, 584 bp, Zea Mays
ctcctgccacgctacccttcattattacccagccctgaatcacccgtcacttgttgtagatgctggctctcatccatccctatgcagcgcattgatagtctagtgaatctagcatttctccttcatcccttgtgttcgctctaggtttagtatgttggcatagccctggttattattgtagacttcttagctagactttgggtctgtttggattcaagatctaattactagctagctaaaattagctaaaattgattctagtgcatccaaacaagagggctaatagacgtgataattttttagccaagtttttaactagctgttagccaactagctagccaaactcagctagattttaacccatctagtagccctaactcatccaaacatgatcttttctagtcatgcagacaacattttaataaggtaagttagttgcattttaaatgatgagtgtttattttttaaaacagaacaggtgtaaataaaggaactagaaacttcattcaaactaagaaaggaaactctacaaattatttgaccaccgctccttaagctttccatgcaaatcagttcattcaccc

SEQ ID NO: 148419 - DNA, 492 bp, Zea Mays
tttagcaaccaaccttgctttgtgcttaatgatgttaccatcaggatatttcttcaccttgaaaacccatttaagccctatagctttgtggcctgcaggtagcactaacagcacccaagtcttgtttgactgaatagagttcatttcagtcatcatggcttccctccagcactgttctgacaaagctacctccacacttcttggctcctctgctgcatggaagcacacaccactatactcgaaatcatgaatttcttcagttgtatcatataaattagatatatttctgtaacctgttggaaccccttcagagttacttgaccattctaactgtggtgtttctaaaaattctccatgtgcaggtctccctactggcgtgtgtggagttgatcctccatgtgaactagtgtcaatactccactcgccttgagctggtgaattctgaactgaatcaccagagaattctgcatcctctccttctgttgttgctgc

SEQ ID NO: 148420 - DNA, 535 bp, Zea Mays
ggttgtttcccagaacgggtttgctcaggttttggagcttgttgagaagaggtatgggaccatggaagctattgttggcaagacgaaggatacgaaggaaggtcaagtttccaagagaggagctgatttggccagccaagctttggccgttgagattgagctccgtgactcgatatggtcgagtggaactgcagttcacaccatgccaatggcagaagtggatgctggtgttccaattgctcaaggctccgtgcggatcactggtgatgcccttcttgaactctagcagagaatgaaaatcttggctgttgttatgatgcgtcgagcaatggactttgtccactgcatgacatagcagtagcagcagtactacaagcatggcgagtttcgacggctgcttccaatgactcattaaggcacgtaattgacacctgtaaaaaataaagaatgatcttggcggcgtactacacagaaactacgtacgctgtgttaaaggagtgatcaagcttacgaacttcctatctaattctcttaa

SEQ ID NO: 148421 - DNA, 661 bp, Zea Mays
ggatactcagaggtctgatagtattcgcccgaagcgtcctcgccgaaccaatcatccaacttctcctgctgaggggaagaaaaagaaaaagagacgtcttcgtcgagtgtcatgcttgaatcaggatgccggcccttctgctcctgctgctgaggaagtgccagtgccggtttttgctgaagctgatcccaatgggtgtgacccgactgatgctgaacccaatgggtgtgaccttgatgatgttgaacccaatgggtgtaatccggccaaagttgatcccaatgggtgtaccgttcgcattattgatgaagatgaggaagaggaggaggaaatccctttaactacatagccagcggggagagtagtggtgttccttctccagctttgtctgccctcgttggtcttcaagaattgtctctggcaaattttgatcagactctcgaagatatggtcccaaaagatctgttgtcggagccggcagatggtgggatgatggaaatttgtgctgatgtgcctgatgccggtttggagttatcccgagcggcgtctcgtgcctcatcgaccttggagcgtggtcttaagagtcaggaggctggtctggattgctctgttcccatggaagtggttgaaggtccttcagccttagaggtggctgttacag

SEQ ID NO: 148422 - DNA, 521 bp, Zea Mays
cacctttttgctagctgatcaagttccagtgatcaacattaagttcaaaaatctacaaaacagaaatccctcctcatagtattgctatcaagaatcaaacttcatcagtagttcagtacaggtcatacttcagcataatataaagaccggatgtgatcaacaaaaggacccatctttattacatgcagcagaaatccatgccatacctgtcagcatggtccacagcaagaaagcaggaaaaatcattcatgcacgcccgcaataccatcttgtctcgggcacactagatctgaccgcacatgcacagtgcacttgtccaaacgagaaacggcttgcgtttagctcgagcctaaattccaggatttctacactaatgatcagaactttcccataatttcagtgcatgcatcccaatcctgtgcattcccccgttccagaacctcgagcgcgccacgaaatctcgcctaccgaagaccaaggtgagcaccatgaatgcactaaccagcaaccacgcattgctc

SEQ ID NO: 148423 - DNA, 528 bp, Zea Mays
caggatcagaagtgtcatactgtaacaatcacaagtgctaagtgtaaggtctttatatggcttgctataaacaataaatgttggacaacacacagagtacaaaagagaggacttgattatcctgaaagttgtgttctttgttaccaagaagaagaaactgtgcagcacatcctaacaaattgcatttttgcaaaccttagctccaattggtctttctattgtgatccctgggtcaggcgcccttttcttccgatgttgtcgccgtccctgggcaatcttcggtccagcagcgaccctctggtgcttctctgtcacctgtgcacacggcccagcaggactggacccctacaccacccaggtccactgctcctgctatgccgtttgctaaccacctcactgctggacagtctcacctccgcggttcgacgctccatctactcccggcggactgcaccagttccccctgtggatgcatctgcgtcatctcctccagctcgcctcccccatggggcggtagtggtctccccg

SEQ ID NO: 148424 - DNA, 812 bp, Zea Mays
tgctcacaagtaacaatagaatgaacaccaacatggatggaaaacctgaaagcaggacaaaatcagttatgatttttttgctgccaagacatccagtctattaagctcggccagataaagttatattgcacctattgatttgcatactcgctgcaagtctcctaatagttaagtttcatgccttgctcaaaaatcagtttattagttatgggatctactatggattttaggatgactatcaccagtcaatggcaatcatatggggcacatgtttattggcatatgggtttaagatatagaactagaacctatatttccagtgcatcaagccctccacaatccatggaatttgttgagcctgtttggatcagattcatattgtttctatgggcaagcttgtggaacattgagcattatctcatattctcatccaatgtctattaggatatcactctgtactataatcgcaccttgaagttagcatccagctatctgcattggatcactaaatatctattctccaatgtgtagatgaccattttacaaaccattagcacaatgcagctctctttatgcaatttgtcacttctatttccaccgttaatcatagtcaataatgatacatccattgggctctgtctgcaaaactgctccattgattgtgtctcactacataagcttagattttctttagtttttagtcacaagtttcgtataatacggcaacgatgatgactgtgaaaatcatggttattaaggcgtcgctaaagcggtaaggcgagcatagccacgtaaggcgtcctatcgccttg

SEQ ID NO: 148425 - DNA, 1275 bp, Zea Mays
attagttgttgctggaagaacttatgaaaacagttcttctattaggaaagcatgtaggtttctattgtcaaagcagctaatcacgggtggatggggtgagacatatccgtctaatggaactgcggtaattcttaatttcccttacctaactatgtgtcttcttggtcatttcatgtttgatatttcatagaatagcgtggtacacatatatttggtcttcgacaaaatatttaaatgttatcatgtgaattgttcccatctagccagtccatcaagtagtttagttcttaaagcattatatatcattagtgatggtcttcattttaagatttaccaggtctatgcagaggccagtagtcctcatgtagtgaatacagcttgggcaatgttggctttaatttatgctggacaggtagacattccacacattgttacatttggagcatgatgagactgttatatgtaagatttatagttcatttatgtgcatgcaaaataggttcagcgagatccaacaccattgtatggtgctgcaaaagaactgatcaatatgcaacaagagtcaggcgagtttccccaacaagtaaggcttcatcttttaggcgtcaccatttggtagttgtaaggattatcttgcactttgatttgtcactaatcttagttggagcttctaaagattgaaatgctttatttcaacctctgtgcaaagcatgcacgcactgaactacagttgaatattatgagatagaaattctatagtataattcctattgtaaatcattagaattggatcatatagctataaaaaccatcttttctacaatcatatggatatgagttgtatttgaatgcacatataccaagcttattgtagaacccatggtctatagttttggcaatatacgtgctaaaccccacctatgtttgatcacaggaacacattgggagcttcaattgttccttttacttcaactatggaaactaccgtaacttgttcccaatatgggctcttggagagtttcggagacgaattgttgcagaaaagaagaggaaccaacaaacatgattgttttaggcatcaacaaattcggggtgaaagcttgtaaggggctcaagtttaacatgtggtgaaagacatgtcaatatactaaagctgatgtccatctggctaaaccatatgtacatatttttactatggaaacaacgatccatatgtatatatggaataaagggccacatatatgaccgtttcgccatctatattatatttttgaa

SEQ ID NO: 148426 - DNA, 2023 bp, Zea Mays
ttctagaaactacaaatatgcaatcgaaaacctaccagtgtgagcaacaatccaaaactcctctgtcgatgacgatgtctctacaaatgccacaactctcattctccaatggaattttttcctgcaaaataaacacttagatggaccatattataggacaaacataattgtgcaagctaacatggactgaagtctacttagcagtattacagcacttactggagtatgctattcttaccaagttagtagcagtacatttctttcatgtctgaataatatgcatctacttaaaacatggtcacacactacacactttgatcccagaagaagcaaggttggaaagcaacatctgtgacgtataagtggcagagctctgagtctgtcaagacaagcgcataaagcaatccactcttatttgtaatttggaatatagataggaaatgttttttcatttattgagttcaaaattatcttaggtcatatttacaagttacaaccattatcacatggtgttctttaggtcctagactcctaggcaactgataactccagcaaaaagatttccaacctaagcggaaataaatgcctagtaaacatatccactacagagagatattagttcgaccataatacttggcactccatattaatggtaagaacacttaagattatgaaaaaatgcaagatgcaatataaataaaactatatttcatttcactttgtgacactgattctaacaatctagcttcaaccagaatagaaaatggatggggactggggagtgactgaagagggacagagtgacagactgaggggttgcagaaaggtggtgaaatgtgcagaaaatggaattcccatgtataacaaagggattgttgttagtgtggcttttcatgcctccaaccccccatcaaatgtggaaatgtccaaataactcaaaaaaaaaacaatgcagtttgatgtaggcattgcttattcatgctatagcaagttaacaacacaactagtagccaatgtggtgtactgacacagtgacaccattccataccctgcaagcaatcatgacctactctatataacaaatgaatcatggtctgattgaacaacaaaatatatacatgctccaaacatagggaagaacgatagcatcttagcttcatagttcatttctcactgagcaactcgaatagcaataccagcagccactagcatgacaaccgaaaaggaaattcagcaacagcaaagcattatcactccactagttcactaagcacaagtaaaagctttgaaggcgcacaataccaggtcttccatctgtcccagagttttgctcgactctccatcaatgtccatctcccacgggaacatcctggttgagctttggtgtggcaaatgaggctacaagcacaatccaaaatcagcaagtatccaggagcacggagggctgaagaacatgattgtgtccaagaatcagatcaaacacctaataattccttgtcactcgatctaatgtaatacccatatgaactggacagtatattcttgtttcagcttgaggattttttgtgacattatctctcctatctcgtgctggacaacattccttatcaatatgaattcacccttttatcacatttgctttcatttgtgtaccgttttctgaccccaaaacctacctgacccccataatgtacccaaaaggccaaaatgaccaagcatcatccgaagtttgtaaaagttaagtgccaaaagaacactgcagaaacagtgaacaaatagggaggaattgtttttgctacctatggagaagtagtatcacatgaaggaggagaaagatgagaagccgatcctcacccagtacgcaactcgccggcaagcacgtcagagggggtgctgggggtggacggggaccgcggaggcgcgctcactttcgtgtgcctgtgcggctgtacttgtgccgctgtgcgccatgcagccgtatgctgttgcagcaacgcagagatgtcaggagcggctacggagg

SEQ ID NO: 148427 - DNA, 926 bp, Zea Mays
tgttcagtaataatttggttgccagcaaaactcacgccttctccttttccataggaatatggagaatacaggtgtgccccagtggaagcagctgctggcttcctttgggccaattgcgtaaccttggcatttgggaatagagataagcgaagcagcagcatgaatgtatgctccatcaggtgctgttttgatcttcccgtgttatggtctcccctgatgcctctatggagcggatccacaagtccatatagtgtgtactttgactgtatactgaatattcttgcaaaagaaagccttggtttctttgaaaagcaataaattatagcacaaatgaatcaacatattctagtgaaaatcatttgtctggctttgtgctgagagctttaacgatgaagtgggaaatcttttcgatatttggatatgtaaaataggatcatattatacccaaattgtgggacgttattctcaagtaaatgtgatttccaacttgtttgctgtttgtagtggtgatttgtgattctcatcattccttctcgttctgttctgtttttttgttctttgttttgtttgctgtgttgctttgcttttgcctaggtgcataattgtctacttcattccatgctacggtttccattaaagtttcattggaaattttcttattgtgaatgcttcatttgcaggtcataattatggttcctcctcaatggctactaggtgcagtagggattcatatgatgacagtgttaacaactgcacacaagttactgcttcgaaggtacagaaatgttttgctatgccatctagcatttcttatgtcttggaagcaccattgaatcatcgataattcaccttctctaatgcattttctattacgcctgttcaggatgtttcttctagggaagcttcaaatgtcttcacatggttag

SEQ ID NO: 148428 - DNA, 390 bp, Zea Mays
ccggacgacttacgccaagaccagagctctattttggcttaaacctaattcaagcactaatcaacgtttcccctaagtcaatttcatagctcgagctctaaatcaccctatccacggagacagcgcagagaacggacgaacagaaatgttcccggtgatctagggcagtctagctcaatcaagcgagtcgaggagcattaggagaacctaaggatgctgaaacgggagagcagaggggataaactgaccggaattgtgctggccgcggtgaggtctctcctacggtgttcttgagcagttttgggggaagttcaaaattcacgctcgctggtgaacgattggggatgattcttggtggttggatgcttaactaccttatggagctcgcgg

SEQ ID NO: 148429 - DNA, 337 bp, Zea Mays
tgtccagatacagcagtttaaataattgtgcttttcgcctcctccctgcctctgtaatttgtatataaacaggaaaatcacgtaggctgctctgatgttctaaaaagacaagatcaagttcccaatgaaaacatatatttgctcatccgattaggcaaaacccaggcactctggcaagttcagaaaagaaggtaacatacaatactgcttatttacttgtcagttgctccttaatgttcataggttaaggtcagggtccaggcaaaataataccataagggaggacaaaattgtagccaatgactcattaggagtgtgaaactcaaatttttatgtt

SEQ ID NO: 148430 - DNA, 565 bp, Zea Mays
gctcagctcgctctccaccaccgcgaggctgatgaacatccttgaagccaagcaccggtggaagagcgccgctcccacaaggccacgcaccgccagcggaggaaagacaagactggcagcaccaacccgctagggaggacaaaaggcatgaactctctggcgacaagttcgccggggaggatggcgccggcacaaatccttctgctgaacgccggcgcatcccatccaagtaggtggcacaccatgtcaagcacccgctcagtctgggcatgctcgagatgaacttacaaggccatggtaaactatggcgacacaaagcagaaaccttgaaggcaaaggggcgcagagagctcaaaggcgaaagggcaccgtgagtgggaaagaagcaagacatggctgctactcgagggatgaacccctttttaaaggcagatttccccgctcgcgccctgaagtgtcacatgcaaagtctcccccgatgcgcaccagggttcccttcctatgacacgggggccaggcctcacatgtcatacaattggcccgaagcgcgaagaaggcgaatcga

SEQ ID NO: 148431 - DNA, 397 bp, Zea Mays
gtagctttactcttctttttctcgaatgtggacaccaattttggtagagggaatttagatttctttgattgtcgtgaatcccttgatggctgtggagaaggtggtggtgtcctaaatgttgatgcttgtggcggagacggtggattagaaagaggatgaggagcatcatgggaagattgtggaggtgatgatggatgtaaaggtactaaagtttgaggaggcagagatggttggggatgagacgacgacggcattggtggatcaaccaattcgacttcccttcgaggccaaaggatgaaatttttgatggcttgtccaagtgtctcgattccttcgggcccagggatgtctagcatgtcgtcctcagatccttggacgaccgtcatcacttctaccc

SEQ ID NO: 148432 - DNA, 467 bp, Zea Mays
cggaataataggtgtgcacaatcgaagtcgctcccaaaagactctccgtgcagaagtggcctatgggcgcagctgtatcaagcgaaggcgcgcagccttatcatacaaattatggttacatacacacagcgagggcatcacatattacattggctcaaccttcggggtgatgcccatctccctgtagttgaacaacattatccttaattcctcaccctcaaaaagattttgcagctccccttcacccacactagccccagccggcgaggacaacaattcccgcttaccagtcccgtccacgcgaagacggccactctccatctcaccacaatgacgcctgttacttcgcgacaattcactcactctccgtttcgccaccgcccttcgccgcctacacccagtactcgcacccggaagatcctcagcacccaccacacgcggcgaagtctccgccgcagccacgtcca

SEQ ID NO: 148433 - DNA, 6937 bp, Zea Mays
tgccattcatgtggcgttctcccatagccagaattgctagggctcggtgtccgaccactatccggtgcggcggtgcctccgatcaggtcatagggcaccagccaccgcgtacatccactcctccattcctcaacggaagtttctagaagaggtgacaacgaacctgctcttatgttgtcgtaaaggtcatcggcacccaactgcctacgacatcgttgttgctgctcctgcatgcacaagagtcgggccgatggcctctacctccgatctgtgccctctcctcttgccacaaagctaacgtatgtgaacatcctctcctccttgcttccccaattaaatctagaaagatgtttcttacttagaaattacaaattaatgctgctacaattttggacaggaagaattttacattagcttgttgcagtttttgccttgagagccttgaccaagcgaacatgaattgattattgtggtccgtagctagatataggtggtgcaattgctaatcttagtagggattttatggaagtttcttatgacacatgattgatggagagcaatgaaactagtccacactattttcaacacataatagtcttggaaacatgatacgaattccctactaagactagctaccttaacaactgcaccttaaaaagaaaacacactgctgattacttgtggctctagctaagctgatgatgctttgatacttcaacaacaatttatttgacaacatgttaggtagaatcatttttagtaataaatcatacaatatgcgtaacttgttcaacacttatatgtcttgctatgttctgaatttgcgctgccatgttatgagttttttcattgctcaagattgccatgttcttctatgttgcacttgaattgctcacttttaaaattcattttaaacaacctcatatggagaaatgaacaaaatgaatgttgtagataacaaaaagttatgcaactttaaagttgatatgcttttatttgaataatttctttaaataaaattacatttaaattttttaaatatttgaatcatatttaaaattcaaaattttgaaaccacctcagatgaagaaatggccaaaataaaagttgtagagcttgaaaattataaaacttttttttgatgaaataggatgggtgagaacccctagtgaaattaatatttaaaagtaaaaatacaacgagttaaaaagttgacatcaaaactattacattttgactaatctaagtaattatgccaggcacatatgatagagacatttttttcttctgcactctaagaagaaacaaatcaaaaagatctttgaaattattatagtagttcattactgaaggatttatgccttagaatagccaagcattcctttgagtccagattgaccacatcataatgatgatgatgtccattgcaaatggcaaacccaaagcagattttattgcagtgatggtctggatgtgggagcctcctctttggaaagtaactccaatttttggtacaacgctttgcaaacccacaatggaaaaataggtgcttcaccgattctagcttctgtagaatgcaaagtccaaatactcattttaaagtataataagcataatgtctagaatgaatattttaaatgaacataagtgtcttattgatgcatttgttagacaaataacccgcaaggactgagatatcgagctcgagcaatggcagccacaaacccgtttgtccactatcctaatggtcgtcagcacccgaccgtctcccacattgttgttggtgctagatgcatagtccaagctctatgttggatgtatgcccactttttcacacatatagtgtcgaagccaagttccaatatgtctcggcacatgctcgagctttgaccgaggtattacgtggaggccaacccaacacaaaggttaggacgccagacccaacacataggtgcccaagtgggctaggacgtcaggaagtggtgtccaatattcaatttcaagctggctccactagtatgagcatcctctcctccttgctcccccaatcagatctctattccccttattctcccaattagatatagaaagatgttgcttagatgttacaaattaatgcacatgacttgattactatggcaaccattatgtgctaatatatacctaaataggtgttgcaattgacagtcacattgaggattttatgaaagtttcctatgacccatgatttatggagagccatgaaactaattcacattattctcaacatacgatagttttagaaacatgcatataaaattcgttgtgatctttggtgtgctcgaatatcaatagcatgtatgcatgagctcaaatacatatgtgtggagctttccaggtgcatcttacaatgttgcacatttaagaaaaataaaacattcatatgcatgccaaattctagctttcggtcacccatggttcctagaaatgaataagctaacttccaatgcacaataaaaccaatgcttccaagaaattaataatatgaactatcagtaagtgagaagtaattgtagatgagctttttcggcttagattttggttcggcaggagaggagcttttgtgcggatggttgcgagttagaaaaactaaatattcaccacaatttccaccagttgaaaacaaactttgcatgccattcatgtggcattccccacaactggaattgctagggcatgttgttcgatcgctccccggcgcctccagctaggttatagggcgccagccatcacatatatccactcctatattcatcgctagaagtttctagaagaggtgatgacaaacctgctcatatgttgcctacgatgttgctactgctcttccatgcacaagagtcaaggcgatgacctctaccttggatctgcgccactcatcttgtcgtacagccgacatatatgaacatcctctcctccttactctcctgagcagatttggaaaggtgttggtccctaagaggttacaaattaatgctactacaatttagatggcaagaattttacattaacttgttgcagttttttccctgaggcccttgaccaagtgcacatgatttgattatcgtggcaaccattatgtgccatagctagataggtggtgcaattgctaatataataacagtggggattttatgaaagtttcttatgacacacgattgatggagagccatgaaactagttcacactattttcaacacataatagtcttggaaataggatacaaattccccgttgagactagccttaacaattgtagcttaaagagaaacacaagattgattactagtagctctagctaagttgatgatgctttgatctacaactgtagttcatctggctacatgttaggaataatatattttagtagaaaattgtacaacatgcctaacttgtttagcactgatatgccttgttgtgttctgaatttgcctgataagtgctgccatgttatgagtttttagtgctcatgatcgtcatgttcttctatgttctaatttgttcattttcataaaattttcatgcattgttttacttgtatagatggccaaataaaccatctgatctgaacccgcataagcctgaccaagacaggacccaatagttgtcaggcgagcaacacacgagtgtgactaactaacacattgggttgtgttgcacctactcatggctacacatgtgcctcggttataaccttggtcataaccccataaaccttgagccttactaggttggcccattgacacacgagcccgttgtgcttgaagcattgcaaatctattatgccactaaggttgtgttcggttcagctttctgaaccagactcgttgccaaaaatttggaacttcaaacaaatgggtacaacaacataatagattcctgaaaatcgacatatttctctagttcaattcagaatcaccttttaccccagatttttagattcctattatctatgctataagctaccattctcttataaaatatataattgatagttgtttcaaattttcagtttttccacaatcgtcccttcacagcagttttctcatagctcacagctagaatccgattttttaggaatctacagttgaaccaaatagacccgaagttacccctaaatagaaggaggctaccaccctacccctgcatagatcaggggtgaagtcactgcctcacccctgcacaaatcaggaaggatgatgcatcaccctatccatgcggtcggatctaagggaaggaggcccacaataccacctacacatggatctgagggaacatgtcaccatggatcttggtgggcattaatgagaggacaaaccgagaggaattaatagacattagtgagagaaggaacattaccaattagaggacatatttcgtttcgagaggagatgtgacattaaattgactagggagtatgatgtaggagaggagctcgggaggtgatttttctagggataggatctgggaggtcatcgattgggattaggattatgagaggagagggaataaaaataaggtgtccgagtgagagttcgatggggtggtgttggtatatactatataagctagggtttaaagtagtgggccatgttgcgtcaggctggcacgtgtgccaaggggatggcctaggcattgtgcaagcgtcggctaggccaacataagcatgacgattatggcaaaacatcaggctatgggtcatgttgatggctaggactcgagccttatggtcatctatagttagttgtaatagtaagcagaccctatttattattgcatagtcatgtacatttcattttctcatcttcatgaatgctagtgaatatctagttggttgtgacaataattaattttatatatagatggaaaaagggacaaaaaggaaaaccattgcaaaattggatgccagtgcacatatagcgtgaatagacatggtttaggaagagatcactagctactagctagaatagggcataaggtcacacacaaatcatgttaaattttgaagaataaactggcagggatcctactatcgtggacaacatagaaataggtggtaccgatgctcacaaagctgaatctagagcagggaagactttgaagatccatgacccaaggttagcggtgaccctgaaatttggacaatttttagggattattttggaagcaccctggtttttaagaatccagtttctagaaattggtttctaaaaaaaagaggtgagggtgtttgaaacccggtttctaagaaaaacaatttctaattttttgatacacaatgtctagcctatccttcctctataaattgggtgagggtggaaataaatgtaaatgtcatgaaataaataagggcatgatgtaattaaacagacaaactagttttagctgggagaggtcaccttctggattttaagaaactagggatctagattctataaactagagcataaaccattatgtttggaatcactctagtttccataaactagtttcttaaaaatgggcccttaagagttgtggaatgaaaaggttaaggtataaacaaatacatgttttcttttttagttgacgaggattaattgtttaaaatggattggcatttgccttttaattataggtcactctagtttgtaagaagtacatacatgcaccactagaatatgaacatagattatatgttatttttcttacacaccaatgattccctcatgttccaaggctaatggatggagctatcaattgatgccatagccatgggcaatagatgtgagatccaaaatgggtcaagtgaggcttggaacccaaggcattgagttgttcttttttagtaattttatttaatattgcggtgatttgtcaatgttggccttgggctagagataaatagttcattgattgaaatactagctgaatttagcctctaggaaggctagaggttaagctaatccacttttagagctaaacactttttgcagctattagttgaatttagtacactaaatgttctagatagagctccatttagcccgcaaatcaggcgaggggaaccaaaaaggactaccaaactagctgaccaaagataatcatttataaattgatgtgtttgttagactatcacttgttagttggtatttatagtatcttgttcatcttttttgtttagatatgtgtaaaattccctgatgtttaacatgttttttgcccacccgctaaattatttagcgcactaaaggtcatagcagactatttagaacactgaataccagtctattgttttctcttgtatagaacccgttggccatacaaagtatgcaaactaaattatagttggactctaaacaagagcttgttgtttgattaaaattctaaatgactggagttttttttggacatgtcagtttggacctatagttgtatactttgaaataacatttgtttgttcacttgttctataaagaaattatgtaagcttagagcctagactagaagtgcattttccttgtgttggttgaaactgcacctatatttttactatcatcaattctaatgtattataacaatatagtaccatcatgagcttttccaattattctagaaaacaggtcatgttcctctattatccatttaaggtttttaaaaagacaagtaatcagttttgatgtaaagtttgcaagaacttacacatttatattatttatttgataggtcatgaagcataatactaataaaagtattgaccaaagaacgcaaatggcttcttcaaatggtcatgtcatacctaatgtatctcaaaatgattcaaagctcgagctctttggttttgattctctagtcaacattttgggactcaagaggtatggccaaatgttctactattttcaccatatttactagagccagg

SEQ ID NO: 148434 - DNA, 1289 bp, Zea Mays
aaaaagtatgcatgttctacacgaaacacggaggatgttccgatgcctgaatcatctgtttcacataagcggaaacgagggcgacgaggtcccaatcagatgaaagaaggtgcagttatgtacgtaacaaaactcaatgcagagggtttcctgaagaaccacttgacgtggttacaaagtttcgaaattcatgcgggtctactgttagagatatagtgccaatcacacttcagaaatggaaggatttagatgaagacacccgcaataaactatgggctaagttgtctgagtcattcaaggtcccaaaaggcacagaggttgcagtaaggaagtcgatgctctctgctatggccaagatgtttcgtgggtggaagaccgagatgaataaggattttgttaagaagaataaggtttctcctcccaagaaaatgggggaaaatcactcaagctcagtgggaggaatttgttcgtcagaagaccgaactgaaggtcaaagaactgggtgaaactaattctcaaagagcgaagatgaacaaacacccgcatcgcctggggtcaaccggatatcaccataaagttgtgcagtggaacaggataatcgaggaagctatagctaacggcactttgaacccaatattaaaaaatatcgataagtgagctattcgttggatcttaggtcgggcaggtttgactgaggacgacaaacttttgcatccagaattggtaggcgaagtttcgacaaaaaatcaagaatatgcagaaaagagaaagaagggcgaatttgagcctcggagggagaatgacatactaactgcagcactaggcaatcctgaacacacaggacgggttcagggaatctcttctaagatttcctggagaaggcgtttccagagtatgcggcgtcatataggaaacacgagaagtcgaaaagaacccttgagactattgatgaaagggtagaaaaggctattaatgacgtgataaagaaaatgaagaaaacagaatgcatatcatgtgaactcaagtcaggccacatgagtacacctctagtccctagcagcgtaggatctgtgcaagacttcgtatcgggcaccaagtaccctgtagacgatattgttgaggacaagccttgctttcttcatattccaatcaatcgatctgggacaaaaacaaaacaagctgctactggtttggtaaaaccaggacttattaactaccaggataatcctgtcccgccacactatgttgtggtccaagttttagagatcacagacagtggttgtgaagat

SEQ ID NO: 148435 - DNA, 301 bp, Zea Mays
gcacgtgtgactacaacgttgatgcacatattgaatagtgatcttgagtacattgctgcctaagtcgtggcgataatgcacctatcgaactgtaatgccgtacattacacattaaatgtgttgtatgggagacttaattgatatgtcagtgctaaggacctgtgaacatgccctaggcatagtgtccctactttggggtcgtaatgtcgtcggtgggaccagactcatccttccatcttatggacatgattacccttagtcgtagttagtcccttgttcttacggaaggcttcgagccccg

SEQ ID NO: 148436 - DNA, 315 bp, Zea Mays
ggccaagaggaggacagaccagattgccggacccgacgccgcttccccctacgcacatcgcgcctgctctcccgagcctgccccccgacgcaccgacgcgcaatcgagcggcccccaagaccgatttttcgtggctacagaggtgggcgccctacgacctcgacccctcccatcctactgcagctctggcccccatcccgtccccgaccaagtccatcgaccgcatcgtccaccgcctctgcatcctcgccctcgacgacgatgatccctcctcatcttcgacgagacacaaaccaaatggtaataatgttgttt

SEQ ID NO: 148437 - DNA, 775 bp, Zea Mays
cactaaacgacaggttcagtttggctttcgtgcgttttatagaatattgaggcattacacttagatgggcactcctccccctaatgccgaaatgttctaaaagcatacagataaaatccccaaccacaatcatccagttgtggccaatgtatgctattgtggtgatttatttgggaaatcttacgcacattacagataggggttttatgcagtgagctttggacttagattgatgtagtggcatgaatactacatatttgtccttcaacgtgaaggattagtctcaacttccagcaagacatgcaacaacaaggagctttgtggttacaattctacaaacttactgttattatcaccaaatatacagtcaatcatcaggatttagactgatacgcgcaacaatatgttagccataaaaacaaaatactttagggctcatgcacaccatttgtcgtttggagcaagtagttgacttcagatctacaaggacaatgaccatcaggtctagcgctcacaagaacattcattggttgcattgtgctttcaagcacataggagaatttgcgcatatataatggtggtaaagtgcatgacattaggccaatgctgccaagcagagatttttatatgcatagatgtatagtccagctcgtttttatcactgcccatggtttacccaattactcataatgttctgaaattgggtatcaatttgtgcaacatttttaggtataataattttgagagagaacttataacaatagttaattatttg

SEQ ID NO: 148438 - DNA, 1326 bp, Zea Mays
tgactatgtattgcttgttctgcctttgggctatatagtgttccttccatagtttttaaggcattgcttaagcagtaaggcgctctcccgccttgcgggcacgagtaaggtgtttgccttaggggtcaaggcgtagccctagcaccttgagcatcgacaaggcgttgctttgcggactccttggatgtagtgtttggggtagagtttatgtgagtgccagagaagttcacgggcttacaaacaaggtcccgatcgcggtaagagaaggcagcgctcgggggatctctagcggcggcggcggcgcaagctcagtgaagtccaggcgagagggcgcaatgacgagctccccctcccctcccggttcgcgctctttattctctcaccctctctgcgttctctgctatctaaatatggatgtgagttatcctctgttgtagatttatgatagagcactggctctaatcctgttgcctctgtggatgtggatgcaaacacatatgaccctatggctgatccaaaactgatgaggacatcctccactattacccgttggcaaagacgcaattggcccagttggcccaattgtagtcggatgacgaccgtgtgagcctcagaattatcccacctcgcttaacttgggaggaggaagccactttaaaagggagagccacccttcccccattggactagtcttttggggcgattgagcctttccctgagttgggtgtgcctaatgaactgttgggctccgggcaaccctaatttgttgggcctcggccaaccccacctgggctgggtgtatcatctggtatcagagctagggcccattttaagaaggtgggaatgatgaggacatcctccactattacccgttggcaaagacgcaattggcccagttggcccaattgtagtcggatgacgaccgtgtgagcctcagaattatcccacctcgcttaacttgggaggaggaagccactttaaaagggagagccacccttcccccattggactagtcttttggggcgattgagcctttccctgagttgggtgtgcctaatgaactgttgggctccgggcaaccctaatttgttgggcctcggccaaccccacctgggctgggtgtatcaaaaacggagagcaaagtctaatgatcctggatggaactatagctattggacggagattgggaaccaagataaggttacatgcaacctttgcaagaccgtgacaacagaattatcaaaaggttgaaagagcatcttgcccggtggttttgcggacacataatgtgttctaagactataactgagattagataagaaatga

SEQ ID NO: 148439 - DNA, 322 bp, Zea Mays
ctgccgtcgagcgccatcggctccagctcccgtcctcgccgcccgacccgttcccggcggctgcgcgcgcccttcttgacgcccccagtggtcgtcccctcaccatccctcctcgctactcgcgctgttgcacttctcccaccagtgttgcctctaccctcaccgatttcatgacgtcacccccaccatacatgaactttacctcactcgctgctctcgtgactgtgcgtgcactcctccacgacggccagctcatccagggcatgttcgtgtccttcgatcctgcctgggaccctattctccaggactgcgtcgagctcca

SEQ ID NO: 148440 - DNA, 420 bp, Zea Mays
tccacccgggagtttaggtgggtgcagtgggaggaaaggtcatcatagtggttatcgagggtgtggagatatccggccatgtagatgatggtggggtcatcctcagtaggatctcttcctgacagggcctgaagtcttttcctccaggtaggggtatttttgttgctaggtgggaagtaacgaaggggggtttcaaagacctctctgctgtagttttggcatagcagtcggagggcttttcgggcaatattttggcaagtgtctgggaagcaatgtccggtgaaggtgacttggaaaggaggttggtttgggtggcttcggctttctcccaggtagactgccatagagcacttctcagttccgttctcgcggtattctttccagacgtactccggcttcttgcggatccccatgcgaagc

SEQ ID NO: 148441 - DNA, 406 bp, Zea Mays
gatgcgtgccaccgtcggcgagccgtagtctagtgcgctgcacctggtggggaaggtgggaaggtctccatcactgccttcattcgagatagagcgggcgccggatccggtggggaaggtgggaagggcgccgtctccggtgccataccgagggatccagtgttgaaggggcaagggagaggtctccggtgggcgccatggatccgcaccgccatgccggatccggtggggaaggtaggaagggcgcgatctccggcgacgtaccgagggatccggtgttgaagggggaaagggagaggtgcgccatggatccgggcttggacaggggaggaattggtgtggcgctggtgacgtctacggggatggggcgttgatggcggcctcggcaaccttccatgatgggcgg

SEQ ID NO: 148442 - DNA, 653 bp, Zea Mays
gaatcagctgagatatagctcctaatctgaggcctctccccgagagactcccacctcaggcagaactccgccttgcccgaattcaccatcgctctgtctgtctcgcccgagctgatcctaggcagataagacaaaaggcgaacgaaaacaggtggggaatactcgcatttaatgtgcatattagaagatattagatattgtgcttatcggataagctaggattgttatcctcttggagctgcgtctccatctctatatctccccctgattttctccaaccgtgtaacagccatgcatggctcatctatataaagaatacatcggcaccatgttcaggtgtcgagtcttgagccatattaacatggtaccggagccaatggttcaatagatgtccatcatctcaactttttcttccgcctccacccctgccaccatgtctcactcgaccaacaacatgccttcccctcctaccatactgctgcatcatgcgatcaccatctgtctcaccaaatccaattatctactctggcgagcccaactcctttcatatctccgcagcataaagttgatggggtttcttgatggcaccctgccagcaccaccgacggttgttgcgtcgtcttctacagccggtgccgagatggtccagaatc

SEQ ID NO: 148443 - DNA, 349 bp, Zea Mays
ttattttctggtataaaaagtcaatggtcttcccaagaacaactagtagcagatgcactgtcagacgatgaattgccaggttttccaaaaaggaaacatcacaaggatgctcatctccaaaaagaagcaaatgagtgttacattgatggatggactatcacctgcacacagtttcagcctcgtcgtcgcatcagttccaagaaacaaaaggggaaacatggaaaaagtcaagaaataacttcaagaaaagcttgctatcaatgtggacgtgaagatcattactttcgtaattgtcctgagaagagttcactaccgaacacctccgagattaagctatctcagtctccag

SEQ ID NO: 148444 - DNA, 754 bp, Zea Mays
accccagcaaggtgaaagagctcggaccagaaagcactattaaaaactgtgtctctatcactcacaattgaacaaggaataccatgaaggcgcacaatcccttcgaagaatgcccgagccacggacactgcggtatatggatagccaagaggaataaagtgagcgaacttagagaacctgtcgaccactattaataccactgtcttgccaccaaccttggggaatccttcaacaaagtccatggagatgtcgctccaaatttccgatggcaccggcaggggctgaagcaggcctgctgggtgtagatgctcagttttatttcgttgacaagtgaagcaagcttgcacaaattctctgacccgtcgtaaggcccaagggctgtagaaggatgctctccatcgatgtacagtcttctcaatgccctcgtgaccacaattatgtgctgctgctaagatttttgtccaaactgctgaggcgtcagagatgaagaccttcccctgaaagagtagcagaccatccacttttgtccacccaggctttgctgttccagctgcaatggcagcccacaaacttaggacctgtgggtcagtggtggcttcagtgcgaaggatgttaaacaactgaaactgtggtgcagaaatactgttaatttctgcggtgtcttcgtctcgatgagacaaggcacctgctgcgccatttaatttgcccggcctatattccactgaaatgtcatatccaaacaacttgctgacca

SEQ ID NO: 148445 - DNA, 296 bp, Zea Mays
gtctcgtgtttgggtttgtgattaggagccgggttcgttttgagctcgtctgggcttaggagtaatataaccgtgcggttcagcttttcatttgttgtttactccttcaggatgtcaattgatgttagatgttttacggagttattactccatgattcacacaaattgagtggtagctgcgttacgggagtggttctggcgttctgcttctgattttccactgtgctctactgctacggagtgtaggttcatttcgaggttctactacagctgttccatggctcaatggatgtttc

SEQ ID NO: 148446 - DNA, 473 bp, Zea Mays
tttcctctctcacggcgtccacctccgtatgtcgtgcccctacacgtctcctcagaatggcagggctgagcgcatgattcacacagcgaacgatgtcatgcgctctctgctctttcaggcttcccttcctacttactactggttcgaggccctcaccactgctacctacctcctcaaccatctgcccaccaaggcggttgcccaccccactccttacttcgctcttttcggcacccacccctcctacgatcatcttcatgtcttcgggtgcgcctgctaccctaatatcgcctccactgctcctcataaattagcgccccgctccactcgttgtgtcttcctcagatactcccccgaccataaggggtaccagtgtctcgagctcacctcacaaagagtcctcaactgtcgtcacgtcgttttcgacaagctggatttcccctttttcctcttcttcttccactgcctctctc

SEQ ID NO: 148447 - DNA, 359 bp, Zea Mays
atgtcgtcttcggaatgtctgaaagtcaaatcttgagctgatggtaacctgacctcagatctatttttgaaaacacgctggctcctctcaactggtcgaacagatcttctattctgggcaaggggtacttgttcttgattgtgacctcattcagagctcaataatcgatacacatccttctggtgccatctttcttctccacaaataggacaggggcggcccaaggcgaggtgcttggtcggatgtagcctttctctgatagctcatcaatctgcttcttaagctcaaccaactctggtccagatactctgtaagctctcttaaaaatgggagcggttccaagaagaagctctatggca

SEQ ID NO: 148448 - DNA, 434 bp, Zea Mays
tgtcgcgttgtccacttggaacattaggagcttcatccccaacccccacaccagctcgcacgtcggccatgaacctcgttcatctccgacctcggacctctgcccaccatcccccagctactcagcatcgctctccatgttccccactgggtttctccacccacaaccctgtgtggaccgacgttgttgcatcaccgtcggcttcttcgcccacgtcttccacgctcgtcgcggccatcgccaccatccaggaagccgtcgccgcctcctagggacgctagcacgtcgcgtccctagcactagagcacgagcgggccatgggcgtcgccctgaccgcctagatggccactgtgcagcgcctcatccttgggcctcccccagcggcactcgaggcaccttcacccacccccgaggccccccacgcctcttgactc

SEQ ID NO: 148449 - DNA, 673 bp, Zea Mays
ttaaggagtcataaatctgaccaaaacaccatctaatgtatctcattttgaacctagggtcaaggattgtagcaataaccatgacattgtttctcacttcccaatatttatcaaacttgttcaacattgcatcagccatactcatcatatatgcatcacctgactgttgtgccagtttcaatgcaatcttgactttaattatataggggtaaaatacattggcagtgggataggttgatgctgaaaaggcagtagttgcttctgccattgttcccaatattggtttgactttgtcatacaaaagccattgggagtctaaaggtttccattcatagttgttgtctatttcagaatagtaaccaaaggcctccttatagtcaaggcaagaatctagcattttgtatgttgaaccccaccttgttttaacatcaaggcacaacccttgtcctactttaacagaatattggttgcaaacttctacaaagtacatagggtcaaagctcgagttctttctagcaagaaacttggacttcagatttgtaatagcagaatcattactagaagcattatcaagagtgattgtcaagatcttatcctcaattttccattcaaccaaacattcaaaaacagcctgagctatgacaataccagtgtgtggaggatccaattcaat

SEQ ID NO: 148450 - DNA, 804 bp, Zea Mays
ccaccgagtggcgaggaggatcatccgacggtctatgttgtgcgggcggttgatccaaccgtgggtaggctagttgttaagttaggctcaagccaccgcataaagaaatcaaacatgggtaccccggtaacactgtaaaaaatttgggtaaaaggcaatagcatactctactggtttacatagaaagagtcacatttcagacagaaatacattatttggtgaagcaagctatgtaaataagaggaagtgctgacatcccatccttggcacgacagatgctaggacctaaaccggcaaccatatgaccctcaccacgactagggttttagtattgagctattttcggcccatctataggatcttttagcctggtctctcgtctcttctgccaatatgtagctaccaaaaagtttggtctatgcctcctttcttttgcccgacgtccagcaccagcggttgtgccccaaatctccagcaccagcggttgtgccccaaatctccagcaccagcggctgccctagaagtgcaaaactccagcaccgacagttgcgccccatatctctagcaccggcgactgctcacttgcgcccccagctgtcctgctccattcaacggcgcatacgctcctctgcctgctttgctactcacctgctccagtccagatatcggttgcgcccctctgcctgcttggctgatcgcctgctccagtccagataccaacggctactccagcatcattgacgagatgagcttgtcatctcaaggttcctcctccccttctctgtagttctgccaatgtcgaac

SEQ ID NO: 148451 - DNA, 1774 bp, Zea Mays
cggacttgatgataaccagccttcaagtcaagcttgctgaaccacttagcttgagtgagttcatcgatcagttgatcaaatactgggactggatattttcctttcactgtgatagcattgaggtaacgatagtcaacacaaaatctccatgtcctatcctttttcttcaccaataaaactggggacgaaaatggactctggcttttttgaatgaccccttggtccagcatttgttgcacctgcgtctcaatctcatccttgagcgcaggaggataacggtatggacgcaccgcgaaagggttagcgcctggcaacagtggaatggcatgatcacactgtcgtgtaggcggcaaaccaatggggtcctcaaaaacttctgtgaactgtgacagcacggcttgcactctgttgtcggctgtgacttgctgtggatcgttggttgttgctggagagtccgaaaacagccgcagctcaatcactgctcccactggtaacgttgacagcataccttgctgagagacataggttccctgataagggatagtaatccacttgtgataccaatcaatatgcatgggactataatgttgaagccaatccatgcccaccactaaatccaccgaagggagaggtaaaaagatgaagtcggacacgaactggtaggtagccatagaccaagttgcttgtggaagatgttgagaacaagtgacgatctgtccattagccactctgaccgccattgggcgttgcaatggttgcgtgcccgtcaacaacgacagaaatcggtcgctgataaatgaatgagtcgatcccgaatcaataagtatcatcaagggatgctgttgaatattgccctgaaaacgcaatgtggagactgcatctttccctgtccatgctgcatcagacagggtcatcaataattgaggttgagtgtcttgcactgtctcactgtcatctggttcatccagcaaatcccacacctcttcaataacttgtagttgcacagtatttggacatttgtgtcccctgaaccacttttctgcacagcgatcacagagaccacgagcacgccggtaacttttcaatgaagccagacgatcagtagatttacccagccgacgagcgtcattcaccggcttgtcaactcctggagtcacgccatcaagtcgatcgtgatcagccggcgcggtgggaggaggccaagccatccggttggaaataggctcgacccgtcggcgtcttgtggattccaacgcctcttcctgcacaagagccagagcgcagacaacatcgaggtttgggggacgttgaaccataattacagctttaatgtcatgcctaaggccatcaatgaaacacatagtgtaatacaatggatctgtgcgtgactcataagctgccaactcgtcaacgagagatgcaaattgttcaacatactcagacacaggacctagctgcctgatatgaaacagctgtctaatgagagattcatgttgctccctaccaaatctctcatgaatgagctcacaaaattcttcccaagacataaaacataatcgacgctctactgactgcaaccagcgataagcctttccctcaaagtgcattgacgccactttgacccacatgtggtattctgtttcgtacatctcaaaataattctcagcttgaacgcgccacagttgttggtgtgaaccgtcaaagcgaggaaaagtaatttgtggtaaacgaccgggtgtcgatcgtgctatgtcgcgtcccgattcatatgaat

SEQ ID NO: 148452 - DNA, 362 bp, Zea Mays
ggccggagcaggcgtcgccgacgatccccgccgcctgtgttcgtggccaggggagctcctaccacctctggcgccgacccgcacatcgacgtgaccgtcgcgacctcctgaacatcaccgaccacctcgctggacctccctcgctgccggtaagccacgccaccctttcctttcccgcggctactgtttcagttgagggaaggactgcgggtgagagggagagaaagtcagggggttaagtgaaaagtcaatgacccgagtgaatagtggcccgagggtagatctgcgaggtttgattcggtttaaacctagggaccttggcgcaaactactctttcagaaaaacttaattaaaacctgatt

SEQ ID NO: 148453 - DNA, 430 bp, Zea Mays
ctgtatgaattccacggccttagcagaggttaaagaagcaatgggcttgaactctatccatttagtgaatttgtcgatcgctaccaatatatgagtgtatccccccagagctttcttgaaaggttcgatcatatccaatccccaacatgcgaagggccaagttactggtatggtctgcagttgctgtgctggcaggtgttgttgctttgacaattattggcaagcttcgcacttctgaactaactcggctgcatcgttctttgctgttggccaatagaatcctgacctgaagaccttcccgactagtgttctggaggctgcatgtattccacattgcccagcatggatctcctccagaagttgcttcccaatgggcgagaggatgcacttcatgaggacgcctgacgcaccccttctatacaatgtctcc

SEQ ID NO: 148454 - DNA, 717 bp, Zea Mays
ctttttctgctcatcagcaggagaatcaagttgattggctcggcaagggcgcttcgggcgaacactgacaggcctctgaatatccaaggctttaccagcttccgggagagacgccaccaccaatgtcccagcaggagcggcatcagaagaatcctcggctaacatatcaagcatggcacatatatctgcatcactgggatccaaaggcacctcaaaatgaacctgccgttcatcatcaggaatttcttcaagcgaagcaaccaaagcactaacttcttcggcagagggtcgcactctaaggcccaaaccgccatcgccagcaggaggacttcacacgaaatgggtaaaggccttggaaggaggcaagttcctggccgagtaggcaacaggggcaccaacatttgacacattgcccctgagtatcatttcaagctggctcaccaagtccacaacaggaattcttctattggtgacccgggtggagtcagctaggcctcggtacaggtaggccgggtatgccctgtccttcaatggctgaatgttcttgaagacaaagtcagcaaccacagcttctgtagtcagacccatctccttcaacaatccaacttcagctagcagaactcctgcctcagccacatcctggtctgtgggggattcagtccagctcggagtgtgaacatccgtctgtctccctgaccgtggggggagagaatttcc

SEQ ID NO: 148455 - DNA, 488 bp, Zea Mays
ctacagcttgactatctctcatccacacatctgagaaccaacggaccgggatcatcttcaacctaagacttctccccatccattccgcccaggttagacgtcgcgctctccctggaactctctctttctccgatggttcaccagcgtgcactcagcccggacccgaacacgatgccgccgaacagatgcaccaaacaataccgtagtcgtccatctctaggtcaaggaacgtgctggcgccacctaccttgcgctagtgactaacggcggcgcaacacacacccgcggcggcagaccccgccggagcgcaccaaagcctcgccaggcgccccaaacctcaccggatcaactttatgcgcagaagagcatcaaacgagcatagcggggttgcttcttaccggaaatcgacgcacagagctccacggcgatgctccgatcgacgaattccacgcaaccctgccccgaggatcgctgggagaggacacaga

SEQ ID NO: 148456 - DNA, 350 bp, Zea Mays
gtctagatcagcaatcaactacaaggccacttttggaaccccggacctgctaagggcatcagccaccacatttgccttccccgggtgataatgaatagacaaatcataatctttaatcgattcgagccaccaacgctgcctcaaattcagatccttctgagtgaaaatatacttgagacttttatgatcggtgtaaatgtcacaagcctcgccataaagataatgcctccacgactttagagcaaaaaccactatggccaattcgagatcatgagttggataattcccctcatgcttcctcaactgccttgagccataagcaatcactctgccttcctgcatcaacacac

SEQ ID NO: 148457 - DNA, 299 bp, Zea Mays
actgaatccatcataaatgtggtagttgaatgtgtgcccatcacaattgtagttgaagcgattgttgttggcggggagtttctgtaggcattgtgcagcaacggaggcaaagttgccggagacctcagcatggtccgctaggacgatggtgcctcgcgccacgaagctatacaccaacgtgcgttgttgccccatctctccgaccaccgacgacgccggcctgtgaaggaggagtctcagaggtggtggagcgaagggatgggcgggagtggtgaaggatgggggatggccgttgtgtt

SEQ ID NO: 148458 - DNA, 992 bp, Zea Mays
acgaggaatgaatctcttcacatgccaatggagacctttgaactctgaaccaaaagctctgatctttctatgccatggtaactttcttactaatgtgaacttgttttataattttctaatccaagttgtctttcattccatatgcattttatttcatgccaccttttttaggatatgccatggaatgcagtatttcaatgagaggtaaatattataatttggtgaatttcataggcacctttacttagcattataaacatatcattacatatcattgtgatgttgaacatgaattaatagtgatgagtttagactaactgtggtagaaacatgaattgcaactttattgcgaatgaatagtgatgagttgagacaactatggtaaaccatttatgataattacccacataaactctttgtgtcatattatggtaatataattatagttttacatatgtaccataaatatttaaaaacacacataattatcttatacatttgggattgttacttttaggcacaggtacaaggttggcgcaggctggatttgtagtgcatggaatggactatgaaggccatggaaaatcttctggacttcaaggatatattaatagtttcgatgacattgtggttgattgctctaagtactttgcaagtgtctgtggtatgatttataaataatacaagtgttttcttatgtcaccttttaatcacatttataaggtgtcatttcttttatattaaatgatcactaggttttagaaaacaaggattaaaacaaatgtatatgaaattccttgagtattttattagacttgatgtgacattttacaaactaatagtatgattcctcttgtatagagaaagaagagtataagaaacaaaagagatttttacttggagaatccatgggcggggcaattgtgcttatgcttcatagaaaggaacctaccttttgggatggggccattttggttgctccgatgtgcaag

SEQ ID NO: 148459 - DNA, 545 bp, Zea Mays
tggttaggaaacgacggttggcagcaacgcggaggatgaggcgaaggagtggactgtctaggtggatccatggatgctcatcaccttcttgctgccgtggtgcggcaaaggtctgaagcacatccgatttaggtgaggtcttcctctcaattgtgccaaacatttgcttcattggtaaaacgacttggttgatacttgcaacaaataatagtgcttaaaattccgtaaatttggtacagatttttagttcgcttccatcggatgttatacatcagcgaatcatcgacccatgaaaactaaaaatcacagaaaacatagtaacaagaggctgtaatatgctgttggttattacctcctttaagttgcactttaggaattgatgctgcaaacaaaaaaataatgtgttgacttaacaaagccagtgacataagtatcattttattttatcttatgatttattgctattcaaaatttcataagggttcgacctgctaccttcctttcatactactttgctactgcagaataacaatcagaatggtaat

SEQ ID NO: 148460 - DNA, 487 bp, Zea Mays
tagaattttggctttccctttttattttatatataggttgggcgtttggaaacaaaaactctgagaaccagtttaaattatcagccactcaaaaagttctgtatgtacactaaatctgcaaactgtgaccaactagtcttatttaaattaatctctgacttgaagctgaatattaatatcttgtggttatagagcaatacttgagtgatataactaaaatcatagtgcaattttcttagctcaacttactacatacctaaaagatcaacattttaaatttattatcttgttcaaccagcagtcatctctttataatgaaagatagctgtcatagtaatatcaatatggatctactatttatgttggaaaacacccaagttatgttgttagcagagtcactgagatactaatgacaactattaacatcgtgactctaaaaacagcgctcttgggcctgtattctcttttttccttttcttgggtgctt

SEQ ID NO: 148461 - DNA, 317 bp, Zea Mays
gcagacatgaactgacttagaatatgaacaacataggagatatcaggacgagttatgccaaggcagacaagactgccaacaagatggcgataacaagtgggatccgcaacaggaacaccatcgatggcacgaagacgaaggtgaagatccatgggagtgtccacagaacggtgatcggtaagaccagcatgatcaaggaagtcctgaatgtatttgcgctgagagaggtaatagccatcaggtgtggaggtgacctcaatcccaagaaagaagctaagaggacctaagtcagacatgtggaactacgcacggagtca

SEQ ID NO: 148462 - DNA, 689 bp, Zea Mays
gcgcgagcatgttgcaccgtcttaagtcgttgctgacttaagccaattgcaccattagcagggcatagtggtcaccccgagttaagtaagaatgtaggtcgatcatgaacaaactgagtattcttgaagcctttttttattgatgacatatttcccattttacagagtacattgtcgtcccgatagcttttgaaatacaactagggataacatttcctgaggtgctctatattccaacagttcccaatttccgtgccgtccatctgagtgagacgatatgatcccggccaagtgacttctgccactatgaatggtccttcccataggggtgacaacttgtgccgtccctcccccgttagaattcggcggaggacgagatctcccactgcaaaggatcatcgtcgcacgaccttgtcgtgatagcgtctcagagtttgctggtatcgcgctgattgaattactgtgttcaaccgttcttcctcgagcacatcaatatcctccagcctagtagcttcagcttctgctatgctctcaaagatcaaccttggcgccccaaacttgagatcagcgggtaatactgcctctgacccatagaccatgaagaaaggagtatttccgtgcagagctcgactaggttgagttcttaggctccaaacgacgtagggcaactcccttatccattttcctgc

SEQ ID NO: 148463 - DNA, 437 bp, Zea Mays
ttaacactcagctaatggtgctgccaaatgggaaagccccttggcaccagcaatctcccattttgccctttcctcatccacggctctaagactcatagtaacactagggctgcagccatcaaagacacatttgtttctatgttttcacaagatccaagctcccagaatgataagggaatcaagtccttttttggtgagtccattaacaatattccccaccaattcccaccagcccagatatgagccaacatccagttgaggagccaaagaatgcagaccaaatttcctaagcaacaaataccagaattccctggataatgaacaggtaacaaggagatgatcaatagtttcatcctcttgatcacatacggggcacttctcaggatgagtcagccctcttttagcaagcctatctgctgtccagactcttttttgag

SEQ ID NO: 148464 - DNA, 417 bp, Zea Mays
ttttgttgctaagacgggcaaaggggctgggggtgtggtgatgaggaactcacagggagaggttttggcggcagcagcacagttatatgaacacatccctgatgcgctaacgagcgaagctttggctgctcgtgatggcgtggtgttggcccagatgcttagcatggaaaaagttattttagaagttgacaactctgtcctggtggctcttctccggtcagatgagggaagaaggagtgctatcgcaggtttatggtaagaaaccagagagacgagtgtggttttcatatcctttgatgcatgcatccttcgttaatagagagggaaatgaggtagctcacctttgtgcaagtaaggctatagagttggctcctattttattttggctagattgcttccctaattggcttatggaag

SEQ ID NO: 148465 - DNA, 329 bp, Zea Mays
aggctccagaactctatggatgcacatacaaatatatcttataagctcaatgctcactagaataatcgaactcttgtaatttcattgcttgatggtaatgaaacttgtttttgaccatagtttaaaatattgcttactaggataggcatacattattaacattaatatgccctatgtatatcttcaggcctgattcggccaacctcaagagagcccaacaaagctcaagcccaatatcagtaagtatttgatcccaagaagcacttaaagtctcagcttaattgggcagactcaagcctagataaatgcttgttgggcctaaagtttca

SEQ ID NO: 148466 - DNA, 438 bp, Zea Mays
agtaaatcgacgtatataccatagcctcactgaaaccttctttcaggctataatatccgaatactaaatcgtttttcagacatacggataccaagtgcaacaactctccatattattcagaaagtatacgaatataaattcagaatactatattactatacagacagacaaaagtctctcacaaaacaagaagattctcctatgtcatctgatgcactatctattcggttttttcttcttcttatttttttgctaacgagtcatgaagtttacatcatataatcctatgtcatctgatgcactatctatgcaaggattccaaaatccttgttctcacttatactataagctttcctttgatcgagccatgtagattttttatcctatgcaccccgtcgtctgactacaacacttcatgtacaaggacaactggacaag

SEQ ID NO: 148467 - DNA, 1011 bp, Zea Mays
cattgtttcgttcccctgtgctgcttgctgtcaccattgttttctgctcttcacggctgtcagtctccggcggtggcgagcatcggtgtttctggtcctcacgtttcgctgtttgtcaatttttttccatcgaatttcctggatgcattattctactgtttattgaagagaggcaatcgatcccgttacattggactttccaaacaaatcatgtaatcacttgatttctattggggatctattgaaagcttgtctctcattgctaacatgtatgaaggggtaaaaattcaaaattctgaagctgtttgaatgaatactacttgtgaaggtctcagcttcttgatacagtgcacgattgcttagcactttagttcttccattctcccctctcacggaaatgaatggaagaaggattatagtgcctcccgtatatccgaagaacattcaagtcataagcaaaaagtaacaccaaatgcttggattaatgtcacataaggcagtcgatattagcaaaacaacttaatatactctctccgttctaaaaaaacttcaatcactgtcctattcaaaacatttataaattattatctactttttttgttatttattttattgttaagattagtttaagcatgtattgtacttttacatgtttacattttttttgttaagaatagtttaagcatgtatgtcataacctggattaatgaataagttaatatttaaatgagcttcggcatcatattaccttcagaagctctcttttgatgaaggtgctacaggcacaagattacgaagtggccgatctctatagcagtggttctgtttattttgtataatttacaattatgttcttcctattacgttgtagctctttctaattggtgggatacaatctcatcattttacacccctaacgtctcaataaaaactgtctcgtgtccaagtttatgttgcatcctttaaattataacaaaaaaataaaagcaaagaatgttagttgaaatggtt

SEQ ID NO: 148468 - DNA, 582 bp, Zea Mays
aggcgcatccagtggcgggggcaggcagacagcgtgcgatcgagcactgtacttggcttcgctgaagccgggcgatgaatggaacgtgagcaggcgacagggacaggacaggagtagcccggtaaacggcagcgccattatatagccgggcacggtaaatttcctgacgcgcgggcccggccatccgagccagccattggaagatggccacgtggctgtctcgcgggtgtcgtgtctgaggctgagtgaggggcttgagacgagggttaatccgtcgtcactggttaataaggtaggttggtaatgttacagcacaagggcaacccctgtctacgtttcagcgattttggctccttccctctacaaaatattctgacacgttattattaacaaatgctggttaacgctgtgtctgcactgctgtagtcgtaacgttcgccagctttgcccgtgccacgcgagaagcaggataagtgaccagtagtgatgggatagggcagctgattgccgggctaaacaacaagcacgcactaatcaaccactattgatactttcgtgcacgaatttggaagaatctttcgc

SEQ ID NO: 148469 - DNA, 383 bp, Zea Mays
tttcaaactaataagcagaggcctattattcccctgccaaaccattttagctttctgtcggtgattattcttcaaggagcttcataattttaataatattacctagtacaagtattaatgtgatgctaaattttggtattttcttcaagtttcaagaaaaccaaaagcctaatattcccctgtcaagaagcaggttggccaaactttcatttgttttgttgacctttcttgaaggaactgctttctcgaaataataccactgcaattattatgcaatgccaacttttgttaacaaataccagtgccagatttggttagtaaataatgagctagctcacaactcagtaatgttaggcatgtttggttcccttggcttctcttgc

SEQ ID NO: 148470 - DNA, 463 bp, Zea Mays
ctgcgaaaggcaactgactgttgggatcgataagaggaatgattgcggcagacgaactctgggctttccgcttgggtgccatctcaaccttgctggcgagcagagcggaggcaatattgcaagagagcagagaaggcctggatgaagaaaagcaaaactaggacacagaatgcagaggcgtgcgacagtgcagtacatatgtggttttcccgggccagatgccatttctaaaaagcacccagtcatcacccagccgttatttctaaaacgctggcgtgccatgtcatcacccagctgttatttctaaaacgctggcgtgccatgtcatcactcggccgttatttccaaaacggccgacgcggcccaatttaactcagctattatttctaaaaacgctggcgttaccagacttcactcggccactatttccaaagcggccgacgtggcccgttatcactcggct

SEQ ID NO: 148471 - DNA, 1089 bp, Zea Mays
gcaccactggcacgaggtattatttctgttctccaaccctgaaaaggtgcacaaaatcaaaagcacagctgacaggtgtaaggtgttacctcttggagtgctcaaaggcctaaacactacatgattttgtacaaaactgcctggctgtattaggcggctaggcgtatttcactgcagtccagactctaaacatatatcttaatataaattgttaattgaagaatctttttcttaaaaaacgatgatcagtagtagttacatgattccttcagaatgcacgatatagtatgaggccaaaaatatcagccccgccccaaaagtccgctgctgggtccatctccatccataatctcaataaattctacaactaaaacctgccataaatttcatgctagagatcctcctaatctagatcactgcaaaagcacagactgttcaatcctaacatcttcatatggaccaaaactaagcttcacataaagtacacaatgtccataaactaagctttgcagtaaatagtatatgtatgcttattgtgaacagacaactggtgtcacgcatggaccaaaatattctaaacatttttttttgccaagctccttatgtcagtaacagtaaacttcatataatggtatagcaattcagtattctaggcatggcaaattatcatgttatagataccaaacgttcatatactgaaacagagtcgtcatgagcaacaatggcactgatccgagagaacaagtgcaccttaactgaaaaagtaatgctaaaagtatcaccaggaaccccctgtcccaaatcaaccaaccacaaccaaccaaccagaaagatgtagcagaggaaggggagccgatggcatcgtcattagaagaggcatacatgatagatacagagagatgaatggaggatgaacgacaaaggacaaagcgaagtgctcgacttctcatccaagaagaggcgtagatgatatatagtttgatgcactctaatacatttagtattaatgctttgacatgtatgatatgcattttgctttacatacttatgattgtgtttaattcatgtgcatatgtatagtgatatgga

SEQ ID NO: 148472 - DNA, 609 bp, Zea Mays
ggctgttgctgtgtctgagtcttgagtccgagtgtagctgctgtttttataggagccgctgctgggagttgcatgatgggctgggttcttttgttgctcggatgttggactgcaggggagtacgggaatcgcggtcgcaaggaggaggatagcttgaagcttcgtccaaggaggtccgaggagtctgtttggcttttggccaaggtccctcctttcggccattgctttccttttccccccaattttgatctttagtattttttgaggagatatgatctttagtattttctaaacttgaaaaacttgtctggctcttagggttgatgcatatacatgtgttgctattacttgcttgctccttgtcgacgatggtatagatagcagtagcactgtacacaagcagcaagcaacaccccacctccttgcattgactgttgcattttttatgaaacctaaagttgtgtttccatctgattgtaggcccatttgactctagtctccggtctctatctccactccaactacagccggcccgcgtctcctcgaccatcaccaccttgacggtctccgtgaaggtatttttcttctttctttgatgcatattattag

SEQ ID NO: 148473 - DNA, 290 bp, Zea Mays
aaaaaatcttcagcctggccttatcccgtcgctgtgctcgtacccagccgttctgatatttcttccaaccaccgctccctgcttcctatctacgcagcgctctggtcggctggtcctcatccctccagtacgcgagacttcttccttgatccttccctccgccgcgcgctgtggaagtctctggccgcccatcctgcgtacgccaccgctctactcgatcttcagctccagcagcgcgatatttttccgctcggcgtcgtcctcatctccttccccgacgctgcgctctc

SEQ ID NO: 148474 - DNA, 518 bp, Zea Mays
attttggaaaagtttttatgagaactaaccaagtattgtaagatatgttgagagcttatgcccttcagcatggtagtagttgggacaagagtctaccttacgctaagttctcatataatgatagttaccaggtcagtctgaagatgtcactattcgagactctatatggcaggaaatgtaggattcctctacattggatcagactggaggaagatagttctttggacctgaacttattcaagaggtagaagaacaagtctgtataatccgagagaatttgagggtagctcagaccaggcaaaagagctacgctgataatggaagaagaccactggaatttaaggaaaggtgatcatgtgtaccccaaggtgtcaccacttcgtggaatgaggagatttaaagttaagggcaaattgttccctcactttaatggacccttcagagtttttaggcaagttggagggatggcctatcgactcgagctacctgataatctatcggatgtacatgatgtcttt

SEQ ID NO: 148475 - DNA, 404 bp, Zea Mays
ccctattctgtgcaatcagcctttcattttcaccttgcactcttcagctacatggagtggcacaatagttgaattggaaattttgtttggtaaattttctggacttcaatcactgcttataactgagtaaactctacattcaaaactcggcaaccgagtcaagaagtgaacgtcataagctatatgggcagccatttgataattaagggccactaaggctttttaaatcaaaccagaaactaagcgaataattttagctgctaccttctccaatgacatctaacagtgacgaataagaatataacaagccatttattaaaccaggtgcgaaagagatacaaggcccaaaggtttaccctgaaaaaagcatttgctcagtacacacaaaacaccatcgctttgca

SEQ ID NO: 148476 - DNA, 1523 bp, Zea Mays
aaaaacaggagtgtaatctggaatgaacggtttcaactgtgagacatgaaacaccggatgcacttgagccgacgcaggcaactccaaacggtaagccactgctcccacacgctccacgatcttgtaaggtccaaaaaacttaaatgcaagcttcggacaaggtgtactgaccacggaatgttgcgcatacggctggagtttgagcaacaccatatcgcccacttgaaactgtcgatcagtgcgaagacgatctgctcgcagtttcatgcgattctgggctgcggccagttgctcccgtaacatggctgtaaactgtgctctctcaactaaaacttgtgcgacatcagctgcagtgtcggaaggcacagaaggtgctgctgcaaagggaggatcatacccatacagaaccttgaatggagaacaagctaaagatgtgtgataagaggtattgtaccaaaattcagcaagcggtagccaggtcttccacttagttggttgagcatgaactgcacatctcaaatacatctcaacacattgatttacacgctcactttgaccgtcggactgtggatggtatgcggtgcttaaattcagcttagtacccaaaatcttgaacaattgagtccaaaaggcactggtaaagatcttgtcccgatcactgacaatagacttgggaaggccatgtaaccggaccacctgatccaaaatgacctgagccacttgggaagcagtaaatgggtgtttcagggcaataaaatgagcatacttcgtgaaacgatccactacaaccaggatagtatcacatccaccagattgtggtaacttctcgataaaatccattgtaatatcctgccaagcaccttgaggaatgggaatggggtgcagcaaaccagcggggtgtactctttcgcctttggcctgctggcagatttggcattgttgcacaaaatcagccacatcagatttcattcccttccacacaaacaacttcttgaggcgatgataagtggcatgcatcccagaatgacccccagccgcgctgtcatgaaccgctgccactaatttagtgcgaagagcagaattctgtcccacccaaatcagacctcctttcctgatcaccccttgagataaagaataaccgtgttcatcaggattatggacacataaccgagccaggagagattgagcagcaggatcagtcacataggaatttgtaacttcttggatccaaagtggttgaacctcactgactgctgttaatgccatcactgcccccacccgagaaagtgcatctgcaaccttgttctctttaccttgcttgtaaaccactttaaactgcagacccatcagcttagccatcgcctttcgctgcaactcggaatgtaaatcttgactgcccaagaaactgagagccttgtggtcggtccgaatttcaaactcactccgctgtaaataatggcgccaacgatcgacagccatgatcaatgcaatgaattctttttcatatattgacagtttctgac

SEQ ID NO: 148477 - DNA, 763 bp, Zea Mays
atcctatctcatataattctgtgaaaccagtttatattatgaaaatcagttgttggcaaaccaattagtactgtgtatgagacatacacattaccagagaacaaattgttgtcaaccggactttgaacacccacagtcctgtgttgaaattgaacactggactctgaggactgtcagaacagactaaaactttagcttcaaattattcaaaggcttcggtcttgcaactaaaatgattttgtttgtattggttctccgttctccctaaagaaaatctgacagggacaatggactggtttagttaagttttaacatacagtcctctgtctacatccatgatttagtttagtttcagttttcacacacagtcatctgtctattgtctacatatttcagtttgcacacattttatacacagaaatctatttagctcacacagaaacctatctgttgttgtcgcacagttttacacggtttacacagttctcaagcacaccaaagttcacatacattttccatagtaggttcacagactgttcaaacaaacaggtacccaaaatatcggtgcctgatgtgttcttttcttctttacaacttacatttgagaagcaacaacttcactccctttttaaattattgtgactatgtttatttgttacataattattaaagtatctacgataacaagttgaaacacgtctcaatttggtatcattgttgccaaataagcccatctcctctctataaatttgttgattaaaca

SEQ ID NO: 148478 - DNA, 549 bp, Zea Mays
tttggcaaggtgatagtgacaaaaagaaatatagtttggcaatgtggaacattgtttatcgtccaaaagatcaaagggggttaggtattcatgacattttaattaaaaatgagcactgctcggtaaatggctatttaggcttcttactaagaacatgatttggcaaacgctccttaagaaaaagtatataggctcaaaagcagtatcttaggttcattagaagccaagtgactcacacttttgggctagtctaatgactgctttggatcttttaagatgaaggagggtcagagacaaggttccgggaggatatgtggctaggaaacaccacccttcgggaacaatatctagctctatacaatattgtttgtttcaaatctcatactattacaagggtgatggaaacctcaccgacgtatcattcagacgacatgtagccggaccacgactgtcagcatggaacacacttctggggcggttggactcgatccaattgactgaagggtctgacaaatttaaatgtgaatggaaaatctattgtggattcca

SEQ ID NO: 148479 - DNA, 631 bp, Zea Mays
accgaacaactactaatggagccattagcagaactaaccacaattgggtgacccatcctctgcacggaaataccagcacgcgacacaaaattctccgaaacaaatgaaaaactagcgccagagtcaaaaagagcatgggaatcaaacgagttaactgagaccgtacctgtcaccacgtctccctgctctctgccatccgtaaagggtagcacatatgctccagaaacacccgtagaagaggaagctcctagagtgaaattaacagaagaaccccacagagtcgtaggatgaggcaggcgtggagctccaaacttggatggtacaagagcggttagtgcaggagtgggcgtggctaggtactgaggaaaagcctgcataggcacgaactgaagagtcccgggcatatagaactgctgctgaggggtggtatagaaaattgctgctcagcgcttgacatcatgttgacagtaccctgcaaagaggaagaagtcactggctcccatttaagtttcccattgagattcctcctacacaccacatccttgtgatcctggtgcaagtatttaacaagttttccaaacgaacgggtatcggctgatctcgatcgcacgatcattgatcaacggccaag

SEQ ID NO: 148480 - DNA, 1005 bp, Zea Mays
tagccactgtcatgccttaccccttcacaccaaatcccattcagtctggtcctatgtgcatgagtttcgtatggccctgtgtgtggcttgccctatgaccaatagaatcgtgtcatgtcgtccaagtccgtgtaacggtagttattcaatatattttgtgttgtaaatccattttaatcatgcctcgttagttttgaaataataccatgtacatgttataaatattgtttttgtcacgacacatgttttaattaatttattgtttaaccattggttattaaaaatactttcaaaattaaaaataagttagagttttaatttacgctttataaatacatgtgtcaggtatcgtaattaggggtacctgggttacacccctagacacaattaacccctaaactatcgtaagacacattcctcgacgtcaagaaagtatgagccgcgatttgcctaagaccccactcggcggtcgctcaacactctgtctcgctcaagcctgccctcaggcgagggcaacacttggggaaatcctcgtcccgcccgaggtcccctcttcacggaacaactgtttccacctcacccgagctcatctcgggcaggaggacaaccccgagcctaccctcagttaaaggtcgcaggaaccgcggagacatgagcattcaatgcaaatacctaacccacatgacgccacagtcaagtaggagcgacaggatcacagtcccatccactttcactgactacgatgacgcatgcccagaaataacagctactactccccacgccgtttgctgagttcaaacaactccggatggggcatgcgtacggcagagcacggtctcaccctcgagaggaaactctacctcacccaaagccagccttagcctctgtaacatcccaaaatttaaccccaaggttagaaaccctaatctcctaacccccccttgattattccctagactccacctcttaggacatctcatcatatgcatacactatgattgttag

SEQ ID NO: 148481 - DNA, 471 bp, Zea Mays
ctgccccaattccagtagcacatgcatcagtttccacttcaaaaggttccttgaactgaggtaaagctaaaacaggtgtggtcaccatagcctgcttcaatgcttgaaaagccatatcagttgtcgtgtcccacacaaaagacttgtgctacaacaacttagtaaaaggtttggctaccactccataattcttctcaaaccttctataataccccgtgagtcccaaaaaaacttctcacctcagtggcagatgtaggagtaggccacctgctcatcaccttagctttagaaggatctgcagcaacacccttctgtgaaataatatggcccaaataagtgagttcagttttgccaaaatcacatttagtccttttaaggaagaactgatactccctcagttttgtgaacaccaaccgaatatgctcatgatgagcagtccaagaatcactataaatgagaatatcatcaata

SEQ ID NO: 148482 - DNA, 654 bp, Zea Mays
actaagatcaaatttcgattgctttaactagctgcgaccagaaccattataatagtgtctaggctcctcacagtgctaagttcgtaaattgcaatgttctacgacaattttgtactaaccaactctacacaccggaacaaaacctgtctacggtggtggaacttattactcaatacaaaacaacatgaagcacgagttgtcctcttccaccatttgattaggttgtacccatttagcattaggcttagtgctcgatacaacaacttggtaatattgccattttggagacgaatatatggaagcattaacaagtaactggatatctttctctaaagttagaaaccaataagcttcacatttactactctacacaacatatacagtatgaagaaacaaacgctacatataggaaaaagagaataataaactccataaagattaaacacaatcataagaagcgccgcatattttggttatgttgatctccgatagcctttaagaccaatattttattgccatacgaaatttgtacatatggttgatccactcttagtacgctgctgcataaactcactttaaactttcgttcaaagtaccattttttgtggccgttaagaccaatatttgtttacttcaatacatgcatgtatgcac

SEQ ID NO: 148483 - DNA, 322 bp, Zea Mays
gtatattcagacttcctatgtcttgacacttaaattaactgagccatactatgtcttgacacttaaattaactgagccatactattttgatatcctgcattctcttttgggttaaccctggcatgtcacgaacatgatctatcctggaaatctgccttgactgctgtattttctgattctctaatcaaaattttgagaaatcagtgtagatggttctagagactataaagctctctatttcttgaacgtaattgaggtcttttgtgcttgcttgatctctggtagcttatccagtcaatctgcatccctcttatgtcatttt

SEQ ID NO: 148484 - DNA, 372 bp, Zea Mays
gtttctttggtgcggcccaagtagctaccaggaggtcgcacgcttcttaccctgacccagcttggctttagggtcagtctcccttgctttctctgcccagcaagccctcgccctctagctcttcctgctagcgccgtctccgtcccgtgatctcctgttcatcgtcgatctcagccatctcaggagcacccgctcactcccagacgcccgcacaaatgaatcccccacgatctccctccaaactgcccactccctccacgatctccccctctagctcatgatctctccgcccgcccccaccccccgcctgccacgcccacgggcgcaacaagccaacaacccacactcggccccgctaccccgatccgtcgc

SEQ ID NO: 148485 - DNA, 404 bp, Zea Mays
gctgcttcgaggctgaggtccatcaatcttgcgcttgcgatcctccatctccttgtgcttcttctctgtcatgatctctctgtcgatcagatgctgaaatgtggggaaggtatgtagggatgaaaacgggacggatagagccggatatagggttatcccgtatcctaccctaatgtatttctctcggacagggtaccagatacgggtagttaagattcaggatggatacagaacgtgatcggataataagctgggcgggtaagaaacggataacagatactattcgtgtaggtacgggataattgtcgggtagttcgtccgatgatattaattgtccaaccatccaacaaacacataaattaagcaatacataatcatgtatatgatagatcaaatgtaagaaa

SEQ ID NO: 148486 - DNA, 388 bp, Zea Mays
gtcggtttcacacttcaaatacaacaaataggatatagcataaacacttgttacgattagcataattagcgtgaaaaatgtataaaagatgaacctagtgtatataaaataaggaagtatatattatgcataaaacttgaatattgaaacaatatgataatacaaaaagccaaaccttggaagcaaaaagattaaccaactcacaaactggagatgaactaacatagaatttgttaacagataacataaatagccattctggtaacaattatgtttgacacacttcagataaaaactgatgcgaagtagcatagacattagccacattgaacataagtggcacacagagtatcaaacacattatcagaggcctgacataagtgactta

SEQ ID NO: 148487 - DNA, 1280 bp, Zea Mays
gtgggtgccggcggcggcgcgtctgggagctgcggctggctgtgtgcggaggcctcgggcgcgtcccggcgcttgagcaggtactggtccttcttgctggacttggtcttcatggcgggcgctccgggcacgatcttctccatgagcctggcggcggcgccgccggcgcctcccctccggcggccggccgccggtgtggcctggtccgccgtcttcctggggccccctttgagcggccgcgctgcaaggcatcaccatccgagtgggccatgtcagtcagtcagtcccactgtctccgtcagcagcagcgaagcagagcaggcacacaagaacatcgcagtcaacgcaaggcggcaagtgctatctactgccagtacaaacgtgaatgcttcacaaatgatttctacctaacaataatcaaacaaaataatgccacggccgtggtataaagaagctaattatgcaaaaagtagttatatcttttaaacacaatgactagtgtcaagtgtggtggctcacacttgagacatgtgggagtggcaacatggctagatcgtgctgttcaagtgatgaagtcgtactgtactggacggcaacatgcagaaggaccgaatcgaccggtgtgtcgtagtgatggcggcgaggacatgcatcaaaggccaactttaatttagccgtaattgcctgggaaatgttaatttacttcttgtgtgaaggaggaagcttagcagatgcgcttggcgacgctaatctctgtagacgtggcagcagagatgcgtgctgctggtgttggatgcggatggctcgctgcctgcgccgttgctttcacctctctaccagcacgaaacacgtctcttctatccatgaatcggatgccatgacaacttcttctgcttctttgtctattcatatataacattttttatataaaaatagaattgaaactgcagcaactcctaatattcttttcttttggcaaaacaactcctaatatttgggttggttggatggtcctaatagggcagaacgggctcagactgtatcgagcagcgtcacctagatccatttttttttgtatagtctcgctaaaagatttcgtgctctatattttattctcctccagcagtgccatatatattcctcatatacctctatctttttaagtctcctctaaaagattcaatcttccatatcttattcttctccggcagcgtcatctataccatttctttcacggtttcctctaaaaagattttatcctctatctaattcttatatcc

SEQ ID NO: 148488 - DNA, 325 bp, Zea Mays
gacgagattagaagtggcgtttggattcgggcaagtgaatcggagccgttgagatccgatcgggtggatctaaagggtgccgggtattttaaatcacgaccgtagatctcggatctgatagctgtggacgcgtaccggttcataataacggtgatttaatcgtggcctttcggttttgattggacgaccagggatcacagataccccttcagctcgtgctttttgcaatagagaccccatactatttaaaaaacaacccaccatccaaacacatggaaaagtaattgcatatcagtcctgaactttatagatttaaccctgagct

SEQ ID NO: 148489 - DNA, 424 bp, Zea Mays
catgattcccgaggggttcatgtgtaaaacgaactagtgaaagggtttggatgattctcggccgcaggatcacacaccaacggtgtggattagatcgggcctcccaggtcccatcattgcactacgaccgttggatcaagtatccacagtccacggttcgtgacaccctattctccccatagccgttagatgaagaaactgtggatcggatttaacaacacccatagtcgactttcacccgtcagattccagatccatggtccacatctgatttcgcgaaaagtcatgccctggcctaatcacgaccgtcggttacttgatctacgatgccgaacccatcttcttcctcccctggctgtcaacacggcggcgcactatccccgcggtggtggttcaccggcgcccagacgatcaacgattgcgc

SEQ ID NO: 148490 - DNA, 1200 bp, Zea Mays
cgcgcgctccggtttccatcggccattgccatccccgcacaagttccgcggattagcttttcggctcggggggagatattactgccctaatcctgctttagcagcgcgccccgttcctgcggttatgcccgggctcgttctctcgtggctcgtgggacaccgtacgcagcgccacggtctctgccgctggcggccggcggctacccggctcttatggagcggcagttactgttccggtttatcgttgcggcctggattctgaattaattcgtcctggccgttggggttgggcggcggaccaccgcggttgtttctcgcgtccatgcggggacgggacgggtctcaacgggaccccgccttttccggtgcttattctgttgctgttaatcataatgcccagtgccatgtaaggcgtcccccctccccctgcatcgctctgctgcgtttgactctccagcaggcagcagcctttgcttttgccccgtgctgaccatttctctggtgtgcacttcacctgagggcgctctcggattcccaccggatttgatgcgcgcaccttcagcttcaaattctcggcctttttgccgcctggcaaaagctgctgtgtcatagcttttgtttcttcttaatgtggacgagatcactgttcgccctaattatttccgcacttgtttaacccacgggctgttttatgtgttgcttttgaattgctcgatcccttttgctgctcctcgtcttcttcatgggaatgtatgtttcctttgctcggccttgctctctgctgtgctctgctgtaacggacgcagcctctggttgtagcacaccacaccccttctgttattttggagaaactggaagcgtttcgggtttggaatttggcacctagcttgaatgccaccgaaaccattttggagctgagtagggctcattaagtgatctctggcaaatgattgagcaagcagtgcagaacttgtacttagcaaagtaggttttatgcttcaaggttacgactacagctacagcctgatgtttttatgcataatttgttcttctgttctaagcacgtgattgttcccagatatgctggaccattcatgactttttatccacttgtacatacttttttttctgtggcctcacagtggcatgcttttcatttgctagtttttagcaagtattggagatacagatacatgctgc

SEQ ID NO: 148491 - DNA, 562 bp, Zea Mays
gttaatagatagtctaattttttagtcaagtctttaaaactagttaactagtcagataaccatggctaatttaagctatttttttagctccaaaacaggcccttagtatagctagagtcaactgacaggagcggtggtgtgttatgagatcatcatccagtggattttgtgtcgatgatccattcattctatcaacatgtgcttatatgatcgatcgatatgagagatcaactcatcatgtttctgacgcacgaaagaaataaggacgaaaattaggaacgagatgatctgtctcaaccagttcactagtgaaagaaaccaacagcatgaacatatatataccccatgcaccacatctcgaacgaaattccaacttaactcatcactgcatgcatgcgttgctaagctgacaatgatggctgccagtgcccagcagatgacttacagcatccataatatatataccaatgtttcgcactgacagagaagtcaaagaacgatgaaggaggagtgcccggcattctgcgagcaactggagaagatcgtcaggaagaaagcaggg

SEQ ID NO: 148492 - DNA, 354 bp, Zea Mays
tctgatgtcaaacttccagaattcaaggatatattcttcgcattccttttgtcacattttttctgtttttatgacatgctttgcggttgttgtttagttcattctgtgtgtagcatttaacaccattcattccgttgtgcacagactgtaacacaaaagaaaaagattgtaactgagaaactgccatagcggtttctgctggcacattgacaactgtaaatgcaggatgtttctgttcaaatatctccttttggcaaatttatttccataaatccctacatgatccccatgcttcatgattttggttatgagaatttggtctatattagtatttgttgttatagaatctgttgg

SEQ ID NO: 148493 - DNA, 389 bp, Zea Mays
caccggcgactgccacggttacagccaccgtgttcctctctgtctccggccgccaccgcgcttaacccaaattcccggccaccgctatcgccccctataaattgaagccaccatgagctctgcaaggtcatcacgcacccagccaccagatatcgtcctcaatcgttcgcctgagtgctcgaattttggattccccccaattcggtttccgccgccgcgatgaacacctccccgtggccagcccaactcaggttagtcccagtgtcccagttgcttgttctagcgtccttagaccctcttcaagccctatgacccacctaattgagctagaccaccctgggttgccgtgaacgcttgtgttcttccccgatacccgcggtcatcgtggc

SEQ ID NO: 148494 - DNA, 276 bp, Zea Mays
cacggcaataaacatgcttcgagcctgaattccggcagcaacacgggaggatctctttccctgcgtctcaatgccgcatcagtgcgtagcagatgagctcacactaaaatctgccgtcagatactaagatttgacccaatagtagtgcaagttgtaatgaaacgacaacaaatacgccagtgaaaggcaccgctgattcgttcgtagtagcgtgacaggtcaaatcagaatacgtcgattcctgtcgctgttctgtcattatacaggagtagtagc

SEQ ID NO: 148495 - DNA, 1056 bp, Zea Mays
ttaaaaataatctcgtcctcgagatttaggaggaacaagagaaaagatggggaaaatctatgtgatgctcttcttctctttcccaagttgcttcatcttcaccgtggtgactccattgcactttgcacatctttatcaccttatttcctgtaactcgagtcaatgtatccaaaatattgatggggtactcagcataagtcaggtcctctgaacgctaaggtcttccattggtaactgtttcttcaggcaccctgagacatttcttcagctgagatacatgaataacatcatgaacatccgcgagatgatccggtaactccaattgatatgcgacctctcccactcgccttaagattaagaagggtccaataaagcgaggggacaactttcctttgactttaaatcttctcataccccggagtggtgacatcttgaggtgcacataatctccttcctcaaattccagtggtcttcttctgttatcagcgtagctcttttgcctggtctgagctatcctcaaattctcccgaattatatggacttgtttttctgcctcttgaataagttcaggtccaaagacctgtcttcctctaatctggtccaaaatagaggagtcctgcatttcctgccatataaagcctcgaacagtgacatcttcagactggcctggtaactattattatatgaggacttatcacaaggtagactcttgtcccaactactaccatgctgaagggcacaagctctcaacatgtcttccaatatttgattagacctttcagtctgtccatcagtttgaggtagggcgaactaaaattcaacttcgtatccatattctcatgaaaacttttccaaaatctggaggtaaactatgatcctctatccaaaatgatcttctttggtactccatgtggagacacaattcgagccatatataactctgctagctaagatcctttataagtagtcttgaccggaatgaaatgagccactttagtcaatctatccacaatcacccatatatcatcatatcctttctgggtgcgaggcaatcca

SEQ ID NO: 148496 - DNA, 2678 bp, Zea Mays
agctacaacttttaattctaggttttcttattctgggtaaggcactagggtcgatattatcttagttgacctattcgtttccttagcgctgagtaggacagggtggagtttgactaggttctaagttctatgggttaagacttttcttcactcgccgatatatatgttcaaaggccttacactacatttatcaagtccccctaactagattttactgtggaatacttaaaatattgggtaacttattagtttgactatattccagtggtttctattgggatctatttatacaatgcatacttaggtctcctagattgaactcatgacaatttggattaggaatggggacatgagtgttgtggttggctatattattgcctttgactatgatagtctaggtcactatgccaatgaagaatcatccgttcattggtaagattgtttggcattctagtcggtgaaatgcaagattcatatcaagacttaaaagaaaagttggcaaggatggagaggacttataatttttaattcaacttggttaactagattttagagtataatacttagtgaattgcttaccttaagggttcaactacctcatgttggtcagacaagatgtatatgattaaaaactgatggcagtctagttagggtgatcagtatgactcatatagtaggttgctcgatacttcagttgacaagcagagaggataacacctattcttcaatgtttaatctcgttaagaggacaaaagcttataatatctatttataaggcatggtagtcgacaaggctggttgcaatgtacttgatctttcagtggttgcagtagttctctagtgaacgtgcaagcacattagttccactaaggattcttggtgaagctagatctaaggtgtccgaaaaacgggcagggtatgaatagggttggtagcatatgtacacaacaaaatgacacataagcataagttgcttacctatgtcttggttatggtgaagctaaatagtaactccaagatccgatagtcctagaatggatccttcaacttgtgtagcttgcggtcatgtactattatagagagaatgaccctaagactctaacaaaggtcacaaccaccaccaagattatgcaagtttaagcgaccaaggattatgatggaacaagcaagattgtaaagggaaaagcataggacgacggagctatactagatggactcaagcactaacactaatggtggccaaccattcaagggtccactagggaaggtcttcactcatggaaaattctaatgtggtttggttggttgtgaaacacaatgctaggtgaaacaatggctatgagggcttgaactacgatagagaaattggcatgcgttctctctatgaatgatagcaagaagaatggaggaagaagacaagttctaggaggaaataatggtgtggtacaattacataactaaagcagtggggtgtcatacacgacgacaacacatgatatgaagcatttccttgtgcacatgggcacaacatggcaaagaggaaggatatgtgacaacatgtggcactaaagttccgagtatgtcgagcatctagttgggtgaacaactaacctagttaaatgaccaaatgattgaatcatttttattatggttccagacttcacaacttctctattcttctcatgatcaagaataaaattttatcgatatgtctaaacgaaagttttaaatttgaacaactccaactaaattaagttgggatacctttgtatgccatttgtacctaaagctctataaatcttggttcaacttcttactaagtttccacatggaatcaaaatgtgtttgctcatatatttatgcatttatatctcctgtcacaaaattagagttccatacaatctgagtataccactcatatagactttgggatcacttggattaccaacgagatctatgtcaaactaaagctagagtttagtgctacaacttttatctttgaactttggtaagcgtttaattgaaataagcggttacttgcccttaaaatgacatattaataaccattcatgttagatatttttgcactaaccttatgttgttagagaatatgatatactagcttcttagtgaggttaactgaagggtcttttaagtctgttggtgaaacaatatgcatttgatgtgtgcaacttgttttggagcttgttcttaatcatttttaaaatttactagactagatatagtggggattaaaatgcatgaacattctcactcatgcatggtgattgatgttgttcatgaaacacatacacttaacatcgaggttgatatattatactagcatacaacacgtgctaacgctatgattccggggagaggagggaagggttcgacggtggcggcggcacgagtgaaggggggtggcagggacgatggggagggacgaaggataggggacgatctaaataatattgttcattggatttaagtaaggaagagagggtacatcgatctgaactgttggttttgattgtctattaagtctgggtgtaatttgtttggtggatttagtggaggttatgcatgcgggggtgatttggttgggtaggttttgcaaagtttaaacgggtgggttatatagtggtatagatatccgacttgtgccaaaattttat

SEQ ID NO: 148497 - DNA, 565 bp, Zea Mays
gagatctcggtgcactccggcgaaggcgccgccgtgcgggcgcgaccgccgccgacaccgggtcacggaagggagtaatcgtgtcgcgccgtccgattcaaagtgtgcggcgatgattagatcagagcataccgactggggagggctgccctggggcgttggatcctgatctgaggatccctgtagaatactggttcgcgtgagtgatgggtcaatctgggcggttggtttctaatctgacggctaaaaacacaggataccccttcggccgagaacatttgctaaagagcccccagtctttacggaaatagaacccgccgtccattcttggtgcgactgagtctgtggaatcttgcgccagaccccctgcactttccagcaaattgtgcccagtccagttaacagaaaaatcagggaaattaatttagaaatagatttttagtattaaattaattgcaaaaacttgtttaatttatagaaaattcatatgaactccaaatttaatgattccagttcctacgattttagtgtaatgtgtagatttttattgtgtattttattcaca

SEQ ID NO: 148498 - DNA, 384 bp, Zea Mays
catcgtgccaaccgtagggagagaaagtggagtaccaccggggttgatttcatgctggggcattgttgggtatggctggtgttgtctgggaggcggccgaccctgtcgatgggcatggtgcagtcgccgtgctccgggatacgcgggggagttgtggttcctcgctggggctgtcctctgccaggggctgcgtctcgctgctcgtcggtgccgttgtttgggcacatatgtgctcaggatacttcattgatggcctgagggtgtccctgtgtggtgttgggcggctgcggatgatcagtgctcaacgaattgctcgccggagattaactccgccgctgatttgatgctatcctgtggccagcgatctccgtcgcaccttttcta

SEQ ID NO: 148499 - DNA, 579 bp, Zea Mays
agggtggattctctacacgagcatatttgggtgagtacaaaataaaggataagtctttttaaatcatttccctctctcacacggtcacgaagactggatgacttttctcactatctcagagataccaggtcctgcaaggatatccacacggagaacggagtctcttaccttgctttacaatcaagagaatgaggaagggagtgagaatgaaaactcgaatcaagaacacaagaactcacaactctcaattgtgcaagccgcaaagtctctcaaacacaaattgatcaaatgcgacgtgagatttgctttggaagcttggagatgttgcacttaatgtgtagtaggttggagtgagtttcatgacttcaatgtactggttggtggtatttatagtccccaacaaccaaaagagtcgatggagaaaagtttcatttattgcacagtccgcgggtgcagcggaccgcctacagtgccggtccggtgcgccactgcaccgtgtcagtctgccaccgcaggttatcgttgaccttgctagtggaccactgacttcttgtcagacggtcgccaccggtgcgccag

SEQ ID NO: 148500 - DNA, 526 bp, Zea Mays
gaaaaaatctgttcacctccttcccctggaccgcgtgggtaaacaagaaagtgatgaaatacgacgttgggagatgtcgtaggagacgaagattctattcgcttgctacttccctctgctcctctgctactactacttcagttctcgccttctctttctgccctcacctgactcctcccttcctgccatttctctctcgatagtcgataccaccacacctccgctcccctccaagcctctccttttcctaagccccgacgtcttccgacttccaggtcggtgccgggcaacaataacttcttggtcaccgagccaaaagggggtcttttcggttcttgcgatcgattgatgagcggcgggtggcggcgatgagagcggatctcagcaccatccagcagacgctcacgccggaggcggcggcggcgctggcgcgtgccatcgacgaggctgcgcggaggaggcatggccagaccacgccgctccacgtcgccgccgcgctgctcgccgcgccggccggtctgctgcg

SEQ ID NO: 148501 - DNA, 703 bp, Zea Mays
agtttctaggaattatacaagtttctagtattgtttttgtattaaaaatcattttctacaatttattatctaatttctctggtctctggactatgcgcataaaacagataagtatagggtttaatctgtaaatagttctaagactcatcactcttctgcgatgggccgcgggttgtttatagagttatacggggtctcttttgcataatggcatggccgaaggggtaagaagcaaccagagccgttggattaaaaggatacggtccagattagattgttttataaatctaaccgatacgcatcccgagccgtgggattacagatctacgcttaggatttcaatacgtgacacggttcgtttttattcgtcaagattcgatccaacgacgcacatctcatcacgcgagcgggcacgccagattgaatcccaaccacttatcccaggacggacggtgcaggggcttcttcttcatccgcccagacgcaagagatgagagcgcccagggcggcggtgccattgctggtgtaaaccttcccattgatccggtgtgctaaatttcaaggaaaaacgttctaccccacacggataccctagcgagtcacttcgagccgtcgcattggggattgggatgatattccggccagtcgtcgacaagaaggagctccccgctcatatcccgccggccaacagaccacgaccgat

SEQ ID NO: 148502 - DNA, 286 bp, Zea Mays
cggggctactggagaagatacacttacctttagtgacaatttttgtgcgaattactgacgctgcattgcatagatcagttccgttttgcatgtggagggcggcggaagcactccgttactagaattggggatatggatgtggttattctagtttttccgcggcggttttcagtgagtgcagaacttttaaaagttccgagaatggattatgacgtgtgcttcagttctgccgtttcttgttccaaatgtagaacgtggtatcaatagaagattcagtttatatggc

SEQ ID NO: 148503 - DNA, 407 bp, Zea Mays
atcaaaggtaactgcatcaccaaaatcaatgtactcggcttgctggctagcatgggaccaaaatatgcttaaaatcttcccttctttgtccagttgaaagtctgaaaaaaattgtggattatctttcttgcataatgaaaaaaagataatagctttgacacatcatttgcatttctttccctttgccatgcttttttcctgtcaaaaaatgtaatgattatgcactatatctaatttaacacattacgcttgtttcggtaatatataataccattattgtcaatgcataatacacttacaggttactcatgtcctgcacggttattggaacgttttctggaccaccatgcatctctgaaacaaaatccataatgcaatgttgtggaatcctgctttcttgcatcgca

SEQ ID NO: 148504 - DNA, 561 bp, Zea Mays
aggtgtagtggggatctctgatacacagtgcttgtgtatctaggtcaaaccgaggtcaagatctgatcattttctcagcatttcaggctatatctagatgctagtttctagagggtttttttgggggttctcagcgtttgtgctgaagaaatcacttccctttcgaatgaaatcgtgcatctattcggggaatatgcacacaccgttggaacaaagggaaatagtgtttactgtcagatttcaaccatctcattggggggtgtgaagcacttttgctgtttatcatagttcttcagtctgacactctgactcatcgcttattatggacgttcttgcacatgatgtaatggcaagagcaaacgtctgtgctgctatagtggcaaatttcttgtgctctacactctgactcttgctgtttatcatagttcttcgcggccagagcaaacgtcagtgctgctaaagtggcaagtttcttgtgcatatattggggttcctgttttccttgtgctatagtgccaaagctgaactttaattgcaagttatcaggccaaatgtttgtag

SEQ ID NO: 148505 - DNA, 278 bp, Zea Mays
tgtaaacagcacctttcgtaaggcccaaggttccaggctatctggaatcattgaggaaacgaggagatcaggggagtcaacaacctcaactctggaaagtgaaacctgggcgatggaaagccttgagactgaactatttgataatgtctgtgcttcgatccagaaatctcttggcaaacctgataaacttttaggtcggcccgttgctgcctcaaccccctaaaggccacagcaaatgcacctcgtgttgcaggtaacaagcctcaaatgctgacaca

SEQ ID NO: 148506 - DNA, 500 bp, Zea Mays
gaggagagatcatcgtagtgggtatcgagggtgtggaggtacccggccatgtagacaatggtggggtcatcctcggtggggtctctccctgagagagcctgaagtcttttcctccaggtgggggtatttttattggtgggtgggaaataacgaagaggggtttcaaagatctctctgctgtagttttggcatagttgtttgagggcctttcgggcaacactttggcaagtgtctgggaagcgatgcccgatgaaggtaacttggaaggggggtggtttgggtagcttcggctttctcccaggtagactgccatagagcatttctccattccattttcgcggtattccttctagacatattcgggcttcttgcggatccccatgcgcagtccgcaactccgtagaaggtgaggaaagccttcctcctctgagcagtatgatgtcctaatgacccaagagttttccatctggtagaagaaaagaagggtctgttaatatcgg

SEQ ID NO: 148507 - DNA, 856 bp, Zea Mays
ctttgggaatctttgcttttgatgttggcataagctgaatgtaggcttttgctgttgtataattgtgctttgtctcttttttgccctccttttgttggttctatctgtgttttcttttttacatgtatgtgttcttattgtttatgtatttacttgttcttattatttacaattgttgcttcaggaatttgcaacgtgcttccccttctgcccacgtgctcgctccactgaatacgctgcgtatcaggtatgtcgcaggttctgtgtgctccattttatttcatgtactttggttaattgttatggtttacttgttacgtttgcacttgcttcatacatccatactctgatttatcatgtatgcttctcctttttggccatcttggctttacctccctacttgctgttacctctggtggtattcagaactgattccaatgtgatacctgtgctcttgtcccatacctagacactccatttgcgattctataaactgctgaccaatggaccatgggccatgtcagagtactggtcgctcctctggaaatgagaggaagaggagacctaccacctctggtttgttcctttggccacgtttttgtttctatttactgacttgcgctgtttctgggtcccctgctcgttgctcaatctgtttgcaagatgatgaccttgtttcttaaccaatggttgccacagacatacttgtattatctccatcgaacatgaccactcagacatccttgcttaaccaacaatgcatccctatttggccgacgtttccactaagacctcgtacgtatcatgtacatctattgggattatgatgcatcacacgctcattcttatgttctcc

SEQ ID NO: 148508 - DNA, 791 bp, Zea Mays
caggcccatctcatgttagctacggtgctagagacagcccagctcaatgaagtctacaggccgagctcatgccaaccagccatcctacgggctctagcatctggtctttgtccaacagcaagtcaacaacaacccggtagcagcagcgtgtttaaaattcaatatttttggtggaaaaaaaacagctcgattgctgtcgaatgtggccaagatcgtaaactattctatgtataagattcattaagaaagcagcaacccgtctgtgcctgcgctaatgatgcgtgccttcactaatcagcgtccaaaatcattgcgcggaatctcaaagggcggggcgcacggtctaaacattattggttattccctgcacccgcagtgcggtgcgatgatcgagatcggtggtggatcctcttttctttacgttctgccgggaaaaggtcgtggacggaaaacgacgcgttcataaaatctgtagaatcgtaaagcttttatatacaggttttggtttgaactgatgcgaagttgcaaaagacgctcaaaaatcgacagaggaagttcatacgcgacggccgaatttacacttgcaaacggaagggaaaatgggtcgtggaggaggaaaccgggagtatttacgacgcagacactagttgatgagaaagaaaacggacttgatccatcgatggcggcagaatcacacgggtgctcgccgaaccggtagcggcaaggcactcagaggtcctccgcgatgcaggcgaggtgcggctgccagggcgcggcgtggctgccggtgc

SEQ ID NO: 148509 - DNA, 1712 bp, Zea Mays
cgggcgaccagctggtcgagtgagaggggcgaccaggcgactaattgcgattagggcgatgattagtcggcctaatcggtcctggtcgacccttggtcgtccgttagtcgtcctatagaattaaggacatatgtatatgtatataactatatattaactatataaacactgcatttctgcaataatataggcataattagtagcagactagcagtaattcagtaaaagtgtaaaactgaatccatccaaagtccaaagtccaaactgaaagtaatattggaataattacttgcagtaattcagtaaaaactaaaaagtactgcatagtctgcattacctgctggctgctacctagagcagatcagcatccaaacaaaatgcatcagcagcagcaccatcttcgtccaatctagttgcttcttgggtttgttgttctgcttgtgctgcagcaacacgtaccatcttcttgatcatcactatcctcttctccaatatcttgagctgctgtatttcttgaacgcttccttgtcctaacatatgtttgttgaggctgagaagacgaaccagcacctgcaacagctattcttggcaagtttctgcctcgaagagcctgagttgctcctaatgcctcatccacatcatgccatatgttgttgtcaccatcatcttcattttcccacatgaactcttcaagcaccagtgggttgcttctttttcctttggatcctagctctcttagtgtttgaaacctattttccatcttcctgttgtaactgacatagaccaatttattaagcctctggtgttctagtcggttcctcttttttgtatggatctaaaaatgcacaattgcaagacatcagattcagcaaataaagggctgacccatacaaccactcaaacaagtgaacaagaacaacaatacttactgctacaaaatctgaccaatttctctcacaacctgaagctgcacaacataggcttataaccctttttgctaagatttgtagttcatatgccagtcctccatatgcaccccaccataggactgttatagttatacaaaaattagatcagttctagtgccaaacagaaacaggcaaacaaactaactaatgctgcaatagtaaaacttactaggactttttctctctctttctcttattgctccagcctttgaaaagcattccccttctgatctttcgtagtcatctgcttgtttacttatttttgtttgctcatcctcatcactgatcattttccacaaaacatcattgaacatagctcgaagtcttgcagcttgcctcctgtctttatccctcaaggtaaagaatttacctggattcaaataaagggctgccccatataatttttgctccatctgagtatcccacctcttctcaaagcatgagattacttcaacaagtaatcgtggcttctctttcaaagactcctgtatggtagcttttgatttgtccatagctgccattatctctggagctgctggcgtctcatcgccgtcagcaatccttagagcaatgagtagtggttgtgaagcccgaagacaattttcaagagtttgccaaaatgatactgaaaggacaatattttcatcttgttcaccttctttaactagggaaaatttagacccgttccattcatcactaacaaacaagccttgtaatttgctcttatgcttatacatgcttgcc

SEQ ID NO: 148510 - DNA, 461 bp, Zea Mays
atggtgtaatgtcaactactcatgctcaaccctaattcacaaacaaccgtcacaacctaaaggtcgaggctccaaaccgtaaaagtcactcacgttcagcaggaccccgcaaattcatggaatagaaactaaacaaattgtcaacaaagtggaaggatgtacaaatgcaatggtcaatttgatgcatccattccagccaatgaaagatagcaatcttagagacatccatcccagcaaatgaaagatagcagtcttagaggcatgcatcgaagcgggctagggtttccttaccaacaaaagtagaagtcggtccaaatctagatagatctccaatccgcactgagaaacaatatgtgaggatgtggacaacgacgagaagggacttcgagctttaggttttgcggaacagaatcggaagaaggcggtcgtcaggcaagagtaaagagaaagggtgcctgtaa

SEQ ID NO: 148511 - DNA, 334 bp, Zea Mays
ggggggcagcagctgtgacaccccagtgtcacctagggtttctcttgtaaaagcccaaccaagaaccattatttcatgtaaatccaagtaagcatgagcatcaaattaacttaagtaaaaaagaattcaccaagtatatacttaaaagtgtcatgatcaaaacaaatgagtctttgaaaagataagaatatgcaaccctaattaagaactctaagtgaaccccatgagcaaaattcaaaagaataagcaaaagggaatgaaaagtttaaaattttgagttaagccaattatataagttaaagtatattttataagcaacaagaaagattgagaa

SEQ ID NO: 148512 - DNA, 484 bp, Zea Mays
cccatctagtcctttttttatagttgggcgacctctttttcttggagttcaacctacagttttggcacttctctttttgtccttgttctcggccgctctgcttctgtttgggttctgagggcatgttgtgctatagtgccccctaacatggcaggtttggcactctcttatgccctgacccccacaatatgtgctgtatggattagcaggttccacactatttttagcacatttagccccactcgcagacttcctacccttcgtgcgcgacactggcggttcagtcaatgttagatcagcgaggcagtttgcagaacctggattgaggcccgattctggtggtggtgtaggtccagtgggcatcacaacaggttccatattgttgtcagaactttgttgtgttggtgcaatgggaccaatattctgccgtccatctgcatcttgctgcaactcagtatttgttgcttcatccggaccaatctcc

SEQ ID NO: 148513 - DNA, 677 bp, Zea Mays
gttagcgtgatattttcacatgccttgttattagggtctaaacaaaggcatattgccaaagtatgcacggagaatgttgatcggctcaattgcgccaatatgcacatacaacgagtgcagagggtgtcgattcaagtgtactgctgagcaagtcccagtggatgcaaatgaccccatgaacagtgcttaccactacaagtgtgtttgccacaggtgatcttcaatgagtaggaggagcttctatgttattgtgtgtcctggagaatagtagtattttcgcccgtttttggttctccctctccttttctttctattctttgttttctctgttgaaaaaggcttctttgtctcatttctattttacaagaggttagctagtagaggactggagtctggaggagcattttgtactttaaaatgcctagctcaggttatggactagtaattttgttagtataaatggttaccaattttgacatctgaaagtatgaatggccagccaattcaagtgcataaatagtacggttgacctatggcgacaatgcatcaagtctatgaagtatgaacaaacctcaaaatgtaccaactgcttgaacagccttggagatctaggctggatcttctgagcatcatcagttcttatggtcattcatggcactcctcttttacatagtaat

SEQ ID NO: 148514 - DNA, 299 bp, Zea Mays
gtctgattgaggacgacgaaccgaataattttggggttgctatatagtttcttcggcaacccacacaaagagggaacgtagatgtcgtcgatcccaataattggaactactagctagttacctaccaccgaatgatgtggcacgcagtagcttagctaggctaacaagcagcaagtaaatcaaagtttctacagtcgccaacaagccggctgtgaaatgaacacgacggacgaaacacacaaacagctcggttgctgcaaatagtccccggccggttcctttgtcggggagaaacgctg

SEQ ID NO: 148515 - DNA, 326 bp, Zea Mays
cttcaaccacctaggcgacttcctcggagttcaactacccgcgccaatcgcggtccggtaggtagtggattcggaaccgagctccgccagtgatttaaacgttgggcgggcgctgccattgccgtcgttgacactcatctccatcaccactccgcgtctgtgacccgatccctggcattcgggtgtgggcgtggattgttctcggggaaggatccgggtgcgtgggtcctcgggaccgggaggattcctcgccgtcgttaccctgccgccgcggaccgcacttcgccgtagcctgcttccgccaccgttcgtgcgcgctgtaagtc

SEQ ID NO: 148516 - DNA, 679 bp, Zea Mays
ggatccatgcctgtagtttagtaagggatacatgtaaaccaacatattattgttattattattaattatatgaaggctactttaaattgaccaatagattgaaacatttaccacaatatttgttctcctacctagggctacatacacctacaaccatgtatttcgcacaattacgatctatgtcattcctcctccctatactaatcatgggatgacctagggagctacatcgatatggttgaaacatacctaaggcccaacccaacaaatcaagcaatagttgtaagaagaaaagaaaactcctttcacatacaatgtttgtattcgtctagctccatttgtgaataatgatgctcacgacacattcgacctgtccaagtgcgaaggtgccatggattgatgaggatagtcaccgacgagtcaaaaagattcttgaagtgaacaatgtgtattccccatctcgccccctagtcctctttctccccagattccaaattcgtaacctctatatctctaattagatgtttaggccgttgtagagggcaccaacgcccctatttgttttcttatcattgcaacattgacttgccccttgctcaatagttgtggaccatagagggcatgacaacaactgagcatgtaatctccacacaagaactcaacccaactcttttgaact

SEQ ID NO: 148517 - DNA, 391 bp, Zea Mays
gggcatcccagacctcgaggaggaggacgccgtcgtcaagcaggtggccggcgagttctcggcgcccgggagtggcgcacgcagccggcgcagctcgatcggcggcgtcagcagcggcattgcccaagtcgaccaagaggacagttctgtcgtcgataagcaagtcattggcgggggtaacgtggcgccggcgcaacgtaacactgcatcctctgcgcccacaccccgtaggcccgtcgacactacagacgttgccggggagatcaaggcgcagttcgttcgagctgcagacgctgtcagggcactttcaccacttcttgagatcgggaggcggaggtaccaccaccgaagctcagtgtaccatggtgagcgttttcttccagtacgcagc

SEQ ID NO: 148518 - DNA, 317 bp, Zea Mays
gcaagccaaggctatatatatctgtaatcggcacttgagggaattgaacaagaatttagtcatccagtcgtcttcctcttttccctgtcaagccgacggctagggggtataaccctgccggcgaagacggaccgagactacgagttgcggagtcgagggccagctaccttaggaaccaactcccttgacaacctggtatcgtcgtcacgtcgatcctcttccactcattcagatcagtcctccacagccaccgcgcccaaactcagccatccaccatcaccacagtcctctactgcctccgccccgcagccgccagc

SEQ ID NO: 148519 - DNA, 548 bp, Zea Mays
gtggaaataagggggatagcgtttcccgctaatctcatagtaatgggtacttagggaatagatgttattctagggataaactagctagataagtaccaggcagttatcagttgtgataagaggacaatcaagttgatgtccccagtaggagaagaggtggtgaccgagttagtcccgcctgagccaaggaaaggaagttgttatcagatggctattgatagcagtgaggcagacccacttaagattatcaaggttgtgttcgagttcccatatgtgttcccaaaggacttactaggtatgccacctgagcgaaaagttgagtttgccatagagcttcttcctggaaccgcccccatctttaagagagcttacagagtatctggaccagagttagttgaactcaagaagcagatcgatgagctatcagagaaaggttacatctggccaagcaccttgccttgggccgcccctgtcctgttcgtggagaagaaagacgacaccagaaggatgtgcatcgattatcgagctctgaatgaagtcacaatcaa

SEQ ID NO: 148520 - DNA, 834 bp, Zea Mays
agcaggagggcagtaagaagcatcttatggacaaagcctctcgtgcagcacttgcagtggcagcagcggtagagcagcacttgcagcggcagcagcagcagagcaggacatctgcatatctcttctgatcagatagcctatagagttcgtcgcctcgcaccactgctccctccacaccttctgccactgtgtctactccacctcccacttcaccagctcctgtcgctccagagccatccaccacgtctgctatacccaccacctccaccactccagcttccactgttccccctcccactcccatttccgctctgcccattcctccacctcgcttcagggagcgtgacaagattgagatgcgacccctagctgctgatccccatctgctcgacctttagcattctactgcatcctaggtacgtcggttcagacacgtacctgtggagtcctggttgccaactcagagggacccgtgcagctgcgcctctcttcagtaccaagactcaggagtccttcttccgggcatagctgacagctcagatcgctttgcaaacgcaccgacttctagatttacctgcttttctgctcgccaccggtgccgattcagagggtcatctcacatatctgccaggactgctttcactattgaccgcaagtgacaggtatgttgaggagtgggttagagtgttctatgctaccgtatggattgaccctgaccatcagtggatgcgattccgtttcgagagagaggatgtcactttgcatgctagccagattcgccagctctttggatttctagagtcatcgattaggctccacagtatgtgctacggc

SEQ ID NO: 148521 - DNA, 564 bp, Zea Mays
gtggaaggattgggtgtgatttgtttttttttttggcgggggagttgatttcacttctcatctgcctgcttgcagtatgtaactgaaattcccgctgcatctgctgcaggatgtagttatttagcaggtagtaactaatttccatttctgtggtggcggtggagagggagcacggcacttccattttatttctggcacgtctgcttggatgagatgagtttctggttgtcgtgcagagatgtatgctaatgaattctggcacgggaaggggaagccagttggatgacttgcgtagcagattttgtgagctcttttcatgatgatgcctgctgcagctttgatgtttttcccctgtattggttgatctattgtttgtggtccgtgttggttatatgtgcttgtctacaataggttacatgttattctctttttcttcgcatatgatcttgaggtgtttgcaattgattgtctagtgcccctgttatgatgttagctagtggtctatagttgtcttttctggtggttgtggtggcatttacttttccatcttatgctcatgttccc

SEQ ID NO: 148522 - DNA, 366 bp, Zea Mays
gaattccttaagaataccttcgccttcaactaacgaaccttattcttcagatggttctgcagcttgtacttcctgagcacgagcatttgtatgaatgttttcttcatcgtgattttcactagtggcattcaactgtgtggattgttgtgccaggaacaaaggcaaataattcagtgcaattactggaactggagaactggagaattactggatgcaattactttttttcttcttccttgtcatggcctaggagaactggagaagaacaggagatcaatcgctgcaatgggagtgtcgtcagccgtcaggaactcaggatggcagattgagtgccacgccgccgcaaatcgacgagagaagatcgtg

SEQ ID NO: 148523 - DNA, 464 bp, Zea Mays
cttgggtttcggagcagcatcttcttcttcttcggtgccgtctggaactatacaaaccagcaggatgctctgggctctggctgactgatgactgacttgggtgtcattccggccccaacgacgacagcgggagagaaaaaaattgctatgatttgatgtcatgtcctcgtatcctagctactagcttccttcttttccacgtctggtcttttcgccgcgcaggggcctgtagcgtctcggatcccatctgacgacacctgcacgacgcagttgcagatgatgtgcgctcgcggctcttcacaagctacgggtcaaacactttggggcgcactacctgccaatgcagcgtacagtgaaacacgcttcgtcctacattgccactgcagcccacaactcacatctttctcttcttccttttttttccccttttctttctcatcttccttcagtgaaccttgacttct

SEQ ID NO: 148524 - DNA, 792 bp, Zea Mays
cgaggaccatggtttatcaggttcagttttaccgagccatagccatctcaatctcaaagcccatcccaaatctttgagacttgaaataccaaggccgccaagctcaagaggtctacaaactctgccccaagccactaaacaatgccctcctcttgcatctttgcttccacgccaaagaaagccttttctgatcttgtcaatagccttgagagctcctgggggtaattctactgccatggcaaaatagatgatcatgtctgtcatcacatactgcacctgtactcttctcccagccctagacattagatcggctttccagccagataattggtcagccactctgtcaataatgggttgcacctaggttctggagagtttttttaatgacagaggaagtccgagatatttacagggaaaggatgagaactcacatggaagctgtctatgtagtgttatcaattcctcctcaccacatcatataggataaacactactcttctgaatattagttttcagacctgatgcttctccaaatagcttcaaaatattgatcatagtatggatttcactctccctaggttgcagaaaaagtaccacgtcatcagcatatagtgatatcctgtgctgcaggggtctagacttagcaacaatacacccaagaatatccattaccaatataaaaagcttaggtgacagaggatcaccttgtctcagcccccttttaagttgaataatatcccctggaacaccattcaggagaacttgtgtagaggaggtggccaataacccact

SEQ ID NO: 148525 - DNA, 892 bp, Zea Mays
ttcatatctgagtagcgaggacacggttaatttatgcacatcaatcagggtctttggttatcaaggttaattgaacactatggtggtttgcatgatacatgttgtggaatttggatcattggtccatgttccagcatgattaataaagccacatatattttctttgcctcatttcctgttttcatatttccttgataatgctgcggaaacatggtggccctatgtgagatccttatagtaaggctgattctacatgaacttaaatgtcagtaagtctcagattcaagtacatgaatgttcaaccatgtcaatacgtcattttcattgcttagtctctcaccagtagtgttgcgtttagtataagcagtaacagatataattcactgcttctttgtccagttttgcaggtcagtttatttgcgggttttcatttcaagaccagtgtttcttaagcttttatcggtctgataattgtagtatgagcatgcaacattttataggcgacagtcattttcgtccacaatcaatgattcttgtttactgcatgcaggatgataaatcatcaaagaattgagataatacgggcagttactggtgaaaggtacaaccatgccacaggtactgactcatcataatttttagtttaatctgaatcagcaataatcttaattgtgtgatgtgctttttctttttttcttaattatgaattctatgcacgcatcaactcattaacaaatacaactggaatccaaacatcaacagttttgtttgccaacaaccaatttttttggctctatcgacatcagcgttcatccaaacacacccatagggcatgttcgattttcacccaaatggccaaatgtatcatgcactagccaagacaaaatttggc

SEQ ID NO: 148526 - DNA, 423 bp, Zea Mays
ttgaataaaaagggccacatatcattttcttctcttttgggttcctaataatattggaatcaccagcgacaattatcggctgcgattcctcgaaacacatctggaccaactctgtaagaaaggtttatttatgttctacttgtgcaagcccataaactgctatgagaccccattggaagccatgatctttattcccaagatggaagtttacatacaagactcactcgttgcaatgctgaaaacttccaaatttattcaaagtaaaataccaccggagcgaccatgaggtcgatccagtgccaaatgaactctcatcccccacagatgttattgagtagaaccctcttttttctcaagagagcaataaaatctagctttgttctctggatatatccgaaagaaatctaaatttagtcaaatcac

SEQ ID NO: 148527 - DNA, 406 bp, Zea Mays
caaactctgagtgagaaactagggcaccaaggagccaaagctgaatatgagtggcagcctccctgtaacccatccatggcagaagcgtccgtctcatgagctgatatacaaacctggccgctgtggtgaagtctgccggagaacgtcgtgacccatctgagaagggcggtcgaaacaaagccgcgacgtgagttgtaccaggagcaactccgccgtgagggcgacgaggagggtcagaggtgccatagcacatgctgtgaagacgagtcgatgactcgttgaatccaaacacctgacgaatctaactggcatgaatggtaacatcctcttgctcaaatcggaatctcatccagtggtgatcagggtcaatccatatagtagcatagaaaactcggacccattcctt

SEQ ID NO: 148528 - DNA, 495 bp, Zea Mays
cggcattatagccggatcttcagccttctgtgtaggagaaatgggctcctttggtttagcaactgaagaagtctctccgccaaattcaggcaccatgacctgttcaatataacgcggccggtgggtaaggactttcaactttttgctctttggcgcaggctcatctggagtggccgaagcagcagtcctggccgaagcagtgttcttcctcttctttcctcgtccccgcagcgggtagcagtagacggggtaaacaaaaccaatggcatcaaaaactctattcaatctctttttccccgaccaccaaaggatgtggataatgcattatcttctgctttggaatacggcccaagcagttcatcacttgtagcttcaatacatttcagccagtcatcattcggttcatcaaatttatccccatatctgaaggtgtatttcagtcaaaccagctaaccttcgttagacttggtgacagtctccttaagcatttcccag

SEQ ID NO: 148529 - DNA, 831 bp, Zea Mays
aaaaagctgtttaatccagcagctatgatttttggaaaaaaaaagtattaagcggactctatctgatagatggatgcttaatattattgatagagagaatcagctataaatagactgacctccttccgtgacatgccggctcatggaaacagcgtccggcagtaagggaaggtggttatcgtgattggaactctccaagaatattggcatgcaagcctgacgcaagggaaagaatcagactaattatagtaatccaacaagggaaagtaatcaggctaattatagtaatccaacaccccccgcagtctgaacgtggtcagctacagggaaaaacattcagactggacctgaactccgtgaacaccgacgaaggcaatcctttagtgaagatatcagcatactgagaggaagtgggaacatgcaatacgcgaactgcaccggccgcaacacgttcccgaacgaagtgtagatcaatctcaatatgcttcgtacgctgatggttcactgggttcgaggagaggtagactgcactaacattatcacagaaaacaacagtggcgcgcttcaggggaagatgcatttcctgaaggagctgtcgtagccaggtagtctcagcaactgtatttgccactgcacgatactctgcttcagcactggaacgggacacagtaggctgacgcttggatgaccaggagacgagattatcaccaagaaaaacagcaaaccccgaggtcgaccgacgggtgtcaggacaaccggcccaatcagcatcagagtaggcaaccaatgtggagacatccgtgggacgaagatgtaggccatgatccagtg

SEQ ID NO: 148530 - DNA, 644 bp, Zea Mays
aaacaaataggcccttaatctttctttactccttgcggccttgccggactttgcatgcatgacatcagcatgcacatttgcatttaagccgtcagtcgtgcatgcatgttttgtcgccggaactcatgctgctgacatatgggcccataaaccataagcttcttctgtttgtaacaaaacaaaacgaacgccacatgctctgccagtttcgtagagctctgaactcccgcgtttttaagactatccgcaagcgttacccctaaattttttcccataaatgttactatacagttacgtcagcaagattccctctcatatattcactcatcccgcaacggttacctctacatattcccatatctcctaccctacatataaaatacacatttcattccaactaacttcaactatctctttttttatttattttgtttttaacgtatgactgtaaaaaacattgcgtttagcaatttatttttaatttctagtaatttgagtcaacatttccgttaaccaataattaagaatttcactttgcacgcatgagacatggatccaaattcgtcctccaagctattacggtcgagacacaagaaggcttactgcatggttgtgtcgttgcctcggtgaacggcggtcgacgg

SEQ ID NO: 148531 - DNA, 356 bp, Zea Mays
agctgcaactttcattagaattttcgtgggagggaaattgttttgttaatgatatacaattgaaattcttcgggatctcatattcataatttgtacaccgtcgcagcgcacgagcacataccataaactgtggactaatctagattgtttggattagctctagatttaggaaataagtggactaatctagattgtttggattagctctagatttaggagataaggatggcaaaccagttacaacatctatcatttacaaatgtattcttgcactggtgtgcttttaaatccaagcagactgctatttttgattatttgattgagtttataagttatcataatatcatatgtccccg

SEQ ID NO: 148532 - DNA, 684 bp, Zea Mays
gcaaatattacattccaaatgtttttacaatagcagctattcttcttttaaaactacttccgcagcttcgtttaacagttgagaaatagcttcattcaaaatagcttcggccattttagtgatttcttcctctctctttgcttctgggtcggccgttggctcgaagggctccgggggaggagatagctcagctgcgatacaaaacataaataagttcgaagtcacagaaataaaacacaaagtcaaaagcaattaagcaatacctatccgcatttcaagttccacagctttctcagctgccttcgtcgcttcttttgcatcataagaatctttttcactcttttttattatctcatgcgccatctcttggccgccattttcccagatgtcagcgaataatttcccgccaactaagcttgcttcggccgaggggtcttttgtaccttcaacagataaggtagcttcggtttgggccaaagctttcatgtggtcacaacctagtttgtccaaaatagccacgattcccctggcacctgagaaggcgtagacatccccatgaccactcaagatttcttcaaaggcttcaacttcgttgctgatccaatcaattgggccttcaggatcgccccttacgaagttgtcctcgctagagaatgcgccaacattggcgaagctagattttat

SEQ ID NO: 148533 - DNA, 410 bp, Zea Mays
gctcaagtatctcaatcatatactggcgctgagagagagtgatgccagaagcagactgttgaacatgcatgcccaggaaatgatgaagaggaccaagatctttcagtgaaaactcctgttggagagcagtaatagtgcgccgcagaaggggcatggacgaggcagttaacacaatgtcatccacgtaaagaagaaggtaaatcatatctgcacccttgtgatagacaaacaatgaagtgtcagacttggcctcaacaaatcctatttgaatcaggtgggaagagaatctactgtaccaggcacaaggggcctatttgagcccataaagtgaccgattgagacggcacacataatcaggatgagtggaatcttcaaaaccagtggactgaacacaataaacagtctctaac

SEQ ID NO: 148534 - DNA, 764 bp, Zea Mays
agcaaatgcaggcactggcacttcctcagcagcaggaacagaaggaccggcatcctgatccaagctagacactcgacgaagacgtctcttcttctttttcttcccctcagcaggagaagtgggctggttggctctgtgagaacgctttgggcgaacactgtcagacctctgaatatccaaagctttgccggcctcagggatggccaccaccaccagtgtttcagtaggagcgacatcagaagaatcctcagctaacatatccagcatggcacttatatctgcgtcacttggattcaaaggcacctcaaaatgaacctacctctcgtcgtcaggaatttcttcgagtgaagcaaccaaagcactaacttcttcgggagagggtcgcactctaaggcccaaaccgctatcaccagcaggaggatttgacacaaaactggtaaaggccttggaaggaggcagattccaggccgagtatgaaataggagcgccgatgttcgacaccttgcctttgagtatcatctcgagccgactcaccaagtccacagcaggaattcttctgttggttacccgggttgaatcagccaggccccgatacagatatgcggggtatgctctgtctttcagtggctgaatgttcttgaaaatgaagtcgacaaccatagcctttgcagtcaaacccctctctttcagcagcccaaccttagcaagcagagcccttgcctcagccacctcctggtccgtgggggattcggtccagctcggag

SEQ ID NO: 148535 - DNA, 502 bp, Zea Mays
atgggtatgtatatccactttattatgtaggataataagatgtctttaaagtatatataggtttgggtaaaaaggagtagggtaaggaaagactccatccaagatttgtggatcttgattcatctaatgatctagcttgatctttgaaggcttgagttgatgtttatccttctttgacgtggttggtcttctttggtctttcttcttggagttgccatccaagttaagggcatatagttaggatagtcggggtacacgaggtaggtaggtttgaataaagttgtattttgcttttcgaacaaatggactaggcagcctgtgatgtaggttatattgttgtttacggacaagttggtatatgacattaatttaggttaggttatgtttgaagcagtgtctaacccacatcaccagattagctaacatgttaataactcactttagattggataatattagactagatgggatctagattatatcggttaagatatgaggtcag

SEQ ID NO: 148536 - DNA, 1093 bp, Zea Mays
cgaagatattccatgcccaacacccatgtttcctgggccacaagtagggtcgccctgcccatgtgcccaagtggccaaggatccccgccctgcgcgacggccaactggtcagtggtaaccaacccgggggacactcaccagtctgctgcctgtctgattcggccaagagactactgtttgtggccctagctcagtcagacgggagtaggaggctgcagttggactaaacaagcaattttgccccgtatcatcaggtgcacaaggtcattatcttagaagactgcaatgagagggccaggcataattgagatgagatgagatgtgtgtgacatgccaccaccagtaccgacgtctcctccacagaacagaaacaggcatccggcggccggtagcgagcatatctctgtcgtcgtggactcatcctggacctgggactccggctagctactcgcagttgttttatgctgctctaacctcctagtgtttggtgccggggcattttcctaagctactcgcggatcacgcagctaccggactggctactcttcttggcattgggcgtagactatgggagagggggaggggggtatatgtgagtgctgacagctcagctgcatgattcgtcaggtttcggggcttggaagtcatgacttgctgctgccacatgactgaccggaggtctgcaggccacaaagaaatggaggaatcttgcgtagaaaggtcgattgagatcggagctgacgagctctagacttgtagcgcatgcacgcagcattggcccttgtgatttccagccttccaggctcctatcaacgtcctacattggcacctcatggacatcaccagccacgcatttaaaagtgcccgttaactaaaagattggttctgattaggtgactagtagcaatttctggcaggtgacaggtggcttatttttgtagtttctttactgtaggagattaagtttctgtggatcaaagaatatctttccaactacaccaagctacgttgtttggcatggctgcaaagatagctccttgctatactccatggagaagaagctagagccactcgaactttaccaaaatggggc

SEQ ID NO: 148537 - DNA, 598 bp, Zea Mays
ggctcattgaagctgcaaggagcgggtgcatggattctctttattgctcctagaggtgaggaactcaagtacgcactccagctactatttccagcatcgaataatgcagcagagtatgaagcactgatccatgggttaagcatcaccgtatcacaaccaatcatcctctcagatcaggtggaagagtgcaacaccctaagccaaaaagagtcggaccccaacgactagagagagagcctatcatcaggtatataaaaatgaagaagaacgggatgacaaggctgcagcagaacgcatcgtgaggcagtcggcccactacaccatcatagggggtttacagtacatgagaggtgcagcaggagtcctcatgaaatgtattcactcaactaccgggaaacaattgttggacgaaatccatgccgggcagcgtggagtacatgcagcatcaaggaatctggtcaggaaggctttcagatccggtttatattggccaacagcgaacagtgatgctgccgagtagtctagaagtgtgaagcatgtcaattcctatcaaagcagcagcacttatccgcgcagcagctgtagaccattcccgtaa

SEQ ID NO: 148538 - DNA, 597 bp, Zea Mays
actggcttgcaagtgtttgcccgaacaaccatggggcataaggaggaggcatgaccatacctcccgttggttgaggaattcgatttacatccatctccatgaatgatcgccgaaagggatcggttgttcagtgcaaagtagaccccagcggcacttatccaaacgtcgtgttcgatgtcgtcgacgttgaagaacttgttcccactagaacaacaccccgatgagatgggtggtggaagtctcgtagccttctatgccatcttgtccatctgggtgtgtgtgcttgccaacacttccgttatctccccaaccttcttctcgattcccggcctccacctctaaaactcaccccgatcggtcatcagaccttgcacggtgagatccatctactccatggttgagtgcatcacatccatatgtcgtcacgtctccttgttaccctcatcgattttggcgattagctgcaccaacgaatcctccacccgtggacgtgccatctctctagccttggcttgaaacctggtgttgtacgcgtggtgaggatccagatcggctccgattaccaactgttaacaccacacaatcacacaatctcgc

SEQ ID NO: 148539 - DNA, 353 bp, Zea Mays
aggagttccaagaagccgacgtcccccaacccccaaatcagagcaagaacgtgaagaattggacataaaatgctcgagctactcgcccgccccagctgcggaggacggatggaggagttccaagaagccgacgtcctgtggacatggccgatgccggacacgccaacgccgtcgccggaggaggggagctacgacctggcggcagcggcctacgagctgtacgagtacgatgccgccgcagtcatcgacttctcgtgcgacgaaccgttcagcaaaccagtcgcggcgtggagcgcaagctcgacgacgagctcaacgttgagcgccctactgtcgtctgacaacggcggcgg

SEQ ID NO: 148540 - DNA, 831 bp, Zea Mays
ggcgtctgcatcgactacaaatcgtaaaccgaaacaagggtacaaagtttgttgcagcaggtacctaaatgggaggatgaacaatgtaacaaggtgagagcttaaactacaagtgcggatctggtaaagtcgtaagggttggggaaaataaactaggattgttcaactaaaccattggtggtgtaaatcattgttcaatgatttattcatatgacggggtacaacatggtatacctcaacacgggcggatctcgcccggtacacggggaatcgaagaaaaaaacgagtgctgttcgaaatgattcgtaaaataagtatggatttgacgaggttcaacaaggtattaccttaagaaggggagatctcggccgcaccacgccgaatcgaagcgtctctgtgtggatctgatggagccgtccaaggtcggatacggaaggcaacgaatcgaaagcggcgtacctcgtgcgacgcggatttgaccccgctttgtcttcggtcgcgaacggaactgcgtggagacgaagtcgagttcgtcttctgcgcaactgagcggggccagggccgactccacagctcgacgggaggttcgccgccgcgtcgccgcgcaaaatctctcttccgcggacgattcgaggcgaagcgaggtggaccgggaagtttccgttgtcttccgcggtcggctccgtccgcgcgaagaaggcgagggggcggctacagtcatccgctgcatgtggcgtgagagagaagagtgcggcgaggtaggggagagggtggcgctcgccgctgcgggaggtaggggcacactgtagccgctataggatgcacagtaat

SEQ ID NO: 148541 - DNA, 321 bp, Zea Mays
cagtgaatgcatggtgaccattttctatttaacatagttactaaatgtttgaagataagtatgttttattatttgcaatagggatggtgtcccaaaacatgtcacggtggttgttttcagatcaatagtgagcaccgactgagccgcgcactgcggcacccagcaaggttggagtcgggcagaagtatgtaaaaatacttgctccttcgaccgcagttggttgtggcctaaaattcataggttgtctcctggccatcgagaaccattcgtgcgaatgaaatatgaaataatgacgtgaggatcccacaatatatatgcagg

SEQ ID NO: 148542 - DNA, 705 bp, Zea Mays
atatgtgggatttatgtagtttgttcttatggtctttatgggaagcttcatgtttgattctcttggggagatttctcatgcaacctttgaatctcaactggtctcctggatttatctgccctcgatcaaatttttcttgggcctctgccggagtatgctatgcgtacttgtggcttctaatgaaatgattacggttctctatggctaatcccccacagaatatgcatcggtccctgaaaattttgtctcacaacatcagaggcattaactctgacaccaagtggaactcgctgtggaataatattttggaatctaattgtgacattatttgtatttaggagacaaaaaggagtccttcgatgactcgtatattcggtatttttgcaacagatctttagataagtttgcttatggtccctctattggagcttctggaggttttatcacaatttggaaaggagctcactttgatgctgaggtagtcgagcagaatttgtttgggcatacaattattttttggtctaaattaacaagtcaggtttggtggtgaaccaacatttatgccccatgctctcctcaagggcgagaggccttttttcctggttttctaaccttgaaattgatgacgacaagctctggatttttcttggtgatttcaacatgattagatttcccgaaaaccgcaacaaaccgagaggagacccc

SEQ ID NO: 148543 - DNA, 1115 bp, Zea Mays
agggacttggtgaaaatatccccaagctgctcctctgttcggatgtagtcgactctgatcaaaccatggtctgcacactcctggatgtaatggaatctaatctcaatgtgcttactcctgtcatgtaaaactggattcttgatcagatcgtagttttattatctaccaacagcagaggtggaacaccctctttcccaagcagctcctccatcagccttgctagccaaacaccttgagttgctgccatggaagcagcaatgtactctgctacacatgaagacagagccactacccttagcttggttgactagtaaaccatgctgctggtgctcttgtggtcttcaacatctccagctatatcgctgtcaatgtatccaataagctccggcctctgttttcctctccctgcgccatacctgacgtccagttcacagttccagccacatgccgcaagatgtgtttcactgcaactaagtgttcttctctgggtgcctccataaaatgactcacatataccagagtaagcaagatcgggccaggtgtttaccagatatctgagactcctgatgatgctgctgtagttggttgtgtcggctgccagagttgtaccagtctttctgagccgaagttaaacatcagtttaatacccaatatctaagttcatatttggtgccaaagtaggaatcaacaatgcttgttcctgaacccatttcataagtgctttactttagcttctcaaaactaaaccatgggaagattaatatttgttagattatgatatggcgccgggtacacttcagaggtgagtagagaaggaggcgagcttgagggttggaacgcagtggatatgggggtagtgggcagctgatgtcgcggctggctggatgagccagggtgaccgaagagctgtccactaaggaataacttcttcgatagatccctagtacaaactatcggctggctttatagatgatgagccaccaaacctttcctattacttaacctagatatttggaaacagaaatatcaaatctaaacttcctaacaactcagcccttgattggaggatttgatttattcaatcaaaaccttcctactgacctcttcttcctttc

SEQ ID NO: 148544 - DNA, 365 bp, Zea Mays
gcatttggcacacttaaaaatagatttaagatactaacaagtcaaccattcttccctttgaaaactcaagtgaagatagttttggcttgttgtgcattacataactttataatagatgatggtcctgatatttatgtatatgatgatgagacctggtttcaaagccttccaagaagcaatcgttcccatgttgacatgaatagagacaaccaacaatgggctaacatgcgtgatcagttagctcaacagatgtgggacgatttggatcacaattgatgtatttgtgtggctgctttgtagtaatgtatttcagacctattttttgtattgtgtcgttgtttgtattgttgttttggaccttaagc

SEQ ID NO: 148545 - DNA, 899 bp, Zea Mays
aaggcaacaagaaccaagctcaagtgaagagagcgatgatgaagaacaaacctcaagctcctcaattgaggatgagtgctcaagagaagttaaagccaggtcaaggagattgcataccatgtgcgagtgctttggaagatgaggtactcaactcatgttgcatgttggtcaagagaaggctagaagagcaaaggaggaagaaagaggctttgttcgcgattgagcaatagttgagtgtgaaggcataagctcaagttcaagtgatgagtcaagcaacaacttcaccagtcaccacccactcttccaaactaagcctcttcgccgagtcaacatcaacatagccaactgcatctttgcctaaggaggtgttaaagggatttaactccttggtgatactagtctcctgggagctgtggagaaataggaatttctgtgtctttgagagagttagtccggatactctaaatgtgattcagtgtgtggccactgaagggcatttgtggtatatggctggagcaacacccctccaggattttgtcctgagagccagctcctaagggtcgtagttttgtgtttattttggttttgtaagtgtgtgtgttgtactggtttacccttgggtggttaccccttttctttcttaatgaattgacatgcaactctgctgtgtggttcgagaaaaatatcaagatggcccatcacaaatcaatgtgtgacgggtcctctagtgatgaagagaatatactttatttgcctgtgtatgctaaatagtctacaagtgatttttgaaagaaaaaaacagaaatgatagaatatcacaactttttattaatcctaggggaagcccactacacggttcatgcatcgcgggtcataagtctcacgattttaaaaaatac

SEQ ID NO: 148546 - DNA, 1644 bp, Zea Mays
ttagtagcagctgctagttaagacgtctacaaattcctatatctcggagcatcaagcctgaattctccacggaagcacaaaccatctgcttcgacttgctccttgtgctcagatagtcagtgggagccaaaagtacacacacgcacaaacgcccttctcctatctgtgcatctgcggcctttccgtgtagacgaaaatttgctgtcaccgtacattggccagcccagctaatccatgtagaactcgaattgaaccccattagaagcagattgaaaaggatctgcgaagcggacacacacagcaacaacctatcgctaaaggtgacggaagtgcaaggggaggtgagggggaacatgtcgctggcacacgaagaactggagcatccatactgcaataacagtagaaggtatagcggcagaaggtataccgacagcagcacgtataccttctatagatgtagcgacccatgcactattaaatgggccgtgcttcgggtcggcctgccaggaacaatccatttggccatctatagacgtcaatgtaaggagagttccatctctcttttggaaatatctttcactgctccatagactcaaacggaagagtcttgttggtatcttgatccgaggatccaccaaccagtgaaataatgttgtgtgccctggcccagatgagtgatgcaaggtgatacaagttgtttatcctggttcgggcgagagaaagccctacttccagcagagggaggacgagacttatattacttgcacctaagtgcttgcagtagggagtacaaacaggtcgagagaggggaggatcccaagtccctggggttgattgaggcaagtgtcaatatcgcagtggaggtgaaaaccgtgaagtgttcgcccgcctccctgaagccacagactcctctatttatagcctcaaggagggctgccatgagtgccggggttggccgggtatggtgaggaggcgaggttgagcacctgtagacggtatggcctgtggtatgaggcttgtacttgctgttgacttatgcctggtggagacgtctggttcctgtatttgcatctttgactacgcagagagtcgaggctagggccgagggctcggtcacatacccgagcctacctgatggggaagttgcacatgtcgtagtggttggtgtagtgctgagcatggcaaaaagcccatgggtaatatgtcagctcccccgttttcggtgacgtcgggcgcccttttgttgataataacgaggtcgatgccgtgctcgggcgaggcgaaagtctgcccgaggccgtgactgagcccgcaccgggattcgtagacgtgcgcgacacagttgaaggagtggtctcctgcggtattcgcggggagtaagtagccgaggctgggctcgggcgaggtgtactttcctctcgaggtccagtcccgcgctttgtcgaatgcgtgtatgcgtgtcccatcagtagttggtaggtgacgtgggggaacaacagccgttgtacttaggcatacatcatcgtagttggtgaaagccgacgagaccgcggtcttgtcgctcctgttcgcctgcagcgctgcgtggggtaggtatgctcattaaatgctcatgtcccctgtgaccttcggctgagacctgcc

SEQ ID NO: 148547 - DNA, 474 bp, Zea Mays
ggccacgatgctgtccctgcccgtggaagaggacgacgacagcatggcagcgccggcggtcccgcgctccgatgggcaaatccccgtggaggaagactactgctactactacgacaacgctaacaatatcaatgctgcggcggcggtgcccggcggctccgagcagacgagggactactacctggactcgtccagctccagcaggaggcgccgaagcgtggaccgctccaccacctccgggcgcaactccttctctgacgccaacagcagcgaggcggcgtgcaggatgatgatgatgatgaatgccgccgccaatggcaatgccagggtgtcaccggcgggcatcgccgccgcagagagtctgcaccactaccacgagtcccatcatcatcaccatcaccagagcgtgcttgtccatcatcagtgctacagagaagaagatgagcagcagcaggaggcctataatctccgcgc

SEQ ID NO: 148548 - DNA, 692 bp, Zea Mays
cgccgggaagtacctggtcgtggcgaacacgtacgccgcccgcgagatgtgggagagcgtggctggcgcgcacgaggcgatgagggcgctgggcttacagaaagatcgtgcctggagctccgtcgaagtgcagagcaggaagcacattttccttgccggagacacgtaccatgacgaatactcggcaatatatgaggtctgcaatgcattggcctccaccgtcgccgagcaatccgtgcgaccagtggatggtgtcagtcgttgttgatggctatgcagtggtttgcgtggtgactgctgcaattcagaatggaagtgcgccgcttctctggagaaaacatcgtgcacagaaatttatctagtatgatctgaatgcctcattctcgtccgagcagttttaccagtataaaggcaagtgagcaagactttgttcgctacactgtaccagagcctgatgaaagctgaaagagcagaggccagagataaccttgggataagttagcagagcaaaggacaggatgttacgtggtacatgtccatctttatttggaacctttaccttgctttcggaaggagcatctaccacaagatcgcatcaactgttcagatatctcccaatcatggtggtttagaatagcacatcgagctgtgaattggatccttgaagatctgtgataatgtcaggatttgga

SEQ ID NO: 148549 - DNA, 329 bp, Zea Mays
ctccttcgctttttgccccttctattttgtctcctggacacataggatattaacacacctcctgctcactgcatcgactaactctctcagcttacctgtaagggaccttacgttccaactacctacacggatcctagtcggctcaactagcttccttacccctcgcacccgttgagacagatgtgaagacccttgcacatttgtcagtacacccgggcgccgatgtagcgcgccactaaggaagcgacgacccgatccttgctcacttgacaccgcatccagatcacgacacgacgcgccaccaagggggtggtggcccgacccttgcc

SEQ ID NO: 148550 - DNA, 281 bp, Zea Mays
ataaaccaccatgcctcacgtgcgaaaaaccatgtaatggactggcacaattggccgagtagtccgtgcatcgcacaccaccacaaaacgcaaccaagctacactaaagttatctcccgattttaagatattctcaaactctataaggcatcagtcggtttcactgtcgtcatatgatggccatagcctaaacacgcgaactgcatgacaccggaccagcggtgccgctctcaccgtggaagctattgcgccgtgtctagtctcatcgacgccgttcctca

SEQ ID NO: 148551 - DNA, 357 bp, Zea Mays
gtatacgccatggcagagtcctcaggcagggtggccctctctcccccttccttttgtattggcgattgacccgttgcaaaaaaatcatgaacattgctgcagagtctagagcttggagcaagttggggaaccattcgcccatccttaggattccattgtatgctgatgacgcaactttgtttgttaagcaaaaaagaggaaattgagacaattgtcagtttgctgaccttatttagagaggcttctagtccggtgaccaattttcagaagtctatgattgtgcccatttgttgtcagggactaccgcttgacgacatccttgacggcctcccttctagaagagcaaccttcctggta

SEQ ID NO: 148552 - DNA, 628 bp, Zea Mays
ttcgcgtgctccgggagccgtacgtgcgagaatagcaagcaggttgccaggttggttggctcttgcattggaggcaggcaggcgtcggggggcccgggccgcggggaccggaggtctcatcgtcccaactgaggccgccgccgtcaccgtggatgcgccgccatagtcgtcgtcgtcgtcgttgttgtcgtgacggacgtgcccggcaacatgttcgttctgcccttccatacacatgctgctatgcatatgcatgcacaacgaacgaacacatgcatggccatgcattcaagctcgtcgagtttttacccagttttagatttaccgttcttttgatcggttttgtactcccattgcatggccagtcctcctcctcgtcatcgtcgtggtcatccgcttcgttctccatccagattacatgcatgtgcctacagcagcagacgcggagagatgcgagcatccgtccatcgcaggtaattagctgcgacgacccaattccagaccggccaatccgcaccatgtcctccgatggccccacgccgtcgccaccgtcgtcgcacgctgcgagccgccgcctgtcgaccacgcacagcttcggcagccatggcaagctcctgccttctcccgg

SEQ ID NO: 148553 - DNA, 662 bp, Zea Mays
tgcacatctcagctcagccacagtcggtagctcttagggttttaaaggttaggagggaaatgaagttcgggatgacaactatcaagagccaactgaatctgtaaagcaacacttagacggcggagatctcttctcatgatctgatggcagtcagatggtggttcagtttttctgtggcgcgaagcggttttccgtttttcttgttattcttccaattcattgtctcctgtattttttcgtttcagcggtttaatttgctcactgccccttttaagctgttcttatgtataagacattgcctgttgtaatcccagatatgccgtcattgagaaattaccccgttttccaatataaaatgagttcagatttccacctttgtcttcaattcatgttgatttctaccattttatcctcaaattatgcatctgcgtttcggagggggagccaattatttcgctgtataagcgttatcaatttttcaaaaaacactaggcgctaggtggtcaggctccactagtttgtaagcatctcctaggcagttcgctcatgagttccatgagaccatgaccatagtttatctttctatctacaatctacaattagtcaaacttccatacacagttgaagttttaaattgctctaggcagaacaatgcctacgta

SEQ ID NO: 148554 - DNA, 324 bp, Zea Mays
tctcaaacataaggcatttcactagagtcaaggtgcttaaacaactttccagcagttgaaacaagctatgtgtgagacaccagtgctagctttgcctaattttgaagaagtatttatggtagaaactgatgcctgcatggatgggattggggcagttttaatgcaaagaaacagacccattgcatttcttagcaaagctctatgtgagaaaaatcagatgctatccatttatgacaaggaattcttggctcttttaatggcagaggaaaggtggcgtcaatatctacaaagagctgaatttgtgattcgaacagatcacaaggc

SEQ ID NO: 148555 - DNA, 491 bp, Zea Mays
ctagctcgtttgacatggtcacttcagtgcataagatatttgttgcgtcagggattggcatttcgtggtcacgcagagggaaaggattcaaataacaaagggaatttttgagaacttttgcaatggcttgcagggaactttgaagaagttaataaggtggttttaggaaatgctcctaacaattgtcagttgatagatcacaagattcaaaaacaactcatttgttgttgtgccaatgaaactaccaaaataataatggatgaacttggtgatgagtgttttgctattcttgctgatgaacctagtgatgcatatcagcaggaacaattggctctttgcttacggtatgtcaataaaataggagagccagttgagagatttcttggtcttgtaaaagttgcaaatactacatcattgacactaaaagaagcaattcagtcattgcttcttgaatggcaattgcccttatctaagatacatggacaagggta

SEQ ID NO: 148556 - DNA, 331 bp, Zea Mays
cgagtgagaagaagtgtactgtatgtggtgagcgtagattcgttgaggttgaaaacgacgatggtttgaccgtgacgacgaagattgcacgtaagcagctttgttacatgcctcttatacctcggttgaaacgtttgttcatctccaagaatacagccagacacatgaggtggcacaaagaaggggtacgtgagaatccaaatgtcatggcgcacctagctgatacaaatgcatggaaggcactagatgcttttgattccagctttgctgatgaagtgcggaacgtccgcttcggtttggcaacagatggtttcttgccttccaatctaac

SEQ ID NO: 148557 - DNA, 858 bp, Zea Mays
tatgatcccggccgagtgacttctgctactatgaatggtccttcccatagaggtgacaatttgtgccgtccctcccccgttagaattcggcgaaggacgagatctcccactgcgaaggatcgatgccgtatggccttatcatgataacgcctcagagtttgctgataccgtgctgattgaatcaccgtattcagtcgctcttcttcgagtacatcaacgtcctccagcctagtagcttcagcttctgctatgttttcaaagattaaccttggtgccccgaacttgagatcagcaggtagcactgcctccgaaccatagaccatgaagaaaggtgtgtttctatgcagagctcgactaggttgagttcttaggctccaaacaacatacaacagctctctgatccactttcctgcgaacttttcattcttgtcgaagactttctttctgagcgcctccaatatcatcccgttagctctttcgacctgcccgttggctcttgggtgcgccaccgaagcatatttgatctgaatgctcttttgctcgcagaaatcgaagaactctgaacttgtgaagttggatcccaggtcggttatgatgctattcggtattccaaacctgaatattatgtcttgtatgaattctacggccttagctgaagttagagaagcaatgggtttgaactctatccatttagtgaatttgtcaatagcaaccagtacatgagtgtatcctccttgagctttcttgaaaggtccaatcatatccaatccccagcacgcgaatggccaagttacaggtatggtttgcagttgctgtgctggtagatgctgttgctttgataaatactggcaggcttcg

SEQ ID NO: 148558 - DNA, 278 bp, Zea Mays
tttctagtgggctactgggcttctattttttcgatccatctacagtagtataaaggcaatacgccgccactcattgtcatcccttgaaacttttcctctcctctattgagtctagaacacaaactgcggctctagaacaccggcaacggctccaaaacactagcgacgagatgagctcctcatctcaaggtccccccttctccccctttcctatctttcctattgtctgaattctgatgaatctgaatctgttggagaagctgctgctgctttttgct

SEQ ID NO: 148559 - DNA, 357 bp, Zea Mays
ttgataaaatagaacatgatgtgatctacaaaattttgcaacacaaaagtttcggtcccaaatggctcaagtggatggaaatgattatgaaatctggcacatctgcaatgctcctcaatggagtacctggtaaattctttaagtgcaaaagaggagtacggcaaggagaccctctctcccccctcctttttgtgttggcagcagatcttcttagtcaataatcaacaaagccaaagatatgggcatactcaatctcccaattcaacaaagatgtggtcaaaattttcccataattcaatatgcagatgataccattctggttttggaggcatgccagaaacaactcttcttcttgaa

SEQ ID NO: 148560 - DNA, 992 bp, Zea Mays
aagcccttacctgcagcctggctcacggtctgcccaggagcgtttattccccctcccccgcatggcccatctaccgggagaattccactcacacaccacgcagcccacgttcgtttattctttctttattcatttggccggagcttacatcaccctgacctcagcaatgacgccaactctgtctaagtgacatgtgggcccttggccagccacacagcgtacccacgcctggtggactccaaactgcctggccgagttccacgccagctctcgcccatcggcaccgtaacaaccccacgcttctcggcatccggtgcataaatacgggagctgcgacctgatcctgactcataggctcggtggaaaccaatgtcccatgcccccatattgacccggcgtgaacgttgtggcaagcaagaagtagccgccagggacagcgctcgaagcacaaccatcttctgtcgtcgccgcgaaaatctaccaccaagggatcatcggcgcaagccgccttgaggtatgacactgatgcttgcgatagtacctcatatcgaagccttccacgttcagtcacggcctccgccgcatctagagtggtccgtcagaaagggataggatatggtgaagatgagaccaaaccacaaacggaaaatcaacggctaaattagaaaatgaacatatcctttcagatccctgcgcctagccataaatctttcactggggccccggtaatggcgtgccaccgcgggcgggggaaacgacgccgctgctgggtttctgggtagaagatgagccgtggcagttggatcttgattcgacggtcttgattagatctgggggaaatttgtgcgtgccgttgatctgcggatggacgaccccgattagcgcacgcgtaccctttcactaggattctcccgggtcgccggatcgggatcccgtggcccaggatggtgctgggcgttataaaatccgcggcgttgatttctaatcggacg

SEQ ID NO: 148561 - DNA, 370 bp, Zea Mays
tccttcttcaagcagcagacagggcgcggagaggagggactagggagggttctagaaccttctagaagtgaacactccttgccgggggcagctcctgttgctctgcgccttctgcagcgtctttgttccgccactcctgttcctgagctcctccactccactcaagtggttcgaatcgagttcggcgcgatctgaatttctccatccaaattttgaaatctcctgttcctctgacgcggatctcctccccatgctccttcagctctcagaaggcggccgcggcggcagacgatagagagcaccattcgccgcctcaccatcctcctgctcgccgcctccgcctcctccgccccgctcaggtgcctccgcc

SEQ ID NO: 148562 - DNA, 868 bp, Zea Mays
atgacgaccgacgagcaatcaagcgtgattctgccaccatcgcgcgcgcaaacccccaggggagacccgacgagcatccgccatgtcccgcggtatgccccacggtggcgccatagctgcaggggccctccaatcgcagacgccagagaggtcccatggtggcggccgccctgcacgctctcagctctgtaacgctatgctccgttgaggtagatgcttacccacctgctcctcgcaatgaccaggaacatggccatgcatatatacccggagtcacggggggttcggccccaggctagcaacggctgacgagagaaatccggccagcccactgagtccgcgcccaaggattcggggaaacaactcaagctagaagaacgcccagacgtgggtcccaccggtcatatggcacagcgagggaggttctgtgcggaggaaggtgggctatcaccggcgaggatctcggccggatctcaacaacccaacagtttctccatcagccagtacacacgcgaggaagacgcattctgttgaagggataactgacgagacggtcccacatgactgagactgcagggcgcgagacgggagcgaaacacagaggctggcatcgcgggcccgatcgacagtgacgcactaggctactgacatcgcggccccaggtgtcagcgcagtgtgggagggggtttagctggactggctatgcgagtgagatgggccgagacaggtgaaatcggcccaagacgagtggttctcttttttttctgtttcttatttcatttccctatttcagatttttgttgaatttgtctcaagttttgaacttcaatttctgaaactacttcaggtctaaatttcaacatgtttt

SEQ ID NO: 148563 - DNA, 453 bp, Zea Mays
tttggtgcaactccaaccgacggtccggtgctctgcatgagctgtttttcttatacacgtttgtccctgaatttttcctcttgactcgagtaggcatatagtaagagctcctttatggtgttcttgagctttggggttgaaatcgggacagcagtcaaattttcaaagtattttttttcttcttcacactctctgatcgactattttgatctttgagaagcaactattaaaacatacagacttcaaagctgataccactttacacactacagctactttcactctgaaccacctaccaacagttactggttacatgttaggttatggtctaatcatcgggtcgtcttccagttcgcccgtggacacagacactgcatgccattccacaaaactagaacagacatgtcccatccaacctaaggtgccgtttgattcacgaaatgtaacgtaaat

SEQ ID NO: 148564 - DNA, 535 bp, Zea Mays
cccgactctccgtctcctctctctcactctctcgcgctcgcggtctcgctctcgctctcgccctcggcctttccgtctctctgctgctcaccgcctcaccgtcggccgtcgccgtagtctctgtcggatcttcgtcatcgggcccccttctgtgcggcgcccctctccagactccggctctgcatcggttgatcggtgaaatccctaaccctaatcacaaatccctaaccctaatctccgctctccggactccggctctccctcccaccgtcccccgtcatcgtctccggctccgggctgcggcttggcagagataagtccctctccgactctccctctccagtcggccatcccaatccctaaccctaaccctaatctcctcttctcggtctctccctctcgcgtcgtccgtcgtcgtgcactttaccctcgtctccggctccgggctccggcttggcaggtatgtcactcttcctcgcttcctcaccagtcgaccattccaatccctaaccctaaccctcgctgcttgctttgc

SEQ ID NO: 148565 - DNA, 301 bp, Zea Mays
agggcctgattggttacctgcatattccccatccatgctcatgggatgcaacctatggatgattggttacctggagagtctattgggcctggctctcccaatgcacgaggcactcctcggcctggccagcggcgtgcgacctttttcttcgtttctcgcgagcctggccgctgctgagcgcgtgaggagcgctggtgagctcggcgggaggcgaaaaggaattggcgcgtgcaggcgggaaagcgcttgggttaccgccggattcgcgccatcacctccctatatatggtcaccactgcct

SEQ ID NO: 148566 - DNA, 716 bp, Zea Mays
cctaaccctagtttcctatcgcgccgcgcacccgctcagtcgctcctctccgctgcgactgcgaccgccgtctcgcctctcgtccatctcctccatctccggtctccgctctcggcctctccatctccgctccggcgcctccgtggacgtgtcctcctcgtccctctcagtctcggactctcgcactcgcacggtaacgctggatctcgccatctcggtgcttgtgctccggctcgtcgtgtgctccactcctccgtcctccccctctccactccttatgtcctccactcctcctgacctcaacggtgccagtgacgtgaaccagggctccggatctgctcgtcttcggtaaccgtgaggaaccagtgcgcgtcggctcgatctccactttgagtcggcgacggaaccgggcttcggaccggatctaccgactaccgctaacggcggcctcagctctgcgtccggctgtgaatcatctaggcccctttggtgatgttttggtaattaatgacaactgcttgtggactaacgattcttcgagaaataagaatgcagggttggaccacataaaacaggaaatgttggagaatcataaacattggttgtggatcagataaaggcaaaggtataatataggttttgtttttgccggtcttgaggagtttagagaagatacatgaccggattagtaggctagatagccgtactattaagag

SEQ ID NO: 148567 - DNA, 442 bp, Zea Mays
gattggaggacatataaacagcactgatgttgtcacaatataccaatgaggtcttggggagaggaacatgaagttctatcaacaactgacgtaaccaggatactttagcaactgcattggcaacagcgtggtactcagcttcgtcactggagcgtgagaccgtgttttggcgcttggaggaccaagagacgaggttagcaccgaggaagacagcataaccagaagtagacctcctagtgtttggatagccagcccaatcagcatcagagtaaaccacaagttccatttgcgaagaggggctgaggtgaaggcccaactgaagagtgcctcggacatagcgcatgatacgcttgagggctgccaaatggggttcccgaggatcgtgcatgtggagacagacttgttgaacagcatacgtaatatccggacgggtgaaagtgag

SEQ ID NO: 148568 - DNA, 653 bp, Zea Mays
ctccactataaaatagccacaacgaaggggtactgatcagttctggccgttggatcttacatcaagggccataattagatcggggaaggttatgaaccggtatgcgttcactgccctaggatcaaagatcgatcgcccgaaatcgtccacacattgttgtcacccgaaccacacgtcaggcaatcaacaacacagattctatgcatcgaaggtgtatcgctatcttctgatccgggccgtcaacacagagatctagggttgagcgaccgtcttccttctctagcgtgctcgacggcggcgcaacacatcaccgtggcagcgcaaccactgacaacctggccaatcaacccaattgccctaacctaaatgctaatcggtgcaaacggaagacacggagatgcggaaccaaatggagaccatcctacctgaaacagtggtgatagccgtgctgcccacggcacgagccagattcatggcgacgaaaaatgctctgatgaggaattctccatccacagttggtcatttcccacacgggcgccacgagtgtattcccagggatcgagcgaagctctcgggcccgacagggagtccccagtgatgacatcatcgcattcacgacagcaacccgatccccatatgcggcggcccatggc

SEQ ID NO: 148569 - DNA, 309 bp, Zea Mays
cctgaatgaacacactgctagcatagtaggccaattcttcaggtggtgatagctattggtggcattcatggggcctgcattgtacagtttgggtaaatggtagggtgggtgatgtcgaagccacaagggggatgagagatgggttgttggtaacatgactatctgaaaataagcgctttggcttttttaagggggtgtttggtttctttagttgccctactaaactttagagactaaactttagtccctagagtttctctttgcaaggattcatttaattataccgtttggcaatttagggactaaaag

SEQ ID NO: 148570 - DNA, 612 bp, Zea Mays
ataaattatccctgtgtgttcacagatccaaacaagagatttgcgaagtagtacatctggcgagttcaagtcgattataacaacttaacatccacatatccaacaaaacaatcaacataaggacaggctgaacagcagtaaaaaccaacagacagttgaagacaaagtgtgcctgaaaagagcagggaggttacacttgagtacaaaatacgtgtggatggttagatgatctgctccagtagttaatgtttaaagaacaaagaacatgttgtttctaactcctagtttggctcatttgaagccgtccaagtagaggagtgctccagtaatctacttcatattttacacgggcccattgtacattattaaaccatgcgtatagagttgccacgtttgacatttgtctatctctcctctgctttgttgcaaatgtattgattactaaatagaaagggtgaaaactaatggatctccactaacccaacaacacaccaatccaagtccatctgtacatgtacaatcatacttgacactgctgacgttggattcagaatttctgatcaatacccccaaacaaattatgggatataatatttttttagtgcttttggc

SEQ ID NO: 148571 - DNA, 449 bp, Zea Mays
agggacgccctttcttcttttaattccttgacttgttgctctaggctttccacctgggaatttaggtgggtgcagtgggagaaaaggtcgtcatagtggttgtcaagggtgtggagatatctggccatgtagactatggtggggtcatcctcattaagatctctccctgacaaggcatgaagtcttttcctccaggtaggggtgtttttgttgctgggtgggaagtagcgaagtggtgtcttagagacttccctgcagtagttttggcatagctggtggagggctctttgggcagcattttggcaagtgtctgggaagcgatgtccagtggcagtgacttggaagggagggtgatttgggtagtttcggctttctcccaggtagactgccatagagcatttctcaattccgttctcacggtattccttccagacgtactccggcttctt

SEQ ID NO: 148572 - DNA, 287 bp, Zea Mays
ccccccggctctgcccttgcctaatatgatattatgctttagactatttgtttataagatcaatgatcaaataaatgctgccctcatgtgccaattatgaaatccttcatgcatcctatcacacatcaatatctgtggtgagctttggatgatccagtaagtattgaatggcgtcggttaggttgtagtgtattatacacaaatgagacacaaactccatggtaagcttaattattggtgtcctcgcaactaatggagtattaatggggtgtttggtttgaagagtt

SEQ ID NO: 148573 - DNA, 329 bp, Zea Mays
gagaagggaaggaaagaggttggaggttctactgattgagagaagggaaggaagcctgatttgtcttagtgtttgcaagcattgatgatgatgagttcagaggagactgaagcaaaaaggttggaagaagaggctgaaaaagggcaatgattcatggtgacaagaaagaagaggatccactaatcacaaaaagtgagatgagaaatgagatgaggagtatgattcaggaactcatgggactaggtatgattggccccaagactttgcctatctcatctgaattgaaattggaactcgttcgatagtgcagccggatgtgaagtcatgtc

SEQ ID NO: 148574 - DNA, 650 bp, Zea Mays
acagagggctaacaaaaccgatgctgtcatttaatacctgcatgaatagaatgttagaaactaaagacaatcagtgggaacttcaatataagaatgcttggctttgaaataagagtaataacatgaaaaggttgttgttctaagataattaaccccatgttgtcgttcatggaatttcaggtaatactatgataatatgtttcaggtcacttgtgtaatctgctcattgtaggatatattaattgttccttgcaaaaaaaaggatatatttgctatttaccatagaagaggtgaaaacaaaaggacgccgacttttgtatgccatgaatctcagagctgacatctagcaacatccttttctcaattcaacaacctcaatggaaagaaaaggataccttaagaaggcccaaacgcaagtatgtccatccataagaattagacatggctctaagtagagatgagttatcatggtggttttgatattcagcagtccaggaagacagaagtttgtcataacaggaggtagctctgagctcatttggtaactcaagtaaatctgtgaagtcaagttgtcttgtgataccaatgtccatcactggattaacgaatttgaaagtcaacagttcccacaaactgtagtcctttatctg

SEQ ID NO: 148575 - DNA, 2144 bp, Zea Mays
gcggcggcggcggcggggagtgatgtcgagaggttcgtcgcggcaatggagcgcctgggccttcccagctttgccgcctctgaccatgacagggtacggtattctcccgtggaccaccaactacttccgttcagcagcagtttttccatatataacaggggccgaaaaatttcggttgggtttagctatgacttgagacttaaagagagagtatgatagtacagtagtaacattttggaaaatcgtctgttaattcagggtggacagggatattacacgtgattgcagcgtgttacagtttcaaatcgaagaagctcggactctgctttcgctgtaggtggttgatgcttgccattgttcagtttgacgattggcaacgttaacctcgatattttctgctttaactgctactggatgctggatgcagctgatgctaacatccaagtctcaatctcaaccagaattttttttccgccaaacatatgagatgtgactccactactcgactaacatataatacaatgcatgccattgctgtccaaatggtttgcatgcactgtacgttccaatgtttgatacattttcctttaataatttcaattgaacccaattcatggtaacaaaattaatgttaactcggtagcttgtggaaattacttcaattatgtcttttttaaatatctgaatatgagcatcagccacgttccagtgtgatgtcacattcaagtattatgatgatgttctggttattaaatttataatatctgaatatggacgtcagccatgttccactgtagtgccaaattcgagtagtatggaggtgttgatgttctgacaataattgtcacttatgcaatactaccgtggaacattcctggtgtctgcagctctttctacaatagaaaaaattatctacctgatcttatttggctggcattgatccagggcccaatgttagctgtcatagtctgtcttcttgcactgaggggtctgtttggttccaatgttggggaaggcttgcattgtagccttgaagcaaaaagtaggatgcacaacatggagtttcccataagggtgaacggctgctgtactcaaaattgtcagtctagagaaaagggtgaagggagcataccaaaggtctccagaagtccagctacgtcaggtgagaagaagtttttacagtacatgtcaagctttcagcagtaacacagagggaaacagagagagcagagcatagctattctatttgttttgcaatatgaaatgtcaaacaaatcatatttatcagtgaaaactgtagttacgaaggttatgatgtgaaggaggttagcttatcagttaaaacatcttttcctattgtagagccatcatctccgatatcaatgcctgaactatcttctatttcaaggcacactcgacataattttcatgaagtcttccatctgagacaaggaatttactctgacatgcctatttctaaagttttggagataatgaaatccaccaacttggatgtaagtggaatatagtgattctttctgaaatgtgcgtgagataatgtcagcccaaattctgatctttttattctttgcatcatgtggaaccaattttacagaatgcccctactcagtcacttttgagttttgtgaatgccatccttgatcggatcattgaaaatgagaatggagaaattccttatgtaggctactcaaaagcaatacagttagttgtttcttttcatacatgagaactttggtacatttttgttttatacttctttcatccccttggataaaaagatagcattctttgcacagaatatcgcttgcttgttgagaaaggtaataatggagattgaacgccgcatttctactcaagcagaacacataagaaatgtaaggaatgctattttatacttatttttcaaattattcttgttgtaactcttacttgtatggcagcaaaatagccttatcagagcacgtgaagagaaatataaatcaaggataagagtactagaggcacttgcaagtgggacaggtggacaaatgcaaataaattcaagtgcggcaaatggaaaaataaatgtaagttctagttttcatttgaaacctattatgatgagttttgttagactcttttat

SEQ ID NO: 148576 - DNA, 798 bp, Zea Mays
gcaagtatcacggagcagcccactctgtgcccacgagctgacgtgtgggccctatctgtcggctacatgtccgcgcccacgttgtgaaccggctggctgcgcaatggggccacgttgtgaatcgtgcccacgtctctgctcactgccgtgtgggccctctgcgccatccttgtacacgcccactaccacgcgggacctacgtgtcatctcccacctccgctaaggttggatccacgccgccataccggcctccccacatgcgccgggaatccgttcccaacctcaacccttgagtccgtgctcagccgtcatattaatctgcaccgatccccagttttgtccgctccatcctcgccctagtagacacgacccgtgagctcgcctttagatttgggagcaccgccagaagccgccatagccatctaccgccgccgtccccgcttagcacccgtggtgcgctcccggacaactcgacggtggtgtggaccgtgtctaggggaaattgggcgcgtggaacctctgtgtggagggaattgctcgctggcccttactatccgccgtcaagccgccccgcttcgtgggcagtctcgtcatcaagccaattgtgagtacaaacctcctacctggatctaccgtcgtcctagctttatttggcacctagcgtctcgggtaatggcgcaccgtatgtcatcggagggtctcctagccatggcgcgccgacgcggcctcactgttggtcaccgacgttcaaccgggaggaggaagacgcgatttgggccgtcgatcgcgcgatatggg

SEQ ID NO: 148577 - DNA, 473 bp, Zea Mays
ttgtgcactacctacatgattgtgtgatgatttttgaaccactgcaacatgttggcataacttttttttcctaaagaggacaattcctgaacactcggacactaacgaattattgatctcttagtataggagaacatagcacagaagagatcaaataatagaacatgatagcatcgatttgttatatactggtattcaaatatatgcttcagaaagcaaaacacgatacaacatcaaatcattaaacaaaccaaaaagtttgcactaaaccaaaaaaacattaactaaagctcactatgaaagtatgaagttgtcaagagagaagtaaaactattctaaaacaaaagaaagagaagttgtccaattggcatattaacttactttatggccttgtatacatcaaaataaaaacaaaaattgccttcgattataactattcacaaaaactatatgttttttatcgaagacgcagg

SEQ ID NO: 148578 - DNA, 597 bp, Zea Mays
ctaaattcaccaaatagtgccacatacctatttagcctggagacataaagaaaaactttgggatggaggatgttaaaatagtatggctcaattaatttagtgttaagacatagtatgtctgcaaatacatatattccccattacaaagctaacccaagaactgctacctgccttgacatagatgattattaaaagctatagattcatgagatgctgtctggtttaggccccctgcctccactaagtgtgacataatccaattaacaaaatcatgtaatcaatatgttgacatggtgacaaattctacaatgctaatccatacataggtcgaggacactacagctacccacagatctcaccagcacatggatgttcacattgaacacacgttgcatgatgtgcaagaattcaataacagaaggggctgctgccctatcttagtgaaattttagctgttctgtttggaggttgtgcttctgcgcagttgggtaatggcactttcagttcaattcaaaaatatgcagtacgcaccgagaaccatgcagttcatatatgtgctcagtagcagcaaagtagttaagagatggcaaggtcagg

SEQ ID NO: 148579 - DNA, 297 bp, Zea Mays
gtgaaacaaagggtaggaccttacttgcaaacgtgtagcatggtgccccggcgtcgtgcatggtggctcggcggtgaaggaggaccttcagagaagaattccggcgactctaaccaagctcaggatgttcatgccctcacacagcgtgccccagcgatgcaccctggccaccctgagactttaaacagcagtcatcgatctgatcgatgatggcggctcctgctggcttcccattggtttccgcccgtgcacgagattgtggccgagacttgggatttcaggtctactctatcgctt

SEQ ID NO: 148580 - DNA, 823 bp, Zea Mays
atcaaaattgtagagcaaactaaggagaacaactttgcttaagattgtgagctcagttgttaagaaaaatccagatataattaagctcaaaatcaggttgtcaggctgctaaggtctgaattttcagactaacagtgaactgacatcaacttcaagcctaaattcaagcatgatccaatgggtttttgtggtagcatcatatggcaatattgtagatggtatgttgctttaccactttgatgcagagtttgagttgagttgtcattcaaaattaagagaaaaccaagctccaagtctgtctgtcaggttgtctgaaggaagtgctccatggtacagtgaccgaattaagttcagaacacttcatcgccgtcgatcactcctccgccgcgattcgtgccgccggcgttaggactcgcgctcggggtgggtggataaggacgtgcggtgaaagatccttgccggcgatgagctggaggtcactccggtgactcaccgtggctatcttttctactttgcggctgggcagataacctcgccagtgaactgccgtgttctggccctgcgccgcgtgtcctaaccgcgctaccacatcaccgtgactccctctagcttcccgtcgaccaccggaactaccgccacggtagaagccacctagcgcttgcgccagtgtcttcttctacctccgaccgccgcgcgtctcacccgattcaccggccaccgacgaagccgcctataaattaagcccgtgaccagctccgcagggtcatcagctaaccagccaccactaatcagccacgatcgttcgccagagctcgagaatttc

SEQ ID NO: 148581 - DNA, 364 bp, Zea Mays
tcctcaggaaatatggaggacgatctgaaggctggtggagaagatcatctagtcgggacgacagcctaggtggagccgtggtgaagaaccaatatgttggacatgtgagaggtaagggaaacatgaaataaacttctctattacttcttgcttaactattgattacaaaggccctggccttataggcgccggcccctaacagaatcccccctagataggagatctaacagctaatacttatctaatgactgggactttatcccaacaaaccagactgcacaatatcctaacagattgaccctattaggcagattgcccctagccatccttagtccttctattgtagccctttccagtcataaca

SEQ ID NO: 148582 - DNA, 278 bp, Zea Mays
catggttgctggcgtcgaggggtaggtgtacaacaacaccagggacgacgaggccttggtgacagacatcggcagatcgacgacggtgatacagcactacgacgatggtggtcggcggcgcacgacaacaaggagacacgacgagcgctgggaaggcaatgcttggcgagcaccagcaacagcacaaggcacatcgaggggctaaacatgggcattcggagatggcggttggcgaccaggcagtgcggcagggagagaattgagcagggagagggctc

SEQ ID NO: 148583 - DNA, 580 bp, Zea Mays
cacggactggattttcattaccacttagccagcagcatggccaagctccacttccaaaccagcagttaccttctagtcatcaacatcccagggcccttagtagccagccaaatattcctggagttggtgggcctttatatccttccaagcatctgcctggtggatcattctctgctgagactaataacatgggttttatgaactcacctgctcaaatgcatcaaggtggagcaggtacaaactaccagcaaaagtcagttagtggtcatgcagttccaaatcatgttggtccatcaccaattcgacctccaatgggttctaatatgggtaatagtgatggacactttgaaagagatggccctcacacttatggaaggtttgatggagcaaaggctctccagcagcaaccaaagcttgctgctctctcaacttcacaaaatcccatggtaataatcttggtacagtagtgttgaatcttaatgaagcgaatagttcactcttacactgcctaaatttatgtcctaccataacagtaagctataatttttcctgtacattgtaaggtccgatgatattttca

SEQ ID NO: 148584 - DNA, 395 bp, Zea Mays
cttaagttcaaccaactctggtctagatactctgtaggctcttttagaaatgggggcggtgccaggaagaagctctatggcaaactcaactttccgctcaggtggcatgcctggtaagtcttccgggaacacatctgtgaattcggacacaaccttgataatctcgagtgaatctggctccttgctgtcgatagccatctgatgacaacttcctttccttggctcacgtgagattaactcggctacgacttcttctcctagtggggacaccaacttaactatcctcttatcatagttgataattgcttggtacttatctagccaattcatccctaggatgacatctattccctgagtacccattactatgagattagcgggaaacgttatccccc

SEQ ID NO: 148585 - DNA, 934 bp, Zea Mays
cacaaagtaatgatagtttaagctcatttcacaagtgtattgaaagataaacagacatgactgcaaataaacattcttagttcgtacccctatataatttactagagcgttgtggtctcttcacagaacaatgagctgatagagccatttgtgcatttttctgatgtactcaatagggagacagctagcttcagttggtagcaacagtgaaataattcatctgaacagaaagagcatttcctataactacagttctgaaggatagcttcagttgtagggatgttgatttcgaatgctactaagttagtatagtgaacattagatcaaaacagcctgcagctgtgtgagtttaaaatatgttagcaaggttgccagagctcaaaaaggggccgcacaagtttcattctaggatcaggagctacatggatttgcaactgcaaaatcaattccttttattaggtgtcattcaaataggaacactacaaattattgtggtatatgactgggaaatcatttatccaacaaatcagactactgcacatgagccttaggcatggtgattttaatggactgttctattagcatatgattacttttgatcacttgctttcttttagatcaaatctacacgtgccttagccaaagtcgtgccgtcgacttgatgctatatatctccataagatacctacctccctaagtctgtcccaagatgcggtcgatcttggcgttcatctcacaggatcgaacagggtgctgacatggaagtcattgataccaaattgatgtggtgctagcgatatgaaaagcaaaggggagaatgaaggaaagatgggactaagcttgagtgcagagggcagcgaggcaatagtgtggtgctgtggtggtttcagcgccggtgaccactgctgaatcgccggcaaccaccgtcgaaaag

SEQ ID NO: 148586 - DNA, 725 bp, Zea Mays
ggcataagggccttggaggcttatatggttagatgccctatgacatgatgggccctaatggttaatatcgataggtgccttaggacatgagcgaccccgagggcttacatcgacatgtgcctcaaggtgtaagggggccgaggctaataccgtcaggtgctctagagcacgaggggccctaaggtaaatgccctaggacgcaaggggctccgagggcttattctaatatgccatgttatatggtctagtaggcctagttaggagcacccttgtataaaacgagttagtgttggtgttgtctgttagtcaagaccaaggaaggcccttggtcatggggtcctgagagtaactacccttctattgtaaggctcggaaatcagtatttcgggcaaggatccttgaacgtgtcttggcagcaactcggggtataaccttcctcaggcgctgataatgatagagatacaaactactattggtgactttgatatttttatcgatgtattaagaagtgtacaagcttccccctagtgctcgttggtgatcctcacaaggattaccatgtgaggaccaagctctcggttgggtacctccgtggatagtccaggccttccccacaaacaagtgtgtctctaaaatagcctcttctagaccactccccagaacatagtcatctctttgaaccaaatatagaacacaggcgggtggaaaacatggctagacataac

SEQ ID NO: 148587 - DNA, 526 bp, Zea Mays
aagatatggtccctgaagatctgttgtcggagccggcagatggtgggacaattccgaatgttcttcttatttcgcgaggcatggagatcgccctaagatgagtaattgcgaatgtgcttgtgttggatcgagtaggcgtgagcgtgtcgtgccgatttaagtcactgtcgacttaaaccgaccgctctgttagtagggtatagtggtcaccgtgagttacgcatgagcatgtcacaccgccttaagttgccgccgacttaagtcgattgctccgctagtagggtatagtggtcaccctaagttaagtaagtgtgagcatgtcacaccgccttaagtcatcgccgacttaagtcgattgctccgttagtagggtatagtggtcaccctgagttaagtaagcatgagcatgtcacaccgccttaggtcgtcgccgacttaagtcgattgctccgttagtagggtatagtggtcaccctgagttaagtaagtgtgagcatgtcacaccgccttaagtcgttgccaactt

SEQ ID NO: 148588 - DNA, 458 bp, Zea Mays
attgcttatattgattttaaatgatgaccttattagatgtgccatcgagaccacatatattagcattttgtaactaaaaatacaatgcatgaatatatatagataacctttacatcgtgctacatgctttcgggaaataaggaaccattacaacatatatatttttgatgatgtacaatttcatcatcggatataccgttcctccttttttacatacattttgataagaatgtcaaaatgtttaaataaatagcgcgcgcatggcacgcgttagacactagtaggtttacaagtatattgagctgcaagttagaccctctccaacaaggactcgtaaacgcactacaccaaaatacctaacttccgagggcctataccgtaggaagttagcgtaaaactctcggaagttatttaaaccgtcggaagttagccgaaaccgtcggaagttagcccgtcgg

SEQ ID NO: 148589 - DNA, 655 bp, Zea Mays
cttgactctgacgcgtgggggccgctttccagcttctgtcgcctcgcgcgccctggtcaccaagtcactgacgcgtgtgtcccatttgtcagatcaatcttccaggatcgcaacaaatcctggcctccgccgcgcgaactccgcgcttgccgcggcaaatcaatcgcgatattgggcatgagctcatctttcctcgtgcctatatatcgtgaccgctcctttcccctctactaatccatccgtgagctttcctcgacctcggaccgtgagcgagaacgcaggaggaggccgccaccatgaagtagagagaggaagagagcaaatcacgttaccggttgattcgtgatgtcaagtccccggtgggcgacggggggatcaacaatattattcgcacgtggttgtggcctttccaagcggggagatccaccagtgattccccaattgctcgtcggagtactttcaacaccgtgatgtcgcgggtcgtcgtgggccggctccccggaactcgattgccggtaaaatcatctccacatctttcaccttgtgcttctcgtagcgtagcgcccgttggtttgcgtattagagcatcggggcgccggtcgtggccacaccgacaggctgcgccgctgggggattgtttggcgctgccgctttg

SEQ ID NO: 148590 - DNA, 526 bp, Zea Mays
tgaacgatgcataaacaccaatatgtttaataagatcatgagaaacttgtataacacccatgttatcacatagaagaggtgtaagagtgtcacaatagccatcagagtcataatttcagcactagtgggtatcagagataacaaagttgttaaaaggcgttttcattttgaatctttttggaatgaggtggtgcacaatgcttggaattctgtccctgttggccaatgtccatactccactcttgatttaaaattcaaggggacagctagggcccttcaaggttggagcagcaagaaggtggggcacattgaggctcagctgcaacttgctacagaaatgatccattagcttgagattgcgcaggatggttgtattctttctgcagccaagaggtggctgttgagcaatttgaagaaacattctctggctttggcctcaaccaagcgaaccattgcacgccttagatcaaggatttcgtggctcaaggagggagatgcaaactctaaactgtttcattcctttgcg

SEQ ID NO: 148591 - DNA, 309 bp, Zea Mays
gttttttcataaaagggaaggatacatattgcccttgtttgaagcctttcaattcaactgaagaagcacagtgctggtggttgatcctttttttaaaccaaactagcagttgttgatcctatgttctagagacagcagaatatctgtagatgtcattgtcacctgcatgtagtaaagttgacttaaagttaaacttatgtacctgaggagcatccaactatgttcacgtatttgtaaacttccgctttaaagtgtgctcttatttgttaggccagtaatatctagatgggcaattgtttttagcaaaac

SEQ ID NO: 148592 - DNA, 496 bp, Zea Mays
gcgggttctaaatcctaaaaacgtaaggtttctttcataaagtgtacccgcgaaggggtatcagttgatctgcatcgttggacacgagatcgacggtgcaggatagatccatccatgcccgaaccggtatgcaataactgcccttggatccgagatccacggcgtagatttaaaataaccgaattattttctatgcgcccgatctagatcgaacggcgcggatgaatcctatgaataggtatgcaaccatctaatcccagccgacccccggccatccaacggcacacgtctgttttccctgagatctaatcgtagccgttgacaacgaatccgacggcgcgcatcacctttccccaatccccgtcggtgagcgcggcggcgcagagctgtggcacggcggcgccattgccggcgcaagcaaagcagtccaaacgagccctaatctctagttcaattgaccctaaacgattcggaagcaacagtgaattgatctagg

SEQ ID NO: 148593 - DNA, 419 bp, Zea Mays
attggaaacaaaacaaggttctaattcttagttgttagacatttaaaagttataccaattcagcttttctagttattatttacagtttcaaatttgatttatttgtacgataaagtttattggctatcatttttctcttggttactatttttattcattgcgagtcacagttgttcggtttttctctaaatttttagacgggtcgtcattagacttgtcaatgagggttcaacctttacgtacctcaaatcattcaaagtgcatcgtttgtaccgttgtacgctgccatgaacttgatgacatgcaaatgatttcatagtgtaattgacgcgtgaaataggttgttgtaagtgtgaaacatgtcaagtatgtggactagctagtaagttgatatatttaaagacctcatttaaggaatg

SEQ ID NO: 148594 - DNA, 317 bp, Zea Mays
ctctcacaccttcacactccactccaaaaactctctcgagtcctcactcttttggaagagtggttggagatccgttcttcccggcgtgtttccaccatcttcctccatctcgttgggagttcttgacccaatcttcggatcgaggtattgccctatgttatttccttgtactcgatcctacgcgttcttgattatcatatgtatcatttgttgggtacattttagtttaagtgattgcaacacttagattatcttcattttgtcacaaacattgttagagattagcgatttgatattgttcgttgtagttgaaccgc

SEQ ID NO: 148595 - DNA, 418 bp, Zea Mays
caggggcggcccaaggcgaggtgcttggccggatgtaacctttctctgatagctcatcgatctgcttcttgagttcaactaactctggtccagaaactctgtaggctcttttagaaatgggggcggtgccaggaagaagctctatagcaaactcaactttccgctcaggtggcatacctagtaaatcttccggaaacacatctggaaattctgacacaaccttgataatctcgagtgaatctggctccttgctatcaatagccatctgatgacaacttcctttccttgactcaggcgagactaactcggtcaccacttcctctcctagtggggacatcaacttgattgtcctcttatcacaagtgataactacctgatacttatctagccagttcatccctaggatgacatctattcc

SEQ ID NO: 148596 - DNA, 311 bp, Zea Mays
ctttgtatggcaggaaatgcaggaccccactgtattgggatcaaactggtgaaagacagttctttggacctgaacttatacaagaggcagaagaacaagttcgaatgataagagaaaatttgagaattgcacaatcaaggcaaaagagttatgctgataatagaaggagactactggagtttcaggagggtgatcatgtctatttgaaggtgtcacctcttcggggtatgaggagatttaaagttaaaggaaagttatcccctcgcttcattggacctttcttgatcttaaagcgagtgggagaagttgca

SEQ ID NO: 148597 - DNA, 410 bp, Zea Mays
aggcgacaaagaagaagcaaggatccctacagtcttcgatgaatgtgttagccgccaagatcttgaggcaaacaacaagctcctaaaggagcaaatggaggagacggtccacaagtcagtgcatgatgccttcattgacatgaaccttggcaagacttacgagaggctggatcgacgattgtccgagatcgtcgatagacttgctatgttggagacacaacaaccagcaccaccaccaccacctcctcgtccacgtcttctcgatgatgcggtgtttgatgcagaaggtaattatgataaagtggccaccagatatttgcgcctacgtcaccgtcttcatcaaaacacagaaggtatgccacaccgccagcaaggtaataacaatcgtgctcctgatgacccttatgcta

SEQ ID NO: 148598 - DNA, 329 bp, Zea Mays
gagagggccacctgtgcgctatgaatttctcgccgatggagatcctctgccgctgggccactacgctccgtggttgtgctccaccacctacgtccagctctcgttgatcgacctgggaggatgcgcagcgcacacggatgttcgtcgcagcttcgcctgggtggattcgttctcggcgcggctggaatttctcaccgatgtgagctctccgccgccaaagcgtcacctgccatgggcgggcctcgtcaccacctcgcactccggtaagaagcctcactatgatccaccatattgcactcctcgaatagcactgatcggattggagtttg

SEQ ID NO: 148599 - DNA, 680 bp, Zea Mays
gtcattcgtggtgatgatgtttgtgtgagggctcatagcaaccaagattattctaggtcatgactatgaacttggagatgtctggttatcactattatgtagttgcctcactagtgtcaggctctagggtgttgcagaggagagcctctgtagtatcaagaggtccagcgaggacaacaacactaaattccaagcacttttgtgcctaccatgatgaccactactgacacaagtcacaaaggttggagaccgcctttgtatgaatttgaagtgaaattgagggattgatagacaccaaggtacgatggtctcgcaacgcccgtggtaatatccatcacgaagctcttgggatggatgcaagctgaaaggataatggacatgatcagagctgactagtggcaataccgtggtaatatccatcacaaagccccactaagggattgctggacaagactagctaagggaggtgttcttacaacacctaaagaggaggatcaagctaatctaactccagcctcatctgaggtagtggaggctagactaagcaagattgttgcattttatatatgcaaagcaacacatgatcaatattgctagagccagtgttagcggcacttgctccatcaactaggtgtgctggtgaagccatgttagcatagcacaacaaaaatatcatcgag

SEQ ID NO: 148600 - DNA, 327 bp, Zea Mays
gatccccacggtgcggcttcagcaggctgacgtggaagacatcatggatgcgggcaccctctggcaactgcaggcggtaggctaccaacccaatcctttcctagacacggaaagggtcaacgtagcgaggtcctagcttcccctttgcgcgcggatggagggactgaaaggtgtggtgcagcaggcgtagccacacccagtcgcccacctggaactggacctcccgatgcccagcgtcgtaatacttcttggcgagctgttgggcctgcaaaaggcgttggcgcacctcggccagcatctcatctctggagtgtagcatgtcgtctg

SEQ ID NO: 148601 - DNA, 341 bp, Zea Mays
tcccaatgatactttgtttagatttcttctaccaattccaaattcagaatttgggtgttacaggcctccaccctggtcatgtttggatgcctgtatttacctgggcctgtctccatggatgcagcttggtcatgtttggtgggctggttggggagttgggtcaggccacaacgatgcaagattcttctgggagccaggctcatcacatacgctagaatcggtcgttcctcaggagccaggctcgccgcgtgcttgtgggtgtgtgttgactagccaaagtgaacgtacagggactaacggggcttggtgcaaccagcaaaccaaacaaagtctcagctgga

SEQ ID NO: 148602 - DNA, 739 bp, Zea Mays
accaaagaacttaaaagccaatttaggacatgacctatttaccactgaatgttgcacataaggttggagcttaagcaacacttgctcacctacctgaaattcccatggcctcctcttaagatcagcaaaatgcttatatcgttgctgagccttcaacaattgttcctgaagcatcactctgtgattatcccttttattcacccattgcatcacatcaatgtcttctgtgccctaaatatgaggctcagccaacacaaaagcttcatatccatacaatgccttaaaaggtgaacaacctagagatgaatgataagaagtattgtaccagaattctgccatagctaaccaggacttccatttatgaggagtagcttgcacagcacacctcaaatacatctctaaacattggtttaccctttcactctgcccatccgtttgtgggtggtaagcagtacttaaagctagtttcactttaagcaactcaaacaagtgcttccaaaagacactagtaaaaatattatctctatctgacactatagattgtggtaccccgtgcaacttcaccacattgtcaagaatcacctgagccaccacctgagcagaaaagggatgcttcaatggaaagaaatgggcatactttgaaaacttgtccaccaccaccataatggtgtcatatccttctgatttgggaagtttctcaataaagtccatagtcaaatccctccatgcaccagtaggg

SEQ ID NO: 148603 - DNA, 760 bp, Zea Mays
ctcgattctctacaaattgcatgagcatcaaaagggcacacgattgtgcgtcaagctttgcttccaagagaaaggaactccactctctgcactgcacctttaaaaattagaacagcagcaaaaatgtggaagtggcgcaactacttcattatttttcgtacaccatttcccgtctctatggttaatcagtagtatcagatttgcattgtgacccgacaaaataacggtgaaaattcatagtttttaaacacgggtttcggtatggtttctcccgtcaccctcgtaaaattgtaaaacttaaaaagagagctcgccaatagatagatgattggccgcgagagaggatcatattttgttgcattttgttgtgtgaaccgcacccggccagctagctagtgaggaccatgaattcgcaagagcgcttggcttcgtttcatctgacgtacgttggcattcttgatggttacggtgatatgatgtgccgtgtcgcatatattggaaagttatgaccgatgatgcatcatcatcaccaactaaaaccaaaatgaccaatgggactttcttcttttcctacttctctccaccaccacgagattgattggttggccacctgatttgtctccaccgaagcaatggggaattaattgctctctcggttttatagattctggttgttcgtttcgaattaaaaccgatcgtttaaaatgctgcagttgcaatatatagagacaaaaatatcgtagaagccagtgcgaattac

SEQ ID NO: 148604 - DNA, 359 bp, Zea Mays
ccagtggtcagtcggctcccatgcagtccaccatgcgtatgatgcctggcaggcgggacccactgtctgcctcaggtcgcgcacgcccgtactggctcgtggggtaggcctgtcaggtttaccttcctcctcgcaacaacccgcacgtcgcgcgcacaacgactgccgaaatccacgcgacttcctcgatccatctcgacctcgtaccccacctcgcggcaagctcggaggagtctgcggactcaatcgtgaacagatgggcgcggaaatcgcggaggctcggccaacggctccgtaacctgaacggtgaccaccttctccggccgagatcctcgttgaacgacccataaaacctagtc

SEQ ID NO: 148605 - DNA, 360 bp, Zea Mays
ccacaatgcacctaggcaggaggacgagctagcaggccaaggttcatcgatgcgtgatgatgatgactatggggaggactacgatggagaggccgatgacgaggttgttacaacgacacaggcaacgaacttcaggtatttttattttgacgacgagttctattttctgttggattgatattattacccgtgcacaatttacaattttgtaggtttcggcggtcccttagagttccaccgacacgacccttggaccaacgtagggtcataaaccctgcaggagagaggagctgggtggaggtggcatggagtggcaaaggtcaccggacaccagttaacacagtgctgggatctatagct

SEQ ID NO: 148606 - DNA, 790 bp, Zea Mays
gttcttgactgaaggtttgttccacagattgccatcaaaccgacgaacttccttacgcttcatcggttccgaaacttcttcctgtaacgtggccaaggtacaagcagtgtcgaggtctggaggtcgttgtagcattacgacagcacgaatatcctccctcaggccttccataaaccgagttgtgaaatataagggatcaaacactgactcataagctgttaattgatcaaccaggacacaaaatttctcaatatagtcagccaccgttgtcgtctgcttaatacgaaacatctggcgcaacagggactgatgttgatccttgccgaacctgtccaaaagcagcttacaaaacaactgccatggcagaggctgatagcgacgctcaatggactgaaaccaacaggcaaccagtggggagaaatgcattttagccactttaacccaggaggtctgatccacactatacatatcaaaatatacttcacagcgagaaatccaaaactggggatgagtaccatcaaacaatgggaatgaaattgtgggtaacttgcccgtagaatgatgtgtaggggcagaatcaaaacctccaaccccacccaaatcaccaggagtactagagagcatatgattcggaataactgggggtgagtggaagttgtgcatacccttgcccgagcccggcatgaaggtcgtcactgatccgtaccccgggtcacgaatctggttctcctcgttgcccttcagacggaacgacggctcggcctcaggacggagcaggagacctgaatcc

SEQ ID NO: 148607 - DNA, 298 bp, Zea Mays
aaaatgcctcatgcattccctatgctctactccaggaaacacataatccactgcagtttctaaacccttgcaagcgtctgtgtgtatagtcaatccatgtggaaaccctataacctgccgcaaattctgtaggaaccatgtgcaactttctgttggctctgcctcgaggacaccataagccactggaaagagccaattatgtgcatcaatggcacaagcagctactaactggcctctgaacctcccataaagagctgttgcatccactgctagataaggcctgcaaccagctaagaac

SEQ ID NO: 148608 - DNA, 807 bp, Zea Mays
gagacggaggagaggaagaaggcgcgccgcgataggttcctcccggccgccgaggaacgggaggcgtcgggcaggggagatgaccgggttctggagatgatgcgcagtttcagcttcatgcaggcgaccgaggaggatttcatggagggcatgaccgcatacgagcacaacggcgttggcgacggcacagcgcacgggcctgtcgcgccggagccgcctgcgctgacggcgactagcctcagcttcaggtttcagcaccagatgcccgaagttccaacggagacggcgctggtttcgagagaattcactgcggcaagacaagagacggcggtagtttcgagagaactgacagcagcgagagacgatgatggacgacaacgagaggaagagaaggaaccacactttcctttggaaccattcgctccgttgcagacggcggcagacatgcaagaacaccggcacgacgaagcagaggaaacagagttcctggcggaggagccggcagaagagcggagcggagaggttgcgcaggaggaggcagcgccacccaagaccgtcgcggccacgcacaactatcagttcctgactgagcgcgacttccgggggttcgtcagggagccggaggccgtgacggtgcgcgtccaggaatctttcgtgccgtcgccgcctccggcgcaccagcccgaggagcgacgggtggtcgacgtctcctcccgcagcggccggttcctcacggcgagggacttccggccggcgaacgagcccgacgtgtgcgagagcgtggcgtcgtccgggaagtggacgccg

SEQ ID NO: 148609 - DNA, 500 bp, Zea Mays
tggggatattcttgttcttcggatccatctcaccaagaaacttgcaactacgaacaacaccagatcccaaccgaggccactcttcttcggaaatcggcgggcgcagagaagttacgcaccagccaccatgaaaaccagaacgagaggaaaccgggagcgaccaaagacgcgagagaaaggcggcgcagtgagggaaggagtgcgaacccacaaagtcaggaggaaaccctaacctcgactcgggagacgcaaaaccatgagacgcgaccggaggaagaaaccccaccgaatggtctagggttgaggcgagcggtgcgacccccgggctccaacccgaccaagaaaccaaattcccaagagcagcaggcgagcacttaccatgggcctcaaggcgagcagcaggcaccggcccagcggaaacaccatgagacgccacatgaacagggacgcgcggggaagacggagacacggcccagatggttttacgccttttctttttc

SEQ ID NO: 148610 - DNA, 498 bp, Zea Mays
cgcctgccttggctgcgcgatctgcagccctcctggcgtcacgacggcgcctgtaagtgcggccgtacatgacatctctccccccctcgacgatcagctcgtcctcgagctgaaaatggggaaatttgtcgcggaagtcggcgacatcttcccatgtagcatcagtagtggcctgccctttccagcggactatttctcttgggcaagtgatcctgttgaccgttgttctactacaggtcattgtattctccttggatcacaccactggcaagcgtacaggtaaagccccttcatttagggtcaaaatgtgatggtaaaaatatgacacgttaggaatacattttgtgtcggttaccgatctatagcaagaagtaacgcacaatcacacataatatatgcagcagctcagctcgtatatacaatagcattcatatatacatgcttgtgtactctgtatatgttaactgtgaaaagggtgaacaggatgcatgagctgaa

SEQ ID NO: 148611 - DNA, 287 bp, Zea Mays
agcagggataatgagcttcggtgagcgacgaacaacggcgagcttgagagcaagagaggagcgcttagtggcggagtggcgtggttcactgccgatggacaggagagtggggagcgttcctgggatagagaagagagtgattgagttcacggaaaggagagggggcgataacgtccaaactccaaagagtgaatcgactagatgtttaaagcacaacatgtgatttgggcttaaagagagagagtctgggtcctattttttggaagcgacaatggcacggttctgta

SEQ ID NO: 148612 - DNA, 1245 bp, Zea Mays
tgccctgaaagcttaaaaccctcataaaaatttcatagaaaaaagtctacttaaacccctcaactatggatggttgtctacttcgcccctcacctataaaatcatcttattctatctctcaaattattggaaaccgtctaaataacccatgaagtggtttcgactttcgaagatgtttttgttgatgtgtcatttctagaaatatatataaccccctaacatatcaagagtctatataaccccctacctataatattgcaaacagcagcagaaaacaaaataccggatcatccacccttttctcaattattttctttgctttgtttgcctttagtcaattgaatttaacaggatatcaacaaactaaatagaaaacatgaaacaaatgaaaaataatcagagatagagcatagtcaaatatataagatagaaagagattaagactgttaattataatagaaaaactatgtaatgacaaaaaacaaggaacatgtgcaacatattctatcatgtgcatggaacaacgcaggaatatgatcatgtatcgctattatagccagatctatagaacaacatgcaacattagacctttaatagtaggagactacttattttgtttatcataaagcaacatcattcagaacaaataatcaattgtcacaatatgcacaagtgcattctactacaagagtccttcactaaaaatttaaatatactaggttttacacacatgtgcctcagtccagcttctaactttctaggtttatatggatttgtaccgagcatagaacagacctagtgttgaaggctctgacatgagtgaatagaggaaaggatgaactcagacaagctcccccctccccctccccgcaaataaagaaggatgttgcaatccctcgacctgatgacttagtaaggtagctctcaccactgcactagacatgtgtcctatttgtaccaatcataagagtacaaaattctttggtattttgagttttaattcctagttcatgtccatcctgcaaatttatgagaaatacaaaacacatggttctaataggtgtgttaaatgtttgtatctaataggtgtgttaaatgtttgtattctaatttctaattcctaatattttgctttttgttatacgtagggtttatatagacccttgatatgttagggggttatatagacccttgatatgtaaggggttatataaacttctaaaaataacatgttagcaaaactag

SEQ ID NO: 148613 - DNA, 1127 bp, Zea Mays
gaatcatgaaccaacatgatctagtggaaacagtatttgcaactgataacaaagaaacatgaacccttgctttctgcacttccgcgtcgaattgatgcctcctcaagtcagcaccgccaaaagcgtcggcataacgttgctctagcgtttgtagatgctgctgaagaagccaagttatagggtgtgataacgatatgagagtgttttctttatcttctttcgggattgccgtgagaacaccctgttgatttgtctatgggtgattggtgggaggggacgctggttactcagacattagacctatttcccccttgtttgtcaatattttcatttgtgatgcaatgctatgcattgacatgcaatacatcgacgtccatcagccgtaacaagtacgaataattgcagtgcaaactgcaaagaaatatataccagggccgattcaagcatattcattctaaattagacagtccatacaaacttgcaagtttgataaatagaccctttttaggaagtccgtaaatgctttatgccttggtgggagccatatcatttgatggctgtcatacatattccctccccaagaatgcaatatttaatcaaagtaactcagcttctgtagtatattcccctactgctcttattttgttgctgaggaacagagttgttcatgttataagactagtttggtttttgtcctgaataacaacagcaggagagatgaacagaagtactgatcgaaattctgaataggataatgaaaggagatatatgctttagcaaatgactgtacggatagctgactagggttgaacatggaacctcttgaattattgtgcaaagtgtgatttgggagaatatatgtatatcagaataggttttgtgaatgactaaagatcatgcacgtatgtggagaattgattctcaaaaggctatatatatttaacccccaataatatcatcactctgtagttatgtccatcttcccccagcatataatcaaacacctagccaactttagtactgtctcataggggcagcttagcatctagaatggacgagcaacacaaatcgtcaattaaattagtcaaagggtaaaagatttactgaagaaaaagaagaagattcac

SEQ ID NO: 148614 - DNA, 405 bp, Zea Mays
ccaaaacttcaaatgctaagcttttgttgtcttcacattctttgttgtatgctagattgtaatgttggattgaaatgcaggaaccaacaactaattctagagaggaggaagacaaggaggaggacaatagccttgacatggaggatgatttctctctaagcctatcttcagaggatggtgggagccaaggtgaagatgaggttcaggtggcacaagttcataatgcaaagagaggagtcaaaagggcaaagggtgatgttccattatctccttcaaagtgtaaggtcaagagggcgaagcgagccgattgctagaagtattttaaggtggtcgaagttcaatcaaagaagaagtttggggaaatggtgatgaaggccaagtgcaagttttgttacaaaatatatg

SEQ ID NO: 148615 - DNA, 326 bp, Zea Mays
tcagtttgcacctttgttgcgcacttttatagacaaatcttctatgcccgaaggccagtttcgcatgtcctttgttttgtaccacttcaactaaaggtcagcttcattcgcccttcgccatatacctggaacacacttgttcatgtcaaagtaaaggtgatttgaggaccttcggcaaaggtaggaccccaacagtagccccttgcggatgaattcgttcctttgtaacgaacttggatcccaaaaacccaattgggaggccttgcgccaaatgtctgaaaaacaccttctcaaagctttctatgaacgggaccgctctgactgac

SEQ ID NO: 148616 - DNA, 996 bp, Zea Mays
gcccatctgcagttttgaggctgacaaaattgtgggtagagcccgtgtcaagaagagctgtgagggcgtatccccgaatatcgacttgcagttgcatggtgccctctgagctgatgcctgttaaggcgtggagtgaaatgatgggtgctggatcctctggattggattcatcctcgattcctgtatcctcttcaaaatctgtgacctccagatagaatagacgcgggcaccgatgaccacgaacgtattgttcgtcacagttgtaacacagtccccgtttgcggcgctcagccatctcgccgggggtgagcttcttaaatggacgttgtgcccccatgctggttggtgctgctactgttacagtggactgttgtgctggaataggaaatgacggccgctggggaggcctcgacggcttgctggtagttgatgtctggtggacgtcgagtgcctgagcccttcgttcacatgctcttgccaaacttaatgcatgattgagatcccgaggagccataagttcgacatcgatcttgatacgctctggaagacctgtcgtgaagagttgtaccttctgttccagagtgagtggcgtggtgtgggccagtaaatcccagaacctctcctgataatcctccactgttgtccggaatggaagccttgccaattccccgagtgggttgctgcgaagcggtggtccaaatcagagttggcatagctgcttgaaacgcccccatgacaggggtggttcatcacgcaggagctggctgtaccaagtccgtgcagcaccgagcatgtgatatgaagccaaccagactttctcctcttccaacgtgcgctgtccctcgaagaattgttcacatcgagtcaaccagtgcattggatatggtgtgcaaactccaagcggtggaagcgaggaacagagcagatggtggtggagagaaagcactgggtatggtgtgcggtagtgggggaaaggatggaatgggagacggtgaa

SEQ ID NO: 148617 - DNA, 639 bp, Zea Mays
ggttcgtgcagggcatcgtgacgtacacggtgctggacgacctgacggtgacgcccatgtccgccatctccagcatcaccctgctgaacaccttcgccgtggcggacctcggcgacctggaggagaagaaggtgaagctgggctacaacgaggtcaaagcactgcactgctagatctttcgttcgcacgtttgtcatctattgttgttggatcttgtcatcttggcaacatcgtcagcttgcatgtggatggatttggtgcagggcttggcggtcctcaaggcctccctgcagtccaagacggtgctcacggatgtcttcatccacggcaaggctgcgtcgtctagtgctcgcgcttgaaggccaccgtgctagcgggcgcgactggctcctggcgtgaacgaaataagtaaggtttggtttgctcttttgtgatgggatggatcaacttgctgcgacgacgtcgtccggccgttttagccttttggtttgggtttgtactgaactgatatcatctggtagcttttggttggcggatcgcatggggtcttatttggttgcgatgtcggtgccggcgtgccgcaaagggactgaactttgtacacacatgccctgttcaacgtccatggattgcttgctg

SEQ ID NO: 148618 - DNA, 409 bp, Zea Mays
gactactacacatttggtcgtagcagtaaacttttctaaaagcacatccatcacctgagtcatatcaggtcgatcctactactagcctagctagcgagctagtactgctactagagaaagtttttaccacgtgtcacacgtttctccacgcaaattaattcgacatttcggattggatattctcttattgaacgtatatataaatctttttgacgaacgtagcctagctagctagcatatgcgtaccaaacagtggatatacaatgaaattgcagggttttttttttaaatgtggtagaagctttaattcgatgcacatacatatgttctccatcaaaagatgaattaatttatagtgttatccctgaatttttgtagccaatagcaagcacgaactcatcatcatccg

SEQ ID NO: 148619 - DNA, 496 bp, Zea Mays
tggttttatatatcctgattattgctatcccttgcgaaagcagggaaaaaagaggaaaactgccacatcggccatctcggttgtgccgaagagcaagaaaatcaaggtcttgacccaccggccaagatatattgatacgaccacagtacctgaatttggtgaagggacctcttccactgccaaagcggaacaagctgctcccgccgttcggagcgctgaaggatcgactgtagtgccgaaggtgcctataatcgggtcagccgcagccaaatatggtgcagccaaagagccagagttggaaaaaacaatagtgctgccagaaattctgagcccaccggtagaggcagaactgtcgaaggtgacaaaggctcccgccacaactcccaagaggaggagaatggccagcgtgctagacgctgtcatggaaaccacaaaggcattaactcctgcccctgcgaagaaagttgccgaagctgctacggcccaggctgaagcc

SEQ ID NO: 148620 - DNA, 1048 bp, Zea Mays
ggaattggctgaccaagctctgaagaaaaagaagaatccgcctggctgtgttggctctagcaagtcaggcaaaaaagatgagggggacaagacacaagactcttcagatgatgacaactgatatgttaactctgccttgggtgggtgtcttttgcaggtctcaacctcgccaggctttttggctgtctcggccctggcgtttttatctgccttctgtgttcacgaacttggtggtttctggctgtgctctgttctgtcttaacagatacacttttgccctcccagttgttgggtttgggctcctttccgttgacgaacttaatctctatgatgaatagtcacaacgctattaattgctctgactggtctgttttaagttttaatgtccgaggtattaatgtcgtggctaaggggaatggaattcattgtgtgattcgggagtccaattgcgacattctctgcttgcaggagacgaagaaggaatcttttgttagggcagacttaagaaggttctgccccagttcttttgatgagttcgcttttgtcccctcgataggtagctcgggggggttcattactgtttggaatagttcgaagctggttggcaatgttattttccaaaatgagtatgctctttcggttgaattttttgctatttcgtcggaggaatcttggattatcaccaacgtctatgcgccctgttccccatctgggaagattgatttcctccactggttctccaatattaacatgccccacgataagcgctggttgattgttggggactttaacctgatgcgtaggactgaaaatagaaacactgctgggggagacattaacctgatgctgagctttaacgaggcaatcagccagctagacctggtggaaatccctctccatggcctctcctttacttggtcgaataaacaaagggaaccccttcttcagagactcgattggtttttcacgtcgcaagaatggtcggtctgctaccctgatactctcgctacaacgctgccaagggatatttcagatcatgtaccctgct

SEQ ID NO: 148621 - DNA, 665 bp, Zea Mays
atggtgaggacgcaggtacccgcgatctggtcgagaaccagtggctagagggaggataggggtttgcgccaaggaggtagcagggatgggaagcggataaatggtgagagagacaaaaagagtacagagagggcgatgacttgtagtgggcggacctctggtcacgggaaaacggtttatctttgagcttgcggcttgggaggcggagggatcgcaacgacttcagctggcgacggaatcgcgcgatcatggaagatccggtcagcgagatccggttctcgcggggaagaagctctggcgtggatttgggggaggacacggaaggagcattgccagcgtgggtgtttggctgaacagcgggccccgcgaaccagaggacgggtgagggaaagagcgagagtgagcggctgaccggtggtcccatcgtgtcggcgtggcacgcgtggtgaaaacgatgacaagcgggccccgcctgcagtgagcgcgtgtgagggagtgggccggcacgcgcatggggaaaaagaggaatgggccaaaaggcgcccagatcggcccaggtaggtttttctcttttgtttttttcgttttagattcctacttcaaatttaaattaaaatcagtttcaaattctagtttaaatgcaacatccaaaatatcggtatgaa

SEQ ID NO: 148622 - DNA, 708 bp, Zea Mays
ttccatctcttatctttctcttgtccatctatctctcactcttctttatgaaaaaaatatgctcagtcgattttcatcctagccttgatgatttatgtagctgcagcaagcttgtttttaatctgtattgcctctcaaccgaacattattgttgttcagttatggtttatggaagatgctcatcattggagataatttggtctataaaactatttgatatttctctaattgccaacttttatatctaacaccaaaccttgaattccattctttcttgacatgataaatttatctaataaccttgcactcgttttttctccatagattctagaagagtggtcgttgtttataggtgaccagtgaccacatattaactgcagtttctctataggcattgtaatctaaacaaaaacaagacttttgcaaaaatctcccaatattttttaatcaacttgagtggtcattgtttataggtgaccattgaccacatattaactgcagtgtctctataggcattgtaatctaaacaaaaacaagacttttgcaaaaatctcccaatattttttaatcaacttgtagtgtgctactccgactttgcctccttggtcctcctcgcatgtgtaggccaacttctggtgcctccagtccctccacgacgcactccttcgtcgccacctcattctttctgatgacctcgcgatgcttcgc

SEQ ID NO: 148623 - DNA, 927 bp, Zea Mays
gcaatatcatggaggagccaagtccaaagcagtaagctatcccttgctccctgacgtcttatagttcagcaaatgtgtactttaaacgtctgaacagaaatgttttgatttgctgtgcgtacagactgtttcttgtccggggaaagatcagaaaaatgattgaacatgatgtgtcacctcatttcattttctctgtaagctttgtttcattaatgtctctatgatttctatagtccagtagcttgttttctccagacagattgtataactgttgatcttccctttttgttatcctttatctgacattgtagcacctggtcgcggaactgaaaagggacaaggatgaagacttccagcacagcgttgatgaattggcctcggacttgaaccatgtaagcattgctagcatctgcaatgagccaatgatcgtcggttttttttttttccatttttcagctaacaaacctgcaaccactatgtagtgtaggctgacttgcattgctttgtttggtcccatatggctagtttcaagattccaaagggcagtgcaaaggaaacaaatcacgggaggcaaactttaaaacgaggtatatgaacatagaaggttttaccgctgaggctcatgaccatggtgaaaccatccaatgcttcataaaaattgaaggtactagaaattctttttacagtttcatattctattctgaacttcagtctagtgaagcaactaaaccttgaattctggcagaattcaccgtaaggttcctgagcttctacagatctctagtggcaaaaaactcgaatagaggcagtgctcaatgaagaacaactcgtcgcttgggtctacagatccccttctgggggctcttgtacctatggtacctgaatatgatgcgttgtgtctattgtcttcatcttgtaaaatttacc

SEQ ID NO: 148624 - DNA, 273 bp, Zea Mays
gctgtggtttgtgatctcgtcttcaatattttttgtcgcttgcatttatggcccttcacgccttctttttcttcccattccctgacgtcctacaaatgacaaattacaggtctcttgttgctgacactacctggacttttcttctgcttatgacaaagacgaactgataagctggcattcgtagatcggtttcttgggagatacacatacagaagctttagggtcggctcgtagaatctctcagacaccgtcgttttgcatccgagaacttgg

SEQ ID NO: 148625 - DNA, 351 bp, Zea Mays
atttggataatccgctgaagcagtcaggttaaagctatttgttatagttgtttgtgctacagaattctcatcagccaacacttcttttgaccatgtccagttaacattattccaagttaagctcgcagaagctggatgagcaggatagcagctgacatgttgctaagcaaccaagagtccagattgtctgtttctgactattgtgatgtttgagctgtggtgaaagtatcaagaattttataatagatgcattgtcaatgaattttctgtttatgtattgaccttaacattttcaaacacaacctgctgcaactcaaatgctaggttatgctatcctgttgacaagattta

SEQ ID NO: 148626 - DNA, 966 bp, Zea Mays
catgctcgtatccctgaattctttaatactcttgttttaaatactcgcctctaaatttctactgcctacttaaacattttagattatatgtcttgaacttcttgtcttctgaggcccctccctattccattatgaagctgttatcctttgcccttttctattctcttggtcttggtacactcatactattgggatcttgcatactcttatttttatatgcttaccttcataccccgatgactgttcaagacatttcagttaacatgcccttgaccacccttgcttgttaatgatccatgatcggtcattttattttgcacatccttgatgatctcgttaattctttgtaacttccttcggtaattttttactttaacccttctattggaaccttacctatcttacccttgattgttttctccactttgtcacttcgcgagtcttgccttaactctatccttggttatgcttttcactattttcatccttaccattgtcacatctatatcttgccctgatgcttatagtatacctgtgctctaaaaccttctctcttctatctcaattttaaagttgtattttacctattttccccttggttgtatactcttcctcatcgctcttgagttttcaacaccaccctttgttgtgctcatgtttagttttgcctttacctttcccatctctcgaccataccttggtgattacattatgtctgtgatctataatctccaatatcctatcccaatttgagagcggtgttttacttatcttacccttggcgatatcctcttctttaccacatgcaagccttgatgtaactccattctttattgtacttataccactggcccttctatgccttcatcttttctcttatacccttgtatgttatcacctttgacccttgtgatattgtggtcttccacctagatgctcatcttgaacttatcctttaaaagcctc

SEQ ID NO: 148627 - DNA, 613 bp, Zea Mays
ctgattccttccggcaatggcgtccgtgcgcatgcggtggaggtgacgcggctggagaaagcgacggcagggttgcggctggcgttgactctataaggcggggtatgagtcttgcggtggcgaggatcgagcagagccgcctgaggaatcgcacggagttcaactgaagccgttcatggcctgcgagatttatggggggtgatggcgctgacgctaggggcccacaatccagtggtcgccagtgattctacgcgcgcgcgatgcggcaacagccatggcggcacgcacgactacgatctggcggacgggcccacacaccagtcatggagagtagggagtgggtggcacggcgataagcctggcggctagggtttggccaggcgcgcaggtcggctgagtggaccgcgcgggtatgaaaggggagctgggctgaattgagggaatagaggcccactcgaccaaaattgctttctcttttttttaatttcttttcccttttctcttctttcccaattcaaactccaaattgaatttaaattcgaattcagttgcaaacctgtctccaaattaaatgttcaacttgaatatggcatgagatgaattgatttatttt

SEQ ID NO: 148628 - DNA, 713 bp, Zea Mays
tctaatgctactagattgcttgttagagcacgtgtgacttctctgcaggaggttccatagtttattgtgttttcagtagctgaaggttttcatggggtttcttggactgttcagtgtgacatagtgcagcagttcatgcttggtaacatgcctgaggatgaagaacctgtgcctccgtatcctcataatgggcatcaacttccggtggaattttttggattggggcaacctgtgcccaatttccaatttgacctcgacatccccccaatggtgaaattgaattagaggatgctaatgccaacaatgctgatgatggttgggatccatggccggttgaacaggtccaacaagatcaaccgcctgcacctgttcctttagtcaacaatgaagaggaacaattcagttaccaattctccggtcttgaggacttaccttcagatgaatctatgggtcttttcaacgatatcgttatcccgcaagctgtcaacttccctcaggaggatgtccaagatcaagaagttgttgtgcttgctcttccagccctccccccagcggacccatttttggagggaaataacgatcagaacgatcagggcgcgcaaaatttgaatctgaatgctgatgataacatcattgtgggcttcatgactcatctgaatcagccctctcaggaccctacctacaaagatttcttggccaaaaagcacttctcc

SEQ ID NO: 148629 - DNA, 707 bp, Zea Mays
gccgaatcatccccggcaacaccctcgggggctgggtgagcgccaacaccatccttgagggccgagttctctgcagcagccacctctaaggctgaaggtccctcagtcacttccatgggagcaagacaatccaagttagcttcctgaccctcaagacagtgctccaaggtcgatgaggcgcgagacgctgcccgggatgaccccaacccggcgtcgagcacatcagcacaaacatccatcgcgtcaccatccgccggttctgataacagatcctctggaaccatatcttcaagagtttgatcaaagttcgctagagataattcttgtagaccaataagggcagacaaagcaggagaaggaactccactactttccccactggctatgtagcaccgactgttcttccgaatcagagggatttcatcatcttcttcctcctcattttcatcagcaacacggacaacacacccattagggtcagcgtcagatgggtcacacccattgggattagtttcagtaaattcaggcacgagcacttcctcagcagcaggagccgaaggaccagcatcccgatccaagctagacactcggcgaagacgtctcttcttctttttctgcccatcagcaggagaagcaggctgattggcttggcaagggcgtttcgggcgaacactgacaggcctctgaatatccaaggctttactagc

SEQ ID NO: 148630 - DNA, 291 bp, Zea Mays
attatatagacggggtgcatcaggcgtcctcatgaagtgcattctctcatctactgggaagcgacttctggacgaggtccatgctaggcaatgtggaatacacgcagcgtccaagacactagtcgggaaggtcttcaggtcaggattctattggccaacagcgaaaagtgatgccgccgagttagttcagaggtgcgaagcttgccagtacttgtcgaagcaacaacatctaccagctcagcaattgcagaccataccggtgacttggccctttgcatgctgggggctaga

SEQ ID NO: 148631 - DNA, 687 bp, Zea Mays
ggggaatcagtttcctctacgacatggaaaacaaaatacagacgtcgagctccgcggatggttgttgcgtgggcgtcgccgcattaccccgtctctctacccttgggcagtcagtcgtatctctcccttccctgaattctcggacaacagccatggcaggggatgccgtaacaacccctaaatccgcgcttgaatctcggggaagcctgaccgagctcgtcctcgccctgggctataaaggtcgatcgtcgtgaccccctttcctcatctatctcatctatctgcgccaatttttccccattgccacaaaacccggtggaatctggccaccgagcgctccttgtcgtgcagagagagagaaaaaaacttcgatgtcgctaccgcgtcccgcacggagagagttctttgacggagactccaagggcgaatcgggctgcacggctgcggcaatggagggccagcctctccctctcctcctggtccgcgcccagccgccgtcactgctaaccaaaccgtgggcggccttggcgttgtcggattgaagggagttaggagaagcgttcctggccgtgcatcttggatcaagggccgagaatgattgtaggcatcccagggatcgtattaaatcaagaccgcgaattcgaagatctgacggctgtcgtcaggtaccgactcataaaagcctaa

SEQ ID NO: 148632 - DNA, 377 bp, Zea Mays
ctggctcggaaacgacaccgtgcttctctttcttgttgattgatggtgattggggaacaggcggaatgtacatgcatggatcgagatgatgacgatccagccgcgctactgtttatgaacgcaaaaacgaaatcaaacggtacgggacgggatgaaatctctccctacttccccgacacacactagcttattgcaagcaggaagaacgacagcagtgagaggtcacggatgggatcggaacaacagggatcagcgaggagatgcatgctgaaaaggaattaatgagagccttccctattagcagcacccgattaatcatcccggtcgggcggtcgatcggttcaccttcaccacctcctctgcaggaagaacaattc

SEQ ID NO: 148633 - DNA, 307 bp, Zea Mays
acgagagcggagagcgcgcgcgtacgctgtatgcaccttcaactcctcgacgcataaatccggcgggtgcccccgctccatcgttcacgcctaaccaaacctcacacagccacggcgacgacgacagggacacaagctgttcgatacgatcgacgagggatcggaggagcccgcgaggtacggggaagcccaatgaagctacagcgtgcgcaagaaggtgccggcggtcacctcctcacgaagaccccgtcgcggcacgacgcggagcggacggtcaccaaggggtgcgcgacgttctgggtcgggg

SEQ ID NO: 148634 - DNA, 809 bp, Zea Mays
ccctggactcgcctctcagtagaaatcaagcgggcacaagtcaacaacacgtacaagacccatgctccaggccatactgtctacaagggctcggctatgcctcctcaccatacgcagccaactccggtactcctagcagtcctccttgaggctataaatagggtagcctacgacttcagggagacaggcgaacacttcacggttttctccccccacgatattatcacttgcctcaatcaaccttagggacttgggatccttccctctctcgttcaacttgtattccctactgcaagcacttaggtgcaagtaatataagtctcatcccctctgttggaagtagggcttctcttgctcgaaccaggataaagacttgtgtcacttgcatcactcatctgggttaggggcacacaacattatttcactcgttggttagaccctcggatccatacactgacaatatctaaaggtgcaaacctcataactttaccattttactccaagttgcatatttgggtccctgtttgagctcttttggacttgatctcttcaaattacctttcatggacatgtgctcatacttatgtgaagatagttagttcaagatggtgtttcaagcacttaatcaccaaaaaaggtagaaatggttctatgacacattttctcttttagcatcacatacctcaacatcaagtgtcatgcgggactgagcatcacacttgctataactgtgatgaaagggggcatcttagaaggtttgtaagatgggtaaaattactaagttgaacatttcaattcactcttattcg

SEQ ID NO: 148635 - DNA, 837 bp, Zea Mays
tcaaggctccttctcataccacgacaagctcaagagccccagaggctgtcaagataaaggagaagaagcaggtcggtggacccttggtggtgcagaatctgctggtgggatcacatcaggacgagcttggctggcaggtggttgagcgaaggaagaagacccaacatgtgcatcttcctcgtcgagggtcccttgtggacctccgaggtaggtgcttcaactgcttttcttcctcccatcttgctgcggtgtgtcgccgtcctacccgatgctttcgttgctttgagtacgggcatcaagtgagcacttgccctacgggacttgtggcgcgtacgaagcaatttggcggattgaagcacgttcagaaggaagacagaattccggtctggcagcgtttgactaggatggtgggggatgctcctctgaggaaggatggtcagggctcaaggtcaaggaagtcggtctggaaaaggatctccccactgcaggaggatgggaggtcggagtttgcatctgctgcatctgtcgaaggtgatagcggtggaggccatgaaggcttacgatgcaagcggaaccggaaccgttccaagcgttgacggggagagatgaagacggatgatcaccatcaacaagtatctccggttcctgttgttgaagcagtagtcccggagccatccctgttgagtgtcaacaattctaaggtttttgattccacactcaactccagctgtgttttggactactcggatgatttggcgagggaggaaattgctctccgacgagctctgtttgtctctgtggctggaacacgtccagtggtccttggttcagaaattg

SEQ ID NO: 148636 - DNA, 575 bp, Zea Mays
gttgtctcgttgagaagcctcagcaagagcagtttcagtgtccacggatctgctgtgtaaattctttgcttagtttgtccgagtaatataatagcagtgattaatgagcaggtgattcggagttgttcttcttctccgtattttgccagtttggatagcttcagcgcagctgcctacctggttctggatgtgactagagtttactcttctccagtggcgtcacggtcaggagtagctagcagcctagcaggcgtctggaaatttcggacagacacgtggcagcccatgctagcttccaggcgttggaccatgatctaacgctggccgcagaatcgctgtcgctggcgagaagggactgcgggtgggactgccgtctcattcttttggtgacgtgtgcgaggggatccaaatccaagggacgagacgacatgcaagtgttgcttcaatcttggcccttaattctccgaatactcttcgtcatcttcactaccaccgagttcccggttcaaatccaagggactgccgtctcattcttttggtgacgtgtgcgaggggatccaaatccaagggacgag

SEQ ID NO: 148637 - DNA, 532 bp, Zea Mays
ggcaccatcgggcgtagaaggtggagttgacgtcgaggaagagcgatacaagagctcggatgatgggcacaacaacagcttgagcatggaggttgagcagcgtcgagagttggggcaggagcgtcgtcatctgcggcatcgttggagaagacgtcgtccgccagagaggagacggtagtcgttgcttgtccgtcggagacgagacggcagtcgctgctcgtcgatggaattaggatccatatgaacaagcacaaattgataataatggagtaaatcttagaagtattgagatgcacggtacccaaatccatgcatcaagaaatgagcaaaaataacttcattggtgctcgacataggatatgtctactaaccggtgatttttcactggtttatcttcttttcttgaagcaatcctgccacaatcgaagctctatggtccttggattcaatggtggaggcctcgtactcatgcggatgagacgtggtgttgggagccatgatttggcagaagcatagatttggcagaaacgtt

SEQ ID NO: 148638 - DNA, 396 bp, Zea Mays
cagactacaggacccggatagatttggatccctagatcgacagagtcgaagtctgtaataatgcttagttcagtgtcttagtctagtcagtattagttagagttagtttgcttattttatgttggatgcttgttatgatggacatgtactgaagttggatatttgtaatgattgtcaccaaggtgtgggtatcccctgcaacttggtgtagttatcaataaagtcggttatttagttgggtaatccatttatttccactttcctctttatctaagaagctgtcagtgaagatggtcaattgttcagtgctatgatgattttctatacatcttttcttatgctgaaggactgcagagtcagatttgatatatgtgtgtgatttctatagatgtctga

SEQ ID NO: 148639 - DNA, 648 bp, Zea Mays
taggaagagtgcaatgtatagaaggttgaatcgactaaggttgattctgtacttattcatgcatcatgctaagaattatactaataacatttttccccttagaaagatgccgccacgcataaggctaacggcacgtaagtcaacgggaccgattggagtaccccggcatcaactagcccctcgacacgaaagcagcagcagcggaagtaatgaccccataggagaccttgaagcccgagtgagtcgacttcaagcagcgctgcaacacaggaccgatgcttggatcgcatacggagatagaatcaatgaactaagaagggacatctgtcacctgcaggatcagcttgctgatcgggacttagcacttgactgggcagtacagtctcatttgctggcatgtgctaaggaagcgagggctcaggcccgaattaaagaacttagctcagctgtcgacaacctgcaggtctactgcaatacgttgcatgaggaagtccatatactatactcacaattacaccctagtgtgcctgcacactctgctgaggcggaagccggaccctctcacgttgcgggacgcgcgctgggtggggagttagacctttttgaaccccctccttctttgaggttggttgacgtctggactcccac

SEQ ID NO: 148640 - DNA, 478 bp, Zea Mays
gctcaaggaagacgaattctgggaactgactcaagacggaagatctgccagcgagtacgtgcacaagttcacggaattggcccgctacgcgccagatgacgtcagtaccgaagtcaataagatggctcgcttcctgaaggggcttagaccagaactcaagaccatcctggctagccaagacttcctcagtttctctcacctctccaacaaagccatgcaagtggaaagggcaaaggaggaagaaaaaggccatctcaagagaaaattccaagtcctccgggctcagcagcaagatcggcaccagaaaactcgatcctttggatttccacccaagggaccaagcttcagtagaccaggtggacccaccccgtcacggttcagtcagtagagtcagagctcctttcatgccccctcagttgcaagcaaccaacccccggcgaatgcatgttggcactgcggagatcccagtcacttcaag

SEQ ID NO: 148641 - DNA, 575 bp, Zea Mays
gcggatccaaggggtgggcaaggtgggccatgaccccacctctattttttaaccctttatacctaggtttaggtacacaccaaaataaacaaatttttgtatagttagcgtggacaaatctaattaaaactaggttttgatctatttttccgtcgacgcttcactgctcagtccactcttcacctgagccatttgattctccctagcgcaagcccagtcgtggctcactcacttcttcggtcatcgactgaccagtaagtcgttgacctaacccgcccgttgcagcgcaccttgccttctcatcactcatcagctcgtcgactcgtcggggtcctgtagacaacgttgatattttgcctcctagtccgcaccagctgatgggcaagttgttggtgggaccatggtgtcacctgtccctcgctaactcattagagttccaccacgccgttgcaacacgacaatgagtgtcgcttgccgtcaccgtcatctatcgctaccttgcttcctgcactcgctcctccaagatgtcgtcgtctcaccaacgccatctcacgacaatttcgatgactcgccag

SEQ ID NO: 148642 - DNA, 507 bp, Zea Mays
ggggtaagtcgtccatatttgagttcgtgcgctcctcttcgtcacataggcttacacagcgttaggtgtagcgcgccagggtgtgatttaaggtcgggccggcgagctttgctctgcgggctgtgtcgcgccgccgtgcgtggggctgagggaagaagacggatcgggcgccgttaactccgcatcgaatggttaggttagatcccgattctgatattgtgtcaaccgttgatccagccctgtacggtggatatttggcgacagtcgtaactcggccgaatcgattcgcgatcgttgatgccaaatcggacgagtgaagctggggctcggttatgaggagcgcagacggtagatcttcgatccaacggtggggatcgtgtaccgtttcagtttatgtaggatctaatccgggccatcggttctggatctagcggtccacaaaacaggataccccttcaccgtgccacaattgctaaagaacccctgagtaaaatagaattcaacccg

SEQ ID NO: 148643 - DNA, 459 bp, Zea Mays
aggtttgctctgcctcttataactccaagagcctcttggttgtctctagatctttagaaatcaatgtttgtttttgggttcctagggcgatagatatggactcaagctcttgatggtggagctctaggtcttcattgttcttgactttggtaggttcccactcagactcctagttcacctgccctcaaatttgggctaccaactcctcaatcaccttgtccactatcacttacctctcgttagttgcctcaagtcgggtcattgcctcttgctacggtgcagcaacatctcccaaatttctttgccatcctcctaggcttgtactgcaatggtatggatatcttaggcctcctccttggccttttgggtggcctattccatttccctccttttgaggatcttgaatacaatcaccgcctaagcttctttgattgcatcctatagataggcccatgtctg

SEQ ID NO: 148644 - DNA, 550 bp, Zea Mays
gctaattgcaatataatgacctgtggtgttgacatatcactagcgtgcagccgcctatacatcaaatgcgatgatatcacagaatagaataaagtgcatgcatgccaaactctgctggccgcccaaagttacagaacaaaagcttcgacaaataatcgccatcggagaatagacttttgcccttgtcatgtgatgagaatgaggtgcgaaaaggatagccagtgagcatgacagttaaagtctgttttctaagccacggtaggattagtgtgtgcacattttttttgtgggggaaatgcaaaatacacgggcggccgctgcatgctgtattctaatggccagtaatcgcatccaaatcggcagcttcggcctttggatagactcgtcactcgtaggcatcagataattgtttttactcgcggcgtcgtcgatggtgtgtcgttcgtgatagcgtctggattatatgtgtggttaattatcttgcaactagtttacgtgggcctgcaagtcatcaccactgttgtcattttatttgacttttcgagattac

SEQ ID NO: 148645 - DNA, 593 bp, Zea Mays
gtccgagttatcatctatgtctatgtacttccaaattgtgttagttctctaaacttgtcgtaagttctcatctcggccccgatactttcaaaatatacactcagctccttaaacaaatcccattttaaacttagtctttattaagttgcatgcaccaactgctaggatcagatttggagcaaggtcgtgaatggtgtcgttactgtgtaagtgtaagttgtaatacacacccacccctcggggtgtataatctttttttgggggtttctttcttcttaatgaaatgacgcacaactctcccgcgtggttcgagaaaaaaacttggattactgtgttgaatgacgcgcaactctttccccataatgtgttgcatgtccccacgacctggacacattcatccacccagtggtgtagggcacaagggatgagacatgtaacaggagttcaggtgggatgtgcatacctagcttccttgggcctgctatgccatttggtcgcccttgtcgtacctttcctaccacatgtcctagccgaggctttgctgccatggccctcctcgattcatcttcactcgctcctattccacctcacca

SEQ ID NO: 148646 - DNA, 621 bp, Zea Mays
tttttttcataaaaaatgaattgacgagctaatcaatcttggtaaaaagtcaaatgaattacaaaatgggacagagggagtatatgctactgaacatgtggcacgcggaagtgaatagttgcatgaaaatagatatcataattgcatgctgtagtggcctcgatatagatagcttgcttgaagagatggctatatactagaaacacatatttagttgagttccgccagggattgcaacttaagatgtcatgataacacatgaggatatttggttcaccaatgtgtagcacagtagcactgcaacaaacaacatatgttccaaagtttactatctatcgatgttcattttgtagcactagatataatccgttcataaggaaaatggattgctccgatcgctttcagttgttagactgtctctaacaagactctgtaaaaggtcctctccgctaaatgtagcaaacaaagttgtccggtacgcctccaacaagaacctatacaacgcccgttaaattgtagggtgcattcatcatccgccaaatgtagcggacacatgaaagctctctatccactgttcgctcccacatcgtctccgttcgctcgctccctcgtcggttcggc

SEQ ID NO: 148647 - DNA, 298 bp, Zea Mays
ggcctatgcaactcaatactccggaattgaggatctggtagatctcaataatatgtcaacactgataatgtacttttctttttcttactttatgtcctgtgtaacctataagcattaactccctggtctcaatgcccaagaagaaggaaaagacagcactaattcaaccacttcaggtttctagtcgataaattgataaactataaggggttcattttgacaggagccaaacagagtaagatatcaagccaggtagaaatcactagttcttcatgttataaaaacatgtgaatatgtg

SEQ ID NO: 148648 - DNA, 541 bp, Zea Mays
caccttttgaagctttatatgggaggaagtgcaggactcctttgtattgggatcagactggagaaagacaattctttgggcctgaattgattcaagaagcagaagaacaagtccgtataattcgagagaatttgagggtggctcaaaccaggcaaaagagttatgctgataatagaaggaggccactggaatttgaagaaggagattatgtgtatctcaaggtgtcaccacttcgtggaatgaggagattcaaagttaagggcaaattgtcccctcgctacattggaccattcttgatctttagaagagttggggagatggcataccaactcgagttacctgctaccctatcggatgtgcataatgtgttccacgtatctcaacttaagaagtgtcttcgtgttcctgaggaacagttaccaatggaagagctcagtgttcaaggtgatttgacttacacggagtacccgatcaagattttggatactttcactcgagttacgaggaataaggtgataaagatgtgcaaagtccaatggag

SEQ ID NO: 148649 - DNA, 284 bp, Zea Mays
ctcggtcgttatttctaaaacaccgacgcggcccgctatcgctcggctatcacctcttaaagccccagcctcgctgataatcactcggccaccactactaaggcgctgacatcgtgaaaaaggcagtctgaagcacgactcaatgattctaagtcgctacataagcattgcgttcaaaaacagcctctgcagtaggcgttaacacaatcgacgatcagcaagagggcagaacaatacacacaagagggatcgaaatcattctccattatacggaaagtactacc

SEQ ID NO: 148650 - DNA, 789 bp, Zea Mays
tccattcgggcactggaaggggttgcaataggcctgcaggcttctggtgctcggctttcgttcgctggcaagtgtcacaccaggccacatactgtgctatctctttcttcatcactctccaccagtatctggttttgaggtttaggtacatcttggtggttcctaggtggatggagtaggctgagttgtgagcttcatcgagcaggacttctcgtgcctccccttttggtacacatagacggttcttgaaccaaaggactccttgttcatttgtcctgaggtccggaagttgttctttgcgagctttttccataagtcttgctgtctccgagtccaggcgttgagctttgcatatgaggtcttctagcattggtttgacttctaggctgtcgttgtttcccaaacatgcattcagctgagctgattccttcttccaatcttctaaaaagttggttccctttatcccgaaaggttttcggctgagggcgtttgctaccacgttggcctttccggggtgataatgaatctcaaggtcataatctttgatcagttctagccatcttctctgacgaaggttgagatctagctgagtgaagatatacttcagactcttgtgattggtgaagatgtgacatttgttcccaattaggtagtgcctccatatttttagggcatgcactatggctgccaattccaaatcatgggtgggataattctgctcatgtggcttgagtaggcatgatgcataagcaatgactttctcgttttgcaacagaacacaccctaagc

SEQ ID NO: 148651 - DNA, 594 bp, Zea Mays
ctgactgtgtattgtggtttggatggcaggtttagcgtcagtaatagctaggattagggttcaggcgatgctaagattttggggcgccaattgcagaatcactggattgattcatcttttaggggtttcctcgtactcggagtacgagggcaccgttttagttgaatgttgctctggtgtctaagcgccaggtagtcaattttgcagtttcagttggggactgtacgctggcatcagtttttaccttcaactcgtttcatctcttcacaactttgtggtttgcggtgggcacaacaatttgttgctgcaaactcttgtgctctgtggggcgtgggctgtgcagcagttgtgcagtttaattgttctgtttatcataatacacaaggagttagtgtttgagcagatgtcaagatgttaactgtttagcagatctctagaggtaaggggtttatttatttgtttttgttgaacatagggtttaagcaggtctaagacttcagattttgtgtggtgacggtcttagggattgcttatttgctactaagatcgggatgccacaattgtaattgtttttcgatcatatactgttggttt

SEQ ID NO: 148652 - DNA, 408 bp, Zea Mays
gacaagcccaaacttgacaaaatggtttgaaaggctagggcctagaggtggagatgggcacaacagacatgtcattctcagcaagcatgcggttaaacaaaggcaaaaccttcaaatggggtagccacggttgtatgtctggtgttctggcgcagaagagcaacttgcttagccccagattctggctcgtgttccatgagatattcaagatcaagaatcatgccatcaagtgagtttgataacggggaatttgtgcattctgccatatgccatataaaattatgctgaattatcgttaagtttgattctttattttgatttgtaggtacctggaggaccacagaagtagccctgaccccaatgaaactttgggataattcattcagtcacatagatattcgtagctcc

SEQ ID NO: 148653 - DNA, 420 bp, Zea Mays
ccgggtctcttgagagatctagtgttgtggtgagaagatttgcactgaagtgttttttgtgggtgttgtatgagccgtatgggtggtgaatgcgtatggtgtcgagtgttcgatggttgtgaaattatcaggcctaaagaacctaaagagctttagcgcttccaaaagcttgccttgggaaggccctgggcatctccttttataggtacaaggaggtgacccagctgtacatgtgggggtgtatctatgcactaatgtggacagcggagaagtgcctgagccctgtagaagcgtggccggcggcgcggccccaagtcctgacccctgtagcggcacggccgactccgccgagttgaagccgagctctgtagcgccgtggccggtgatatggcctagtcgtcgaggtggccttgaagtgtg

SEQ ID NO: 148654 - DNA, 761 bp, Zea Mays
gcagcatggaacatgcttgcattggcacaacatcacagtcaatagaatcatgataagaaccaattgcaaatgtaactcttaccaaccttgttaccttcatgccgctgctattaagccattggatgtagtagggcggcgggtgtggtttggtagttagccaattttctgcaccatgtcagcactagccaagttgttgcagctcccgccataatgatcacacgacaagatcgcttgttgatcacaggtgacgcaccagggaagggtgcggcagcctggtgccaatcagatcagacctaccaaagagagatatcctctttcctatatcagtacaacagatctggctacctaaggaaggaacctctagttgccataacagaccatgttgctatactagcctagacagaagtgcctcacgcaggaggcaatccaggaatattaccaaaacagtctaacagctttatcaaatagcatggagttccccaaacctgcattctcaaccacctaatacctaaagtacttatgtgcattttccactaacaattctaactttttaattgaaagcaacttatcgattctactcgcttccaaattattttgggtaacaacaaatatttgtatatgagatttagttgactaataaacatagagaatgcaatgactactacgttaggacatcaatttcatcaaacaaaacacacttacacaattaacaatgacatcattatcggttagacgggtgaaacactatctcaatcatacct

SEQ ID NO: 148655 - DNA, 499 bp, Zea Mays
agacttcccaacacccctttggtgtgccgcactgttggcccagatgaagttcggtgacgacgcggcctgtcgtggctaacatggatcaacaatatctacctcattttcataacagacgagtacaagcgtatgtgagtgatcattctgtgagtgataggtgggcccgagaggcagggcccacgtgcgcacgctgaattcaacctagctgggactaggtcgggacgtccacctcgctgagttgctcggcagggactaggttgggacctccgccttggtgagttgctcgatagggactttgtcgagacctccatctcgttgagttgctcggtagggacctagtcgccaggtggaccgttaagagtcacagaactactacaggtacctggttctcgggtacctgtcaccatgtcaaacgtgggcttaaggggtaagctataccaaccaaaaaaattaaaaggaagggtcatattggattagacactgcactcgaccaccacgg

SEQ ID NO: 148656 - DNA, 300 bp, Zea Mays
ataagtcgagtcaaaatacggggtactagtggtacgctaggcaggcggtgtccaaataaattaaccggtcgatgtggtagatgtcgtgcgtgatttattgttagcgagtagtttgaattacgagttatatgaggattatgttagaaactagtatgcggcgtgtaactgtgctcgtgatgtgaataatatatcagtaggtatggttggtgtcattagcaagtgggatgaattcggttgtgcgatagattttgaagggcgaagaacatgtgtagtgtgtcgatcaagttaaccgataggttt

SEQ ID NO: 148657 - DNA, 528 bp, Zea Mays
ggcgcaattcattcccttgttgccctcatgcaaggggcgaaatgatgatgataagctttgcgaccatccatggattgggacacattttggtgtttggagctgtaggctgtagccggggaaaaaccttgcttggtggagcagtggcgacacacatgcccactttgagagcaaatgcatcctttgaaaagagagagagaggtggtggtgagtgttctctgtccatcttgactcagtgatccagagcttattatgccagttaggctgttactgctctggagactatgcgagtgatgtgacgacgacaatttttagagtactagtgtatactagctagctcttattaacatgcatcacgaggtcttcctatgctagagctggagctgagttgtgttggcagcagcagcaggtgattagtttattactggtaacgtccttgtttggccgaggtgctccatcatttgactggaggctcgtgcatgtgttggcgagattcctcctgccgacgacgagatctttgccctgctgtgc

SEQ ID NO: 148658 - DNA, 317 bp, Zea Mays
cccccaagcatgttttgctgaataatctcacactgaacagtccaagaatcaccaacgaagccctcagcctccgaaaaaacaatgaattgagggacttcctcaagggaagtgacacggacacgaagcagggttctgaagacattaccccgatcctcctccaaaagaatcagcctaccaaacgacccaatggctgcttgcaagtactccaaggaacggtaatccagggggaaacctagaaacataagccaacactcatggttgaacaaaagagcccgatggttccaggtgtcattgtggcgaacagcggtgaaagtagc

SEQ ID NO: 148659 - DNA, 342 bp, Zea Mays
cgtttgtcctcaacggcggtccgaaccgcatgttgacgaaatcggcgaagcgaggccagtgaggatgccataatcccgctccaaagcgtagtaccactctgcagcaatgccttcgaggtgcatcattgccatccaaaccttcttctcctccatggtacgcatgccacgaaaataggccacacactttgtcagccacgggagagggtctgatgtaccgtcgaaggagggaaagttgagcttgggacggtcgcggtggggaaagccgccgtcgaagccattccgaccgccgccagcacagtgaccgcggccgtagaagtcgccgtcgtcaacgcggccgtaggg

SEQ ID NO: 148660 - DNA, 1194 bp, Zea Mays
tgagaaatatgcagcactgaacaagtcaccagaagataccgatttcatctacacacaaaatgataaatatcctgccgctaaggtcttgtttgggagcaagtggaatggagagaattgatggggctagaatccctcatcttgaacgctaccttgggtcaccattaagataacatcaaacgactcggtagtcggtaaacattgaaagaaacatgatgttttttttacaatgccatgctgcatccttgagtgtacgaaattgcatactctatggtctccgcttgcacttgtaatcaaggttgagagttcacactaagtgagaacatcgagaagtaggcgtaaactatgcctagaacacatccgaagtcatagcggaggctgcattttcactcgtcataatgtgatgcactaaaaagaaccctcatttgttagccagatacagagacaacaaaaaatagcaccctaaacacagatggataccatggtacagcagggaaaatacacataaacggagtgggggttttaccctaacgtagaggcaaataaccatacaagcatgtagccagtagagggaggtaaggatatatcactatgctgaggctttaacgaagtcgtcagttcaccacgaatatgagaactggacacctgaaagaactttcagatgttctttatctcacagaggaattaatcatcccgttccacattgcgcgcccagcgtagacaagctaaaactatcacaaaaacagctggtaatcgtcaagttctcattggatcagcccacagccagcttagaaccggacaaatcaaccgacagaccccacaaaatccacgagcgcccacctcgagctcgttcacttgaaacaccaacaccggacaccgctgcaacgcagcaacccaccccggaacggaaacgatcgaaagctgaagctacgcacaccgcactgaggcagcatgcgaaaagcagcagatctagtagattacgcgagggagcaatacctgagcaggctcggccgacggctgcgcgcgggatgggaacggaggcggagtgctaagctcctaactccactgccgcagcgctgctgctgtactgggtgctccactgcgtgcccacgagcaccaccacctctccgccttttttgaggaggggagggggggaaggcgacggccgcttgtggttaattagcggcagcggcagtg

SEQ ID NO: 148661 - DNA, 507 bp, Zea Mays
tctaaagcagcattgttcaattagtatggttagaaagaagacaataaaacaatagtagctggtaatgcttagacttaattatgtaaatgtaacttgtaaggtttggtttaccatctgttttagtttgcagttgtcaaacaaataagtatttgtaactcattctgcatgtgttggcatgcatggaatggtttggaacattctgcaaagtatgccattcagagtttcacatgttctcttgacactactgccatgagtgattcccagctcgaaatcctttttttgttggtgaacgcttacaaaagttttggtcataacccatgcgcgaagaagaaaagggaaatggaaaggaagaaaaagaagaactggtacaagccttctcaaatcaacaaaagtgtctgcttataaaaatcaatgatgctaatcaataaaatagaagaaaataatatgacatcatgataaaatgattgcatgagccactctgttttgggatatataaatggtaaacac

SEQ ID NO: 148662 - DNA, 911 bp, Zea Mays
tcaaataaaattactcatctcacctcctatgtcaagcttcaatctataaagttatggtcagcaagtcgtgcaaaacattgtaagctgctggagatagcctaaacagtatagtatgcagtgcaaaactgtgttttgcacggccatatgcatattgctataggctaagagcactaaatcaatcaattagcaagaaagggcaaaaatacaacatgtacaaagaacggcgataggctacactgaacttaggtattatgcaatacagctggtgtctgctaactctaatgttgacatatttgtaaaacgccccttgtatcttacaccaaattgtatatttcatctgactaatgttttttccgcagacgggactcagttcccattaacactaatgggagttaaagcaccactacaagtaatattagtgattctgtcaatgtccaatataatgcatgtcaaattctaagttaacccttaaatgccatacgtatcagtctgacaagtatggttgtccattaataaataatataatgtgagtatttttactcaataaattaacaacatgtggggttgttcaaacacaacagcgcaatcgcagaaatatgtgtagctactattcaaaataacaaatctgaaaggtgcctcaaggtctttgggaaactgttatacaataactacaatgacattcaattggtcgatccaagatatatatgaaatgaaatacaacaatgtaaaactaaccttttgttttccctacaatcagtaaaaacatccacaatagctagctgaacaaaatcaccgcagatgtccttttgtatttactgattgatttatttatgcttctaggtatagtgaagtcatttatcagctaatgatgcacctctaaaaagaatgattgtataaccagacaattctgt

SEQ ID NO: 148663 - DNA, 385 bp, Zea Mays
ggaaggctaagaaggagcttaactcttttgaagggaaagtgtcatgctcaaccttcttatgataactgtgataacatggtgaagaagcttgagaaggggacaaccgtagcatgcacaaacccgcttcaaaataatgttaagttccctaagaaagacatgagcaaacatcaagagaagaaagccaaagctcatgacaagtgcctcaatcaagtctccacatgctccacacaaggtaacaaacaagccactcttccaaataagagaagatgcactagaaagtgttatcaatgtcatgagaagggacatgagattaagtcatgtccttacataaaagatagtggtttatctttggaaagaaagaggctcactaaccatgtagcaaaca

SEQ ID NO: 148664 - DNA, 712 bp, Zea Mays
cagaggtggaggggttcccacatctgttgcgaagttgtgtgcttcgcatggggatccgcaagaagccagaatatgtctggaaggaatatctcgagaatggaatggagaagtgctctatggcagtctacctgggagagagccgaaactacccgaaccacccgtctatccaagtcactttcacttgacaccgcttcccagatacttgccaaaatgttgcccgaaaagccctccgatagctatgccagaactacagcagagtagtctttgaaacctcccttcgctactttccacccagcaacaaaaatacccccgcctggaggaaaagacttcaggccctgtcagggagagaccctaccgaggatgaccccaccatcgtctacatggctggatacctccacactctcgataaccaatatgatgaccttgcctcccactgcactcacctaaactcccgggtggaaagcctggagcaacaagtcagggaacttacaagggaaaaggcgtcccttcaagagagtctcgagatagcggaaggcgaggaaaccaacacctgtgaggcctaccgaaccctgaagatggattacgacaagaagctaaagaagctcgcccccgcaaagaaaatccgcaagaagaccagaagccaaggatgccagactgagcagaaagaagaagcccctctagccctacctcctaccaggatagagaactcgtc

SEQ ID NO: 148665 - DNA, 1528 bp, Zea Mays
tggggttggcgtaaaatgtcgaggtgacatcgaggacaagaagcacgagcacactaatgttctgcacgacaacagatttggtgtggagtggtgacctcatgacaaagaagggaatcgcggatgtgtgacgcatcggtgacgaaggcatcgtccttgaggtcgtccccatcaaggttggcatcatccagaggcatcttagtcgcaacacgcgcaagagtggcacggtcgagggcggcgcgtatgcatgcatccactgcatcacgcccaacctgggcgagggcggcttcacactcagcctcagcagcgcgggcaagggcagcgtcacgggcggcctaggccattcgtttgtgttcctccttggcaaggcaagcaacatcagtctattggagagcggcagcggtgacggccaaatcgacagtgatcgtgcaagtggctgtgctagaagcagcggcaccatgagatgacgcagtatggtcgccagccatagcaactgatgtggcagatgacgcgcacataggaagcggcggcggaggcgagaagaggaaggctaaacctaggcgaatgatagcacgaaagcaatagagatatcgcagaataatggattgaatgatgattggagagacctatgtacatatatatatagagagagagagaggagagatatcgtgacttacgaaaacagaaccaaacaaaatatccatgtatttttctaaccatatacaaggatcggcctgctataactggcacatatccatatacacacaccctatatggcaatctaatactcagaatgaatacggctctaaccaaacaatagttttgaagaaataagtagaaaaatcattcttgatgatgataaaaagaaaaggtcagcaaatagtcttcatctccaataaaaccataccagcagcaagttcaggggagcaaaattcccaaccatcccgaatgcaaatagctgtatgagcaggatattgcttagctacctcagcctcgttggggttcagatctgcattggatacaaagttcagaaatatgaaaggtatcaaagtgatcaaaacataatgtaccagtcgcaccaaacaatttataatgtatttggtttcgtgcttcgcctcatgcagcatggcctggttccgtggcgagacggataggttcgtccggcgttttcttgcagaatgagttggctcgtatattggcttataggttcgtccggcgttttcttgcagaatgagttggctcgtatattggcttgcgactgttactgtgcgggatgagtcaatgtggcataatctcattaggtgactcaaaccaaacagctctataggttctcggacataggttcggatgactccagtgcccacccatgccgcaaaccaaacaggctggtagtgtatcagaacatgtagtataatagaaactttgcagatatttggagctttaagggtagacattaggacattactgatgttcatgctcaaatatgtggtatcacagcaattttccagatagttagagctttggagtagac

SEQ ID NO: 148666 - DNA, 1236 bp, Zea Mays
ggtgcaggaggtagtcgccgcggtgccgaatcactcttatttcctgtcgactcaaccgatgttcgttgtggccttcggaggccgttgaatcctcttcgggctacgtggaacggacgttctctaggcggtgctgagttgtgtgcctgtgctgggtcgggagtgatgttcgtattgttctgggcgcagagtgagtcactacgtggatttgcgtctcgggagctcttctatttcatttccaactaattagctccatgtattgacctctgtaagtacagtctctgccaactattcacgggttgagccggctgctgcataggggacgcagtgtgccagtgtcacatcctactgtaccaagtttgttctgttctgcgctgttagtgcactgccggctaatagcgatacacttaagcttgtcattgtaccttgcaatctattcacactctctgaaatttctccctttacacattttccagtgacttagtaatttcatgttgcttagtggttcctaactttggtaacccttttaactgacaggcaggactattcccattgctcagatatggctgttcgaggaagcagtgctttcaagctacgtttctatcccaacttagaagtacaaaatattgcacaagaatgggttaaagagagccggaggctgttctatctaagaactgccaacaatgtcacaaataacatctataagggaaacactcctctatggactggaatggtacaaaatgaactctctgaagattgcaggggtttgaactacacttatttgaataatttgagggaacgcgtatcgtccaaatcaattgtaaatagacatggtaataaccgagaactgatcgggcatagtacgataaatcagcatgtgaaatcagtgccagctccagtacgtgttgttaatgatagtgtcaagtgtttcagcatgcctagagcctctaaggtggagattccttggcctgcctattcaccagcggaggatcctttgcttgataaatctaatacagaggtaattttggagcttgaggataaagttcatgatggtgatgacaaaaagaaaaaaactgttgtaaaaaaggtggtttcacctttcccaactaaagcggccttctctgaggaatctttgaaagcacgggaggcacttgctagcatctacgacaaagttttggtagttgacgatatcgagtcagctaggaacattgttaaactgctcactacaaagtacaagag

SEQ ID NO: 148667 - DNA, 360 bp, Zea Mays
caaagaacctgcgcttacacagaagattgaagagccggctgcaatgccgaaggcatcatcggccaaattagctgagccgaaggccgataatattgaagagatagaggtcgaaagaacaaagatattagaagttataagcccttcggcagaagtgacagtgccgaaggcacaaaaagatcttacagcgaccccaagaggaaaaggatggtcaacgtactagatgtgctggagacgataaagacttcaagctctactctagggaaaactgccgaagcttcaaaactgcagactgagacaaaactaaccgaagccgaagctgcaaagagccaggccgagaccgaagctggtccttcagagccc

SEQ ID NO: 148668 - DNA, 634 bp, Zea Mays
ctgcagaagggcctttggcactgtatgcttctttattggtacaagagacttggttcaagaacatatagcattcagagtatggccgcttttagagagctgggagatgccaaaggagactgtcaccaaatctggcaaaggtgagctggttcgactgaaatataccttcaaatatggagataaatttgatgaaccgaatgatggctagctgaaatgtatcgaagctacaagtgatgaactgcttgggccgtattaaaaagcggaagataatgcgctatccacatccttcggggcccggggaaaaagagattaaacagagtttttgatgctattggttttgcttaccccgactacaactacccactgcggggatggggaaaaaagaggaaaattgctgcttcggccaagattgctgcttcggccactccagatgagcctgcgccgaagagtagaaagttgaaagtcctcacccaccggccacgctatattgagccggtcgtggtgcccgattatggcggggaaacttcttcatctgttgatccaaaggaaccaattccttctacgcagaaggctgaagaaccggctatcatgccgaagacaccctcagccgagcaagctgaggcaaacactggtaaag

SEQ ID NO: 148669 - DNA, 518 bp, Zea Mays
ctagaacagtaccctcgctggataacttttcgatgtgaatcatgctttggagcccttcctgttgctataagaaatgaccttaccaggtttctaaatcctgtagatggactacgtgacggacgcaaagccattgctcaagacgatggagaggaatggaataggcctcaaaagggcttcgttctatatggcatatgcactgtattatgagaagcacaggagattcaatgatgcagagaagatgtaccgtttgggaatccagaagtaagctaaagcatttaatacccccaatcccaacacacccacttcttttttttaactggataccaccatctgctactagaactgctgcggttgtgcaagctgaatgcgccgccaacctaacattcatgttaaaatagatctcagtttatactttatagttcctttgagagaaacactggtatcttactgaagtttttaatagccttgcagagcctattggggagttgcacaaagcacatgaacagtttcgtttccgc

SEQ ID NO: 148670 - DNA, 822 bp, Zea Mays
gtatgttctcccgaaagagcgcccttctccttttagtaatttcagcattctctgtgttacgcgtatctgattttgaaaaatctagtttcagttcttctctaaatttcggagcagaagctctccacagatgatcaacttcagtaatggtttggcacacgggtgactatatctcatccataaggtgaaatatctccaaatatgtttcactaagggttgcaccataaatagacaaaagcaagaaaactaattctcttcatccactcaattggctattattctgttgtctgctcttaatatcatacagtacccttagtaatctgatggtttcaactcttctcttttctgcaatagaaatttctgccttattttcttccacgaaagaaaaatcaactaatttcaaaatacttggagctggctgtagcatcccccttgtggtgttacaaggagatggatacttagaatcttcattgcatgttattgtcgatacaaaattggagtgacccagtataagttcaagaatttcatcagctgagaactttccttgtgatagcacaacaagaatacatcgaattgcttttatggcgacaagatcattgaatctatgcaagagggacgatctgatgaattgagcaaggaaaggtattgatttcagctgatttagatagctttgaatctctaaagacagttcaatgatattcttgagaaatacatattccagaaaacagatgacctttcgttccttggtagagagtgataagatattgtcactcgatgggaaattcatgagtattttatccatagttctgaccagtatgctaataa

SEQ ID NO: 148671 - DNA, 300 bp, Zea Mays
atgctaacaaccggagggaataaggatttggtatcattagagtagacaccacttgaaagggatcgttattctgttgattaaagtttcaatttttgtgtggtaggtggactgccgaaagcaacaactccaccaagagttgtactcactctttttatgcccaactagtactggagtacgtttttatacgcccattttgaatctgaactccggctagcagcagtactgaaaactggttatgcagagatcccatctatgtacacagttcaggcgcatttaatcaacgaaaccaagttcattttg

SEQ ID NO: 148672 - DNA, 568 bp, Zea Mays
ctagcgcatccagatactggaacatgaattaaacgagcaggagcagacctgggacgagctgtccacggagcgcggaggatccaagctcgcgggtaacagaaaaggggaaaattgaagccgcaacggtctcggttggaattgggaggcaagtttaaggctacacgtccgtaaaggagtatagtttcaccatgcactatcaattttgggaacggtggagggaatttcgcgaatttgggcttctactgagcttcactggtggagatgaaagcaccttgccgtgactctctgctcaatttataggcacgatgttcaggctagctatccgtggtcacgaaacacgtcgccaacgcatgacgaccacgtaataaaggagcacagtgaggtagaattgagacgcgagtgacacggcggcggaaacgacagatgcggtggccgccggtgaagcactccgaccgagctcgggagatagcgccacgtatgagtcacctttttcccggcgttatccaaccctcaccgtgcatgaatccgggcggcgatcaacgacggcgagcttagctggcaacctgat

SEQ ID NO: 148673 - DNA, 2387 bp, Zea Mays
aaggggctgaccctaaaaccctaaacgagtactctaacaggttccttggtcacgtcggctattactggtactctaacatattcgttggtcacgtcggctattactgaaaattatttcagaacttcagtctaatagcttgaccactcacacagttgctgaaaaaaggccttcacttgggatgcagccgtcgaccaggcttttgacgccctcaaacatagcccaactttgtagttgcctgacttcaatgccacatgcatcatcaactgtgatgcttcaggaacaagctttggcatggtgctccatcaggacggggccctgatcgcttgccgcagcacgccaaactggccgcctatgagtacgagctcattggtctggtcaagaccatgtgccactagcggacatatttatggacacgcccgtttgtcgtgcggacaaaccactactcgctgaaattcccctgctggactagtgcatctccactatatcgcagcatacttgggtgagcaaactttttggctacgacttttctattgaatgtatgccaggcaactccaacacgaccatcaacatgttatcttgccgcgacgaggatgcagtagcagcgctggccatgtccagcccagcccctccttcgcactctttgacgacctctgatgtgagtgcttgagctcgacgaggggagacacctgctggaccagattcgcaaaggtgaagccacgaccaactggtcatcaaccaacggcctcgccatgtgcgtcagccgtgtgttcgtcccccttccatcctcctatgatcgactatcctggccacaactcatggggtgggccgcgaaggcatacagaagacactacacctactccgtgcctcctacaacgccaaagcagccaagatagtcaaatactacatcaagagctgtgaaatttgccagcgcaacaaattagagcacctccacccagtgggactgctgcagcctctcgagataccaaatttggtctaggcgaagatcaccgattcaccgtggactttgtggaatgcttccctcgcattggtggcaagtcagtggtcctcacagtggtcaatcgcttgtccaagtacgttcactttctacccctgggggtatccatacatcgtcgtctttgttgctaaggcatttttcgacaacattgttaggcttcacagcgtcctgtgcttcattgtcagagatcgcgatcctgtcttcacccatatattatagacggaattgttcactctccggcatgcaactacacctcggtacggctttccacctctaaagtgatggtcagtcagagtgaccaataggatcttgggcgtctacttgcgctgcttggacggtgattagcctacaagttagctgcgctggctaccatgggcagaacactgctacaaaacacctctttctagattgctcttcgttccacaccattcaatgtggtctgcggtcgcaatccatcaacactgctctcccacaaccaagggcagtccaaggtggctgctgttgaccaacagctccaggagtgtgacgaatttctgcttgaaattcgtgatagattgttgcatgcctagattatgaaaggcaattacgacacccatcatcacgccgtggagatctaggtaggctaatgggtttggctgcgtcttcaacaccgtcttgcagcatcactgagtgataacgcttaggacaagctggctcccaaatactatgggcccttccaagtgcttgagtgcattgggcctatcgcctacaagcttgctctgccaccacatgcccgcatccataatgtcttccatgtggttttctccaaaaaattccagcgacagccgccaacagagtgtcatctcggccagtaacgattctgtgtgctcgcctcaaccgtggagtttggaaggtattggtcagctggatgggctaatctactgctgacgctacatgggagcaactcactgagctcaaggacgcgtcctcttcgtttcagctcgaggacgagctgtttcataatgcgagggaagtgttacgggttcttttattaggaggatctaccaatgctaacctaggccagaaaagacctaaaccagcaccgcagcccctgctgcaccaggagaactgacacctggaaaccagctgccgctgggggcttagagataagaataaagaatatagcaacgaaaatatgttgggatagggataagtagcagtttagagataagaatagaaatggaaatctgttgggataaggataagcattaacagtttagagataagaataatctgctgggatagggataagtattatcagtttgttgctcccaatagatttggctggcgcctgaggactataaaatcaagggcgcagcaccttgtatcagca

SEQ ID NO: 148674 - DNA, 729 bp, Zea Mays
gcccttgccactgcccccattgctggaggaggaggtggaatggcaggcaggcgacgtgcaggatggggcggtggaaacagcgagtgccgatgccgaagcttccttattctcggtgtcgaggcgaagttccttgacacggagcatgttggtggcggacttgaagtcgggcagtggtgacgtgttggcgatgatgtcggcggtgttggcgaagcgagggttgaggtcacgcagaagattaagaacgagctgcgcaggggagacagtgtggccgacctctcggagcgcatcagcggtacgcttcagttgctgggcataggcgtcgatggagaggtcgccctgggacaggttgtggaactcatgctcgatgacggcgcgagactccttgttcgcctggaacagggccttgatggagacgtacagggcgcgggcgtcctgatcaagctccatggcgagatcgaggacggcgtcatcggcgaagttgtacatccactcgcgaacacacgcgtcgggctgagaccacaggggatcagccgggcgcgcaggcactgtgccgttgatgtggccgagcaggccgtacttgccgcagagggcggtaaagaaggctttccatttggagtagttggggcgctcgagactaagatcgatcggcacgtgctgcttcacgttgacggcggcgtaggcgggaaagaaaaacggggcaaggccttctgcaggggtggtgtcggtggc

SEQ ID NO: 148675 - DNA, 388 bp, Zea Mays
ggctcgaccaaagatatatgccaaaatgatgcgcgggcttgactctggtcccggcaccggagatttatgccaaatggtgtcagacaattttcacgactcaacgtaggataaccaatgagcagtgaacactggtaggaggggcatcttgcaccaaaccatgctttttgcttggttgttataacagtttggagcacaaaatttgactgttcgggcttatgttttatctagttaggctgatctcttatttcaacctttatttcaaacttctttatatatacaaacagtgttatctataacgttatcaatgatttgtttaagaaataaatcatagataatgctatttaggaaataaattatatattagaaaataaatagttggatattaaga

SEQ ID NO: 148676 - DNA, 294 bp, Zea Mays
tgtactaaagcttaaagcatgtatggtccatattcttcgccttctgacccttccatttagtatcttgaacacataagatatttacatgtcttctggtcactgtctcaactaactctcttaagttacatgtaagtgacactacattccaactacccaaataaatcctagttggttcgactaacttctttactcttcatacccatcgatgatgtggtgactcttacagtgatttgaagttgagcgacttgctaattgacacacctggggaaccaggcgactaatcgcgattaagac

SEQ ID NO: 148677 - DNA, 429 bp, Zea Mays
ttgggatagtgacgtcttagacctgtctaatgtaactgttggggagttccacttatctgcaagtgtgacacttaaggatcgccgagcctccttctccctaacagtcgtctatgggccaacctgtagaagtcgcaagcctgccttccttagagagatgaacaattagagacctcatttgttttccccatggctgatccttggggatttcaattgcacatacaaagctagtgacaaaaataattctagaataaatcatcgccttatgcagttgtttagacaagctctcgataattgcgacctaaaggaaattcctctgcaaaataggaaattcacttggagcaatgagaggtgacaccccactttggtcaggcttgataggttcttttgcaatccagagtgggagaagttttttgacaactatgggctgca

SEQ ID NO: 148678 - DNA, 578 bp, Zea Mays
acatttatcctttctgagctgctgggtttcataaaagagagcaagacctttctctcctcaagaatgttcatctgattacccccttttggaatgagggtcatcctacagagggagttgatataacgataatacttatgaatgttggtcgactcccaatactttccagactcagaaagatgaagatccttggcttcatctctagtgggctgccggaaatcatgaatcttgatcttgtcgccagatatatcatcgtcagaaaagccaagaatgtgagcaaatcgacgatagctcaccttataccaactaccttcaatgaagaagttcagataggggtagttgtaatgactctcctcgtcagctagctttatccatagggtggagtagaattgagcaatcacttcatcattccaatcatattggaatgtcatgatattctccatttgtttcctttcacaggccctcagtgcctgtgacatttctggatccccaatggcttcacaaccttcccagttgatataacgttgatgcaggataggttgatgcttcttggggagaatgacggaattatagaaatccac

SEQ ID NO: 148679 - DNA, 4171 bp, Zea Mays
ctattacaagcctagcttatatatcagccggccaccacaatcacaatacggcccaatacggcccaccagctacatttcaaaattgtgattccagaattaactcccgtgctcagtcgccaccatctccattcgtgacaatacctccccctgaagaaccagctggtccccagatggttgcttgtggaaaacgagatttgagcacagtataatcctcccaagaagccatgtcggctggaaaacccatccatttgatcaacacttgagttacagctgcagaccctttcctgaccaaacgccggtctaaaatggcttctggcataggaacaacatcttcagagaatgctggggcaggtaaatccctgaatactggaacgctgttaggaacatgaggcttgagttgtgaaacatggaatattggatgaatgactgccgatgcaggaagctggagcttgtaggcagcagtacccaacttctccaagatgggaaaaggaccaaaatatttgaaagacaatttagcacatggtcgatgaaacactgaagattgggcaaacggttggagtttcaaatataccatgtcccccacttgaaattgtcttggagatctcttagcatcagcatactatttcatccgattttgtgtcgtagccagattagctttgatcaattgcaagaaatcttgtcgctgctgtaatgtgagctgagcatctgagggatctgaagacataggaacaggtagcaccccccagtttggatccactccatatagagctttgaagggagaacatttcaacgaagagtggtaacttgaattataccatagctctgcagagtccaaccactgaacccattgtgaaggggtttgatgcacagcacaccttaagaacatttcaaggcattggttaattctttcagtttgtccatccgattgtgggtggtaagctgaacttaactgtaacgtagtgccagtcagtctgaagagttcctgccaaaaatggctagtgaatactctatctctgtcagaaacaatagaccttgggatcccatgtaattttacaatctgagaaaagaatacttgagccacttgagcagctgtgtaaggatgtttgagtggaacaaaatgtgcatacttggtaagtctgtccaccactactaatatcactgtgtacccttttgatttaggcaatccttccacaaagtccattgacaaatcttgccaactttggtgaggaatgggtaagggttgtagtagaccaggatatttacagttctcatgcttagcctgttgacagatttgacactgcttgacaaatagctcaacatctgttttctgtccaggccagtaaaagagtttctttagtctctgataagttggtaaaatgccagagtgacctcccacagctgaggcatgaaaagctgaaataagtttggtgtgcaatccaacattctgtcctaccaccagttgatgttgtttgtagatcagaccattatataaagaataaccttgaggattggggctttgtatagcaagttcttgtaacaattcttgtgcttgtggatccagctcataagacttgagtacttcttgaatccagactggtgtagcaattgatatagcagctagctgaacacctgctggcactctggacaaggcatctgcagccttattttcactccccttcttgtattgcacagtaaactgtaatcctgccaactttgccatggcctttttttgtaggtcggtggccaatgattggtcctgtaaatgactcaagcttttatggtctgatctgataacaaatgaccccctttgtaagtagcatctccacttgtcgactgccatcaaaattgccaagaactccttttcataggtggacaatttgctattgttgaccccaagtgccttgctgtagaaagcaatagggtgcccattttgtgataacactgcccctatgcctctatcagacgcatctgtctcaattacaaactcctcattaaagtttggtaaggccagcactggagttgatatcattgcagactttaattcttcaaatgctgtctgagctgcagaagaccaattgaattgcttctgttgaagaatggaggttaagggtttggccatcataccataccccttcacaaacttcctgtagtagccagttaaccctagaaaccccctgagctcagtatgggaagtaggaactggccatctggtgattgaaactgttttggaaggatcagttgcaactcctctatgagatatgacatgccccaaataatcgatctgctgaactgcaaatgagcacttgcttcttttagcgtacagctggtggtcttgaaggatttgaaagaccttattcaagtgaatggcatgagcctccaacgttggactatataccggtatgtcatccatgaaaatgagcacacatttcctcatcaattcttgaaacaccacattcattaagcattggaatgtggcaggagcattagtcaatccgaatggcataactctaaattggaaatgaccatggtgagttttgagggctgtcttcagttcatctgcctctgccatcctgatttgatgaaagcctgatgccatgtccaacttggaaaaatatgtggctccagataactcatccaagaattcatcaataattggcataggaaacttatttttcacagtgatatcatttagtttcctatagtcgacacaaaatctccagctgccatcttttttcttcagaagtaatactggagaagcaaaaggactcacacttctagtaataatcccagactttagcatgtcttgcacctgtctttcaatctcatccttttgcaaaggagagtatctatagggtctcagattaacaggtgtagtaccagtcaacaaggtaatggtgtggtcatattctctagagggaggcaacgagtcaggtgttttgaataccttttcaaacttgtcaaggatttgttgtatgtttggaggaatcatttgtgtttccaccttctcctagttagatattatttgcagcatggccacagcccaaatttcattgcctctatgccacttattcacttgttcacaagagatctcttgcagcctttgcactttaccagagtttagtccttgtaatctgaccatttctccttcataagtgaattcaacccactttctatcccaagcacacagcataggactaaacttctctagccagtccatacctattaccatgtcataggctgcttcgggcagcacaaaagcgtcagccacgaatgttttaccacaacaccaccattccagttgtaccaccttcttattgcaaattatcgtctgtccatttgctaccttgacagatactggaacaatgtcttgagttgtacactggattcggctgtaagctaactcactaatgaaagtgttagagctgcctgagtcaaacaactgtagtatcaactgattttgaatctgagccctcaatctgatgcatttggtctattcagtcccactcaaggcattcaaggatactaccattccttcctcattattttcccaactggactccagaaaatttaagacctcatctgacaacataggacccccatctccaccttcttcaatagtaataccattgagctgtggtgcagctgccaccttgcatttgtgtccaggtatatatttctccccacaacgataacaaaggccattcaccctgtggtattccttcaattgtttggccttccaaagttccccttggaattcgtttgtatccttggtgttgagtgtaggattcccctttgctgcattaaatcttctgttgcccatcggttgtctggcctgccaaccttcatacttcatagccagctgagcagccatcaacaccgtttgaggaaactgaacctccacatttacccttaactcatgtttgagacccaacacaaattgggttaccaggaatgtttcactgatggccttctcaaacagtctaatgtggtaaaccagcatatcaaaatgatttttatattctaagacagatccattctgtcgaagggtcagcaattccagcatcttatcagaatgagtatttgcctcaaactcctctagaacagcccccttaaattggttccactgtagtacacccaacgtatcgcgcgaggcttgaaaccataaggctgc

SEQ ID NO: 148680 - DNA, 620 bp, Zea Mays
ccactgaatatcgccgccggtgatcttacgccgcgattgtcaccggcgatgtgattcgtgctcaacggagtactgatagttgctcggggtagtaaatatcgccttgtggatgaacttgagccactgtttcactctggtcgtcgtgtccgcctgactcacagtcgattcggatgaactcgccagagttagccaactatcggccatgcaccacgtgccttggtgtcttaccacatcgcagtagctcgtattacacatatccggtgatcgccggtgagctcgccacggtggaagccaccaatctcttgcgacagtgctcttttctttctccaaccgccaccgcgccatctcaaattcacgagccatcgctcagggatcctataaattgagtgtgacatcggctccgctaagtagtcaagcacccaatccatcaactcgtgcctcaaatcatccactagagctcgccaatttgaaacttcccccaaatcggtccagaacactgcacgtagtgacctcgccatggccagcgtgctacaggtccgttcatgtccgctgctctcttgtttcagtacccttatgtgcccttgatgcttctcgacccgaccgattaagctagaacccat

SEQ ID NO: 148681 - DNA, 589 bp, Zea Mays
tgtgactggtgctttgtgctacagcaaattagttaattttattttattttttcacatggttcactgctactaacatggttttattttattttttcctgcaaaatagctgtagatgggtcaaaggaaattataacgttcgaaatgcatatgacatcttgccctcacacaacaccgtaatccatttcaagatccaaatcagaaatgagaacttattaaaattgattgacggtacgaaaatgtatgtctattcccatatattgtactaaaaaactttgaagaatcacgtctggggggtaaattatatttactcaatgcaactatatacgcacagctactttctactcattatatgtatcatgatgtaggtgcatatcacgtagcaaaaagggatgaatgatgctccatatccttcagtaaaaatattgcttttatacacggttctttatttgttcctacatgcaccggtgtttctattatatagtgatctgttgatgcactctccttaatcagatttgggtttaaattttgtcgtatattatatatatcgttgcaacgcacatgctaactatcacaaaatttatgtatggct

SEQ ID NO: 148682 - DNA, 296 bp, Zea Mays
aaaggaggggctccgaggtgtcgcggctgcccacaccactcattgatattaagctgcgtggagataaggccgctgctccccaagacgggccacggttctgcgccccccgcgatcgaggcatcgggtccccctgcagtcgatgcatcaggtgccaccgcagtcgacgtatcgggcctctcatcagccaaggtggcaggcctccgctcaccaacttcggcaacaacggccgccccctcctcatggtcgaaaagggggagatccgggatgaccaagggcggaggcgcctcagtcgtctc

SEQ ID NO: 148683 - DNA, 1211 bp, Zea Mays
agattacctttaaacgtacaacagaatcagtgacagtttttagcacatggagcaaaagctgtgtgctccctccccaagtcaaatctacagaagagcaaatcttgcgagcaatctgcagatggggaaaaacagtatccaaattaaccaaacaatctaaggctcctatttgttaaggcccgtgattaaggcaatcaatttcataatggcacatactgctggcaaaagctcaatcatcccctcccccacacactcttgcatcgtgtaacgacagaatccatgcactagatcagtattgaaaagggaagactcagaaaccagaaaaagggtacaccggctcatggcattcataagcaacgggagatacttcctgctgacttcattagtaagaatactgcacacaaacataaattcctgataagcccactcagtatctctcttatttgatgaatactatcacaaaattggtaatctcaccgaagccatggttttagctgtttgaaaaggctgatgagtcgttcataaggggtaggttccttcaccttgcccttgctggaacaattagcaaggcaaacagtgagctcaaccgcaaggagggtgacttcaggatccgtgccagcctccccagcgctgccggggtccggaaggaggacgggatcaacgcctgcagcaccacgtcgcgacttggtgctcgtggtgggtggagagagcgcggagcggagggcgtcgagggtagcggcagcctccgcactggcgcgtgcgaagtgaccgcgcgactcgaggcaacagatgaagcggccgcgttggagcaacacggagtagggtttccccgcaaggcagggtgatatggcctctaggcagtccaagaggaggccgtagatctcaagcagttcgtcggcggcttcgccgcccttatcgcccgaaacaggacaagcgcggacgagcggcgggaggaggtggagcgcgcgaccgagaaacggcaggaatcgcttcgcaagggggcggagggtggccgcgtcgggaggcggcggctgcttgttctgcttcgtcgccctcttctgcggtggcttggtgttagggtttgagctgtgcaggtagggggtgaagggctgtaggtaggcggcgaagcgagagtagaggccagcgaatgaggatggggacgagagggcggcgatgaggtcggcagcggcggcctccattgccgtctaggtgga

SEQ ID NO: 148684 - DNA, 633 bp, Zea Mays
ggactgttccggtgagcaattgcggtgttccctgtggagattcatcaccggagcggtcaccattacagccacgggcaccaagcaaacccacccaagcttttcctgtgcccataatggcaacacagacggatgcccacggtgggacgcggccgcggcgaacgctatagccctggcgagcacttcatcacagatgggacctccgccgcttgcaatagtgtgcggaagggtacgccagacccccccccaccgaacacccgcaagcacccgccgaggtcaaagcatcagtaaaggcagagtttgagcacggtgaatcccttcccccgtcggtaaggctcacagcaccgtatgactttgtggcgaccccaggtttggggtttggtgaatgagggaggtcgcggatggctcattatatactccagagtccgagccagtgcgaaacgaccggcgcaggaatctcggccatgcacaaccgtgtaggcgccggatccatagggataagtggagcgcatgaggataagcatccggggtcctagcttttaggtggtgaggggggaggtgatttgttaggaccttgttgggatcaactcccaaccggatatgcagatacgaacgcagcgtcgctcgctccttatt

SEQ ID NO: 148685 - DNA, 345 bp, Zea Mays
tctgcggtcctgagctccggctcggctcgggttcccagagaacgaccggacgcgatgctgccggccggtcagacggcggcaatggccgagatgaccgtgcccggcgaagggcagagcagtgggccggcgtttggagtggcggcgcacgagtccaagcgcctgagccccggaggccccgaccctcaacaccattaggtgatggtagtaaccgtgatgagttattagctcgtcgtctggaagacggtttcttatgtatcgtacgtcgcctcgtcggatgagatagagagttgctgtggagatcatcatcaacaagcatgacatctccctaagcgttctttcagatac

SEQ ID NO: 148686 - DNA, 681 bp, Zea Mays
atttaagggttatgtcatttggcttagctaaattgttaacagatttggttagggctttctggtgggttcctttccttgtgactagtcaagactcaagaataaaccaatatcaatatgaatttatttcctgcattgcaatattcccaaataaagctagtccaatttggttccgaagaaaagaggttcgctttagaattaacaactatggttttaagtcgtacaactaatggggcatggccatgtgcatgaaaaggctggcataaggtgactgattgttggatttttcacaaatgcaatgagaccaataatgctgataaggaccattagcactaaaagcaattttagagaagcctaaccacttgaaatctaccaattagccaataagaaaaactataaataaaagatacattatactagcaaatagcttgatttcataccatgatgtgttcaacttatgtccatatgcactttaattatctttatttagaagaatcttgtatctgctctgacatatgcgctgcagtattggacgtatctgcatgtttcgaaaatgaatacaacagttcaaaggaaagcaaaaaaagaagtatgaaagagaagtagtagtaagacgtcaaaatggcagctgagtgacagtgctagtccatgttagagtatattaggcaactcctgatatggttg

SEQ ID NO: 148687 - DNA, 614 bp, Zea Mays
ctcaacccgggttaccaacaggaggattcctgctatggatttggtaagccggctggagatgatccttagaggcaaagtgtcgaatattggagctcctgttgcatattctgcctggaatctgccaccttccaagactttttcagttttgtgtccaatcctcctgctagcgacagtggcctaggtcttagagtgcgaccctctcctgaagaagtcgaggctctggttgcttcacttggtgatctccccaacgatgaaaggcaagttcactttgagatgcctgtaaacccgagtgatgcagagataagtgctatgctggacatgttggctgaggattcctctgactccatccctgctgaaaccatagctgctgcaactatccccgagcctgaaaagatcttgactgctcaaagatctgatggtgcttgcccaaagcgtctttgcccggccactcatccaactgctcctgccgatgggaagaagaaaaagaggaggcttcggcgagtgtcaggatgtcggcccttctgctcctgctactaaggaagtgccagtggaacattttactagagctgatcccaatggttgtgaccctgctgacgctgaccctaatgggtgtg

SEQ ID NO: 148688 - DNA, 312 bp, Zea Mays
gcatcttctcccatagagagcttcgaagggtgccatgtttaggctggattgataactattgttataagcaaactctgccaaggagaggttcttatcccagttattgccacaatcaattgcacaagccctcaacatatcttcaagaatttgatttaccctctcggtctgaccatcagtctgtgggtggtaagccgaacttctgattagcttggttcccagggactcttgcatttgttcccaaaatctggcaacaaatggggctccttggtaagaaacaatggtccagggcaatccgtgcaaacacacgatccg

SEQ ID NO: 148689 - DNA, 356 bp, Zea Mays
tcaccaagtagtggtagggttcaggggttttcttttctcaatttcaatttgcttttctgtcttccactaagtggactcctagagaaatgggattttctgagaaagggaaatgacggtgaaaatgattttactggatggatgtcactaggacgattctgctaaatttgcagatggtccttttacatgtcaacgctggtccaaatagtctagtagcatctgtaaatatctgaaaactgtgtatatttcaactgtgacgtattgttaatttttttctgttgtggcttgtcaccaagtagtggcagggttcaggggttttcttagccggtttggctggggtttcttctcagtgcaaagtc

SEQ ID NO: 148690 - DNA, 460 bp, Zea Mays
tgtaccgccatctttacgcgctccccattatcactccaaccaaaactcatccctttttactcatgacctatgtcccttaagttgaagcctatcaaggagctctgcgactccgcaaaggaaatagggagaggacctacgaacgggctacaaagtaaaaacgtcaacgtaggggaaaatatggacaaacccaagtaataatgaccacctggggctcacatcactgatgcggaccacaccatctctacaagatatccatgataagatcaaggacccatgcaacgaagggcgctgacacacgacaaaagttaccgaaggattaatcttctttatcatttcacgttcacttccagtagcgaccattgttagaggccccctccatgtgctataaaaggaggggttggccttgcgagtggggggagggacaaaaagagaatgaaacacaactacacgcagtaaaata

SEQ ID NO: 148691 - DNA, 526 bp, Zea Mays
gaaagaaagaaaacagctcaggatgctagtcctgatgaattgagtttgttctcgtaactccttttttggttaaaaaaactaacttatgaaatgcctgatttaaagcgtaagcacacgctggcgcgctctttattctatttccagcctaagtacatgtacccatgtcctttgttcttaacttgcatccatttaacatttggattctatctgactctataccagggacactgcttttgcccaaaaccttattcttgtaccctgacaggtggtggaagatcctctttactgatgttaattgatgccatattcttaattatctcaaatcatttctcatgacatatggccataaaccttctatgcattgtgcagtttcccaaacctctgtacttctgtgtattggatgtttcatcgcagtgcagaagtgaaaataaataggactgttttgtatgcatttgttttgctgtggtagagacaatatgattgttggcttgtcgcaagcaagaatccataccttgctctttgcctt

SEQ ID NO: 148692 - DNA, 3315 bp, Zea Mays
caggtagtatttttcttctctattattttcttaacccttcctcaagtctcaaacaaccatatatcactccttacatgggccagcccacaatgccactcacgcactcacccaaaaacaacccagaatggcgcacacacccttcggcaaccttcgcttcaaacttcagcttctggctccactcccttgttctttgtattctgcattatgacacccgctggcgtgacatctgcccccctgcaacgcttgcttggccccaagcaagagcatccggatagcgctggcgcagaacatagtaatcttcccaggttgttgctccgctggaacatgacaccacctgatcagcacctgtggcacagcccgattcccttttttgatcaatctgcgatttagtatctccaaaggatggacattgtgaccactcagatcagaggaagtaggaagagtagcaaagacaagagtgtagtctagaatatatggtttcagttgtgacacatggaataccgggtgcacctgagcaccaatcggcaactccaaacgataagccactgcacccacacgctccaatatcttgtaagggccgaagaacttgaaggcaagtttaggacatgaccgactgaccacagtgtgctgggtatacggttggagtttgagcaaaaccatgtcactgacgttaaactgacgttcggtccggagccggtctgcctttagcttattgcggttctcggctgcggcaagctgctcccgcaacattaaggtgaactgagccctttcctctaacagctgtgccacatcaacgatagcatcagatgggatatgaggtgctgctgcaaacggagggtcataaccgtacaacactttgaaaggagaacaagccagtgaagtgtggtatgtggtattgtaccaaaattctgccagaggcaaccaattcttccatttagaaggttgagcatggactgcacacctcaggtacatctccacacattggttaacccgctcactctggccgtcagtctgtgggtgatatgttgtgctcaggttcagcttagtgcccaacagcttgaataattgactccagaatatgttcgtaaagatcttatccctgtcactaacaatagatctcggaagactatgcaagcggaccacctgatccaaaacaacctgagccacttgtgctgcagtgaaagggtgtttcagagcaataaaatgggcgtacttcgagaaacagtccaccacatccaagattgtatcatagccactggacttgggcagtttttcgatgaaatccattgcaatatcctgccaggcgccttgaggaaccggaagcggttgcaataaactagttgggtgaactctctctcctttggccttttgacaaatttgacactgtttgacaaaatcttccacatcagtattcatgcccttccaaaaaaccaatttcttcaatcgatgataagtggcgtgcacccccgagtgaccacccgtggcactgtcatgcaatgttgccaccaacttcgtccggagagctgaattttggccaacccaaatcaaactgcccttcctgatgactccctgagaaagagagtagccatactcatccgagctgtggacacacaaccgagccaacagtgactgcgcatcagaatcagtcacataagaattggtaacttcttgaatccagcgaggttgaacttcactgactgctgtcaacgccatcacacagcccacccgagaaagagcatcagcgactttgttctctttgccctgcttgtagattactttaaactgcatccccataagcttttccatggccttacgttgcaactccgaatgaagctcctgactgcccaagaaactgagagccttgtgatccgtccggatttcaaactttcttcgttggagataatgacgccaacgatccacagccatatcagggcgatgaactccttctcatagatcgaaagcttctgattggtaactcccaacgccttactcaagaaagcgataggtctaccctgctgcatcaacaccactcctaccccgtcatcacaggcgtgtcagtttcaatagcaaagggtatgttaaaatcaggtaatgccaatactggcgtggaaaccatggcctgctttagacgctgaaaagaaacttcagcttctggtgtccacttgaaggcccctttctgcagtaacttcgttagtggccgagcaattatcccgtacccttgcacaaagcgcctgtagtacccggtcaacccaagaaaacctcgcaaatcagtgacattcagtggtgtcggccacttgcgcatagcttcggttttctgagggtcagtagccacaccctcactagatataatatggccaaataaatcagctcctttttaccaaagacacattcctctctttgagatagaacttgtggtcccttaaagcagcaaataccaacctcagatgctccaaatgagagtgccaagtgggactataaatcaatatatcatcaataaagaccataacaaatttccaaaggaaaggagctagcaccaagttcatcgcacactggaatgtagctggagcgttagtaagtccgaaaggcatgactcgaaactagtagtgaccctggtgagttttaaacgcagtcttaaactcctcgaaggcgcctatacgcacctaatgataccccgaagtcatgtccagactggaaaataatttagtgccagcaagctcatccaaaatctcctcgaccaccggcatcggaaaccgattcttgatggtcatatcattgagcttacggtaatccacacagaaccgccacgtaccatccttcttttgcactaaaaggaccggagaagcaaatgggctcacactgggggtgatcaaaccatatttcaacaacgcatccacttgcttctcaatctccgtcttatgatgaggagaatatttgtagggtcgagcattcaccgggatggacccagggagcaaacgaatatgatggtcaaatggtcgagatggaggcagttcagttggtgtaacaaaaatgtcactgaattcccccaataacacctgcaattctagatggatctcattgctgttctcctcaatcacctcctctaacaatgcaaacacccagatatcattccctcgcggccatttctccacctgtagagtagaaatttcctccacaacctgctgctgagcagtattgcccaccaactgaacttccactcctttgtccacaaaactaataaccttatcatcccaatcactacaggaattcacttaattcccgtcagccagaaaccgacgggaataagcctaaaccgac

SEQ ID NO: 148693 - DNA, 455 bp, Zea Mays
ctctaatcaaaaagggaaacaaacacccaattcccctcgcaaatgaacaaaagttttttgatcaaggggtttggtcaaaatgtctgcaagctggcgagtggtatcaatatagtgcaattcgatgtcgcctttctcataatgatcacgaagaaagtgaaagcgaacatcaatgtgcttggtcctcgaatgtagcacaagattcttggctacacttatggcactcgtgctatcacaaagcagaggcacatgatgaaaatccaagtcaaagtcccgtaaggtagccatcatccaaagtaactgcgaacaacagctagcggcaacaatatactcgacctctatggtagacaggcaacactagactgtttttgagaagaccatgaaaccaacgaagtacccaaaaactgaaaagtcccagaagtagacttgcgctccaaaaggcaacccgcaaaatcagc

SEQ ID NO: 148694 - DNA, 345 bp, Zea Mays
agcggtggcggctctgcgatgagtgggcggatcggacgaaccagtggcaaaatctagcacaaatgggtcttacacataggcgagcacaaggcgaactcggaggaggttcactaaccgatggtggaggcactgacggagatggcaacggtggatcgcggattccacggtggcacgacgaaacgacagcaagcaattgcgatgactccgatcaaccccacggtacaaggatgctacgcgagcgatcggtgtaccccggccgtcttccctgacctctctgtgaagaactaacggcgacaaatgcgcggattggcgtcggtggcttctctcttggctcgatgccgcgac

SEQ ID NO: 148695 - DNA, 2478 bp, Zea Mays
gttttgtgggagaaaagaaccgacgccctagatgacttctgtctttgcatccaacggcccacaaccctttcccatatccacgcaccgaagatcaacttttggtcaactttttttgggatattacaaagatgatcctcccatctacccttccaagacagaacacaagcaagcaacatgtcttccatggtttggatagttcgccccaactgaccatcagtctgagggtgaaaatcaacactaagagaaagcttggtacccaaagcactatgaagactctcccagaaattggatacaaatttggagtctcgatctgaaacaatggacttaggcaccccatgaagcttgattacttctttcatatacaagggaactaactctgaagctgaatttgtggtcttcatgggaataaaatgcgcagaattagttaagcgatccactaaaacccatatagcatccctgccctgaggagaacgaggtaagccaaccatgaaatccgtagtgatatgctcccacttccaatctggaatttccaacggcttcaataaacctgcaggcctcttatgttcggccttcacacactgacacacctcataggctaccacgtacttagaaacgtcaaccttcattctcttccaccagaagttttgcttcaaatcccggtacattttggtttcgctagagtggatggtgtaaggcgttttatgagcttctctcgagatatccttcttcacctctgatttctgtggcacacaaaggcggcccctgaaactaaccaaatcattctcatcaatggtaaactcacggggtttaccatcgccgatcctctttcgagcttcctgcaacaaacgatcctgctgctgtgccacacgcactctctccagaagggaggattggatgagcatctgagtctcctctctagcgatgccgacatagcacaaagcaacacccatgcggtccagatctgcaatcaaaggcatggccacttttggaacaccggtcctgctaagggcatcaaccaccacatttgccttccctgggtgatattgaattgatagatcataatcctttatcaactcaagccaccgacgctgcctcaatttcagctctttctgagtgaaaatatacttgagactcttatgatgggtgtaaatgtctcaagattcaccatagagataatgcctccacgaatttagggcaaagacaacagcggccaactcgaggtcatgagtaggataattcccctcatgcttcttcaactgcctcgagccataagcaatcactctgccttcctgcatcaacacacaaccaaggccaatacgagaaacatccatataaactgtgaaacgcttaccactctcaggcaaggctaagataggagcattcaccaacttgttcttcaatgcctgataactgacctcgcaatcgttggaccagacgaaaagaacacccttctccaagagtctagtcaatggcttagtaatgctggaaaaatttggcacgaaacgccgataatatccggcaagccccaagaaacttcggatttctgagacactagagggtctcttccactccacacaacattggcattcttggggtcaaccataatgccatgctgattaatcacatgacccaagaaagcaacttcagacaaccaaaaggcacacttcttcaatttgccatagaattgattcttcctaagagcacccagaacgagacagagatgtcgctcatgctcttcctccattttcgagtaaatcagaatatcatccagaaacaccaccacaaagtcatccaagaactcatgtaacatcctattcattgcttccataaaagcagcagaggcattagttaagccaaaagacatgacgataaactcgaaatgcccatacctggtgctaaaaggtgtcttctcaatatccccctcgcgaatcctcaactgatgatacccagagttcaaatcaattttagagaacacctgggcacccctcaattgctcaaagataacatcaatacgaggtagcggatatttattcttgattgacacttgatttaaagcacgataatccacacatagcctcttgcttttatccttcttctcaacaaacaatactgggaaagcccatggtgacctgataggcctaatgaaacccttagccagtagatcatccaatttccgcttcaattcaacctgctcctttggagccatccgatatggggccttatgaatcggatgcgtacccgaaatcagcttgatttcaaaagccgcatcgcgctccgatggaatgcccggtagttccactggaaacacgtcggcataatcacacaccacacggatgtcctacacccgcaaggcagcctcactctccaccaccatggagtaagagattcccgacttctttgaccgacgatccggaagtaattgggacaacaatgagagagtgagctttggagaacttcccaagattaccacctccctac

SEQ ID NO: 148696 - DNA, 547 bp, Zea Mays
gggtcactactaatctctagccaagttttacaaagcaaaaggtcctcatcaggtttgaagttctgttcctttgtcctcctacctgtcccaggtgtgttcgaaggtttggtagggttgtttacttcctggacactgtgctctgcttctgattccaaatttatatgctcagtcgtgtttgtcacatgggtataaacctggggaaatggactaagtggtaccatctggccttgacccaaggatgtttgtggtggaggaccacctggattcatcatagcaaaatatgggttccatggattgcggaaggcaaatgaagatgtgtcattaggtccctaggaccaggtaggattgctcatgtggcttgtactaccagtcatagtagcaggatgggttgggtctaatccttggccctgctagaactaaggatcccactgggtggagggaaaatctggttacctgaactggggccggcaccaggaggtcgaataggtgagtttgggttgttctcagccattctgggaaagaaatacacgaatcaatgaattgcaac

SEQ ID NO: 148697 - DNA, 580 bp, Zea Mays
ggagaattcctcgacggtccccgtgcgacggcactcggcgagctcgaacaagggggcggaccgcagtggtggcccgaaccgtagattcagcatctccttgaaacgctcccatgttggcgtgccatgctcatcctcctggagttgcatgtaccacagttgtgccacgtcctccaggttataggaggccatccacacccgttcttcggccatgatgcgttgttgacggaaatatgattcgcatttgttgatgaagagcatcggatcggacttgccatcaaagcgggggaaatccaatttctggaatcgtgggggacgatcagtgtggggttcgcctaagggcggcctgctgttgttggaagacgtcgtctgctgggccaccagatctgcgatggccctggtattggcctcggcagtggactgcaatgacttcacgatggcagctaatgcagccacggtggttttgagttcatcggagtcgcccatctcgacggagtatgatgccgcggaggaagtaggcgaagacggcgtggtggctggcggtgagggtggcgtggcggctgatggcagaatcggagagcgg

SEQ ID NO: 148698 - DNA, 854 bp, Zea Mays
ggagagcgcaggctctgctccggcctctgaccctatggcagatccaaagcgcagagcagagtctaatgatcctggatggaaccatggatattggacagagattgggaatcgagataagctcacatgcaacctttgcaagactgacaacgggatgaatcaggaggttaaaagaacatcttgccggtggttatgcagacacattaatatgttttaagactacaactgagattagaaaagaaatgaaggcatatttggacaagaacaagaggtctaggcctattttccttgatgatgatgatcatgatggtcaggggcagcaagacgaagaggattccaccacatctaagcaacaacttagctcggggatagctgccaaaaggaagagagctgcatttcagtttagaatagctgcacagccacaaacatcaaacaaggaaaaagaaaaaggggaaattgcaactatgtttcgaagaactcctgaacaagttatggatgagaggctcccctcagggtcacaccaccaaaccaccatggaagcatgcactaagtctaaggctgacagagattatgtcaacaagcaatgggctatgtggttctatgagtgtggtgtaccttttaacgccattaattctagacagtttcacattacttgtgaggccactgctcaatatggtactagatatgttcctcctagtattcatgaggttaaagagcctttacttgctgaatgtgtcaaaaatgtgactaacttgagagctcatcatgagttagcttggaagacttatggttgcacacttatgtcatatggatggactgacaggaggggacatcagttgatcaactttcttgtgaac

SEQ ID NO: 148699 - DNA, 594 bp, Zea Mays
aggcagcttaggtggtacggctgcacaggcttgttgccttgtgcgcctgcccctagtatggttagttggtctcaataggcaaggatctccctgataggattgtgtaggattgtttccttttcctgtcgacatccttgcctatatgtacttgagcctttgctcccataaatcaactatcatattttctgctaattcattgtctctcatgccaaagaattcctaactcttttggtccaacactcaacttaccaacgctgtagattttaaatcatatgatgacaacagtgtctatcaatgcttctgcaaaacctaggtcaaagcaaggtcctaaaaatcgatgatcagtttgtttggccatccacctggtaatgattagctgattatacagcctaaccagcccaactatgcagcctgaataacaattaaacagtaacatgcggaagcgctttccttgtgtatgacatagtaaagcttcttttaggacattgggaaagtctaccagtgtccaatgtccataatcacacaaggaaacttcagatctaacagaaagaatagaaggtcaagagtagtagagtgcttagttctcattcatga

SEQ ID NO: 148700 - DNA, 736 bp, Zea Mays
ccgccacaagcgtacaaccgccccgcggttgtgcgccccctcagcttcgcggcaaccggcggtccaacatgggggcccaggcccacatgtcatacaactggtgcgccggttaccaggtgcggaaaaatcgcaccgccgctcgcaccaatgccacgtctcctcggggccgtcacggaagactgaaaagataagtttcagaactgtgcaacgactcgaggcagcctgcgcatggcccagcggtggcattaagtacgaaaatcacgggccagtcaaccgtgggaataggcgtggcagtcggcatgaccataggcgggccggcagtaattgcgtcaacaggcacgcaggagcagcaggccaaccgctaatcaagctttggccccacctgcaggctcgcatcctcccctgaggcgagcccgggggccactgtcggtaccctgaatcaggggtactctcttctacagtatgaaggtgtcgtacatctacaacgtctccaggtcacacggagaatggctcccgaccccaccgcatgggcaggtctaaaggcaccacgtggcaaggaaaggtaatacatcccaggatgtatcattgggtccgaacctccacagtaggacaccggacccctgtgcgtacaagcccggagctcccaagaaggcatgtcgggtccctcgggtaggcccaggtccctccgagtaaggtccgggccttggcaaggtcccgggacgggaaggactgaaag

SEQ ID NO: 148701 - DNA, 637 bp, Zea Mays
tagttggaacagctgctaaaaggcagttattgttttatgtgagtcgtgatcaagtgtatgtcgcagtcagttttattgcgttggttcagctctagttttgtttgcccagcagcatgtgatgaggctgggattttacagtaggtcctaaaagttgattatgtccttttagtcgctagtgatccactatgttgcaggcagcttgaagccttggctacctacctttttttgctgttagttcttaatttgcatcctgagtgtttgccattcctaggcttcttgctgctgcttttttagatattatttatgtgagaaatgaagccatttgttttacaatttggtttcgtgtaggatgatctgttatgttctatctgaatcagtgcgtttgaccaccttgcatagttcagtttctttgttttggctgccgtgttatgacttatggggttggaatcagggagcattactgcatctttgcactgcaccaagctccaataaggagatacaaacaatcactgtttggatggtgtgtatcctttgtttatcaaattttagtatgattgtcatgctctgatgacatgaacatgtgaaagacagtaaagttggcttaggttccgtatggcatatgccatgtcactgttat

SEQ ID NO: 148702 - DNA, 560 bp, Zea Mays
ctccaaatttggtccatctgacagtgtacctttgtctccaaaaaatcttttttctttccagtagattcagggtgtgctccttcaaaatatttctgaagttgaactcttgtgtatataggggtctgatctcttctaatctatccaatacaaggagaacgttgttgcaggagcttatggtgttattaatcgtagatagactttttccccagcgttttagcactcgtcgcaaaagcttgaatttagctgcaattcttgaggcaatattgttagctctttggttaatgttccagacctgttgaaccaactcagagaatccaggttgttggatccaatggttttcaaaacggaaaatttgggcctttggaatagaagtgccaatctgaattctacacggtgtgtgatcagaagttggtcttgagagcggaagcatcagagtgttcaggaaagcactaatccagtgagttgaagtaaagcaccagtcgatttgttcaagtagaggatcttcttgcatattggaccaagtgtaattttttcctttgaggggaatttcctgcaggcct

SEQ ID NO: 148703 - DNA, 517 bp, Zea Mays
gttctagccaaccaaacccaactcattaaggtcctcactagaagtctagagaatcaacgcccgaatggtggaagaccacaagaaaggatgggagattttctgaggctcaagcctcacacattcgctggatctagcaatcccctcgatgctgatgactggctgcgcacgattaaaaggaagttagaagccatcggatgtccggagaatcagcatgttcaattggttgctcatcaactttccgggatggccctagcttggtgggataccttcaacgccgccatcagagatgctacctggacaaagtttgaaactgctttccgagagcaccatgtgccccaagggatcgttcagctcaaggaagatgaattccgggaactaactcaaggtggaagatctgtcagtgagtacgtgcacaaattcacagaattggcccgctacgctcctgatgacatcagcacagaagtcaagaagatggcccgctttttgaaggggctcagaccagaactcaagaccatcc

SEQ ID NO: 148704 - DNA, 539 bp, Zea Mays
ctggggacgaggttgcagatctacaaaatcaggcttacatggccgattctaaagatctcaacagtgcttctccaaacagcaacacttggctgactaatttatcggtcgctgagcatgaaagattaaaagatgacatgaagaaaatagacgaggaggcctagcgacaaacagagcaggtgttcaaggtggcggataagtggtttctctcgcacttcagggtagattgccaccagaagaccgtccaagagagggagataaacgccgagtacatgtcagtcgtgctgcaacagctccccacgataggtgatgccagatcagccgatgatattccatttattaaaatttcttttgataatcggattaaaagtatcacagaggatatagataggatggcgcatgcattagaaaaaacgcacatgcctagttttttatcacataaattaggcgccaaaacaattgcgccaaacacatcggcaacaaatgggtttccccagccatattctggtatgccgatggactcatatccaggacgaccgtca

SEQ ID NO: 148705 - DNA, 794 bp, Zea Mays
ggacactaaaattctactatgtcaacaaagttgatatggttgggagactcaaatttcattttaccatggtttcgacactaaaatcctttagtgtcgatgtttaggtttagggtttagggataggatttagggtctaggtttccataaaatcgtgtgctatagctacacggtggcaaaaaatgccataacggcctcctagatataaaacgaaggtggcaggtcggatacataaaattggttgtttggccacggaaatgtgtgatataactcgcgggaggccaagaaccgctttaaggtgctccggggacaaaaacacgtgcggtggaacgcggacataaaaatggtcgctgggccatgaaaacgtgtgctatagctcacgggaggccaaaacagccttaccagtctcaatggtcaaatcatgggtggcggacgggaggcacgaaatcgctgttcgacgacaaaaacatgtgtcacgggacgccctaaaacctaaaccctacagcttgtgggaggccaagaacaactttaaggtgctctggggaccaaaacgctggtggtggaacacgtacttaaaaatagtcgctcgaccatgaaaacatgtgctatagcttacgggaggccataaatagccttagcagtctctgtggccaaatcatgggtggcggacgggaggcatgaaatcgttgtttgacgatgaaaacatgtgttacgggaggccaaaaatagccttaccggcctccggggaccaaaacgtgtactatggtttggacactaaaattctactatgtcagcaa

SEQ ID NO: 148706 - DNA, 861 bp, Zea Mays
gaagattttaaatgccagtataagataaacccaagtaagatatagaggtgtctaaggtgaaggtgataataacaaaagtcatgacaaatgatagagttaaggcaagactcgcgtagcggcgaagtggagaaaacaatcaagggtaagataggtgagggtgcaatagaatggttgaagtaagaactcattatcaagagaagttataaaggaacaacgagatcaccaaggatgggcgacataaaatgatcgctcatggaccgttaagaaacaggggtggtcaaggacatgctaactgaaatgtcttgaacagttattggggtacgaaaataagcatacataagaatataagagtatgcaagattccaaggatacgagcataccaagaccaaggacatagaaattgccgaaagatagcgacttaacaacagaataagaaatgatctcataagacaagaaggtcatggacacataaactgaactgtttaaataggcaatagaggtacaagggtaagtactttggattaagggataagggtattataaatgcaaggatacgagcatgtcaacaacaaaatggaatagagatggtcaaatggtagcaatttaataatggacgaggaaagagtcccaaaagactaaaggctatggtcagggggcatctataaagatgtcgcaagcacaagagtgcgataagttctaatagactgagagaagtatagaccatgctagaataaaatactttttgacaagggggcatatagcagcacaacatagaattagtcgagatgactaaaattttgaagcagcataagggatgaggtgaagtaacagtcaagaagtccttaaaatggccaatgctac

SEQ ID NO: 148707 - DNA, 379 bp, Zea Mays
gccgcctcgtagggctcggggtagtccgcaagttcctagtggggactcgatgagtccggcggcaatgttagccgcgatgcaggccatgcagcaggagttggccattctgaggcaagctattcctgttgcccctgcgggtgctgctcagggtgctagtggaggagtgcccgggggcgctgtccctgtgggtgctgctccaggtggtgaggctgaggtgcctcttccagtcagtggtctttctctgatgcagtggatgggcatgaagctggatgctttttatggcagtggtactccggtcgaggcggcagattggctaacttacgtggaggataagatgaatgtctttgagattgtgtatggtgatcgtgttcgctttggc

SEQ ID NO: 148708 - DNA, 411 bp, Zea Mays
ccgaagcagcgtaggtggacaacggcgtcaaagactcgtgggatgagagagtcctgaacctctatctccttcacccatcactctgatatgtagacggttgatataataacaagcctaagggggcttagaaacccaccgtgtgtcataaagagaacggacataggttcccagctcgtgaagcacattctgtagtaagtttgggaagtggcccgtctcaaacattgaagtgtagtgctctgcgataggccacatcccaacaaaaccatcctcctggtcaggctcattgttgttgttattgttgttgttgttggcatcatcattgttgttgtcctagttatcctcttcatcatcatcattgcctccatcatcaccagaatcatcaggatcatcacctgcaggagtaggggcttg

SEQ ID NO: 148709 - DNA, 432 bp, Zea Mays
catcaggttatcggataaagcgagggagatttcacaacactgaaaatctgataaccggtgtagggccaattccccaggtcgcggaccgtccgcgtgaagacgccggaccgtctggggttaccaggaaagttctcctaatcgattcggccgataatgaagctgatgcaagtgattggaggacgcccataactaattatttacgaaatcccaatgtcaggacagataagaacattcggcgtacagctttcaagtatgttttgatgagtgatgaactctaccgccgaacagtcaacgacgtcctgattaagtgcttgggcctagatgatgctatattagccatggccgaagtacatgaaggaatttgtggtacccatcaatcagctccaaagatgaagtgactgttgtgaaggtctggtttttattggcctaaca

SEQ ID NO: 148710 - DNA, 326 bp, Zea Mays
cattcttcaaattattgctgcaacccacaaacatggccaacggcatatgcttgctgttagtcttgtgtgttgtgtcaaatgtgactacatccccaaaatccttgtattctgcacgctgacttgcatgacaccaaaaaatgctccgaagcacctttgtttttgggtcaaaatccacatcccagtaaaagtattcattgtgttctttgcactccctgaaaaattggaacagtttatccatgtccccatccctctcctcccttgcttgctcagctttcctgtaccataaaagaaaaaacaagttaatctgtcggtcttaatatatcgca

SEQ ID NO: 148711 - DNA, 925 bp, Zea Mays
cttatgcactaagcaaatagaaattttacagcataacagtatacttacaacaaggacacgtatgattatgcaagggttcctatacttcaacactactttacttctaccttgcccttgaatgtgtgtggatgggagtgggatggtatgtcatggcaagaggggggcacatccttatataggcacctaggagctatggatgagtgacacctcaccatgcatatgtcatctaccactttaatggggggacacttcaccatgcatgtgtcacctccacctttcatggggggacacttcaccatgcatgtgtcatttaccactttaatgggggaacacttcaccatgcatgtgtcacatccaccttacatgggggacacttcaccatgacacatcaccataattctagagaggtccaaaaatatataggcttcgtgacttaccatgattagtgtagggaattctagaaggctatgtacatcatggttatccatggttgttcctagaaagttgtcttgcttatgattaaggtttatcatgaatattgtataatcttctagaaacttggttattcttattatatgataattgtttaagcgaggttttccttgcatattttcaatgggcaaatgatggccatgggaaaagctgtcttaattgatgctaaggtcataacttctatagtttaagaatgacttcggggggaggaagaggtcaaagatcatggcatgctcacctatggctcaaatcgacggtgagggcttgtcctctggtttgaagagtaaggcacgcgttgttcggatgtgagggtgacaatgagatggtggctggactgtgaggttctgcggcaagggcatcgatatttataggcagaggaacgacagtttataatggagggagtctcgaccggcgtactgtgattggcgacgtt

SEQ ID NO: 148712 - DNA, 644 bp, Zea Mays
cagcaataatgactttcttgtcttaaactaacctgtagtaaattggttgtttcttgtttctttcgaagagaacaacaccctctattatataggatattatataggaaaaccaggctaatgataaccatgtacaaaaggatattaaactaaaactaactcggttacaatctccacgatttgatggatccaattccaaacatttcatgcaagacaaaattggaaagtaactcagttacgatatccacgatatgatggattcagttttgaacttgttgcacaaagtgaagttggattcatgggtgacactttcaggtttattttggaatttagtagtgaataggccaagctcaataaactccatcaatcatgcaccaggtctcaaaatagttacactagcttacaattgctcaacgaaccgtgccttaaattggcagttttgcacaaactagttgtactcaagaatttgactcgtacttggtgctctttaggcaatctcttcgggtggagcttataagtcatgctcttgtgtctctttcatgagcttcttagagaattcccaccaatagtcaattcatataggtacgttcgtacaagaatactttgtaggatgatatctcattgttaagccaccaaacatattaaaa

SEQ ID NO: 148713 - DNA, 1035 bp, Zea Mays
gttgggctaaggtttgcaaaccagtgaaccaaggaggtctgggtctgcacaacttggatgttcttgggtgggctctaaacctgaggtggctctggcttaaaaaaacacaaccggacagaccctgggcagaatttgacatccaaattcatccaaatgcagcagcccttttttctgcttgtgtgtgttactatgttggtgacggtgcttcaactctattctggacagatcgctggcttcaggggcaatcgattaagaagattgctccatctctgattcgtcgtatccccaaaagaatccagtttatcagaacagtccaagaagctttgatcaatagcagatgggtgaatgatatcaggggtagtctgccggaacaagttctacttgagtacttcaatatttgggatttgatttagggggttcagcttcatccagaggttcctgacaggcacagatggctacctacatcctcaagggaatactctgccaaatctgcaaataaccggtttctagttcgatcaactttgtttgagccagctgaaaggatatggaaaagttgggctcctccgtgatgtgtgtgtcatttcattaagaagaaaaaaataccacatacatcaaagagagaaaaaaacgaccgaaaacagccaagaccacaagacatgtacccatatagccagggactgagcaactaaaagctgtgacacctagaccacttgaatacaaaaaccacagagggataggccatcaaggcctacacattcctagctcgtgcccagaccaggaagtcttgcagtttggactttggaggctctagcctctagcccacctccagagccgacattcctcaacaatccttgtgatcaaagtgagtgtgttaggctctgaatactcagacacaagaattcatatgcttccatatctcccaggctgttaaaatgataagagaattcagcccttgcctcctttcttttggtactaacttgaccaccttcctctaccacttttctcgaacgcgcaggagagttacgcatcattata

SEQ ID NO: 148714 - DNA, 324 bp, Zea Mays
ctagcttggagatgcgccgcgggaggaaaactgagtatctcgaaatccctctcaaagacagtatcaagggatggcgcttggagtggttcattgttgagaattatggaaactctctccccctcggtcgggaagacagccggacgttcacaccccgagttggaccgagtcccccacggatcaggaggtagctgaggcaggtgttttgctagctgaagttgggttgctgaaggagaggggtctgactgctgaagctgtggttgctgattttgtcttcaagaatattcagtcgttgaaagacagggcatacccggcttatctgtatcg

SEQ ID NO: 148715 - DNA, 530 bp, Zea Mays
gccttatggataccgttaagattgtggctgctggggttaatgtgtcgcgcggttccaaggggtgggaccatcctttggcggctgctgtgcatgggaacgagtttttggaattggccgaggagactgtgaatgcaggagttactgtggagatgttacaaccgtgtgtctcgggaatcgaggagtcttctcggattttgcagacaccgcatttaagccttatggattccgttcagagtgtggctgctggagttaatgtgtcgcgcggttccaagtgttgggaccatcatttggcggcagttgtacatgggaccgagattttgccaaggacgcagccccgtttctctggattcaaggggacatcttgggttctgcaaccactgaagttatgctcgaaggacgccaatctgtctgtggatgcgggcgatattgagctgcacgtttccagggattgggaccacctgctggcaacccatttgtctgatcctatgcagcattttgaagggttgatgggcttatctgtaacactttcg

SEQ ID NO: 148716 - DNA, 973 bp, Zea Mays
gaaattcagggttgagggctcaactttggagccttgtaactttcaaaatatagggtttttgccctaggtcaccacatcaaaattgtagagcaaactaaggagaacaactttgcttaaggttgtgagctcagttgttaagaaaaatccagagataattaagctcaaaatcaggctgtcaggctgctaaggtctgaattttcagactaacagtgaactgacatcaacttcaagcctaaattcaagcatgatccaatgggtttttgtggcagcatcatatggcaatattgtagatggtatgttgctttaccactttgatgcagagtttgagttgagttgtcattcaaaattaagagaaaaccaagctccaagtctgtctgtcaggttgtctgaaggaagtgctccatggtacagtgaccgaattaagttcagaacacttcatcgccgtcgatcactcctctgccgcgattcatgccgccggcgttaggactcgtgctcggggtaggtgtataaggacgtgcggtgaaagatccttgccgacggtgagctggaggtcactccggtgactcaccgtggctatcttttctactttgcggctggacagataacctcgccggtgaaccgtcgtgttctggccctgcgccgcgtgtcctaaccgcgccaccacatcaccgtgactccctctagcttcctgtcgaccaccggaactaccgccacggtagaagccacctagcgcttgcgccagtgtcttcttctacctccgaccgccgcgcgtctcgcccgattcaccggccaccgacgaagccgcctataaattaagcccgtgaccagctccgcagggtcatcagctaaccagccaccactaatcagccaagatcgttcgccagagctcgagaatttcttgtttcccccaaactggtttccgccaccgcaaaactcacctcaccgcggccagccctttctaggtcagttcatc

SEQ ID NO: 148717 - DNA, 320 bp, Zea Mays
caaagttcctatttgagcttatgagacggactcttctgccgcgtatggggtacagggaggctaccacacatatccagctctggctccttggtgccctggtctctcactccgagtttgacgtcgtggatttccttatttgtgagatcgaggacactgtattggatggtctgcgtgctcgacgccagctaccgtatgctcactacttgtgccacatttttgcgcagctgattcggcctccacagttccagggcacacttgaggcctcacgccttgtttttggatcctaccgtccagcgcctgaggatcctgtgccagcttct

SEQ ID NO: 148718 - DNA, 1647 bp, Zea Mays
agctgttggggcactgggggcagtggcgcctggtactgcagagatgccgggagcagttgcatgtcctggagaaaacaaaagcggtgggcctataggtggcggtaccaggttagtgggaatgttgtccagaaaatcgaactcgtgggaggtgacagtgggtgactgttgggcaaaggggaaggtggactcattgaaaacaacgtgacgggaaagatgacatggttcgagagaagatcaagacaccggtatcgtttgtggtgaggtgagtagccaagaaagacacacttagcagagcggtgatcaagtttgtggctagtggtggcgaataggttggtataacaagtgcaaccgaagacgcgaaggtgttcgtaggatggcactgttttgaagagggcgaagtgcggggtggagaaatgaagagtcttggtgggtagaatgttaagaagtgttgctgtgtggagagcttcaacccagaaggttggtggaatgttggcctgaaatagaagtgagcgaatggtgttattggtagtacgaatgatgcgctcagctttaccgttctgaggtgaggtgtaggggcaggacatacggaggacaccatgggtgaggaagaacgtgcaggagctggagttgtcgaactcaagtccgttgtcacattgcacaactttaatggtgacaccaacctatgttttcacataggcgaaaaactgagtgagtcgggaaagcataagatttcaggtttaaaggaaaagtccataagtagtgggagcaatcatcaagaacaactaagtaatatttgtagcctgagacacttaaaatgggggacatccacagatcacaatgaatgagatcgaaattgttaaccgcacgagaagtagacgtacggaatggaagacgaacatgacgactcaactgacagacatgacataaagtggagctagcatccttattacacatgcgaatggctgatgtgagcttggatagggtctcgtgaccagggtgaccaagacggcgatgccaaagtgatggagtggagcttgcgacgaagctgtgtgtagcagggaggcacagggggtatagtggtctggaactattgcacctgacgatcacgttccgagacagcagatccttcacagaccaaccatagggatcaaattcaatggaacatttattatctgtggtagactggcgaacagagaccaggttcttaataagtttaggtgaaacaagaacattgttgagatgtaaaaaaccatgtaaagtggtggagccaatggaaagattggaagaagggagctgtcaccgacaataatggaggaaggtgcagtaagagagggatttgaagtgtttgatagggtaccggcgttggaggtcatgtgggaggttgcacctgtgtcgaagtactagtcggtttgctggggcggagtcagggacacagtgttgaaggctgaggcaaggaattgagcatcccaagatggagtggacgagtgtcccaggatgtcgtagagagcctagggaatacatccctgcagggcgccgttttgcaggttgtgctgcagtggggcgcctccctgtccttgtagagcgccatggacgtactgctgggtttggtgggccagcagtgcctggtgtggggcgatggaggccgga

SEQ ID NO: 148719 - DNA, 652 bp, Zea Mays
cgcggaggcctcgcgcctacgttccgccactgacgctgcgcagtggatgcgcctacactacggcgacatccgcgacgccgccgcgcagctcctgaacgggcttctcctcgccttctccgaagaggtaactgacctattcactcgtggtgcctctgattcacacattgctctgtcgatttgtgacatttgttgcggtttaggggccattgagagaggtgttcatggatattaagtgggaggtggaggaaggggaattgctgaaggattgcctggaagtgggagctaaggacttaaagggtttgcttgtcattgccaaagacctcttcgctggtgtttcaaggacttctacgcagcatagcgagctctgaggtttggtgactttaagttgccttttctgatcgtttcaggaactcacgcatgcttgtgtaatttagtttactttagaaacctgatgttgatccgtacagaaactaaacccttgtgatatcactgttgtgtctgctactaatgggctttgaattttgagctgtgcataattttgctaatctgaattcatttgtgatcatggcactaccaataactttggtcctttttttctcaatgcacatgctattttattgatttagtggaaatgttgcgcacgaaactgtcc

SEQ ID NO: 148720 - DNA, 3644 bp, Zea Mays
ctcaaacacagcattaaagaagctagagatcaaactgtttttaaaatcaaaaccctatcaaactagagctaaatacttttcgttgctactatattttttttccagcacgccatttccattctcctttcatccattgcgagtttgcgactgcgaacacgcgcgcaaaaaatattgacgaaaactggaggggtaaaggggaaaaggcgacggccgcctgggccctggaggagcgagaaggcggaagaaggggagcggcagtcgcaggccgcagctcgttgatggtggttagggtttcgccgcccgcacgctcgacctgctgaagaatcgcccccctgttgaagaggtctgcgcctcgccctataaggctccggggaagaggagatagacatcagtggaccccggcgcgcggctgatggcggagcaggagcggagggacgcggaggctgggggcgatgccgcgggcgcagcggtggcgtctcacaccagcagcatgcaggtgaggtctccgcaccctacttctcggctgtcctgtacgattttgggagctttatgatgcgtagatccgctcgctgctatttgattggctaaacctgcgtccgttgcgtgccttcattttagtttgttagtgcgtagtaggttctggaagggagctgtcggaattttgcatggaggcggtggggaatttctgtgggccaaccgtgccttagatccgagttagctgccgttggagctggtaaattattgttctgagagggattgggtgtgcttatttcttggtgaactgtagtaatgagcgagatatcataagacttggtttttttgttcatgaggaatatgtgggtatgtttttttttgttttttgtgctatccccatgctgctgtaccagcacctgcatgtttgggaagtagtgaggcctgctttactgtggagttagcctgtgtcacttggtttctcactctgtcagtgaacttattggtgatagtctcgatgtgaacagttcagcacaatgagattgacaatttaaacaaagacgaatgtgccctgagcatgatgtaatcactacccatatgccatatcatttcgtaaacgtggggcatacttgattgaattatattgatacaatatatcagctactaccattttgattatttctatgccggcagtagtatccttctatcttgaaaactgtagagccttcccatctcatctgaaatttctatacaatcaaaagttccagcttaggtggatgtgatctacattgataaacttaacatctaggaagtaggaacagaagttgttttgatttaaatttattgcatcatttgattatatgtaccggtgggattttgttcctctgaagccaaatatcccaacttcattgaatgtctcacttcattgtagaaaaacaatcgacttttggtagtttgacctaaaagaaagataataaaaggcacccatgatactccctttcagtggttgttgcgtatgtcagaaaggtcaaaacagcttgtgatacctgccagctgatctatggtcatatttgtatccgtagttaactagttatactacccaatccaagtatcggtcacttcagtattaaacaaacactgatagccatgatttgttagacattgttgcaatggactagagcacgtgatgaatgtttcacttgcacagaatttttattgtggataagaggcccttgcagcagcatgtcattaggtctaggtgcagcagaggtaccaaggatagcaaagtatgacagtagctgggcataatgtgggagagcctagagtgcagatctaaccacgtcaaaagtcctacaagtcttaacgttcatatgattagaccgaaattttgtttttaggaatttgcaaattttgattagttcttactgtgttagtcattggtccaacgtccaatgaatgtttaatttgtgttaactactagcctttctagggtatctatatcgaggaggtccacacgcataatataatgatgaagcattcttctattttctgtctctcgagctctctagttctctctaccaagctatatctgtctgtctcattacaatccttaaccccattcagccatgtatattactaacgatggttacaattctaactgttccagcgtgtcaaagtataccgtttggctgatggtgggaagtgggacgatcaaggaacaggtcatgtttctattgattacattgaggtatgaagaatttctttgctaatatgggtggtatttataatttcttattcatgggtctaagctaattctcatactttctcctgattttctttgatagtgcccaaatatttgtttgcctcttgatctactttagttttgctaccctagtaccttgttgcaacatgcttcatttgaccctcattctgtttctacaaataatgaaattgtcaactattcatttttttcactgtcaagggaacagtgtcccaatgtaaaactaaagaaaaccttgtcgaagtagacatcattttcatatttcatactgtaatggtgattcatggaacagtgtcccaatgtaaaactaaagcaatagtccactaaaaatgaaaataagcacaaattacttgatgatgattcatggatcaatatatcggtgtaaaagtaaagaaatggtccagtacaaatggaaacaagcagaaattacttgtagtctatgcctctatggcaccatgatattctgtcattgtattatgatttctaatctgtgtgcttactttttggaccttatatgatttattatttcgttggtttcagggttcgaaagaactcggtttgactgttttagatgaagatgacaatgagacgctacttatgcacaacatcacatctgatgatatttacagaaaacaagaaggtgaactaactcagtatcactctgtttttgagctaattcatatcttttttgcaacttcctaatccatttcttttgttagaaacaatcatttcatggagagatcgtgaagcagcgacagacttagcactaagctttcaggaagctgcaggatgctcctacatatggtgattgaagcaagagctgtggtgcagttaccatgtttttgttcaattactctttttggtttatttgtgttctttgttggtgctttgcagggaacatatatgtgaaattcagagaaaccttcagttcagtaaccttggtggtgagtttttaaaaatcagctgtgactgtttattcaaccacacatttgcatgcagcatgctcttctcattttaacgatgcctgcagctccggaagttggtcgtcgtcaatcatcagaatctctagaagcctctagaataatgcattcaaatggtacaccccctttgctgaacgtccacttgagattgtgccattgtggtatctttcaaaaataatatttagaaattattttaaagcgtctagtttgggaacataacagaaaagtatcttactgtccattgcaaagtaggtgactagattctggagtgaagcacaactagaatctggccgttcactatttttgcttggtgttatgtgaacgaaaaggcttgcaccatctgaatataaataaatgtgtcctatgttagtagagttcagtgaccatttgttactctattttgtacttttagc

SEQ ID NO: 148721 - DNA, 609 bp, Zea Mays
gtggtggcctatttaagccgtcgtctgctgaacagcgagagcaggtatgtgttcattgaaaaactctgcttatccttgtattttgcatgcaccaggtttcgacattatttgctctcaagtacttgtactgtagtatgtcaaacggatgtggttaaatatatgttgcacaaaccgattcttagtggtcgagtcgggaagtgggcatatgctttgatagagtacgatctaatttatgagtctttatcttctatgaaagggcaagttatagctgattttataactgaacatagggttgatgtagagcaggaaatctcatgtcttaatattcgtccttggcaattattttttgatggttctgtgtgcaaagaagggcagggaatcagctatgttttagtatcaccaaatggtttattgcatgaaacatcaattaggattgaatattgttgcactaacaatcagattgagtatgaggcgttgttgtttgggttaatgcatttagatgatatgggaataaaagatatagacgtgttcggggattcgttgcttgtggtacagcaggtgagaggggaatttcagtgtttagatggtatgctgcgtaattatttagac

SEQ ID NO: 148722 - DNA, 306 bp, Zea Mays
ctccgatacctcgttccataccactatggacattggtatccttcttccaccattgttggcaatggttctgttcttccagtcacctccatcaacgactcaaatctttttggtccttttcgtcttcgcaatgttcttgttgctcctgacaacattcggaaccttctatctattcgtcaattgactactgacatttcctgttctacggagtttgaccctttcggtttgttcatgaaggatcttgccacttggagtcttctcgcacggtgtgacagctttggcccctatacacccttcaccttcctgggt

SEQ ID NO: 148723 - DNA, 688 bp, Zea Mays
ctggtagcgcgagctggatgcatgagcagagtcaaccattctaacagattcggtagctcgcacaatttgactgaccaattcaaccaatgacgttcggggcactgaccttcccggcaaccgacgccctcggcgaagccgtcgccctccgagcccttggggcagtcgcaccggaacgcctcctgccctgcgaccggcgtggtgacctgggtgcagttagcgtggctcgagcatcggcacggccccagcatccaccactccagctccatcgtggctagcagcagcgccggcgccggcgcgtccaagtagctcaccgccgacaccagcccggtgcattccgcggcgagcgcttgcatcctggttctgttgaggaaacggtcggggacgctggtcggccgtgtcagcacggggcagcggatggagtccgcagcggcgcggccgcactgggacgagttgtcgaggtaagcgctaggggggacgctgcagttacggatgtggtcggcctgggaggcggagctgcacgagctcacgacgagcccgttctggctgccgggcgcgtacgccttggtgaagagcgcctcgacggaggcgttgagccggcgcgagcagttcgggcgcagggtgaggaagagcgcgcgcgccgtgacgttggacacgagcaggcccagctcgcgcgtcttcccgagccacg

SEQ ID NO: 148724 - DNA, 296 bp, Zea Mays
ggttgttaggtgttacatggctgacagcaaggctaataggtcagagaaggaagtgaaaagactactggtctcatatgtgaatgcgtgtttagatccctagggcaccattgagagaccgattagtgacgacacgctcaccttgaggtaaacacatgcaccagcaaggggcccataggcggtgctggcacttcatcgtgctatctatctcactggagatggggaagaaggcagaggaaggagaaggagctctagcgagaggaagtgagagatgtgccgagcggcctaggtcatggact

SEQ ID NO: 148725 - DNA, 1079 bp, Zea Mays
gtcgctgacggtttacagaaacaccctcaagcttctaatccttcacaggggaaggtccccgacgacagccgcacgctgaggagctccggcgagccacttcaccggccgattgaggcgatgaccggcgctcccgagcgacagacaccaaatcggatctatcctaagcttttcccccaactcaattgcatctaataccaactgaggagccctggccacggtgaccgagagcatggcggctaaggtgttgtgttcccggcgatcccaggcggttcagtttgattaaaggggtcggggaacatcactaacatgtaagggtgctagaacaagaacgagaagggaatgagcagacctggggaaggctggccgcggtgaggtgagttcacggtggcggagagtggatttggggcgaatccaaaattcgcgagttctagcgaaggactgtcagcgattaacggtggctgggtggatgatgatgttatgtagctaggggagggctcaatttataggcagcttcgacggtggccgggaattttaacggcgatgtgtggcggtcggagataagtaaaaaccgtggcgcggtggttgcgtgtcccgtgtcgtggcaattgctccggtgatcaacggggagctaggagagatcacggcgatgcggtggcgaggttgggacacgcggtggacaacggcgagggcacgacgacggggagcagctttattcacggcggtgagcaaggggaggagtattgcggctgaccggggtggcttccagctcgacggcgacgacgatctttttacctcgcagcgttatccggttaccagcgaacgttaatcttaacgcggcggcgcgaatccttgcgcgggggagggtcaccggcggcaagcacgtgatgctggcatcctgatccattttgactactgtaccatcagagctcgtttcagacagcctgacagaacattctgcagaggaatttcccttcaatttcatatggcagctcctcccaagctctgcagcagaattgtagagctacaaaccaaccataattcggctataggacttgaacccatttgagcactaaatcaag

SEQ ID NO: 148726 - DNA, 427 bp, Zea Mays
gttttgtgcttttttattttctcggaaaaaactgtgcacctctgtaagtatttaaggtagttccttactgtattttaggcataagtattaaatgttttaaggaccctcatgaagaattacaaagttctaatgtctgggagattctttatactagctctgtatacctttttttacttaactgtctcggttgcttcaggattggagatggtgaatgattttccctcttttttgtatttttctgttgagatcattttcctctttagtgacttatagtgatgatttgataagtggggcatactgttttagtgcaactacaccatggcaaatgatatatcaatgagcacagacccagtagtccgacaaaactgttagactaaggctttgcagttcttcccatgcattccgcagcaacacacgtaaaaaaggg

SEQ ID NO: 148727 - DNA, 335 bp, Zea Mays
ccgaaggtccatggctccagttgcacaccacagaaagccttcgttggcaacattttgaagaaccactaagacctccgaaatagatctatcaaacaaacccccaagccactaggataaagagattgttgattcctttctttatattcttagaagccaaacaagcaacgctactccaccaactcataaagcttctttcctcatgttgaggtagagaggaaagtcctaggccctgcaggattagaaaccacacttgtttggtaaacacgcaggagacaaataggtcaggctgtagggtgtgggaggcctcgctttgcaagccggtttgtagtacacag

SEQ ID NO: 148728 - DNA, 486 bp, Zea Mays
gagagccatcggcgccaagttctccgagcagtacaacggcgcctataactgaacagtcctccaatgtatgtcacctctactctactcctatcatctacattatcttgtagtcttgtaatgtggtcttcattttagtcttttagatctgtgtagtgttctcaaatgtcaactttatcttgtagatgggggacactgatgatgttggtgttaatgaagtgaacgcaaaagaaccaatagcgacagatgcagacaaaggcaaggaagagcagcccaatgatgcaccaacagaggatgatggcaagaaaaggaaagctattgctccaaggtcagatgtatgggaacatttcagcaaagttagaactgaaggaggggaagacagagccaagtgtaggtattgtggcaagctgtttcgctgtgacacaaggacaaatggtacatcttctctgaaaggtcatctaaaggtttgcaagaagaatccaaacaagc

SEQ ID NO: 148729 - DNA, 427 bp, Zea Mays
aaatttaacttgctgctattttaacagtatagtttcatttagagttcaactctcttgtgccgattgagacatggatatatatgattaccgcggtgaaaccatctatgagctctgggtaagcatggctgtctatccctggcggctgatattagcatttttttcttggtctgctcaggaacaggccataaagataatagagtacggccaaaacggttccttcttgctgcagccacgaaatttgagccaaattatgctagcttagctacatcttcttggtaaaaacaacgtggcatgcagcagccgcaactgaatatatcaaggtaataactacacaccagccagagcgctgacataaaagtgaaaaaaatcccagtctaaagggcctaaatggataaaagtgaaaaagaatgcctcaacatcacatgtt

SEQ ID NO: 148730 - DNA, 530 bp, Zea Mays
cagccgtccacaaccccgaaggtttgcaaattactcaggacaccgagggccaccgaattgtcaacctcatcatggccgaagactggcgagctccaataacactattcctgcaaggccattaccatccaaccgaccgcaatgaggccaaacgactgaagcacaggagcaaggacttcgcattgatcgagggccagttgtacaagaagggaatcagccagcctatgttgaaatgcataaccaaaaccgaaggcatagaaatcctccgcgaagtccacagtggaacctgcggctcacactcaggaccaagggccctcgcagccaaggtgatccgtcaaggattttactggcccgcgataatctacatagccaaccgagtcaccaggtcaagcgaagcatgccaaaagttctctccttgctcaggcaacccttcgcaattcaccaagctcatcgcacacacatggccacttcaatgctgggggctggacatcgttggaccactgcccacagctcaagggaacctcaatttcacc

SEQ ID NO: 148731 - DNA, 706 bp, Zea Mays
aagaaacacgaacacgagggcggcgattttccaatatgctgcagatccaaagatgaggaacggcgtaatgaggtgtgcaatgcggatggatcttggtgctgcctacgccgcttggggtaagaaggtttaggaccgtcttgggacaacaaagatgaggtacggtcgacaacgaaggcggcgacgcttgggaccgtcccttctccgattgtcagccaaccaagacggaggcggatcctccagctcggcgagacgaatctccttccccgccgaggcctgctggcgacgccgccgttcctgggtcgccggtgcacgcgccttgtcgtcgcttgcttccaaatcgccgctgccttggatccgcccgaactgctcggcggggcaataaatcggacgaagattgctcatgcacggcttcggttgcgccggagcaagatccggcactcatggatagcatccagggagagtgggacggcgccacggcaagccggaacttgctgtgtccgccgccgaaggagacttccttggtccggacgagcgcgcgacggaaggagagaggagaaccactgtcgccgctaaacaaggggaggggaggagtgctcgcgggaagcgcgttcaagacagtctgaggtgcagatgcctcttccatttcctccacgtttggagctcaaacgaagcacaactgagcttgtggcccacaagcaagcgacct

SEQ ID NO: 148732 - DNA, 418 bp, Zea Mays
ggccaggtcagtgactcggcgccttccgccattacatgaggattgggccatcatcaatattcaacctttgcctgatcatgaggtcactttctcggcggtgagagacgtggtcagagaatatttggtggagcaccgtcggcttggggtgcgggatattcagcggtcgcacctggggcaggtcctgattcagtttagtagtgtgcttgagagagacaatctagtcctgcttggcccgcagaactacctggatgccaccttcactgctctgtggcacaatgatgcctggaaccacagagcccttttctttaattgtgaatgctggctcatgttgttgggattcccgctagattatcgttcatcagaatatctgcaggctgccattggttcctttggcagattactattatgggaagacgac

SEQ ID NO: 148733 - DNA, 449 bp, Zea Mays
ttttgagtgtttgcaagtgtttatatgcttccccaatggaaaatacatgaatcatgaagcaaacttaagtgtcagcttgattgttgttatgggtacattactcacttcagctctgggacccaggttcctagctcattaaccttgctacttgaactatcagtttctttccatgttcctcacatctggtctctccctgtgtttgtgtgtcagggggtggggtgctatgtttctcagtttgttgccatgttcctcaccatcatcatcatacgaaacttgctttccaggccacagaacctctcaatctttggcaggatgagcctgttagacaagatgccaaacataaaaggatttggttggaatgtgttcacattgaggattctcatgggcaatatctatggacgtagctgaaagagtgtgaatgtgtcaggtgttggtaggaaagtttgctg

SEQ ID NO: 148734 - DNA, 362 bp, Zea Mays
ggccgtgcgggtttttttggtagatgtgttttctcaggattctaactcgttgttctggatccaaaaactagcaccgcgtcgattaagctagggttccgttcccagcagttactcatgctttgcttagcacacatttcgatctcaccgaggcaaacaaggttgtcggcattgcttacccgtgttttattgccttcgtcataaatcatgctggactctttatggctagtcctatgcaattcattgggcacacagtagtaagatgggttggggatgatagttttcagtggactagtaactcaggaatttgcatgaaaactttgttatctttcacgagcatgttatttccttaaaaccgaatttca

SEQ ID NO: 148735 - DNA, 476 bp, Zea Mays
ctgaacaacaaactcaacaggcaccaactgctcctccaaaagcaagcaccccagcaggacctgttgctcccaacacatccaccaacagggcatgcttcaagtgtggacaaccgggacactacgccaactactgtcccaacagagctgcctacactacaccggctccgatgaagcaaggacaagcctcggcaggaaagagtcagcccctatctatcaaccggggacatgcccatcatgcagaagtagaggttgaaccaggtgaactggaaattcaaggagaagagctagttgatgatgaagtagtcggtgaagaagtcaacgaacaacaagaatagagataaacataaatatagatacatatatatattactattttgtaagacctaaatattagtttggccagtagttcgtattttactatttttaggaataataataaggtcgatttgaccctttgttttgctaataagttacgc

SEQ ID NO: 148736 - DNA, 1196 bp, Zea Mays
gtgagcggatgttctccctcggtccctctggtatggctgcgggcgtctgctacctgtggcttgccgctgagcctgcgtccggcctgctgcctgtggtctgctacctgcggtctgctgcctgcccggcctgcccctcccaagttggtgtggccacggcaaccttgtggccgggcagctgacggtagaggcctcaaggattgtgtgcagggcgtagcttggtgtgttatcaatacatgttgacatgtcactggacataaacactcgtgagatccacgtgacactcatgagatctataacatttatgttcctttgaaaggcagtcaacaaataatgtgtaaatctctaatgctcctttatggttgtatttgaactatcaatatgaattttaaaccatttatattgtatttaatggatgatttaacttaatccttgaatttagatgttattgcgttacttagtgcatcaataatgaatcacgatgcttctataattattatataattaaaaaataaatttaccgagtttatgtatgaaaattttgaacggcatacccttagataaaatcctagatccgccactgcccgacttcccctcaaatgtcaaagtcattcatcgttctacaccacgtagaggatagacttgtctaaccattaatataacttaaccacaatgcacaaattgcagaggttccagctgtctatatcactaattctaacactctgatatagtgacatcgcacaatcgcataaaagactagaatattgtcaacacttccaaatttcaattaccggcctaaacgttggtgtgctaccccgccgctaaatggatccggaactggcgagggcgctgaaggaacgcgaaatgggtgtcggtatcatgatcactgctgaagtgtgcgtactgcgcactgctttggtaaggagaggcgtaccttgagtatagcgtgctcggcggcgtctttgacagcggggtggcggcggcgtgcctcagcggagagagcgcgcagatcggcctccagcgccgccatgaagaccatctcctcctccgccggcctgctcctcctcaggcggaggaagcgatggtgagaccaggggttaggtttttggcctgcgctcacgcggggatcggaagcgggagggcgcgcggcacgggacaagtgagatctgagaagagacggggaccagccgaccaggcag

SEQ ID NO: 148737 - DNA, 468 bp, Zea Mays
taggccaagacagataaactatagccctcgtagccctctgaatccgttttgtatatcaccagagctcctctctcctgagagcatgggggttaagctaaagccaatcaagacacgagccaaccttaaagcataggaacaggtgatgagaatgcgtaggaactgatgcgcatcccttgatttttttgtgctgaagtgacatagctattgtttccgtgatgtacataagacaagaggttagtcgggtcagggttgggtgggtggtcgattccattgatttgtagcctttaaaacagttgtacattgtcacagatttatttgttgaagggagaagaaataataaggggagatgagatgttgccaaaagttagttcctctaacatttccattttttatctttgtaagttagactggcgaatccttgcggctttctaaataagttacgatgggcagtccaattgttgcagaagc

SEQ ID NO: 148738 - DNA, 326 bp, Zea Mays
gtagatcaccttggatgaagtgccgaaactgagcgtcgaggtggggggcgcgagtctcccgattcccgagaaactggttctcgagagttagccaagtggtgcgggcactggcgcctcgctccatggccatttcagcaaggtccggggagatggaactggagatccaggacttgacaacgcagtccatgcgtgcccagtcggggaagtaaggcgcgggagtgtcgtcgaggatgtggctgtccagggagtatttgccaacgacgaggaggaactcatcgcgccagcgggtgtagttgttgttggcgaggtcgaggacgacgtgaacg

SEQ ID NO: 148739 - DNA, 696 bp, Zea Mays
gtagtggcaacagattctggaaggaatgtccgtcgacgaacagaagaggaggatgaagaaggtggcatcggcagttctgatgtatgtcttcttctaggactaataatttgttgtatattaaagtatggaattatggtttgtcaactactttactactatctccactctaaataggtacttctaggtttgttttgggtaaaaaaccccgatatgttaacttttaaccaagtttgtacaaaaataattaacatatatgacaccaaattgaaggacagacctggtagagtggcgagaagcctttccactgagccgtcctgggttcgacgcaccctctctacaaaatacagggggtaaggcttgtctcggttatttttgccctggaccccactcatgtgggagccaccataactgggtctgtcctttttatatatgacaccaaatcagtacattccgaacatatatttcataattgatcaaataataccagtttagtgcttaaatgttgctattttgttctaaaaatttggtcaaatctaacatagttcgaattaggacaaacctcgaagtatctatatggagggagtattatttattgttgaatctggtttatttgatgccttgtaggaagagaaagaaatgattagagatcagcaggaaaaggctcagctagaaagaaacatgagagaaagagatgca

SEQ ID NO: 148740 - DNA, 377 bp, Zea Mays
cttgtgtaaaagtctctaagactcagcacgccactggactggaccgcgggttctaatctctaaacttataagggctcatctgcaaaccgcgcattccgaaggggtatggatcacttcaagccgtccgattagaattcggccgctaggattagacttatccccggccgaatcggtaccgatcgatcaccgcacgatctaaaactggcgctccagatttaaaacactagaagtccaccccgagccatccgatcaacatctaacggaccagatcgagccgcggcgaaagagtacactacttctaatctccaccgtccactaacggatctacggctcatcgatcatcctcctcccccggcggcaccctcacggcggcgcgc

SEQ ID NO: 148741 - DNA, 383 bp, Zea Mays
tggctcttttcgcacttctttgcttgggtcttcacctagttcgaccgacctattcgtgctctccagtgcgataatggtcttgagttcgaccactcctcttctcgctctttcttcccatattcggttgtggctctcgtgcactttcacctcccatcagaacgatcgaactgaacgcatgattggcaccaccaccaacatgatttgttgccttctcttccctcccaatactagatggaggctctcaacactgccacccatctactcaacttcttcccctccaaggcggtcactcagcacactcccttcttcaccctctttggcaccatactgtcccatgtgcaccttcaagtctttggttacccatggtatcccaacacctccac

SEQ ID NO: 148742 - DNA, 322 bp, Zea Mays
accgggtgctatgtactcggcagagaatgtcctcgacgatggatggacaactttaggggctgtttggaactggttttaagtctaaaaccaccgtaaattacggatctgtaaaattttacaatcctagatccaagttgtctgctttgatggacggtaacatgtgtggtttgacaacagtattatgtcttccgaaccggaaaataaaaattttgcccgtcggccactcaatcagtgtgtactgcaggtagggacagatggaccacaggcatccaaatctaatagggagaagacgagagatgggatgtaagctatagccatcgga

SEQ ID NO: 148743 - DNA, 1061 bp, Zea Mays
cacgcacattctgtgacgatggccttttcgtcacggagtcgtcacaaccaaatagattatgacaaacaaatccctatctgtgacgtaatgagaatgtcatagaaggccacatgtgttgtagtgtctaatggggaaggtatctaggtgtcagcagtggtgaagcctaggtgtgaagattcagttatggttggctggcactttggatcttgaggtcgcacacccaaggaaggggtaggcagagcagcatacaagatactttaggacttaatggacccttttcctcgagagattgctaccgtcatacctaggatctttcctaggggtgatcctttcaaccctaagtgggaccagcctgagggtagagctctgatagggggtgatagtgagcagcagtacagtgacactgtagcctccagtgctatgtttgcagttatgcaactgtataacagctctgagcgcaacttggagatggtcaatggctctcttgccatggcttagaatgagttgcaccggactcgagaggcacatgctgtagagatagctcaagtctagatagagttagcccaggttaccttagacaaggatgaggcaattcaggttagggatgtggatgtacttgacaatgcgttgtggattgacaaatgccaggactaccaggccatggtagtagagatcatcagggagaggaatgtagcctggtccaagataacctagcttagggcaacacaggtcaatctgatgcagcagctgaacaatgtaaaggcttggaatgctaacctgcatgaagaggtttttcagttgcatggccagctaaacccagttaaccttccagaacctgaggaagcagatgcagccgcaatagacgacggaggggcagtctttgaggtcaacagtacacagaattagtcagttagccgtcgttagatgctagactaatttcttttggttaacattcctaggagtaggaacatgacatatggtgtaaggcctataatgtcaaggcttctgacgtgtgtgtgtgaagtcactcttttggttggtatttgtatgcgggcaaaaac

SEQ ID NO: 148744 - DNA, 465 bp, Zea Mays
agcagtttgacagccaagacttcaaggatttttgcttcttcatcggcaccaagcttgccttcgcctcagtatatcacccgcagtccaacggagttgtggaacgcgccaatggaaaaaattttcacagctgtcaaaaagatgctcctcgacgaaaaaaagggcaggtgggccgatttgttacccgaggcggtctgggcgctaaacacgactgagtgcagggcgaccgggttcacccctttccgccttctatatggatcggaggctatgaccccacaagaaataaaacatgggtccccgcgaacagttccgtcagccgtccccgacgtggacgagcccacttcgaaggatctcatcgatggagaccgagtctttgccctacaggctctaaataaataccaagcccagacgaaagcatggcgcgaccacgcagtcatcccaagggaattcagcgaaggggacctcgta

SEQ ID NO: 148745 - DNA, 2049 bp, Zea Mays
cattgtcaagtactatataccacatgctttggttccaaaaggcgacaaaacttcaaaggcgaaatcttaactttacgatggccctacaatatattacctgcaagcaaacagaagcacgcagccaagtttattttccttcttgaggttcagctctcgcttagtactcgacttcccagcgatgctggtggtagtcaacagactcctgggtgacattagggcagtctgacaaattgactctcttcagcttaggcaatgttgatgcatgtaagatagccagtaacctgtcagtgatcaaggggcaccagcaccacgttaaattaaactcctcaagttggtgaaatcctacaagcataaggatcctgatttggacatcactgattccaatacgattcaaggtcaacttggttaggttggggcaagactctctgaggcacaccacaaagttgcccagaacgttcgggcactcgtccaatataagttcctgcagagctccctggcatgaacgagctacagtgcaaacatgcgtgtctggaaaatggtaggattgcagttcaacctttctgatcccattgtagtgcaggatgtcacataaaatgtgttccatgtgataagcctgaacagatgctggaaagccaacaagcctaagctccttaagccctcgacacactatgttgacccattacaagatagttctctcacagtgctccgttctgatcaccttcagcttgggacactcacaggccacagctacagcttcatgaagatcacgtggcgtcattatgccaaaatcacatgaatccataatcattgattcaatagttctgctgatcaaggacatgacttctattacagctttatatgtaaaaaaaatggaacctgacaagttcaatggtcctaagcttactgggattcatggcatcacccaatagacacttcaagccaagttctgtcactcctctgcagtcattaattaccaaatgccttagcaatcgaaagtgaattctagcaaggttaagcattgcccaggtcccataaacctgagcatttcaccaggatgagagtagagagctggcgaaataagcataaatgatggaggactgatgattgtcttgcaacattcatatgtgattctccagccatcatgcccttgagctcaagtttatccagataaggttggttcatcagtaaggacaagatggcatcttgcccaatttgagggcagcttcccagagtaagggactcgagtctcttggcatactgcataagggctcttagagacgcctcagtgatggacaagcacccttcgatatggaggaacttcaggtttctgcattgcttagcaacctgaggaagaccatcgtcgctgattgaagactgtaacataacgaaattttctagtgcagggcagtttgaagcaatgatcctggcagctttatccgtgagagagaggcagtcaacgagacaaactgacttcagattgccgcatgcactgcttacaaaatggatagcactatcagtgagccgtggaacaccagcaacaacagtcccacatggtgcacaacaaagaccaagatcagttatcacaccccttgcacatatgttgacaacagcggctgcaagcttgacatcatcaacatcagacatatgcaggcaagggtgaacaccttgatgaacactgaaggggccccaaaaatctggccgctgagggaccaatatgttggcccgtctccaacagacacaggcacatgactggcgatcttctgggtttcccacatgcctgaatatttcagctatgcaagcttctggcagctcatttatcaagtcctgtggaagagttcttgattgatacatggaagaacctgcgcttaccttcttacaagcttcataagaagttctaaggcagcttgattgcctcatgtttcctgtcatacaaacaatttcgatcagatttggtggtatgaagaaataatggactcatatgaagtgaactgggaaaattttaataaactattggcatgcaaacaactcttccaaaatccaaacaaagaa

SEQ ID NO: 148746 - DNA, 775 bp, Zea Mays
gttagaaacaatcagggcgtgccaagtgctcttggttcttaacttcttatcagtattatgattgaaagcaaaactatatgttttttctggcatgctataaccatttttcacgattttgggtcaaggagattgaggcgtacaatattgcatgctagactgatccctattgttgctatctgaccttataacatgctgtcgtattgtgtatcatctaaaattccagaatatcttggaatggaagttgacaattctcacgagttacaagtgcttttatcgaagctgtttttttcccctgtgattgatgcaattgtttcatgagcattgtctatacatgtcatctcgctcaacgggtcaaaatttgtttagaccagcattgcacattgttaagatcatcagcattgcgcattgatgaggtgacttgatgtaaggtcaaatctaatcggttatctcccgtgcctttttattctgtatgttgctacaataccacattgtttacccaaaaccatattttgggggttaatttttggaagtcttttggagatacttctaggcctagaataacactggtgtctgttgtcgttgttcgaactttccatggccccaaggaaacgtgtgaaagtgggaatcaaacacgacacattttaaaggcagcctaggttgcagtaaaggagactgtagcagtgaaagaagccgtcaccgccatatagtggtcctagactcctagctccactagccaaaactgccatgactcaaatcgcacctgacgaaaatcatg

SEQ ID NO: 148747 - DNA, 475 bp, Zea Mays
cttcgcttggttcatcggttgttcgtgttgtgagcaggagagctgttcggtttagaccttttgtttaggagggattgttcaagatattaatgctgccttcactgatcttggtcaagaaatctgaagattagaggagttcctactaaattacagcaaaagcagtcaacttgttgcctgtcgaactgttctgttccccagtgacaaaactcatctgtttctgccctgctcatttttttatggaattgccaagtaggtgggcctaagatgtgacctgatgaataaatataaacagctggactgaaccaaccgaggaacgattgcgtggacgctggatcgtagatcagatcaattgcagtgaacacttctctaatcacgtttaatttacttctgaattgaccaatcaaatcacatgagtgtactgctgagggtatattcgcttttagtgtccatattgttttttagagaaaagggttcc

SEQ ID NO: 148748 - DNA, 661 bp, Zea Mays
gttcggcgcttttggtttgcggaatcgcggtccgagcaacgaatgcgggatctgttgcggtcgtgtggaaggagtggggtttgtttggagatttgggcatttggttgcctggtgctgcgcggtgaggctgggcggcgctacgattggcggcctctgcggggttggtgctgtatgaatgtgaatcctgggggccaatagcgagatcgtcgcgttctgatgctaatttgggatgtttgggatcaggggttcggggctttgtagtttttctgtaaccgggtgagatttcgggtgctctttcaagctcgtttgcgaggcactaattctgatcgagttagaacaccatagcagatagatcatcactgttttgctttgtttacctttgaggtcgcggtttttttttccaggagatagtttgagaagagcaatttaggatctagtttgagaagctcaaccttttatattgcaattttgatgcgattttgattagtatcttttcatatttattcatttaaatgtttgtgagacgattaaatagtgctgctaaggtctacatacagattctgctgtaaaatagtatgcccaggggggaaaatctgtgtaagcatgtatgcaattgacatattacttctttgtgtcctgattcgcttttgttgctccaatt

SEQ ID NO: 148749 - DNA, 546 bp, Zea Mays
ctccctgagaaattggtttcagcatgtttcctggccagacagggtttagtacacctcaaccttcaattaaaaaaatggcatgggaagtatctcctctcccagtgatcaagttaaaaaaacttacagccatgacatgccccatgtgcaaccaaaacatcaaacaatgttttttttgaactttaaatacagcaggggagatccccacggtaaggattttattaacaaatgaaaagaacaccactgcacaaagagggagaggggaaaataggagccagggagctacaagtctacaactaagagaactgcacaagctgtacaagcagaaacaagaccaacaaagttaagctaggacagtaagaagggagaagaaactaggttttttagaggagccggtcagacaatgttgttgaccaaatttctaagacgtgctgcagatttcgacttacattaactccagagaagtgatatttccgacctccttaggtatggtcccgccaatcgaattccacataaaatcccttcaaaagaaataaatactcagcatct

SEQ ID NO: 148750 - DNA, 341 bp, Zea Mays
ccataaattccctgctaaaaatactacattatgtatctacaagataaacatatttttactaggttgaagtaattcctggttgctagatttcgcaagaaaaagatccaacgacatatagctagactttgtagttcaattattaatgtggcgaaagctcccaaatgaaaacaaaaaaccaacgacatatggccagattaatctgggtgtgagtaattattggcattcttaatctggcattcagactttcgcacgatgctcccaaatgaaaaaagctccaacgaacaccatacacagagaagtgtaaatagtcggctagaactgctatttagctattaaaaatc

SEQ ID NO: 148751 - DNA, 670 bp, Zea Mays
ggaactagatcatgtcgatgacagcacggccaagttcttttttaagacaatgaagaggcttccaggaagaactggccatggcctttatatttcatatatgcttctaggatagagttatcagttatgactatattatttctttttaaagctagtatatgtgaataatttaggaagggattagatcttggtaatcacatcatgagttattttgatttaacataatggatagagttccagcttcaacccattcatagaagagacatcataccacaactattacaaatttgtggcccaagctaccacaaccaaatccacgtgcctaacccaagagtcagaacctcaaattattgatgtatcaaccggcgtgacccaagacagcacaaggcatattttgagcgaatctaactgaaagttagataatgacacttggaaggcgcataaatggcttgactcaggtccacagaaattactaacaggcaaggacagggaattccagtgcaaatgctatttgctgacataaagtagagagacctgacagactgccctttagatatgtacactcatttatatcctttgtttcttcactctttatgatgcaaactgacaagtgaccacaaaaactatcatgcaactgtacaaggtgttacaggcctttgagtttattgtgcag

SEQ ID NO: 148752 - DNA, 559 bp, Zea Mays
gaactgtcgttctaccatggcttgaaaatcttgaaacttatgaaaaaacatcagacttgtgcttaataagatagatccaggtaaatttgctagaatcatcaatgaagcttacataatagtgatatcaccccacagactcaatggcaggaccccatacattagagaagatgagctccaaaggagaactagacttgctatcaaatctagtgtaggggagttgatgacactttgcctgttgacaagcatcacaaactgaagaacaagatgcctcacctaacaaagggagtttattcctactgataacttgtttcattatagtcgacgaaggatgacccaaacgactatgccatcgtgaggaggggactttggtggcaatgtaggttttcttattgaatggtgctgggaaagggtaaagaccatagcgacactccccttcaagaatgacattcttcatgtcctgatcctttatcaaaaaatagttcgggtgaaactcaataaaagcattgttatcgatggcaagacgatgaacggaaataagatttttttgagcttttggaac

SEQ ID NO: 148753 - DNA, 534 bp, Zea Mays
cctcaaccatccgcgagcttcacgctttgcgccgcgccaatctcggccggatctgctgggcccgagctccctgtttgatcttgccgcccgagggggatctacctgacctggggtataagagaaaaagcacgccgcatctgcgcatctcttgcttgccgcacagagagagtcatggagaacgagaagcaagagataaatgggggggggggggaagccgccacactcgatctacgaattcgcagccgatcgatgcttggggatgggtctcggaggtccgctggcgtgtgaagatctcgtccgatcgattcctcggatgcgtgggccacttgggtccagggaatcgctcaccggagcgctgggcccaccatggactgcacgtctctgtggttcaggcactactccgcacaatcgtcggtaagaacctccccatagtttcgctttcacctctgcatggtgtagcatcttttgtttcgaagttgaattagtggataatctactggtcgaataccggccatggtgccaccacattgggtg

SEQ ID NO: 148754 - DNA, 433 bp, Zea Mays
tacatgatcgcctcgtcctcaatttcgttttgcgcatgaagtcaaccgcatccagtagccggaacggtggaattcgggtggccggcgaaggactccgccgagcggtggtgtctctgcgcacgccgccgggggggggggggggaagctggctgctggcgtaggattgatgacggaccgatggccgttggatgggaaaggagcgcccgagattagatcgtgtgaaccgttgattcctaacccttggatcataatcggacgataggcacgtagctctgtattcagtagatccgggccgtagatcctcaatccgagggcggtcatcgtgtactggttgatgatacctagatctaatcgtggcccttgattcgcgatcgggcggccagaaaccgtgcataccccttcgcggtcacgcatttgcatatgagcccccgac

SEQ ID NO: 148755 - DNA, 2421 bp, Zea Mays
ctacagctccaagagaattccaatatttattaatcaacaaacaacatgaagcattaacattacaggaagatatataccagttcttttctcatctgtttcttcagcagactcataattaggatccatatgtgagtcaacatgcacttccagaacttcattaatcctgcgggttctttcctcagaatcgttgagaagctgcagcttttctacatattctctaagtgtatgatacagtcaaggatcacaaaataatgaaacatgcagtacaagtaatagcctatagttctataatacaaataaagctgtacttgattattatgaatattcgcaattcctgagcagaggattatgagctattggaagcatgcctctagcattaaaagacctttggcgaagctatgacaagaaaatggagctgacctaagttaaataaattataagtgaagcataaccaatcttgggaaggggtgaataatggtccagaaattaagaaatgacaattgagcaaatgaaaaacataaaggcatcaccacatcatagtatggtctaataggatattcctttctgcgtccagtttcacttgcacggtcacgaagatgcccaagcctctgcttttcattttcaaaccactgtaaaaattaggataccagtaagtcacgtttgagatcttttcaagaaaaactgatcattgtatacatattgagttgtccttacatcattcacttttacagattgcaatatctttgctttctctaggatatccccctgcattaataatacaaaacaaacacaaatcaaacttacacaaatctgatgggccaaaacgaaattagatcataagtgttcagtcccatgtagcagtaccacttttagtctgctaatcacgccacacttcatgctctgccttaaacgtttgcactcttcctacagaagcaaatgtaaatatcaaaaagaggtaaaaatgaatagccaatgtagttcaactaagagttccgcctctaacttgtaaggaagaactacaatttgatcatactctcccttgggttaaaaagtatgtgatcatagataccaagcattcaacaatccaaactagacaataaaatcagataaggactttaaaaatgcaaccactgactctgggaattaaacatcagacaggacactgagcaaaagatgttaacctctgtaaaatcatgattagatattgtatccattgtaataatctcctttttgtttaaattcaatatctcgagtgcaaaatttgtcatcttctttccaatgctatacttttctggaaccttgtgcgttcctgaagaaagaaaatgaaaaaaatgctcaccatcaaaacaaactataagaataaatttgaagtaaattatcttaccagtaacttttactagacggtatatgtcttgtttctgatacacatcagaaattttaatcctcacaaaaccaccatgaattttgtctgagaatttggcatcatcaactaaatcctccatcaggctgcgcctcataaaaatcaaatttatattatgcatgtcaattgctgcatagtcctcaagattaacttgggtatctctttccatctttctatggatctttctcctcttatcaggagaaaattttgcagccatgtcattgtatccattggtatctacataagctgaattgagatcgatagtcacttgtctactatcagttactgttgaagtctcattcataagaaaatgcatttccaaaagctttaacatctcaaagtgagcaacccgtgctttcctgaacaagcgatgaagtctcaagtcacaaataatttggcttttcctctgaggatcgcgaaggttattcttcttgatataatcaagcagaagagtctgaacatcaaactgagaaatgaaagattgatcgccatctctcatatgtcctacaaactccagtagctctggtgatgcccattttgtgtttgctggcaagggcactgattcatttggtacttttgtgtctactggcaagggtacccatccatttggtacttttgtgtctactggcaatggcactcgttcatttgtcacttctgtgggaacgctctcagtatttgtaattggaagctcgaccttttttgcaggaacactacaatctttatttaccttccggcatttttgaccctttttccttgaattagttcgccttcgttttcctgaggagcagtcagtaccagcatcatcatcattattagcgtcatacaggtcatcagacgactcatctttttctttcctagcagaagtgctaggaacattccatctagtcttggcaatagtaagttcttccaatgttaatgaaagcttccctttcagatctaaccaatatagcttgaacaggtactcccagctgagtatgtcatcaaaatcaacctgcaataga

SEQ ID NO: 148756 - DNA, 631 bp, Zea Mays
caaactgattagttagcatatcaccatggtaatctggaagcagagcagcatccccaacttctctttgttacattgattgaacggacaagaaaacgaagcatcagcatcatactactgtccaatgtctaagctatcggttagcgcatcagtttcaatctttcaaagcgtcattggaagtcaaaggctaggtagcactagcacaagttgtttctagcatcgtccagatctgatgcatccgttaaacaggcgcacgagctcaaggccttcaccttggatcagggatgtgatcgacgacgcggtgcgacgtactcctcactagtaggagcattcactgtgatctcctgttgcttagcttagctgcaagaacgatctggaacatagcgaccggtagtatgaacctcctttgtcctcgcggagctagcggttcctctggcgcttcgcggcgccactggcggtcgggaagcagcggccggcgccgtccggggtgcagatgtccggcacgaaggcgccgctgtcggggccgccgtgttgccagtggaggccggacgcggtcggcggggagggcagcgccggcaccgaccactggatctccggcacctggccgaacagctcgttggcgtcccgctcctcc

SEQ ID NO: 148757 - DNA, 1115 bp, Zea Mays
ttttgttcacgttctgttttccatgccccttttacttttctaaaattgtcttcatgacttcttcattcgttacccgtccataccgcctcctctaacaatatcattcttagagcatctccaagagaacccgtaaaccaacactaaaaaacgttttaaggaaaaaaaactcattttaagccctccaacagttccctgttcttgccccaatattgttcgcgtcccgcatcgactggcttgcctcccgtaaatttgcgtgtgacggattcttccccaatcgccgagcgcgcgcatcagctgatggttcccgcgtcggcggcggtgagagaaactttagcggcgccgttcgggatcacgcgttcgctcgtcgagatcctccccgacggcccgacctcaacaagcacgccccgaacgccatcgtgtgctcccctcccggcatgcctctgccatgcctccgacccgtcatcgcctggtgcgtgcgccacccgcacctaccgcccatactagctcccacttgctcctctcttgcggcgacgacatgtatgcaggttgcggtaaggacttgaatgcagctgtgacggaaaacgtaggagcaggcagtgattaggactgcactctgctcatcaagtaccttgttctttcctcgtggtggcggttcctgctgatggggcaaacacaggagcaggcaatgataaggacttgcctgtgttggtggatgacaacagtttcattttcatgaacatttgcctgacttgtcgcctagtttagacttcttctattactattttgtgtgtctcggctattgttttgttttactattttcaattctacttatatatgatgaatgatactcaaagaaccatgatagatgttgcagaaggcgagaattctgtaaactcctccactgcattactaatcaactccaacaaatcaatttatcagttgacctcccatgtttaagcataactgattaaatgaacattctgtagtacagaccattgcaaaataaaactagcttgatgtcaacttgtcaagcaggaacttaacgaagagaggccaggccaggcctcaacagagcaaaagtgatctatcagcagaattgaaggcatcaagcgcaa

SEQ ID NO: 148758 - DNA, 448 bp, Zea Mays
caggaatcttaggccaaaaactctcgaaatgaaatcgtctcttacccaagcacacctctctgacttaagttaggggacagtgatccaaaactgaggtagcattactgtgaagagaacaattaggaaaataatcttctcaatctgtagtgcagaaaacatgatccaatttcataagggtaggctcatccctctgattcgaccaagtgaaccttctaccaatcaaaggaatctcctttagctccaaggaattaacaagacctctgaagttacccttcattgtcctgtttatgttggaattattcttatcctcttctttgaaaatcaggttaaaatcgccacataataaccatggccccgcacactcctccctaactgatcttaattcatggataaaagcctgcttaaggctatcctgatgaggtccatacacacctgtgaaccaccagca

SEQ ID NO: 148759 - DNA, 1056 bp, Zea Mays
ctgattgcataccacaagaaagggtatttgtttgcaacagatctaatccaataatgaagattggtagtttgtacaaggatatgaaagaattcagactggctatcaggcagtatgagattaataatgagtttgagttagggattgagtcaagctcacctttcagatatcgagcttattgcaaaggaggtgattgtccatggagaatcaatgcaaggctacaaaatgccgggcctcccacagtcgttgtgagtaatgttgtatcacacattgtttctactttggatcatgaatgaaattagggaaagtcacaatgaattttttattgtgtgcatgttacagttatcgtggatcagcacacatgcacttctagtggtcgttgaaaaacaacaacacccaccagctcatgggttgcatccctagcactgccattcctaacgaagaaaccacatatgggagctaaagaattgcaaaataccttgcaagagcagcacaattgcacaatttcttatgatacagtgtggaaaggtaaagagaaggcccttagagagttgtatggaacatgggaggacagcttcaaattactatttagatggagagaagctgttttggaggttatgccagactcagtgattgagtttgatctagtagttgaagatggaaaattatatttcagcagattcttttgtgcttttggcccttgtcttcaaggttttcgtgaaggttgcaggccctacttaagtgtggattccacagctctaaatggtcgttggaatggtcaccttccctcagctacaagtgttgatgggcataattggatgtttccagtggcttttggtttcttcgagtcagagacaaaagatagttggatttggttcatgcaacaacttcgtaaggccataggcgaccctcctgttttagccatttgctctgatgcatacaaaggactgacatcaacagtaaacgatgtatttccaaatgctaaaaaaagagaatgcttccgccacctcatgcaaaactacattaagcacttcactggttccgagcacatgtatcccg

SEQ ID NO: 148760 - DNA, 594 bp, Zea Mays
cgggatgttgtcggtgcggagaggcagatgaattcggtctctcccatggccaacaataatcacagcagggatgtaggtactgcgttctcgagcacgggctcgcattctccgggagtgctatcgttggaggtgatgcacaacggtgagatgcgggggtcgtcgtgcggcagatcggtgagtcgccaaaatatgcttgaggaggaagcaggttgccgtccatctcgtgcttcggttagcttgaatgggagtcgtcgggcgagagcatggcctaccatggcttgccctctgaccactccttctcccaccgacccgaggaggaagacaaacagtgtggggggtccacatgtcagcggactaaagtaccccgaagaagaaggtagacagtcgcagagcgtaacagagcgccagcctatgggcctgggcagtaattacggattagagcctcagcagaagttcaatcgttacaggccctacaagccgcctaatggtcttgtggcctttttcgaaaagtctttctcgctgttctcactccgtagagctcctagtaccagtactcgccgcttaggattcccatcctacgctgcagcagtcaag

SEQ ID NO: 148761 - DNA, 533 bp, Zea Mays
cttcgaagaccacatggcgagagatgatgatgcggtgagagagacgaccaaggccgaggtatcctttgtggtggggagaatacccaaggaagacacatagggtagagcgaggagataatttgtggggtgtagtgggggtgagattaggatagcacttgcagccgaaaacacgaaggtgttcgtacgaggggtgtttgccaagtaaggcgaagtggggtgtgccggaagcaagtgtatttgtgggaaggatattgagaagatatgtggcagtacgagagcagcagcccagaaagtgggagggatgctggcttggaagagaagcgtgcagacgacattattgatggagcgaattatgcattcggccttgctgttttggggggaagtgtaaggacaagacatgcgtaaaagaactccatgggaggagaaaaacttgcgagcgttgaggttgtcgaattcgcgaccattgtcacattggacaccctggatggtgacaccaaattgggtgcgaacataagcgaaaaaatttgtaaggg

SEQ ID NO: 148762 - DNA, 715 bp, Zea Mays
agcaatcccgttctaaaccctgtcagcataccatcgggttcagtacactttgaacaccaatcggcaagcgcaggaacgaatgaagctgctgttggaaggatgggccgccgcgtgcgcaggcctaatatgcaggtgacgggagccgaatggatgacttgactaatgaccgtgggccgtgtccagtatattgttgtacaaatactcgatgggatgctgctaatagagttgtcgaataacagaacaatattcgtccattccttccgttcttcttcctcggatctctcctgctatcttcctcatatccggtgacattcacgacgaaggtgcgtgacaagtggtatcataggtcagttcagttcctgatctggcggcgccgtgctactacactcgacgagcgaagatggcgggtgcgtcggatccaagcatcactgccgcgctggaggcgcagtccaagtccatcgaggtgcagtcgcggacgctcacggctcagtccaagcttcttcaacagctatgtgaccgtctcgagtcgcaagaccacaaatggacccatctggagaggacagtggcgacgaatgaagataacatcgccaagttacaagagaagctaggcgatggtgagattgaagtcttccgacaggagctcacgcgatccgtgggagcgctggtcgacgcacaggctgtagaattcaagaagacgacattggaccgagtggat

SEQ ID NO: 148763 - DNA, 982 bp, Zea Mays
acacgagttcattgaaaccagtcatctgtcccatgaattcatacaagccgcttgcctgaaatttagcaagcaagccctccatgactgtctgaccctccatataatcccagtcaatcacctgatgcttatgaaacttggtgtcatgagagttccatagaaaacatcaaactgcagctgagtatgaaaatattgaatatttatgtcacatgaaagagaaaactggtcaacagtccttctagaggaatattcagccatagaaaacctcatcttagatgagtgtgtggcgcatcttcagcatccaaagagacactgcccctagcggatgattgggactcggaatcggtgacagggttataatctgtgtcatccgcacgacaacgcttggacaaaaaaatgccctgctaacttctttttcagaccaacgaaaccacagtaataaaatataaaataatcccaacaatcagaagacaataacttgaaaacatgtgcaagatggataagctgatctgctagaatgcgaacagtccacgctagagggacgaacggtccatgcacccacgaccggatggtgcgcgccacctaggaggaaggtccgcgaccgtccaggacgacttttgaaacccaagacgcccaattcatggagtcacaaaattgacaaaggtatccatcaaaacccattcaaatttttgcaccatattctcagtaagtaacacaagcaattccaccaatcaaatccataatttcactgcccaatttcagatcagagaagaaatcctagaaattcccaaacttgagtaaattgaataaattttgtgggattttgaaataccgagatgaagacatgtcgattgaatctcaggagatctcccgaacagtccatgcgcaatttcgatccaccatccgctcaaaaacgacaagattcacttttagcttgtggagtatgagagaggaaggacaagctggagagaatgacccccttttc

SEQ ID NO: 148764 - DNA, 714 bp, Zea Mays
atcagcacaacaagtgcgtaacagcacccaagggtgcatagtcgtacaagagacacatgttttatccaagcaaaagtcgccttagggtgcagctggatcagcagaacaagtgcgtaacaacatccaagggtgcgaagtcgtctaaaagacgcatatttttatccaagcaaaagtcacctaagggcgcagttggattagcacagcaggtgcatcccaaaggtgtgaagtcatcgccaagacagacgtttataccctagcacaagtcgcataaggttacagtcggatcagtacaaacgtatctacgacacctaagaacgcgaagtcatccaatgatgcagctgagatagcacaaatacatttttatattaccaaaacaaaaggcacatcatatttcaaatacaagatgcataataagcacaagaaaataattcaaatacaagtgtccccatagccgtcctttggcgaagtggtggcgagggtagcgttttcgcttgaattcaccaaagaacggcgatggcaacacacatctcacattgactcttttttcgggataaggccggcttcacggaaattgaacaacatcagattcaactttcactgtcaaaaagtgcctgtagacccccctctccaaaacatgacccggccgtcggagcaaggatgatccgatgggtcccctcctccaaccgcatttcactccggagacgggacatctcc

SEQ ID NO: 148765 - DNA, 608 bp, Zea Mays
attggttgtagactcaacagcggttccacactactcttggaaggatggaatacttcgatacaagaatcgaatctgggttggtgctgattcggatttgcagcagaagcttttggcagcatttcactgttcaacagtcggaggacattatagaatgctagtgacatatgctcgacttaagcagctctttgcttggaagggcatgaagcgtgttgtacaacagtttgtcagtcactgtaccgtgtcccaacaggcaaaggcggatcgggccaagttaccggggctgttacaaccattactcgtcccgactgctttatggcaaattatctcgatggattttattgaagctcttcctcggtcctagaattatacatgcattttggtggtggtcgataccttcacaaatatgctaatttcttgcccttgcgccacccattcacggctctgtctgtggccagggtgtttcatgatcatatctacaaacatcatgggttgcctcagtcgattgtctttgatcatgacaaaatcttccccagtcatttgtggcaagagttatttcgtctggtagatgtttgtcttcgcatgagctctgcgtaccatccacagtctga

SEQ ID NO: 148766 - DNA, 424 bp, Zea Mays
ggaagatgccccagccctcacacgtcgcggtcacacacgcgcggatctcggccacaccgggttctccatggcgtagcgcatatattagagggttatgggcacggcgtggtaatgtggagtggtaatatgagaagatatgggctggaatgggccttgtaatcctaggctaagtaatggcaggtgagatataaggcggggaataattctgtaaggggtatgcacaatttggttatcaaaggatcatcttcctcgctttatccccttctccaagctttcttctacccgagcacctctcctctctccgatccccatcctaggtgctaacatctgatatcaaagatagctcgcatcctggaacctgctcacccattctcggccatcagccacgttctgctgctactttaggcatggatgctgcgatgca

SEQ ID NO: 148767 - DNA, 292 bp, Zea Mays
cgacgattggacctgctacgttgtttggtgcaggatattggcctacaaaaagatgtcatagttagcagataagtgttatagaaatgtgtaggttgtgttagagttatggccaaaacggattgcgtttgaatagatatacgtgaagaaaagcttgtccaacattgttgagatggtttggagtctggacatgtccagaggaaaccttcagaagcacaatgcatagtgggatcctaaggcgctatagtaataagaagagtagcatgggaagtttgaagttgacatggaaagaggc

SEQ ID NO: 148768 - DNA, 457 bp, Zea Mays
tccgcgcccagcctctgcaattctcaatcatccctagctgggctaccactgcactacgcaattaccgctaccaccgtcaggtcaggtgaacgaaaactctcaggttcgtagccatctcgggttgagctgatgctttgtggacttgttgcttaaatttagcccaccacacgaaaacatggcccatgaaacgctccacaaatggctcaatatgcgtatagacagaactgaggttcctgcacgagcccatgcggtcatgcggcacagtatcactacgcgtctacgcctccgccacagtcgctagcaatacgagtaccaaacagcccagagagcaaggactagctgatgatataaagattactctgaacgcaacgacatgtagcaagctgtgacgaaaagcagtagcactggtgggtccggtgctttcttctgaacctttgaagacataagcgtatctgag

SEQ ID NO: 148769 - DNA, 601 bp, Zea Mays
aggaggtgctccaagaggggctggtcgccgtcggagatggcgtggagagcagccctgggcgtgggatgggctgatgcccccacgccgtgccactggattcggcgaccgtcgcgccaaaacgccatccaatgatcgtcgaggttctagaggatgggtcccagggcgcgcaggaaggtgacaccgagcacaaggtcgtaacctcctagcggaatggcgtagcaggtgatggggaagacgtcgggacccacgctcatgtctacatccggggcgcggccgaagcagggcaccttgtcgccgttggcgacggcgacacggatggcggagtagtcggtgaagaggaggccgaccgtggccgcgacgtcggcgttgatgaagttgtgcgtggagccagtatccatgagagcggtgagcttgtgcccatgaatggataccgcgacctgcatggtgttcggtgtgcgcactcctgccagggcgtggagtgacacagtgggctgcacgggttccggtggagactcctcttgcgctggctccgtgtcgtcctcgtccgccacctcgaggtagaacaggcgctggcagcgatgtccgcggacgaagggctcgt

SEQ ID NO: 148770 - DNA, 345 bp, Zea Mays
ggaacctgtcgccgtcatgggatctagggatcacgtcaatgaaccaagtgcacaggcgggaccagcgatccgcgtggatagaaaggatcctggctccatggcgagtgatccatgacaaagaggagagaagaaacacagagatcttggcatgggcatacctgatctaaatcggagtgggcgggatcggcggctggagcaaaggcggagattgggaacaacagaacaaatcacgttctctggaggcaagccattgagagagatggcagaggagagcgcgcgacatccagtggcgtggggcgagggtgaggacggggttggcggcggcggaattggggaagaggaggc

SEQ ID NO: 148771 - DNA, 1212 bp, Zea Mays
cccactccatcgtcacaagcgtcagtctctaccacaaaaggaatattgaaatctggtaatgcaaggaccggtgtggacaccatggcctgcttcaacctctgaaaagccatctctgcctctgatgtccattggaatgcccctttttgtaacagcctggtgagaggcctagcaatggcaccataaccctgcacaaaccgcctgtagtatcctgtcagaccgagaaagcctctgagatctgtgacattcaacggcttgggccacttgagcatagcatcagttttcttggggtcagtcgctaccccattcccagaaataatatgacccaaatatgacaactccttttgaccaaagacacatttcctttctttgagatagaatttatggtgccgcaaggcagtgaaaaccagcctgaggtgctccaaatgagattgccaattggggctataaaccaggatgtcatcaataaagaccatgacaaacttgcgaagaaaaggagctaacaccaaattcatggcacactgaaaggtggccggagcgttggtaagaccaaaaggcatgactcggaactgatagtggccctgatgagttttgaatgccgttttaaactcctcggatacacccatgcgtatctgatggtaacctgaagtcatgtccagactcgaaaagatttcagtacccgccaattcatccagaatttcctccaccactggcatgggaaaccgattcttaatagtcatatcattcaatttgcgataatcgacacaaaaacgccatgtaccatccttcttttgcactaagaggactggagacgcaaacgggctcacgcttggagtgatcaaaccagatttcaacaaatcagccacctgtctctcaatctcggtcttatggtgaggggaatatttgtagggccgagcattaactggtatggatcccggaagcaaaggaatgtgatgatcaaatggccgagatggaggtaagactgtaggtgcctcaaaaatatccatgaattctcctagcaacccttgcaaatctgtatgaatttcgttgctgctcgctgccgtcacctcttccagcagagcaaacacccagatatcatttccacgcaaccaccgctccacttgtaaagaagatacctcctgcaccacttgttgttttggatgattccccaccaactggacctcgatccctttgtccacaaaactgatcacctga

SEQ ID NO: 148772 - DNA, 523 bp, Zea Mays
actagaacatgcctctgaattgatcaatagagttatcttaagcatagtttctgtagtttttatttacctggaatacttaagagggtcaaatctgcaaggaactagatataaaatctccatgccgcttatcggtcatcctttgaatttctgaagcattagtttttaggtgtaaaatcgtggtgctgcagattatcagacctattgattttatgtagattaggaaggacgcagatagtaaaaacgatactaatttagtgtgctaattagattaaggaacccaaaattcctatccaacaccctaatttcgcttttctaaattcatttttattgttgaatatatatgtttgcttgtaccaattctgggaacggtcatggttgggtaccggagaaccagaacagtccctttggaagaaaaagagagaacaagaacaacatttatgaagcatgacaagttgtctggttctaattattggagattttgtagtttttcatttatcgaagcctcaatcgacttgcacatcgg

SEQ ID NO: 148773 - DNA, 540 bp, Zea Mays
gagatcgcggatccactatctaaaggagggtgatgctaacactaagttctttcatttacaggcatgttatcgaaagaaaaagaatttcatttccaaacttgaggaagatggaagaatggctaccaatcatgaggacatgcaacaaattcttgaagagtatttttgcaatctgttgggggctgatttgcagaggcattttactattgatttgagtaattgtcatagggctgcgatggatctaagtgctttggagcagcctttttcggagaaagaggttagggacaccattgcttgtctcccttctgataaggctcctgggcctgatggttttacaggaaaattttacaagacatgctgggacatcattaaagtcgacataatggctgctcttaactccctttaccatggaaatgccaataagtttgatttgctgaactcagcgtatctcattcttctcccgaagagagaggatgcttcttcagctggtgattttcggccaattagcttgattcatagttttgctaagttggtcactaagat

SEQ ID NO: 148774 - DNA, 669 bp, Zea Mays
ctcttcttcctccagttgtgggggcgtgtggctcgagctcatggttggggcaccccttcgcttggtcactaaagattgtgctaatcaactcttttctagacacatggtcacttgtgatttccattagctcggcgatagccttgggcctaccacaacccatattgtgcaccaacgccttattgggcggtgcagtagatgaatgacccgacaatgatagagtcgctcatgctagacagttcattgtagcacttggagaaaaaatggaggtagtcctttaggctcttgtttgaccattgcttgtagctatttaagtcctaggggttgccttgatgttggcacattccttagaatttcctacaaaaactttctctaggttagaccaccctagatacaccctttcgggaggtactcaagccaagctcaagttaactccatgaggtagatggggaggtactagatgatcatcatgtcattgcttgcccctcttatgcgacaagcaaggtggtagtgctcaagccaaacgatctggttggtagtcgcattgtactttgcgatgttggccgacatatgaaattgtcaggggaactcattggtgcagtgagcattgccaaatgtatgaggccccgattggaccttctcactatcatggttgttgcccgtgttggtccc

SEQ ID NO: 148775 - DNA, 446 bp, Zea Mays
tttggggaggctgagagtaaacttgttcattttgctggtgaggaactggttccagaacctaaggatgatgaagttgttgtgtttaaaagcttctttagagcagggcttcggttccctctatataatataataggtgaggttttaaagaactttgaaatataccttcatcaactgacacccaatgtaattgttagacttagtgtctacatctgggccctccggagccaagggatgagtcctaatgtcgaagctttctatcgagtgcacgagctgcattaccagacgaaggccagggcagatggccttcatgagaattttggttgctacaattttgcgtatcgaaaggatacgaaggcaccggttcttatctgccgtactaagtggccaactggttggaaaagtgaatggttttatatgaaggcagacgagaaaaagagggagaagct

SEQ ID NO: 148776 - DNA, 358 bp, Zea Mays
tagggtgttatacttttggtcactaaattgccttctttggactaataataggtgcaccaatgaatttaaccttaatatattaacaccttttaaaggtaaatagcaagaatcaaacctaatagaagatgttgctttgttattcttcttatagctttatctaaattccaaagttgatttcatgttgatcaaaaatgaccattttccttcacaaaactagttttgtgggttgcaaaggtcgccttaccattcttggaggtgtagctcaatccttctttgttgagagaaattctttagctacccaaaaactttagcaagtggcgtagactttacataatgcatgagtgatctcattacttcc

SEQ ID NO: 148777 - DNA, 2342 bp, Zea Mays
tgcttgaagaggtacaccgacccgtcctccttcaggacgggctccgcatgtcctacgaccttgctgcaggaaggaactcgagatgatagaagacctctgagagccgtggtaataaacaaaatcaggtgcaccaaaaagagaacgacatcgtccaacggaacattttttttttgaaaaaaaacattttttcccactcttgcaggagatcagtcctaaccttcagaatgctgagattttcagatcccccaatgcagccgacaatttctccaagtacctttcctcttacaatttggtttgtattttttgcatgctatcgtctctgcttgcttattctaaaaacgtcatcttgtccatctctgtactgtagactggagaccggttcatcggctggagctctggatgaagtgcccacaaaccgcagacgactcaagttccgccagctaaatggatccgtgtttcaaagcttcagaccgctcatgcagaatctgcatgaaaagccttcatcagaggagagactcatcacaggcgaccactcaaaagtgcatgtatttatggttgagtcacctgaaccaggtgctgaagagagagatgtcatggtagacacgtccgacaacatggagaaaggcaagctcaccgttcgcaggaaaagatcagtttctgaagaagcactgtcacgttcgtctgatgctcggtcagcaggaagcagcaggggcggctacgactccgaactggatatctacgtggacgcattaaccacgatggattctgaagatttcagtgctccggagtctggagcaagagagcaagctactgaagaagaagaagaagagcagagatgcaatggcagtgtcaccagtgctgtatcaaatggcacacgagatattactaagaagaccaaggaagtcaaggagaactccaagaaaatagcaagcaagaggtccaagtatgttggcagcatggagctcactgcttcaaaagttggcattctgccaagggagctctccgagaagcatgcccctttctctggttccctccggtacatggcgaagcaactccttgaactgaggtatgatggcactcaagacagcgaattatatgacgttgaagcagacggcgtgggacgtgatgtcaagtaccaggaaatttctgaccatgctgttgaagctaaggagagtgatgctgtgcacaaaattctgtcaggttcaccctatgatgatgcgggtttaggaaaatgcccgcaggaagaaattaaccatgggcaggagcatgatgttccacctactgacagtccacatgattcggcccctgatgaaggaaatgggtttcaggactccaacatggcctacttggtaggcatcatcacatcttccagttcccaagagggagaaggatgtacaagtactgcactgcatgagaattcatctatggcagtgctcaaccatgttttggaacatgctcaagagaggtttggggaagatcttgacaaggaagtggatgtggacattcatacagaagccatttctgagaatacatctgataagtgtgaggacttgaaagaagtcagcatttacacggagcaggtgaatgtggaagatatggaggaaatcaatgaatctgatgtatatgcgttggacgatgaaagagccgagtacatagaacagcaagtagtttcagatggtagtatctcttcaccggtttcatccaagcaatcggatgatccttgctggataactccactcaccctcgcagatgaagatgatacagtggcatgtaaggtcgtcgacagacctgaaggggatcatgttatattatcagaaacattcaagggcattgatctacctaatgtggtaactgagtcagtaatcaacagcaaacatgacatgccaaataatggacagtactatttacatccaaaagctacttttggacaagatctgtgtcttggcagctataagattgttggagaaaatggggaagttccactatgcagctcaaccactgcgactacaactccagaactaactgtaaacacagagacaaagcatgagtttcatcaagctgtgtatcaggaaccatcgaattcattcaatagcagtgctgaagtttttggagatccactagctcccgactccagagatgatgcaccgtcagtcatctcaagctttgattggatgctcaatggtgcaacgcagaagtcattcaatatctttccttctcatccaactaatggaaatgcagaagaaaatggttcttctgaagatgtgccaccgcttcctcctcttccaccgatgcagtggcgaacaaacaagatacagactgggccatcaccgttatctgcgaaa

SEQ ID NO: 148778 - DNA, 1185 bp, Zea Mays
cttggagtctcttgcgcccatacaagtttgatgagagttacaactctagaaacagcacaaggtaggagtagaacacacacaagagccaaaaagaataacacccaaagtcacaacacgaacacacaacagtagaatagcactatctctctagaacaggcgctcggatcgcttcagagtgtctcacaaatgtgtatgagtgaagcacttgctcttggtatgcttggtgtgtagtaggggtcaaaatgggggctacttatagccccaagtcccctcatagccgttgcacttgccctccaaaactgctctgcgtagaggcacaccggaccggtccggtgcgcaccggaccgggaataggaacgggtcctccgggatcttgattgaggccttccaaactaagctagcactagacgatccagtccaccaccagaccatcacatgtcagccgctcgttgaactagctgttgcgcgccaagtagccgctggagctactgtagacggtctactgaattataaaaataattcccgaagctgagcaattcgtacggagccagggtctggtgcaccggacccagggtctggtgcaccggacccagggtctgatgcccccaaatccttgaagtcttctggggggctctctgcgaacgtggtatggtgcaccactagaccggtccggtgagccccagttcagaccaactttagcgcttttgagctaaacttccctaacttgttttgaatgatcttgggagctttcctatgacttagacaaacatcattagagtgtaatcaattgaacttagtcaaggaaactcacatttttgttgttctttcaccaggattttcattttagctgaaactaagtccaaaaggcactttttctctacaaaatgtgttagagtgcaaatacaagtgctagaagcattgtaatagccatctgcaacatatctaaaggttcaaacctcatagttttaccattttacacatagttgcatttttaggccttgctttggacttagtgtcgggtaccataattagggataccccaattactccctaaccatacctagaaaacgtttaaatcacaaagcagcacacagacaactttctctaaagatgtagcaggccgataacatggttcagccgaggcctcgtctgctaaggggcacggtcacgactcgctcgagcccc

SEQ ID NO: 148779 - DNA, 1094 bp, Zea Mays
gtttgggagacttcttcgaaaagccacagaagctacatgtgaaaccttttactagaagccttgctaatttgctaaagaaacccttactatatcgatgggtttataagcttatttgtatgtcataatcggtggtctttgctaaagtttttcatttgaaattaaaacaattgtttgtttctcctctcactttttatttattaaattaatgctaatatagtgtactactactccatctaccctagaaccaaagcaactcgaattttgtcccaaattaagatattaggtatttggatatattaaaacattcattaaatactcaaccttatttgggtaagggacaattaatatcctgcgtgacttgggccaatcaaagtatgtgttgtcttaggccattcttaatgcgagtttcataagggtttcattcttattaaatgatatgacacataagcaaagtagacgacatgacatgtaacatgatgaagagagatatgagagagtttcatggtgatgaaactctgtttacactgttttctagataaatattgacatggcaccttggaaacagtgtaatgaaacccccattgagaatagccttagggcatgtacaacactgagacaccagtttagtttttcaagtataagagatgactaagagattgcatggtacatccctgagacactggatcatcaatgcagctaaaagacaacgtgtatggaaagtcgtgaagagacgggctcttcgcgaagtgtccatctcttgtatttttcacttagccccttagagactactcaagaaaccatattaaatggtgttgtacatgcccttatatatgaaggagtacaagcaagcgacttctgtcatatcccttaaactatcctagaaatcctagaggaagcttatattgggatccgagggaataatctcaaaggagataaagagaaaactcatgtaaacactaggatgcacatagtagagaacacacttgtggtgccaaatataccgtcagacctttatatatatgttgcctacacaatttatctcatacccgtttagatgtagatattggagcatggaattagaaattggaatcagc

SEQ ID NO: 148780 - DNA, 525 bp, Zea Mays
gttaacatatcctaaagtcaaaatacaaaagatataaagctctaaaataacctattctttaaaatagattgatttgctttgaatttccaagtgataaagtgtcaaagagatgaaatcatgtccaatgatgtcatgcaataacgcaaatacaatacaaaaaagaaccaattcaaatttatcaggattccagattaaaatatcgtaccaaaccagaaaacataattatatgaggtgatgacataaagtaaataccacatagtgctgtcattctatcattcacccattgaatcaccactagcagaacatgcaaaatcaagtaaacagtgtgtactgtaaaaagcttggttgactaaagagctatcaatatttccaaatccaaatatcatactgaactgagatgttaacggtagaatcaaaagaagtgggtggagaacaaagttcaatatatatgttaaatagagtcttgttgtatcccagtttataattggttcaatcactgttatagacttagtttatagaactaga

SEQ ID NO: 148781 - DNA, 1084 bp, Zea Mays
tccatgccctcgcctcagtgccccctcctccctgtcccgcacgtgatgccccaccatgacagccgccgctccatcaacgacctcgccctccttcctccaccgtcccgctcgcacgaatctccttcgttgcgacactatcgtgggcctgcggtgcaaggagatcgccacgctcgttgttggggcctctgcgctctcctcctggcacgacggcagtcgtggtgagccccgaccctacttcattcttgaaagcttggcacctccgcgcgggattgggtgggttggttttctagcagactggtgaggttggtggcccgcgccttctacgatgaccacgatgggtgcaacccgccacatgacgccaacactcggtatgccgtgcagctgctcgacgtctgtggtgagccccgaccctacgtcattctcgaaaccctagccgcagtcgttcctgacctccgcgtggtgtcaagtgtgttcgttttctggtaggctggcggaccgtgccttctacaatgaagtctctatgaacggcgacaaccaaccattgaatatttgtaagcttttttgaccttttatatggcctggcacttcaatggtagactagtatagaaggcaaattaatgaaattggttgcaattacagatagtgtgttgcaaatagcttccttccaatgtgaaaattgtttttttttcaggcagcagatccaggattttgatgcactgcagcacacagtctttaaagatatagcggttcacatatgtgggagcgagtcaaaaacaaagacatgcaaatgttgatattttaaaactgaataagtcttactttctaatttgcataaacgttgtttgtgctttaggtatttcagtaatgccagtcatccaattttatcttttactaagttcaacattgagatggaccataaaacatacctctgtcccaaaatataggtactcctaggtttgagtcaaactgttttagttttgaccaggtttatacgaaaaatatctacacaagtacattgtaaaaagttattttataattggtatagcgatactaatttagtgttctacatgttgataatttttac

SEQ ID NO: 148782 - DNA, 480 bp, Zea Mays
gccagcgagagttgatctcaacaaagttagagaggcaaagagatttgccgtccttgaagcgcagcatgagggatgccttggaagctataaaagcttcgattccctctttgggaattaccttgttcctgtcataccaacgaacgatttctttcatcaggccgggaccaaatgatgaacaagaatggctatttgtaacgaacagaatgactactaaattttgcaatttcctttaagagcgcgacctgatacagcattactaagctatcaacggaagataacacgaagaccaagttttgtgtgtggtgttgtacgtaggccccctaacttgcaagatctcaaaaggtaaagattatcctgcacagttgcagatctaagtagtgaaaaagtttttgcattatggggagcatatgtcagtgtgtgttagctttctttttttttcccttctagtgcgaatttgtcaagacatattttccatgaatc

SEQ ID NO: 148783 - DNA, 404 bp, Zea Mays
gttctctttctctgtagagcaccaacgatatgaaggtcacgaaaaaaaattcagattgctagcttagcaagtgatgcatgttctgccactcctaaagctggtgtccatggactaaaatctgctggtgatttggtacttactttagggatctcctaccccaggactgtcgtgcccgcctggaaatgcaaagcagagcgtcagcaaacctgcggacgagcaggttgggacttgggcgggagggatggatgcgtagcaggacctcctcctccgtcgcactctccggcggcggatctgcttccatggtggtgtccgggccggcggcgcagcaggtgaggaaaggatctaccgctccgtgctctgcaccggcctccaggtggggccatgggtcagaaagagagagcggc

SEQ ID NO: 148784 - DNA, 682 bp, Zea Mays
ctgtttcattcatcacacctttttcattagactagactgtagttccgcgaccaattcacgatgccgtgcaggaacgggagattattacacagctgtggcgcacaaaacgaagctacccagccaccgccgaaagcgcttttgaattttcctgtggcagttaaaggttgctcctttgggatgggggtgatgggcacggcagatttggctacagttagtgacgcatgacagggaagaagccaccatcctatgaatccctctagtggacgctagtgctattcggtgggcacggccggtgatcggcttccgtgttgctgctttggacttgtacaccagaggagatcttggtggcggctgcaatgtggcgtcagatcgggacgcatgatatgatgcaatggtcggcctaactcgaaagtagatccgcggttagttgattggtgggggcaagagcactgatgaaggatatacaaaacaatgacgatgctgatgttaaaccgccaaacagtgagcatgtttagccgtcgctttcctcatcctaacaactgtagtatattaatactgatttcctcatcctaacaactatagttattaatcaaatgggccaagcgtccatgcttttgctgccaccattactaatgatattgctgcgtggaaccgacactttaaacacttcaagaatagttct

SEQ ID NO: 148785 - DNA, 541 bp, Zea Mays
tttcgcgctcatcctgggccccacgccgttcctcaccccgctgctcgccatttagcgccaccaccaccaccacgcggggctcgtgcggtgagacagagtgggagacggcggccgagatcacgggcggggcgtgagcggaccgggggagcacggacgcccgaggattaaatgcggggagggggagggcgccgcggggcccagcgacagcgagagagagaggatgagaaggaagcttggccggcgagcgagttggtgtgggggaagactgaagagcctagctaggacgggacggggaggacgaaggcagagctgggtgggtgggtggagcggagtgagctgtgtcgcggcctgcgtcccccggagcttgccacgtcggcgcagaccccagtcatctcattctgggctagcgatgcgtaggtcccaccggacagtgacgtgggtgggaatgtgggatccgccgactgccctgttccgtgcggccgaggcatgtacccgtgtagacgggtggctggtggctgcgtatgcaggtgggcccggaaac

SEQ ID NO: 148786 - DNA, 1941 bp, Zea Mays
aattcagaagagtatctgttttgggagcctcgtgagcatgcaaagcaagataagtatgttcttaactacgggctcaactttgtcagcttttcttcattctttttattaatgaaaaaatggaccttcttgctaagcttataccctctggaagcaaaattatgactgatacacattaaattgcactgtagccatttctgtttaagttaatctgcatctaaatcttgccagttttgttcttattttcttgcttggcgtggcaagagtttgttaatagacttagtccatcatgtgcatggactagtcagtactacattttgttattcacattcattactatcctttgcgattgagtatgttttatctgttatataaacttgctatagtggatgcagtaacatgcatgatgtgtccttgcacctgtactgacttaacatgtttcactattgaggtgtatgcaatatgattttgatctttcaacaacacaactctacaactttctttggcctgacgcaatatgtttgctattcctcgaccattaaaataaaatgtcattcatatatccgaaaatggtactagtaaattattcttacttctgcaataccttattttgtatatttcccaaatatatggtaataaataatataatggttaaaagtaaatgttcacctaaatgtaataagttagtcacctgttgtttaggcaattattattgggcaaaactgccattaaatgggctacatggccgtttaaacagtttaaatggacacggctgggcaccttgtagcatttaaatggtgtttgtactttgaacgggccaaacagctgtttagttgaagaatgaatagggtgcaatattgtgctctgaataaagggtaaaaggggtagcttcatttgtttctaccagatggaacgaaatagggacactttgatgcaacatgtttaactttagaatatcaaactgttcaagtccttgttctgcataggttgtggtttgtgcaagcttaaaaaaatatattgtcaacatctacaaaatcaaataaatgcaatatcaaaatagatagcatggtgtatcgaatgaatcttgcttgatattttagcatttttctacaaatttggtctaacctagaaaagtttgacttgggacaaagctacaacgacgaaacatgtaagttaggtttccagcactaaattaaatgaattctcaggttatattactgcatatgattttgtattgttactcccattcatggattgattattgataaaaagtagttggatttatcgatgctcataatcaaacccagtaccagtaacatggagctatctatgctttgcaatctgctgaaagatatttatgttctgtgtaatgcataaccaggccgagactccaatcacctccgagttccgtggtcaatacaaggtctactgcattggacattcataagaaggggaagaaaggtacaaagctgagcacgtcagctttggggttcaaggttcagagcacccgtatcatgatgggtgagatcgcgcatgttgacgagtagatgtccagactggtatatatatagttaagatctatatctatattatatgttgagctacgaaaggcgaccaattcgtgtactgatgcacatagcttacacttcgcatcatcgttttagcacagaatttttatcatggtaggcgagcttcctgaagaatgaagatgatgacagtttggcggctgaagtgacgagaattcaaattgagcaactggcaaaggttttggttttcagcaggcttggttgtaacttgaaaatcgtataatgtttgttgctgggcggattttgtgcgaagcattgagcctggaaggttcaagattcaggtctaatttgcagtatggaatattcgagtgcttgcttgtgaccgtttcctgaaacagtcatctggtgtatagtttcc

SEQ ID NO: 148787 - DNA, 1275 bp, Zea Mays
ttaggctttaccaactgaagtcacaattcactgatgcaggcaactagcagatgacagaaattgcgattacacattacacaaaaatcagctaatcaagaaagcaaacaggaaaagcctagattacacataacacaaaaaatcaggtaatcagcatagtagcaggcacaaacaaggtcgtgctctgctcctgcctcttgatgttgatggccttgtcatcaggttcatgtatatatatatcttctctctgaagctatgatgtctgaaaaaagtgaaatgaaacgcatggttgaactgattggtttttacgagctcgatcgattcgtttccatgtcacgcagcaagagagttgtcgccactgctggagggagacgtggaccctgaagacaccaagtcgcagtggaaatgcttccggctgtgggacaactactgcgtgaagaacaagagatgcgtcgacgagtgcctgggcgtcgaggggaagggctacacccacggacactgcgagctgtggacgtgcgtctgctgcaagaagaatggcgaggatgaaatactagctcctagcggctaggcggccctaagcagcgagcagaatcacccatcagtgtcaaacaaatgaagcattagggggggagctcaaatggtttccacatttcgctgtattgtagcgtttgagcttggctaaactttttgaggctacagatcgattgagagaataagacataataagtacgcagtttttggttcacccagcttctttctaagtgcacttaacatatcgtcacccagctttttggttcacgcagttttgaaccaccccaataataatcatgccccagtgccccacgtatacactaaaaagtaagaaccagaccagttcactcattcttcaccattaaaccgacagttttggaccaccgcaattggcaaatctgttcaagcagaggctcttgcctattaccttatcccactcctattaatctcgaaacatagtgtcagagtcttggccctttgcctttcctaaagaagggccgcttgtcgtctactgttgtttaacagttgagctatgatttctcaagtgcgtttggttttactgatcttttactctcccttttttgagactagagagtgcttccccaccttttactatttggttataggctttcactgttcacatggacacttatggattgaaatgataaacttgtgggcgtcttttggggatgatgagccaaaggaatatagattatctcactaactcctatatatgctccaaatctg

SEQ ID NO: 148788 - DNA, 422 bp, Zea Mays
aagtgatccaaagatcaagcttgaggccatagttttcagtttttcacttatatccgtctcctcacaaggatctccacagaatggagactcttgctatccttgcacaagttgataagagctagaactccaatagaagcaagagagaggaagaaacacacaagagcgcaatcacaccaccaacagatcgaagaacgcaagcgcaaaaactgaaatagagctctcttgcgaatactggtgcttagaccactttgctgtgtttctctaatgttaggaatgaaagcacttgctcttgagtgaattggtgtgttgagggggctggtttgtgggtctatttatatacccaagccaacaaagagccgttggaatggcctgtccagatctactgtgcgtgggtgccatagttgttaaggcgtcagttaagc

SEQ ID NO: 148789 - DNA, 345 bp, Zea Mays
gctgcagtgagaatatgaaattattaattcctgagttctctttcttactgtgctatatgttccattgtgatgtgaatctcggatttgatagaacagtgaattgacgtacaaaagacaacactgctctcattgaaatctttcatggggatgttgctctttaggtagtgcctgtattgtagtaaatgaagttgcaaataaaatgaattattataaggggatatgtatattaagaacatgctggaattcatgtcaaatcttaggcgttcaggagcaaactgaaaaagctagaaagttatacatttgagagaagtggcaatatatttggatgcaaatttgctaagcttg

SEQ ID NO: 148790 - DNA, 607 bp, Zea Mays
gcgcgccacgcctcactgaaaaagcgcaatggcggatggcgcgcacatgatccccctccctattccctacacccacgatgccaagcacaggcacagccgaccaaaggagcggagactgatgaatgataaacagcctgctgctgcctacctgcctgcgtatgaaaagcgacgagcgacgaggatcatgaaccaccatgatggcggcgtcgagatcgggatccatatgcatgtgagagcaagacgtgaccatctcctaccttttacagctcacaaagacgaagctcggaggagctggtgaccagaccttggggccatgcatggatcactttcccaacccttgttatcgagtatagagtaggacgggcggataaaatactagatcccgagctcggaaaatatggcgtcggtgcaagtggaggccaatcatggccacggtgctgccggctctccaccttggaagctttatcacaacccccactacaccccgcggggcaggggcacccatctctcctcatcctgctgctcgccctctccttgccaagtccgcaggagtcccgagccccctcctatgatcattgcgctggacgacgaggaggtcgaccaaggg

SEQ ID NO: 148791 - DNA, 277 bp, Zea Mays
agcagcgtaggtggatagcagtgtcaaagactcatgagctgatagagtcctgaaccctctatcacctacatccatcaccctgacatgagtgtgagtgatgtagtagcaagcacgagggggctagcacactcttctggtctcatacaggggtcgaacgtaggttcccaacgcatgcagaacatcttgcagcaggttagggaagtgccccatctcgaacattgatgtataatgttcggtgacaggccatatccccacgaagtggtcctattgttcaccg

SEQ ID NO: 148792 - DNA, 391 bp, Zea Mays
tgtgcccgtattgacactaccagatatacaccaagatttcgtcatcttctgtgatgcttcaaggcagggcttagggtgtgtcttgatgcaaaatgagaaagttattgcttatgcatcccgcttactcaagccacatgagcagaattaccccacccacgacttggaattggcagccatagtacacgctctgaaaatatggaggcactacctgattgggaacaaatgccacatcttcaccgaccacaagagtctgaaatacattttcactcagccggacctcaacctccgtcaaagaatgtggcttgaattgatcaaggattatgacctcgaaatccactaccaccccgggaaggccaacgtggtagcagacgccctcagccgaaaacctttc

SEQ ID NO: 148793 - DNA, 437 bp, Zea Mays
ggactgccgctggaaagtgactaccatctattgcgcctatgcaatccttgaagtgtggccaaaacctcgcctctcgcaaacgaggatgaatctcgatgaaatttgggtctttgggcttgattatgtcagatgacatcttataaagtgcattaaggacatcactatacttgcggctaattgtttccaatgagtgaccaaatttatttcttatctgcctaaacgattgtggacccccacatgcccataagaatatgccaagagcttccatagtactgacaccccggcttggaagcagaccataattttgtaccaacgtgccatgcaatcgtctaaaaacagttcttcgcatgcgaaacatgtcgaaacagtcgttactaatctccaacgttctctgaacccattgaataccagattcgaccaatgttcttctaggagcc

SEQ ID NO: 148794 - DNA, 753 bp, Zea Mays
ttatcgaagaagcgtaactttgatgacagtcctccaaaagtcttgaagaagatagttacaaagcggaggaaagtagtggaccccccacgacaggttagaatttatggtcaatggcaatatttcatttttatgcgtgaaattatgttgtgttgaggtttgatttaaacattgagttgtgattatgcagatgtaaatgtttacgctattcattgtatacattttttcagaagaggcttaatgtgagatgcaatccccaagacgtattagtaagcatccagatattaaatgacagatagcgcctagctattgcacggagggggttctccagtattcttgatatgagagttgacgcactcggcagtagatctcatttagcttggctgatggaaaagcttgaccataatgacatgacaattcgagccggcccagggaaggagctcaaaattacaaaggatacggtgcactttattttggggttaccaaatgctagtggagggacggccttgggcattgatgaagctgttgctgccaacaatttaagggctgaacttgctttatcgaaagaagattttggggttgcagctcttcaagatcgtctgaggaaagggtctgacgatgatctaaccatcagatccttctttctgatactgttcaataggttgttgttccctactgccagctggggaataaccaaccatgaggttcttttaactgaggagatggatcgtttccaccagatggactggtgccagc

SEQ ID NO: 148795 - DNA, 320 bp, Zea Mays
tagctatgattcatcttgattaaaatttatactgcattattttaaacaattcgtgtttgactcagttttactcttgaattttaaatctaacacacgtcagtctgaattgccgcgacaggagtcgcgaaaatctaatcggagttccagggttatgatttagatcgaggcgagaagcaacagaccaaatttaatggatttcggcttcgatattttgaattgagagatatttttaaagggtcgaaccaaaataagttcgacaaaatatttgagaaagatttgacgtggtgactaatctggagtcagatgaattcgtagctgtt

SEQ ID NO: 148796 - DNA, 453 bp, Zea Mays
gtgatgccaagtttggagcccttttgtgatcagcccatgaggttttggactaagaatcttatagtaaagttaaagatctttcaaaggagaacaagtttagtataagatgttagtctttttgctgtgtagaattgacagaaaaaggaatgccaaaaccctctatcagacttaaactgtgctgtttcagacttctgaaactgagtttttagtgtttttcaccccagtttagagcatggtaactcttggtatttgcatccttggtcttgggtgattgtgtaaggttggtagtgctatggttggggtccatgtttgaccaacttacatggcatggggctaaataaaatcgtcaaataaagggggactaaacagcgaggagagtgagggagcagcagaactgaaacagctagcctcaggatggcattaggtatctgaaaaagatcaccccctgctgct

SEQ ID NO: 148797 - DNA, 382 bp, Zea Mays
agctaatattgaacacatagaccaaatcatacaaccaaatcacaaggcatatagagaaggtggggggaaaacagacctcctgaaaagcggcgaggagctcaaccaaatccagacggggcacgacgctttggtggtggcaaagtaatcctcgttgtcattctcgatgtctgccgagatgggggattaatagactgttcgttgagctcaacctagaagacctccttctgtggcttgcctgtgttttccctttgtattaatatatagcatcggccagatgggggattgaagggcaccgtcgatgggaagagactaccgaggatggtaagatagcgcctaggatggaaggggctagtggtttcggcttggatttcgtccacctcca

SEQ ID NO: 148798 - DNA, 504 bp, Zea Mays
ctgtagcagagtatattgagcagtttgacattttaatgcatcagttgctagcacatgaaggacagttaaccccagctatgatcactgctcggtttgtggatgggctaaaggatgaaattaagtcagttgtggtgattcaacgtccagttgatttggacactgcctgttctctagccatgttgcaagaggatgtgttgatgcacactggaaagagggaaaataggagggtggagataagtgggtattcaaggccaccgggaaaacctaattcagtgggagtaaattcagtagcagtccctgtaagtcgtgggtttccaccatatggggaacatcgtaagacaacagctagtggacataaggcagaagagaataaacttgctgcactaaaatcctatagaagagctaagggtttatgttttaaatgtggagagaagtggggctacaaccacagttgttccagcagtgttcccttgcatttggtcgaagaaatgtgggcgatagctg

SEQ ID NO: 148799 - DNA, 483 bp, Zea Mays
gctgagcccggtcagcggaaatcgggcgcgcgcggagatctcgcccatggcctattcggtcagcaggatccgattcacgcggggactcatagtatcagaggtgagcggaggtaatcaaccggcctaagtgccccccgaatttcccggtggacggtgatctcgcgagcgagtcgcgtggaggagaagactcccaggtgcagtcgggcggcagacaggttggcccaccaggaagtcacacaggagcggcagtgagcgcgaggcggcaaggctgactagtggaccccggatcggcaggcgcaagcgcgaggagaggggggccgcgtgtccggaatagtttagctgggccagaaatgaatttagtcggcccgtgtagcatcttcttcttttctttttctgttattcccttttctttcttcctatttctttcacatttcaattttttttcttttatttttaattcccaatttgaacttcaaataggaa

SEQ ID NO: 148800 - DNA, 569 bp, Zea Mays
gctgcatctccacaccaagttcctgctccactgtagtacggaagtccaccaacggaaaggctcccaaggcatgcctgatagaaggtttcaggccctgacagaactggctcaccttctccatctcattaaaagccacatgagggacaaagcggaccatcttgttgaagcccacttcatactctctgacagacttcttctcttgcttgaaagactgcaaatcaatcttcattttctccaggaaggtgaccgggtagaacctcctttcaaactgcctgatgaagacatcccaagtcagaactcctagtgaggaggagtgcgctacctgcacgcctctccaccaaatttgagcctctcccttcagcagctgtgtgccaaagcgaacacgatcaccatacacaatctcaaagacattcatcttatcctccacgtaagttagccaatctaccgcctcgaccggagtaccactgccatcaaaagcatccagcttcatgcccatccactgcatcagagaaagaccactgactcgaagaggcacctcagcctcgccacctggagcagcacccgcaggg

SEQ ID NO: 148801 - DNA, 428 bp, Zea Mays
cacgcatttacgcgcgcgtactgcagagccccgcatgcaagctgtcctcaacaacatccaggttggcatcctctctcctccgtccctccccttcgccgcactagccgacgcgtccacctcggctatatatacacgcgagccccggacacgccgcctcgcttactcatctcaacttctccaccagtcaagtccaccagccagcagctcgccggctgcctcgctcctgctctgcactgcactagtcgccgctcgagctacccggctgtagcaactagcaagattcgttgggtccgtgaacgtgcagacgcaacacgctagactgtctagacacacattatcagattcgttctgcagtacaataatgggagcctgcaactcgtgcgaggccacggcggtggcggcggcgccggggccggcgacggcggagg

SEQ ID NO: 148802 - DNA, 410 bp, Zea Mays
tggcgctccacctgctctgcggctgctcgtccgggccctggaactaccttctcacctatgtcggcgtcgaaggggacacagtggaatcactatcgagtaggttcggggcgagcatggatgccatcgagactgccaatgccatggccggccccgaccccatcaccgcgggaaaggtgtactacatcccactcaactcaggtcagtcttcccaacgtttgcgatcattttggacaaatgtttctctttcttgaattcgttgtgaaaagactggtagttcctttcgtctcaaagtttgttgggttgttgcaattgcaagcacgggtctctaatgatcgcaaataattgctcgtttatgaagtacggatcctctgatttattggtctgggcttgtgaggcgtaccacggaattc

SEQ ID NO: 148803 - DNA, 933 bp, Zea Mays
gggttctacactcggagttacgaaggctgtagatatgaaattcaccaataagttcgaggttggtcgcctgcaggtatcagttcttgatccgaatcttatcccgcagttcgtggatgttgtaattggtgatttcatttatgagcttcaatttcgggtggaggaaaatattgatgaaattaacccagagccaatggatatggatgatactgactttggggaagatgataaaaagtcagaggataatggttccagtaaacaaaattttgggtcactaactttggaacaatacaaacagcatgctgtttcaaccgaaaatggggctacagggagtaacattgggaagaaagttactgaccagggggtgcagacactgttgggttcacaaccaagtgttgttgatacacatattgacagtggaaaggacacaagtggggcgctggttccaggatctcctaatgtctctacgctgagtgctgatctgaatatggctgatgttgggattctatctcctgaagtactggctcttgctgctgtgtcggaagctaacaactcggctaaattacttaggagcaaaagaagggcaactacaagtatgaaggactctgttgctcgggccaccaaactgaaagctgcacgcaatttagactcggcgttcgctgaaggtacgaactgtgactctccactgttttttccctcacatgcttgtattgttgagaatttggcttcccttggttttggttttaataatgattcaagctctgtcctcaagtttatagattttctctctacaactgttaagccatcaagtaaagccgataaacagaatttagtggagaaagcaatagattttgaggaaagtgaaatgtatggggaacaagagttggagaaggtaattcttaagaatatttgcaatgacattctggatgaatttat

SEQ ID NO: 148804 - DNA, 288 bp, Zea Mays
ggcggttcgtgtcgctgcggatgagagctcgctccctggactttacttaactctactctgagtctcggatgctccagagtccagacttccgggattagaaatccacgcacatcgccgtgcacgcacgcgacggcggagatgtccgtggccgtggggaagcgggtgctcgatacgggctggctcgccgcgcgctccaccgaggtcgcgctcaccggcgtccagctcaccaccacgcacccgccggcagctgaccccgccccagccgcgccctggatgagcgccgccgtc

SEQ ID NO: 148805 - DNA, 375 bp, Zea Mays
gagaaatggggtgatccccaacaggatcctcactcatacagggaccaaatattagtgaggctattacacagactcaaggtccccaacaaacctagctcaactgtggttgatggttgcaatcgtaaggcctagctcatacagttcctttgtaccagccatgcaccatagactctgcttgttcttaagctcacacaaaattgtgttaaccgaagcagaagccccctaaaaaacacaagcatttctatgtttccatataacccagacgctagattgtcgactccttttttgtgttccttttcaaaaacttgaacaactcaataatatcaaaacaagcttttcattacaataagataagaaacatattggcattcttgt

SEQ ID NO: 148806 - DNA, 606 bp, Zea Mays
gctcatccgggttctacacctatggtatctatgagcataaggaaggatggcctgatttcggcttgggagagacgagggtggctttcaagctgcggaaagacatgtaagccatagttactgtttttcttcttgttcattgaatgtctgaaactctctaaatgctgctgtaatcgcaggtttcattacatggcattggctgacgacaggcagagaattatgccaatgcccgatgaccggttgcctcctcgaggacagccattagcataccctgaggctgtgctccttgtggacccaatcaaccctgaacttagaggggaggtaagcttccctgacagagataaatataatacatgtctgttatccattgtaagtgtctgagtgcattctgattctgaacgttgcttataatgtttgtcaaggttgacgacaagtaccagtactcttgcgaagaccagtacaacaatgtccatggttggatgtcattcgatcctccaattggcttctggcagatcactccaagtgatgagttcaggacaggaggacctctgaagcaaaacttgacttctcatgttggccctactatgctggctgtaagttcaatcgtta

SEQ ID NO: 148807 - DNA, 655 bp, Zea Mays
tgatcaaaatacacataatttcaggacaaagggagtacataatgaaccagcaattcagcggaatggacccacttgcatcgtcaaaagtatactactcgctcctagatacataatttttgctatgcacctagatataggtcatgtctaaatacatgcaaaagtcatgtatctaaaaaagccaaaactacttataatttggaatggagggagtactatataagatcgaattggtgaaagagcacaaaataactcatatatggaggccagaaaataataatatgcctaaagtgacagcttgtcaaaacaatcccaaagcactatatatccatgttcttactacatattctaacccaaacaagaatgagatggtggggtgatcttctggcaaatgcactgagtagcttactcggatttcaaatgctagcacagaagtggaaagtgtgaatggagtttcttgccgaggcatagtgatggcagaatttcatgatggtttttagttacgctagctacactaagtcgtgaaaggctgatcactgaggaagtttatacttcaggccccacaaatttatttttcaaatcctctgaaattactgagctacagtcaaaatgttattacatcattcaggcaccgcatactttccaacatgctttgtag

SEQ ID NO: 148808 - DNA, 364 bp, Zea Mays
caagaacggttctttactgcaagccaaatggagagcttgcagcaaagaggagcccaggacttccaaattcgtttccatggagcaaagcggatggaactaaggaaaaaggtattgtaggccgactttgctagagtaagaatcgttcctagtaagcctccaaacaagctgatcagcatcattctgcttcagcgagaaaccttccatcaagtctcataagcggagatattatgtaagaacctggacagagagctcctcttatgtcagctacccaacgatgggggtacatcacttgatgatcctcttgaattccctagttgatcatttttcagtttattgccaaatctagctgtgttcttgtggctgt

SEQ ID NO: 148809 - DNA, 400 bp, Zea Mays
gaaaacgtccataagctttgcttattacaacaaaatacaccccagactggaggcaaggctaacatagcagttcaacaaaagtaaaatacagacggaagagaagcagcagacaacactaacaaccatgaagccaactacccagaaatgcgacggtctctaggtctccaaccataggcctgacacaacacttcacttgccatcgttctgatgagcttgcttccttgtaccaccatcctttttccttctctttctaccggatagcccaggaatccagccagaagaagcaaataaaaatgatgttagagggatcaagcaaagttttgtcgccaaagcaccaatcatttctggttctccaaatggcccataatacaacaccacacccaaacaagaacagattagc

SEQ ID NO: 148810 - DNA, 540 bp, Zea Mays
gacaaagtggcgcctaaatacatcagacataccctggtgaagtttgaaaccaaaccaaaaccgtttgacacgctttggcctagtttttgtcgcgactcgagctgagtgatagacctgacttgccacaagcttttctcctcaccctaagcatatctaagctcgggactcacatagaaaagataggatttggagcagggaaaaggccttacactggatctttgccaagatacacacgttagggtagctaaacggacgcttggacatggacagaagcaaacatccacgtgttcgacctcagcttgccctcaggagcggctctgaccgcgcccgcgcatgccacaagctccggtcggctcaaccgcgtgcctagccccgcgcccatgcccatgccttcgcctataagaagccccagcccctcggcttcacccttccgcatgcctcacacccttgccaacgaccggacgccggtgatcaccacaaaactgagcgcggcgtcgccggcaagcttgccaaggcctcggccaccgcagtccggccatc

SEQ ID NO: 148811 - DNA, 1196 bp, Zea Mays
aatgatgcaatggaaagagagatcaaggcaccaacatcccccttatggtcagaagagtatccaaggaagacaattagtggaacgacgtgcaagtttgtggggaacaacagcggaaaggttgggatagcaggcacaaccaaaaatgtgaaggtgtttgtaggaagggggagtgccgaacaaggcaccgtgggagcaaaaggcgttgatggtctttgtgggggagacaattcaacaagtatgtcacaatgtcaatgccttcaacccagtatcgtgctggagcagaagcttgaaaacgcagagtgaaaatgactagaacaaataaaaatatggccgactttaccattctactaagagttgtagaggcacaacattcgaagcgaagtgccatgggaaaggacaaaggagaaaggaccgaatggaagcattatcaaactaatgcccattgtcacactagaaacatatgagaaaaagtgggacaaagtagtgaatgtgtcaaattttaaatgcagaggaaaggtccataagtaatgagaaaaatcatcaagaatgactaagtagtatttgtaactagacacgctaacaacatgatacgtccacaaatcataatgaaccaactcaaacaacttggaagctcaactggaggaactagagaaaggtaaatgggtatgttttcctagctgacaggcatgacaaagatcatgcccgcttttattacacgagatagttgaagcaatagacaaactagacagcacatcagagccaaggtggccaagacactgatgctaggtagacacaacaacaatagacatggcacaggaggcaggagaccctaggaggcagtgtgtagagggggatgttatcagtgttgatggtggtgtggttggaggcaccgaagttggccacctagtttttttctcgaaccacgcaggagaggtgcacatcatttcattaaaaagcaaatagggaggccatgggagaaaagagtcccccaaggccaaaaaaatacaacacccactctcacaaaatacaatacacggccatgacctcctagggtcatccgtgcatcacattctaaaaagcccttcatcaattacagtccaaaccaccatctgtgcatcacattctaaaaaatgcaagcattttgatgcttccatagctcccaagtaactagaatcactagggagttaaattatttc

SEQ ID NO: 148812 - DNA, 446 bp, Zea Mays
gtaagggaatagaaagagccaaaggataacgacttagcaacagaatgggaagggatctcagaagacaagaagttcatggacatataaactgaagtgttcaagtaagcaatacaaattatgatgtaagcatttgaaacaagagtattgaggaatctaggggtatgggaaagtcaataccaagggaacagagatggtcaaatgttagcaatttaataatggaagagacaagaatcacaaaagacaagaaggttatggtcagggggcatctacaaagatgtcgcaagcacaagagtgagatcagatctaatagattgagagaagtatagaccatactagaataaaatactttttggcaagggggcatataggagcacaacatagaattaggcgaggtgactaatattttgaagcagaatcaaggatgtggtgaagtagtaatcaataag

SEQ ID NO: 148813 - DNA, 730 bp, Zea Mays
ttctctaatctcctcactatgcaaagtgttttcctagttctcacagggttgctatatctgatggagagggcaagacaccttatagagtattagagttgatatgagggggtatatatagccccaaatgcccaaactagtccatactatttgacttggattttttgtgtgcatcgaacatgtctggtgctagcaccatacatgtcggtgctactccaacggctacttcttcaaaactagccgttagtgtatagacatctggtgcgccactagtgtcacaccggacacgttcggtgcatgcaactggatggagcacagtcacctttttatgacaatgtttcatgagatatttctttatcaataactttcctctctatgacaatgttttctttagtggttgcatctctcaaatcttttctttagcttctcattctctaatgtgattaggtgaatcttgtcaaaaagttttttctcttcctcttgattgcatatatgatcagttgaatgttcatgattcatactcagtcatcatatagtagctacatcaatcttaacaatgttgttaatagcctcatatatttcaatagataaaagctcatgtgtaacaataagattgtcatgatcaattttagtttgagtgtaatcttattttagtgatgcatgtctatcattggtctctccatttgtttcacttagtttgtcatatttctctttaatatcttttagatagatc

SEQ ID NO: 148814 - DNA, 425 bp, Zea Mays
cttaatcttgtcgacctattacagaatcaacggacgtagactctccttcatcctctgatggtgcagggacgccggagcacagtctccacggcggcgctactcaccggcgcaatggccatcacccgctccattgcccaaagctccaaatcgacgacgtctactcgttccagagaatttggtgaatagagtggggcttcttaccgatggtcatgccgtgacgttttctgcccacagggaagtgcgatccgcggtggggcccataactccggtgagaaatcgcggtgacgccaagggtcttccccatcaacgacgccacgacgagcacccatacgcgcaggcgattctccctagccctctgccttggtcagaagtcgacgtgctcgcatatccatttgcggggtatctctctctctgtctctctttct

SEQ ID NO: 148815 - DNA, 328 bp, Zea Mays
cttggtgtcataaacccatacacttgcgtgcaagtgttggccttgtcaccgattgcatactactggccaactggtgtaatagctcaagacagtcaagagtaaaataaagttggtgaaaatatagttgggtctgaaccgctgaagtgagtggagactaataatttgtttttgtttccggtacttgattttactgttttgaccttatttttgtgtcactaatactcatcatgtatttgtagtcatacaggtatagattaaacgaaactcttcatcaaacgcgaattgagcaaaagttgagcggtagataaattgtatatttttaaggcta

SEQ ID NO: 148816 - DNA, 592 bp, Zea Mays
gtaaactaatgcatatcttttattctggaaataaactaatgcatatctccctacaataaaagcttgcctactaacccgattgctagccacttttttgatcactttccttgcttgcttctgctgctccttttgctggatcctggcgcctttgcctctggtactggcagcctacaaatgcatcagtaacatttctcccctccacaagaaacagctcgtccgcgagcttaaaaagaggatacttctgtgtgaagtcttccaattgttcccaagaggcatctgatgctggtcgacccacccactggactaatagttcccaaactcctctattcagccgagccttgaggaccttgtctggtgtcggaatgactctgccatgcagaattttgggtaatggaactatggctgttggtgctgtgccttcaaacttttttaacaaggatacatggaagattttgtggatccgggcacgtgctggtagttgcaacttataagagactttcccaatgcgacttgttacctggtatggcccaaagaagcgaggacccaatttcgacggagcagccgcggtgacacccactgctgtccgctgttg

SEQ ID NO: 148817 - DNA, 298 bp, Zea Mays
atagttgttgcttcccgttacatgcttggggtatcaagcaataacgggaaaattaccagtctcaactccagcattgatagtgacaaaagtaatggaggaagcaccatatctgaaccaaataaaaaatctgttgccccaaaagttagacaagaggcaaaacctcaggtatgtatgctgaagctcataggtctaattcagaagtccgggttttcaagttcctaacaaacattgatattttagttgataaaacctatataaaatatgatttgtaagaaataacagggatatgatttgtgag

SEQ ID NO: 148818 - DNA, 655 bp, Zea Mays
cttgtttcttagctgctttcctgttcattatacaaaataagttattcaaccgcatcacaacctaatatcaatacgacaatgtcatccggcaaggaaaaactcaaattttatgtgacaactcttacatgtttttcaaatcttatgtcgtaataggaacgtttttaggaccatcatacatgtctgaaatcatatcaacaatacagcgttgtggtaccctactgtcatgcattgctccaacaaagtccataaattccggatcacgtgtcttgttacaacagaggtgttgtttttcagtttcttgggttacaaaatcatgattatgcacaaggttaactagatcaatcctaacagatatgacatttttagcatcatcataaattttcctaagctttattcctactttgcactatgttcgacctatgtatttgttccagattctagggttaccatcttttctttctacacatctcccctctctggagcaattcaaccatttgcagtttgtcttttccctgtaccttttcaaaggaaagccgacctcatatgcataacatttatagaaatcataagcatcatcaacatctcggaacatcatcctaaacctaggaactaaactaggatcaatcgaatcaggctgtggacaacataaaatcgc

SEQ ID NO: 148819 - DNA, 674 bp, Zea Mays
ttccaattatagaatacaacattgcttcgatagttcttgctaagggtaaaacttcctgaggtgctctatattccatgaattccctacttctgtgccatccattttagtaagccgatatgatcctggccgagtgacctccgataccatgaacggcccttcccatagcggcgataatttgtgtcgtccttctcccgttagaattcgacgaaggaccaagtctcccactacaaaggatcgatgtcgtatagtcttatcatgatagcgcctcagggtgtgctggtatctagctgactgaattactgcgttcaaccgctcttcttccagtatgtcaatatcttctagcttgatagcttctacttcaactatgttttcgaatatcagccttggtgccccaaacctgaggtcggcgggtagcactgtctccgaaccatagaccatgaagaagggggtgtttccatgcagagctcgactaggttgagttcttaggctccaaaccacataagggaattctctgatccacttccttgcgaacttttcattcttgtcgaagactttcttcctgagtgcttccagtatcattccattagccctttccacctgaccgttggctcttggatgtgctactgacgcatatttgatctggatgctccgttgttcgcagaaatcaaagaatt

SEQ ID NO: 148820 - DNA, 334 bp, Zea Mays
ggattatagaagagaaggttaggcagggaaaacttctattctggatagtggatcttgactcatctgatgatctggttgactcttgatcttccttgttgaggttgatctcctccttttccggtcttggtctcattgagtcgtggtcggtgtatatcatcagagttgggggaatatggttaagatagttatggatgagatagactacatgatgtaggtcaaaatctggttggtcaggtgtgggttaatagattatgcaatccatcaagactctattggttgggttagctcatagttgttattctagagtgggataaatacgctaattagggcaaga

SEQ ID NO: 148821 - DNA, 436 bp, Zea Mays
taacgtcactgcagcctgtgtgacgatcatctaaaaatacccgtagagctaaccgaagctcccaccgcagattccaagagagcgtcgctttgtcccgtagtacttcccggttgagcaaaaacaactgctacttgcactcagcgtaccatatatacaagagcgccgtttgttttttgttcgttgaaatcgtcgtggccggacagggacagggacagggacaggggtcccgtttccatattccatgtacagacctcgcgcccactgctatctatcttgcccagcccatgcaaggaattctttggacgggacacatcggtgagcgtactatgtaaagccttgtcagtcaaaaaagacaacaccggttaagtggaggagcttccaaaggtggatttcgcttggtgtcagtgagggaactgaggccagtggaacgccctta

SEQ ID NO: 148822 - DNA, 594 bp, Zea Mays
tgcaataatctttgtaatcactagctcatcttgttgatgcttctcactcttttcacttctactatttgaatattgcctgatgagattcaacttcatctgtatctcaaccttttctgttgtgctttgtaggccgttctctagatttcagccctctgattatttgtgttcttcagaaatgcattaggctactcgacacatcatctggaagtacaaagttacacgagaagtctacaatttcattgtatgtgtgcaacacgatccaccttattcttcagtcttaggtattggacattccctatattgtctaatgtctataatacttttaccacatctgcatgaagaattgactagactgctgattctaaaaggtggacatgcatttattgcctgatcttataggtactgtcctaaaagaaagatttgataaattttcatcccaagaactgaactctaggatttatctggctgagtggaggctgttaacaaatatggtgcatttttgaggaaaaattctgaccaacagaattatagcctattcaacacgctggaacattctcctgagtttgatggtaactcgttgtgctctgtatctag

SEQ ID NO: 148823 - DNA, 451 bp, Zea Mays
ttggatgaattgggtaatgcttcgtggttcaccagcctcgatcttactgctggttatcatcagattcggctgcttccatccgacacgcacaagacggccttccagacccattccggccaatatgaattccgtgtcatggcttttggactaacaggtgcaccagcaacatttcaacgggcaatgaatgtgaccttggctcccttgctgcgccgttgtgtactagtctttttcgatgacattctgatttacagtgagaattggaatgcccatcttgttcacattcgtcaggttttggagctgctggcaagggataaatggcaggtcaaagtgccgaagtgttcctttgcgcagtctcagctggcgtatttgggacatgtcatttcagctgacggggtagcaacagatccatctaagattcaagctgtcgcacagtggaagacacctggcaatg

SEQ ID NO: 148824 - DNA, 513 bp, Zea Mays
gcccccgacgtcgtttcgtttcgtctcggctcgggcgctcgaccgctcgtcaatctcatcgccctcgcccctccctcgccctcgcctccgcctccgttccgttccactccactccagtccacccgcgacttcaaagttcattcaaacccgcgacccccgggcaccaccaactccaactccgccgctgggaagaggaggagcgacgacgagctgcccggctccaccacgagcagcaagttgcaggcctaaggaacaggctccagcctccagcctccagcagagcgtgtgcccatctgcctgccggtgccggctactactcacccgcctccgcctccggtgagaagccaagccagccatggggtgcgtgtgctcgagggggttgccggaggacgcgccgccggcgccgggcccgctggcggccgcctacgacgcgcgccgcttgaggtacgggcccggcgacttggactccagcgagctcgccatcccgcggcccaagccgccccactcccacaa

SEQ ID NO: 148825 - DNA, 346 bp, Zea Mays
ctcaattgtattagtatattgatttctagatgtctacaagtaacacaataatagctcaaaattctatttacccagctagtctatacataaacaaatatcatgttttagatatgttcagaaaattttccataccttactcttctgattgttagaaagtcgataaataatggtactagttcaacctttcatgcactcccggctactggtttgaagcgcatccctagtgttcgtcgatcggaggcaacaagaagaggaaatcaagaaacgtaccggatgatgattggcttctccccctctgacttataccgttgtgctgctaggaactatgcagggaactatccagaat

SEQ ID NO: 148826 - DNA, 314 bp, Zea Mays
ggattatacaggttcgtgccgctcgttcgcgtaaatcctacgtcctttgagtttgtggagatgtattgcactgtgttcctggttacatatggttcatgaggtagaagatggctattctactgagtggcgcctccttttcataggggcccctcttccgccttattcccggcggaagaggagttacacgcacgaccggtacacgatctccgtccacgcgcctctgctagagtcgtgccgactttcccggtggtcagcgaatcttcataaaatttgcacgtcctctgcatgcgcggagcgtggcccaggagtcttca

SEQ ID NO: 148827 - DNA, 814 bp, Zea Mays
cgagatctagtttaacctgagagctctctgcgccatcgcggatggttcgccgtccacccgtggatggtctggtgccttatcacagaccgtccggcacaccactggctcgtagagcagaaatagaggtcgagttcaagaccgcattatagagccaacctcaagatcttgcacgccgcatggaggctttagagtttgttggcatttgaccccaaaaaggtgccaacacagatataaagccctatatctgtaagctaaggctaccaccaaatcaacgctacacgaagcaacagatacaagatgcacgaagcaacagatacaagatgagcagaattgaaattcaaagtcagttctaacaaactccattactctactaaggcaccaactatcaagctaccacatccgactatgactgatagtattgtagtccacaagatcgttctctttacaccaaaaaaactttccagagaagatcaacggttggccgacacacgatcttctactagtttgcttgatcatcagcatccctgtgggtttcttctatctccatcggcaccgaactgctttgcaccagcatccttgtagctatctgaagcataatatccacactttccagtagcattcctcgagcttccttggaatatagaccttcccactaattcataagagctcacaaaggatttcagcaggattccgaatgaacttattcttatagcaggctttgtttctcattttccaggtggcccaacagattgctgtgaccccaatagtgtagaagtgtcgccaattttgaacccatctacaatactgagatctg

SEQ ID NO: 148828 - DNA, 948 bp, Zea Mays
cgattatggccacaaggttcaggctgccgcgagggttgctcctccgtctagtggcccgatcggcctacgttggtatgtatgtatgaactgacgtagtcacgtagagactggaacactcccgcatgccaattctcgtggtaactgtctgtggaccacggcgccatgccattgccttgcagcattcacactgttcgtggcggtgaccttcccgttcttcggcgacctcctaggcttcttcggagggtttgggttcacgccgacctcctacttcgtaagcagctgcagctctgccttccacgctgacacgtaccatagcagtgacgactgacgagactcgttggaccctgtttgcgcagctcccctgcgttctgtggctgaagatcaagaagccgccgaggttcagcgcgtcgtggtgtgccaactgggtaggcgacgaccgccacttcttcttcttcctcgcattctttggctttttcaaactgggagagagtccagagctgggactggcctctgcctgctcaccacttgcttgctccgtccgcgtctctttgtcagggctgcatcatcgtcggagtgctgctgatgcttgtgtccaccatcggcggcttacggagcatcgtccaagacgcatcgacgttccagttctactcctgaagccctcacacttgcatgtacctctacactcacatggttccagcaagtcgtcaccctcgctcgtccacgcagctctacctctacattttgttgcaagcttgagggtgtccgggtgtggctgcagcctgccgaaatgcagaggacgatgcagcaaactgtacactcgctaagacgtacggttgtgtgttctacggatggggggggggggggggggggggctttcctgtgcgcgcccagctcaatctgcaaggtgtggttgcaacaggcagatcagacgaatcgtttagccgtagt

SEQ ID NO: 148829 - DNA, 788 bp, Zea Mays
gaactgggagaaacaacggcccaaagatgcaatgtgcaggtttcgatttcagacttagtctatggctgattgagacctgaatttcagtgaaaagtgtcaagtttggagctccttggtgatcaatccatgatcttttaggctgtagtttctgtagcaaacctagagaccaatgttgggggagtaatctatagtgagggacttgccctttaaaacgcttaggaatgagagaaaacactgcacaaagttgtgctgtcaaataaaaggagtattgactattattcagtgcctaagtcggaaatcaatgtgtttggttaaactttggggctttgtggtgcttgatctatacgctttcggactgaatttattgtagaaagtttgaagaccatatgttagtgaactatttacttcaagtgagttgggcttgatcccacacaaaaagtgaagtaagcgttgtccaatattggactgtcagtttgcagaaactgaattttattcagtccaatgaaaactgaaattgcagtgtttggtgctctgttggagcacttttgtgacctttccatcaggttgtagactatggattatattgaaaagttggagaccaagtattagtgacaaactttacttaggggtgcttagcttggtgctgcacaaagtagggagtaaatctgttccaaagtgcttcctgtcagcttcttgttttcagttaactgaaaacgacatttagtggattgggttcactttgagcatgtgtaacttttattctgtgtaaatgcggctttggattgttg

SEQ ID NO: 148830 - DNA, 377 bp, Zea Mays
cacacagctggagatgatatgctgcacggtttcctcttcttgatcacaaagcacgcaacactccgggaagtcaagccctctttttttcagcatgtctgcagtccagcacttgttattgatagctagccaaataaaaaacttgcatttagggggcgcccagctcttccataccatcttccaaggctcaaacactacaacaccaatgtagaaaagctctgtaagccaacttagatgtaaacagcccagaattggaggacctccaaacatgtttgtcagctctatcttgtagctggaattcttccagaatctcccccagcttcaaaaattccagaatgccagccagcgacaggttcccttcgatatcttgcacccaggcg

SEQ ID NO: 148831 - DNA, 410 bp, Zea Mays
gtgacctctaagaccttacttacacaaggcaatcggctcgggcggcgaagtccaaccccagtttggtgctacatgcctcgtctgactcatgggtgacctctaagcccttacacaaggcaatcggcccgtgcgacgaagtccgaccctagtttggtgctacattcctcgtctagactcatgagtgacctctaagcccttacttacataaggcaatcggctcaggcggcaaactttgaccccattccggtgctacatgcctcgtctaactcatgggtgacctctaagcccttacttacacaaggcaatcggctcaggcggtgaaggttgaccctagttcagtgctacatgcctcacttaacctagggtgcgctcaagccctactttacgaaggcaataactaaaggttgcac

SEQ ID NO: 148832 - DNA, 307 bp, Zea Mays
gtagaagtaaaaattattggaattgataagagaaaatgtaatatcaaaatttgtcggtaaaatagagaaatattgtcttgatagataagacttcttggtttttgatgtttcaacgcatagaaacaacataagtgaacctgacactcctaccaaacatgatgtccgacacaattcatagttatctaccaaaaattattggaataacatgtgcctgtactcttttaattgacttgagtatgcagttatttcagattttccaaagcaatatcatatttagtgtagattttggtgagactgatagcagtga

SEQ ID NO: 148833 - DNA, 376 bp, Zea Mays
ctcgctatcgcttgctgagcgtcctagctccagggtataaataccatcgtgtctcgccacctctccatcgggtcttagccatggacgacggagctgaggccctaagtactgagaacgaaatagaggaggagcagtggctgccgccgttgttgaatcatgttttcttcttcgctccggcctcggcgtagggtcgttggggccgtcagggctcgtggatcccgtatcatcctctggggagcacgaggatcatcggtgggttccgaatttgtcgccgggcttcgtcaaacgccgcggatccgccgagccgcgtgggtgggggcctctgcgtcaccgtactaggtaagaaccgtcccatttcatttcgccttcatgcctg

SEQ ID NO: 148834 - DNA, 414 bp, Zea Mays
tgctacagtacccgtgggggtgattatctcggctaatcaaggtcagtaacatggtatcagaggaggttagggttagggtttacgtctaaacccgaccctgatccaaaattttggcgccgtcgcgccgtcgttgtgctgccatcgcggccagctctccggcctgccgtcgcggccatcccttccctcctctgccaccgtcgcgcggttttcccgccgccagggaatctcgccggcctgcgcctgcggcgtccgccggatctcggccgccatcgtcctctgccggatcttggcctacgcctgcgggatctctgccgcgccgtccgccgccagagcctctcggccgccgcctccttcaacgatccgccgtccgccaggggcggatctccctccttcaacggccgccgccaggggcag

SEQ ID NO: 148835 - DNA, 591 bp, Zea Mays
acatgtacatcagctagacggacctagctagacgatgcccatcgtcacatgcatgctttggaagctatacctttgcttgtttctgcgtggggtagtagtgtacggcgtacatgccaggccatctcgatcgctgtcacgtgaaatatgaatgcgccaagatagagtttgtgcatatgggagagaatcgtgtatcaatgtcagtcaggtgctagctagcggctaagatagcatgcatatacattatatacattctagttacagattgtaaatgcggtgcatttatttgaggtcagtcagcttcttaagtactaattagtagccgacgatggcgatgaacccgcgcgcgcaatgggagagactgtgtgtgggagctgagacgagaggcgtacgtacgtagagaaagaaggtgggcaacgtgtccatgtccaaaaacttgtgtgcagctagctagctgctgcaacaacacacccaatgaaaaaagatctagagagagaatctgatgctagctgggtatacaaactgaatcttggaaggtccgatgtagctatacgtacgagcgagagagctggtcatgcatgtacgtacgtagat

SEQ ID NO: 148836 - DNA, 350 bp, Zea Mays
gtgctcaaaattaccattttgttcacctctgtgaagctttcctcagaattgctctccattttggtctgtggaaatacctataccactacaagctggcatgaagggcaaaaggcattaggtagttggaggagtgagtttggaacttcgtcggggcaggaaagttgattatctggatgttcctctaaaggagaacaataaagggtggcgctatgagtgtctcactttggaaaatcacaacaattccctccctgcccgttcagggagacaacctgatgtgagattagctagttggatagagggaccaaccgacttagagtccactgagatcactgctttgatgactgagattg

SEQ ID NO: 148837 - DNA, 296 bp, Zea Mays
gtcctttgtgcttgagctataaatctgggtgttctgacttgaaccttgtgtaattctgttactaccagtaatgaaattcagctcggccattgtgaaaaatgtaaacaagttaatatcaggcagcaatagtccacctgaatccatcagccattcaagtattcaacacacacattcagcatcagtgtggtaacgtttgcaattggtgttttttcaatgcttattacaattagtcaattagcaaggtcaacaatattaatattcagacaccttgagtagttcatatactgcatacaaat

SEQ ID NO: 148838 - DNA, 349 bp, Zea Mays
gcggaggaggcggcggtagaggaggaggtggtgaggctgtcgccggagctggcgatgcacggcgccatcgagccggtggcgctgccgtcgtcgacgtcgaggcggcggctgtccatcagcgtgagcaagaagctgagcctgaatatcccggacaagctgcggctgagccggcgggagcacaaggaccaccaccatcacaaggtggagtcggaggacacactgtggaagaagggcatcatcctcggggagaagtgcaggatcccgggggagcgggaggcggagtgcgccgaccccgacgacgacgacatcgccgccgccaacttccgccggtccagctactcacggcccg

SEQ ID NO: 148839 - DNA, 463 bp, Zea Mays
cccgccacttctgctcattctctggctaggggtgcctcggatcacgttccttgggtggtcaacgtccaaattaacgttcctaagccgcccattttcaggtttgaaaattattggctacaacttgaagactttcactcaatttttcaaggctcttggactcaaacgttgtttcagccggatccagcgaaacggcttatggctaaattcaaacgggcaagaaaagtgatccaaggttggcataaatcccttcccaatctagctaagttgattgttaaggttgaaatgatcattcagcttatggacttcattgaggaaagcagagacttaacgattcaagaatggaatcttaaagatgttcttgttcatcatttgcatgacctactttccaagcaacgaacatactggaaacaaagaggcaaaatcaaatgggctactttgggggatgctggcacgaaatttttcc

SEQ ID NO: 148840 - DNA, 968 bp, Zea Mays
ggaagaagaggtgaattgcttacaggacttgctgccatgtaatatttcagattttccctgtaagtacctcggtttgcctttgtctgccaagaaactcacaagggaccaggttcaggccattgtggatagagtggccagccttctgccaggatggaaagctgagctcatgaccagggctggtagagttattcatgtgcagttcgtcatgacggcaaagatgatttatgcagctttggcacttgaccttcctgtatgggccatcaaagcaatcgataaactgaggaagggcttcctctggaggggcaggaaagagttctgtggtggtcattgcctcctggcttggcctaaggttacccgtcccaaggagctgggtggtcttgggattagtgagttaaagagcctctattgggctctgagagctcgttggccatggctggagaaaacagatcccagtaggccttgggcggacttccccactcacgtttgtaaggtggtacaaaatctgattgttgtagccgttactactaagctcggtgatggagccaatacccttttttggaaggacagatggttggatgggagatgtattagggacatagctcctgcaatgtttgatatgatgcccttgcatcttgccaacaaacggttggccaaagatgctctccctaatctccattggatctccgatgtgaaaggggcaatttcagttagagtcattgctgaattcctggaactttgtgaagtgcttgaggcagttgtgcttcagcctagaataagggatcgacatatatggaaattcagtgcttcaggggattatacagctagttctgcttataaagctctcttccttggttcagttcagtttgaaccagcagagcgagtatggaaatcttggactcctgggaagtgcaagttctttatctggcttgtggagcataataggtgttggacagctgacaggctcagaa

SEQ ID NO: 148841 - DNA, 367 bp, Zea Mays
taaccaacactgtgaaaactactaactagcccacccctcgaactggactcagttctttaagatgtttggccccggcaaaacaccaaagatggtgttctttagcaaaattgtgcagaggccttctgcatgttgggctgaacaacggcattcctatgctttcaaagagaccaagctcctagaatgatggccgagataactccttgctggaccagttttgagaggtgttcaatgctctccttcaatcagcaaaagaggattcagcttgacttggctcttgaggcaaagcccaagtttgaaagaattttaaaccagaattctctagtgaaaacacaagtggtaataatatgctggacattctcctcttctt

SEQ ID NO: 148842 - DNA, 541 bp, Zea Mays
tgaagctttgaatgatttctataccaacctgttgggggtggctaaacatagagaattcacactaaacttgggatcttgccacagggacatgggcgatctaggtgtattggacctccccatctcagaggatgaggtccggtctgcagttttctgcctaccttcagatagagctccgggtccggatggttttaccgggagattctataagtcatgctggcatatcattaaggacgatctgcttgcggctatcaatgccctccatcaaggtaattctcgggggttgtggctgttgaactcagcttatcttaccctcatccccaagaagactgatgccacaacagcggctgatttcagacccataagtctcattcatagttttgccaaattggtgaccaagattatggctaaccggttggctcctctcctgccaaggttagtggctgcaaatcagagtgcttttgtgaggggaaggtctatccacgataactatatgtttgttcagcactcgatcaagtcccttcatcggcgaaaggtctctagc

SEQ ID NO: 148843 - DNA, 555 bp, Zea Mays
gctcggattagatccctgcatccatgaactggtatgcagcactagccgcccgattttaagtagatggccatgatttaaaaaccctggatctaaccacacccgtccgttaatagatcaacggcgctagatccaactaagatgagaaccaaccgtagccctccgatcacatttctacggaatagatttaaagagtcaaaaggttatcgtcgatctaatcataggcgtccattacggatccaacggttcgcaagcccccatctaccaacagcgccccaacgccgcaccatcgtggcggcgccgccgatccgaggccgagatctcgccggaattcaaccaatccggccaccaaccggatcaaacttagcgaatcctataccgttctagagggaaggaggaggcgaacccgactgaaagcttaccggggaggaaactctgccagtagaacacgtctcgcgatgtggcgcggcccagtgatggaagccagacgccgacgagcgattggcggagccccggcaccaagcttcgaccgcagaatacctgagcaacttccctgcg

SEQ ID NO: 148844 - DNA, 490 bp, Zea Mays
tttaataacaagagtgtggactcaatactcaattatattccatatcagtcacttagaatacaacaatacataatttatttttccctctcacaagcacaagaatcgctcgtgctgtaagatgtcacactttattaccttcaggttgcaagaagtaccaatttaattaacatcttcaggattattaggtagacagtatctagagaactatatcagtctccagctttattttttaatattgatagacctctactgcagaaggcaccaaaaatctgttgttttgcgtgcttagtttgattcgccaggtctaagtttttaaagcaaacatgagttctttatctctcttttttcaactgtctgatacacattgtaattgatttggatacaggcagttaaactataattcctgcagtaccaaggtttccacgttgtgtttaaattattaatggcaggggccaaatcccccatcccccatgatgccctccactacttt

SEQ ID NO: 148845 - DNA, 398 bp, Zea Mays
gtggtgacggtggcgctgagaagcagccgtagacgaaggcgcgatgcgtcgagacagatgagggtgtcgatgccgggggcgacacgtcaagcagccatggatgatgtgtgtttcaggtttgccatgcctaaaaatgtatcatggatgaatgcacgtgcgggtggtgctagtaccagacgtactagatgacccaaccatatgtgccagcatatcaagggaccagcagagaaggcctccgcgacggttgtggtgcatcacgacgggagtgccggcgcaacgcacggttgtcagagcggagtagacgaagtagtcgaggacgagacgatgatgctggtgacgaggttgtgctggacgaagcgaagaggtaggcgtggcgacacatcgaggttcatagagtc

SEQ ID NO: 148846 - DNA, 439 bp, Zea Mays
gaatcgctatcgtctgcgtgaggttgggcggacgtctggggaggtcgccagtgcggatttctcgcctcaatcctacctccttgcgcctttaaataccggctggggtgctctgcgattcaacaatcccgtaatgtatcgaggctgggagatcgcagcgttgagcggagcatcaaaaccagtggaagaggtcggagagagatagagaacggccggtgcggatcttcatcaagcgcggtgtcgagcaaaggaaatggagaggggagagaaaagatgaagccgccgtcgatccataccctcggcttgctgcgtcctgggtgggtgtcctaggagatccaccataataccgtgattgctcgccggtgtaaggatctaaccgctgggccgcgggtcacgtgcgcagggcacctcgcagcttgtaccaaggtatgatgactccccc

SEQ ID NO: 148847 - DNA, 1533 bp, Zea Mays
aggaacatcgacacaatcgatatcgaggtcgagaggtggggaggagttagcaagagagaaaatctcctcatcaaagacaacatgatgagagatgatgatgcggtgggtgagtgagtgagaagatcgaggcactagtaccccttgtgatcagaggagtacctgagaaaaagacaacaagaggatcagggtgaaagtttatgagaaatagtggcagaggtgttggaatagcaagcacacccgaagatgtgaaggtgctcataagaggcgacattgtcgaagagggcaaagaacggagtgggatggggaccgccttagagggaagacggttgaggaggtgggtgactatgttgagcgcctcagtctagtagcgagcaagaaaagcagcctaaaaaggtggtgacgttgcatgttggtggtggtgcgaatcatgcactcggctcgaccattatgaggagaggtgtaagggaacaacatccgcagttgcgcgacgtgggagagaaagaaggtgcaagacttggagttatcgaactcacatccattatcgcaatgaatagcccggatggtgcaccgaaatgagtggacacccacacaaagaggtgagaaagactggtgaaggtgttggacctgcggtgaacgagaaaggtcaactagcactgagagaaaccatctaggatgaccagattgtaccggtaaccagagatgcttggaacagggcatgtctaaaggtcatagtggatgaggtcgaaggggtgaataggtcgggacatggaagaagagaagggtaagcgaatataacacccaagctgacaggcatggcaaagcgaggtgtcatcgccacaagggcaagggatagtcgaggtggtcgagagtcgagagaggatgtcgtggctgaggtggccaagacgacagtgtcaagtggaggcagaggtagtggaggtaaggttgtagggttgggcaacataggcggaggaagatgggttgggggaagcgaatggggtatcggggcccggagctatcgcatcaagcaaccatagcatgagtggtaagaacctgtattgtgaggccctagggatcgaactcaatagagtagcagttgtcagtggtgaagcgacggactgagagaaggttataaacgatgtttggggcaacaaggatgttgttgaggtacaaaggaccgggaaggaccgtgtcacctactaaggtgacaggtagagtcgacccattaccgacaatggaggaaaggaaggtggagctatggggatggggtaaaccgacggctctggggtcgagatgttgtgaaatgaggcgtcgaagttggcaacccagttaatgggaggagagtgcggcgaagacatgtggtagccaagggaggcacccctaaagagccactgtgaggcgacaaggtgatcatgggcggtgaagacgacaaggcctcgatcgtcaaggagacgcgcacaagatagggaggtgtgtggaccgcgacatggcgaatgacgggcgttgagggagcaggcatgggagtgaaagagggca

SEQ ID NO: 148848 - DNA, 485 bp, Zea Mays
tgattaggtcagtggttaccctggagcatgcttcaagggctacagatcaagggatgaagctgaggaggccttccagcatgtgcacaacaagtcagatttcaaaattcgagaagagcctatcaagaggataaaaatatttaccttctcaatcaaagatgtaataatattagtccagtcactaatcattcttttactactttggcaattgatgtaaaatgagtgtagtaatctgttttttaatcatgcctctcggaggtgtatgttcaagctgccggtggtaacctcaccaacctatatgcatggtgattgaaccacatgtacaattgaactaccaaacaccttctttgttgtccaggtgtactacatctttaaaccaaacaacatctcctgcaaccaggccggtgacagccagtcatccaaacataccccttttgcatgcacagagcatggcctgctgggtcctggttcctagatacgggacaggc

SEQ ID NO: 148849 - DNA, 884 bp, Zea Mays
gcaactgtcatcggcccagggctcaatttcctcttcttcagtttttcttcatcttcttttaccattctagcggcctgtctgcccacaacactgacaactctttttcttttctacccttcggcgtccttgctcaaccgctcataatcaggatattcaaaatgtagagcatccattactcgattcaatcttcgcttcggtcgggagccgaaggttgcagtcatcaactgatcttcctttttcgtgtagttccctaaaatctcgttacacataacttcgatcgtgtccagccattcttggcagggttccttgaagtgttttttgaacttaaactgataaggcagccgaacgagttcaccctctttcttctcttcttcaagcttcggcataccccacttcttcagcgttgggaacactctgttggctaagtattcctagactaagtccctagacccaatgtgttcagacacaactctaaactcatacacagcatcttggcatggatcccccggtgtcatgttgcattgaggtctagtcagcccgaagattagcttcagcgggctttgaactagcttctccttttcttcatcaattttaacataaaaccattcagatttccaaccggtcggccatttagtgcgatagctgaccactggtgtcttcatatgcttctgataagcaaaattataacaaccgaagttctcatgctatccgtcttctctaggcttcgtctgataatgaagttcatgtacttggcagaatgcatcggcgagcggctctaccccttgacttcggagagcccagatgtacacgctgagcctaacaatggcgttgggggtcagctgatgaagataaatcccgaatttttccaagacttctgcaatcat

SEQ ID NO: 148850 - DNA, 278 bp, Zea Mays
gttcaattggtgggagaacccaaacagatagattttgccctagagcaagagttcaattaggggggatagagttccccgctgatctaatagttatgggtaaccaggatgcgactatagatgtcatcctagggatgaattggctaaccaaatatcaagcaagtcttagctgtgacaagagaacggtgaagttagtatccttattaggagaggaagtgttagtggagttatcaccaagttagtatccttatgggtaacaaggaaaggaagctatcaccaag

SEQ ID NO: 148851 - DNA, 683 bp, Zea Mays
tcaccgtgcactaccaatttcgggaaagaaggaggagacactgccaattttggcttcaatcgagatcactgaagaaatgtgagtgcctcgccgtggttcatggcgctatttatagggacggcaacccagctaacgacgcagccacgaaatgcatcgttagagcatggctaccacgtaaggaagaggcacagtgaggtaaggtggtggcacgagtgacacggcaacaaaataccgcgccacggcgagcaccggcgaaaaatctccagctaggctcgtgggaccgtgaatcagcccgcagttatcttgccgcggtcgttcctatctccacttcacccgcacacatccgaaaacacagtaaccagagatgttttccttctgcagatatttctggttctctgatcttcattgttctgctgaaccgacctcctttcaccccctctttctcttgattcttgttaagaacagggtaatctccattaataaaaagtgttcaccagacaacacccttcaaatttgctataggattcatggatcaaaactgcatagatttttggatctggtgctctgaaatcgactgcatctcactaagaccatggtgttctgaatctggctttcagtattgcccagttcgcatggcttgtttctgacagaacaacttcacaccactagtcctttgatttttg

SEQ ID NO: 148852 - DNA, 846 bp, Zea Mays
tggtaatggtggtgttggccttgtccttgccatgctcctcattacatttgtgatgtccaaacttttcacaaagtttggcccaaatgagatgagcatcctcgatgagctcaccatcataaagaataatccaatcaatgatctctacacacattgttctcaatagtatgttataacttgagcattaagttgcaggcacataatgcttgaaataacaaaatccacaccaatcggactcatggtccacataatttcaagaacatgtgatgaccaagaagagtctgagccatgctcgcggagtagctcaaatggtatctcacatgttgtagacattgattatcacaaacgattaagcttaaccatgagacttcgttttatacaaattggaaggactgatttgatgcctagggatgggtgaataggctctataaaatttctcaataagtatcagcacaaacaaagctaattaataaatctaagtgggaaagtagacctggttgactgtagatctcggcttagctggatttcccttgttagctgaggtacaacccaaacccggcttagctacttggatgtctataaaaagcttcaagcctcctcctcttgcaacattgatacaacttggtgtgtggtgttcttataagtaggtaaatactttcactcacttcctataatcacaaatcaccacatccaagtagcgcaactggtagcacgagtaatatatgcaataaaaacaaatgcaatgcaaacaaaggaggagacctcaaaaatgtgaaaaacatcctaatccaatcaatttgtgcattgtttgccccctacaacgaaaaaagtgaaaaacattgaatccga

SEQ ID NO: 148853 - DNA, 608 bp, Zea Mays
gccgagctagacgggtagtgggaggcgaagaacgttccgcgccgtataacggggactcgaatggcggacttgggttgtcgctgccagatccttggcgctcggccgcggcgagtggactggagagagaaaagagagaagggagagaatcggtgatgaagaagacgcccgacatcacttgatcatgcgttggacggtaaggattaaaggatagggatgaagaaaccgggaccataggatggtgagtggagggggtagattaatctcgcgtacccgccgttcatcactaatcgcacggctttgattagaagcaggaaataccccttcatcccaaccgttatccaccgtagaccggcaatctgacgactaaagcgaaatagtggggatcgtgcgctgtgagtcgtcgatctcagatccgacgatgactcgagaatcaggatttatacccatcgccggtctaatctgggcgctcggggttggatcggacggtccaaacatcactgtaccccttcggcctggccattttgcataagaaaccctgtagttaaaagaaattaacccgccgtcctcattagcagtagactgagtctagggaattttttctgcgctag

SEQ ID NO: 148854 - DNA, 594 bp, Zea Mays
ctagagttcaatgcaccttttgcatcttgtttcaaatctagttaagaagtaaggcatcggtaattcattaagcttttcacctctcaacgttaagatgatatgacgacatggaattcctatcgactcaaataacatgcaggagcaatttccaaatgattctgaagcgctccaacgaaccaccctatctttcagagatccatcattaattactaccatcttcatgtcctcaaacacacaaatgtttacaaaagaacagtggtctctagcagcttgaatttctgtttggaactttgtgaacacattgcgcgtgtacagtacactagcttgcctctccataggccatggtgtaattaaaagtggactggtatgtaggctcatgtggtcttcctttaactcttcgtgacgctggcattccaacgccgtgtcaaatctaagccaaaactcgacaaaagataacttgcggtggataaagcgattgaaaaatgaatttgcgctttcagaccttgaggttgttctgaggagtcctgcaagaggtgtattcataaaatatgctggaatccatgactcacgaatttcatacctattagacatcca

SEQ ID NO: 148855 - DNA, 828 bp, Zea Mays
gcaggtgctgggcagggaggacgcggagacgctggcgcggtgccagcagatgatggcgcgcggggagtggccgccgttggtcgtggcgtacgaccccgtggaagggttcacggtggaggcggaccgccccatccgcgacctcaccatcatcaccgagtacgtcggcgacgtcgacttcctccgcaaccgggagcacgacgacggcgacagcatgatgacgctgctgtcggcggcatcgccggcccgcagcctcgtcatctgccccgaccgccgcagcaacatcgcgcggttcatcaacggcatcaacaaccacacgccgtgagtagagagccccatgccgtcggttcccattgcgcattgcagtttccgtcgatctttggctgaacgactgaacccttgtgtgcttgtattgattgctcagggaggggaggaggaagcagaacgtcaagtgcgtgcggttcgccgtcggcggcgagtgccgggtgctgctgttggccaacagggacatctccaagggggagaggctctactacgactacaatggctcggagcacgagtaccccacgcaccatttcgtgtgatgtgaccacgaggcgaggcaatctcagtccgtgtccaccattgcagctccagctccacagctgccaaaatttcgtgtgatgtggggacctgtttgaatcggctttggctagtgactagttggagcgggaagttaatctagattagctggccttcttgtttggacagattagagtggctaactaaaatgtcgattcttgcataacagtgagggcagatgaagcaatctagatattcatcagcacctag

SEQ ID NO: 148856 - DNA, 271 bp, Zea Mays
aatcaatgcgcgttcagcagcttcttcagcctcctttgcctccactcgtgcatcgtgagattctttttcactcttttttatagtttcatcggccatctcacgaccgcccttcatccagatattggaatagaatttccctcccatcaaagtagcttcggttgaaggatccttcatatcgtcaatagagaagatggcttctgcctgggctgcagccttaacatgttcacagccagttttctccaacactgctgcaacccctcgggcaccggtg

SEQ ID NO: 148857 - DNA, 629 bp, Zea Mays
acaaaactcaaatcgcagttcccgtccatctgtcaccacctcgctctctacattgcggaaccctattctctcatcgcgctctcgcctcaccggcgccgccaatccgccggcgagctagggctttctgatcactggcctctccagtttcccgccaccatgggggtcgacagcgacgacgaggatctcgtcgtctatgggacgcccatcgagcgagaggaggacacctccgcccgcaagcgccgggccgtcgccgaggctggccaactccgcgccctccctgcctggaagcaggaggtctttctctcacctccctccttcttcttctccacctcccaatctccctatcctgtatctgtatcgttgcggtaggacagaatatgtgctctgttacggtgttggtattgatggattcgagatatactagggcatgcaatttcgtgagtagcaatgcaacaggtgttgcgtttttttaatgtttacggtttgtggagcaactggggtgcatttggttgtgaccaagagagactgcacatactcttccatttggggtttgctcacatgtctgctgctatgtttagctttggtggcacatattataaatagagctgtgctaattttctgcttgtacc

SEQ ID NO: 148858 - DNA, 380 bp, Zea Mays
ccaccaccagtgcgtgtgcgtcgcgctgccttgcagccgtagttcctgcactgtcgtcacccaccgtcggaaggaggagcagcagcagcgagtggattatgatcaaatggagcacgcacaataaagggcggctaggtgtccggcggaagcggccctgcctcgaacgcgtgtccgcctccacgatcgcacgtactacgactacgacgacccagaacccagaagctgtcgtcctcgcagcgcaggccccgcctgcggaattcgaaaatcatgtggcgtggcaatggcacgcacgcgcgttcggtcggtggacacctcttttcgtgcatgggtcgatgtatttttgtttccaagattcgtgccaccaattgtagttgacctcc

SEQ ID NO: 148859 - DNA, 703 bp, Zea Mays
gccacatctaatttgggccgcccaaagtcgatccgacgatctagagatcatcgctaaccttagctcatggggtggtgccgccaagacatccccatggtggagctggtcgccggtgcccatcgcgcaacacccccaagctcatatcccatgattacttgcccgcgcacaaccacccgacccccctgaactcgaaggccgactacaggttgccgattgacgtgtttggcaccacgaccacggtgacccgcggcaaaccaaagccggataaacactggtgagcaattccagccccaatgaggagtaatctctcccccaacgcgactctacaccaccggaattagctacgacaccaacgaaagcgatcataccggaggatttgtggtgatggggcagtcctcaacgcggggcggaggagcggcgcctttgaacaccggtgagtgattccactgcttcctaaccatggccactactccgatccacgcgtggagtgccatagatccctcagctccaccagcccgatcatagagcacgagcacggtcctcccaaccctctctcaccctttttcctacacttcggcgttcgcggacgaatgagaacaagagagggaaagtggaggcgatgcggctcggatattttgtcttgcactaagtcaaggggaagactttgcgtatatacgtcacatgggaatgccaaaacggatgg

SEQ ID NO: 148860 - DNA, 820 bp, Zea Mays
ctactaatgacatatatcttgagcttacttatgaaaatcgacaagagagtaaatacaaaccacaagcctcaagggtttctcttcacccaaaggaagaaaggtaaaagcaaaggtatgagaactctttttcccatcaatggttattcactctaaattatcttattctacctatgtgaagaatatattctttattggacttgatttttgctaagtatgcattcaatcttgttctcataaatgcactagtccattagaatctatttcatgcctttgctatacatattctcatattgatttacttctaagtaatgattaataaattcaatatgaagaagtaaatttcctatgattgattaaaatgtttaaaaggtgtatattcctttttcttaaaagatgtgcacaaatgataagaagtttacttcatgtctatgtgacttatggatgatgaattgtttttatttcctatctaaagaaatcatccttcatcatatactcccttatgctattaacatctttcttgagtattttcaataagtttggaaggaaaaagagacaactacaaagggaggacactcacatgaaagagaaggacatcaagaacaacaacacctacttggacaacgagatcttcaaaacaatcaatggtgtggttgtaagcattctaaatctttttcattgtgagaatatcaggcttaagttgtttattgtaaattttataagccttgatcaagatgcttctccctatttgtctttaaaaatgagtgcatctattcaattcatttcaaataccttgatgcatatctttagggggagcctattt

SEQ ID NO: 148861 - DNA, 1029 bp, Zea Mays
gaataaagagacaagacacaagaggatgtccatattatgtttagatatgcatgccccgtaatgaggtccattttgtgtgttgttggagatgtttacgtacgttagcttatttcaatttgctatgaaacataggtttgtgtttttttgtttacgcatgacagcgagttcggtaaggtacaagtttcatacccatacatgtatttgcagggaaaaaactacacatctacatgactacatgtcacatgtcaggtatactgatacactcgtggccacgaactagattattgctagaacaggggagaggatattggggcctataatttccaatagaagtccaatcagtacacgcttcggcttgcaccaaacaccccgaaccccaccgggaacactgatgcgtgatttcaattcagtcgggtgggaatcagcccaatcagaatattggtgggcgcacaaccaggtttgagtgtaaaaacctaaatttaagcgtaaatactgctagatatatcgtaaatgtcggtgcaatagtcaacacgatgtcacgtaacaaacatgtgtgaattcaggtggttaccgaaaataccgagccaacacgagaaacattgatatctttgggatgtcgtatttatgattgtgagattcacaagtttgagcgtaaatagtgtcagatatagcgtaaatattattataacggccaacagacatgcactaatccatgtggttaacgtaaataccgagacaacataagggacatagatatctctggtacgtggtattcatgattgtaaaatctttaagtttaaacgtaaatagtggcatatatagcgtaaatgttgttacaatagtcagtatgatgtcaagccgggggcctcatccacgtcgaaaccggctaccacggctgcggttggtcacctcttcgctcgagccgtgagcgatggcgtatgttccgattatcgcgagacgcctcctcgctgaatctgcccgccacctcctcgtcgagccgcggggcgacaaggtgcccctgccgcgcat

SEQ ID NO: 148862 - DNA, 362 bp, Zea Mays
aagtgattcttgcagctgttcccaaaagtgtgccacaaacagtgctcctctgtcagatatgatggtctttggaataccatgcaatcgcactatttgatcaacataagtttatgcatacttctctgtcttgtgggtggtgtgcactggcaagaaatgagcggtcttggtcaacctgtccacgataacccaaatagaatcatggtgcctggaggtattgggcaatcccactataaagtccatgcaaatgtcctcccatttccaagatggtatgggaaggggttgcaaaggacttgctgtcttcaagtgactggccttgattctctggcaggtgtcacactcggatatgtacttggcaatttccc

SEQ ID NO: 148863 - DNA, 1491 bp, Zea Mays
ggctacgtcgctcggaggctcgcgagttacgagaggctgcagctgggagctcctcagcagcaccctttcttgggcgtcgggcccgcaagtccagcggaggtttgggcggacagcatgccctgtcgtgcttaccccaatcgtagaccgtcgtcggggaagaaactgctgctggtgtgaaaaattgcgaaggcaacaggaatcgtaggctgtcgtcggggaagaaaagtgccaccgtcgtcgaccaccttgcctctcgcctccatgacctgaagcacaaggtaatctcccccctcccaaaatcccacacccgcttcctccttttccttgtaaatcgaatcgcatatatgcctctcgcctccaggacccaggtcggcgccgaggtaatacagtggtggacaccacgatggacaggaaggaggacggaccggggtcccggtgtggccacacgctcacaacagtgccggcaaccggggaggagggctcgctcgggtacgtgggcccacgactgatactctttggtggtgccattgcgctcgagggcaactccgccacaccgccctcgtcggctgggagctctaggatccgtacgcccccttcaacctcagcttactcaatgatattatagtttttttagagctagactgctagagttcaaagcaaatcgagagggaacagtaagctatcgaatactgcccctttcttaaaaccagaggttcttcctcttgtcaaaaaaagaggggatattaggcaacgggcttgcttgttaatctcgctttggagtaggagatggggaaaaaactttgtggtttattaattgcagttagccagttacttatcaaagtgggattcttattacagttgtgggacattcttgtagagaacaattaggacattatggttctgttttatgcctattttttctgccatccttttgcttttgcattatgattgtgtggtaaaagaaatattcaacggctccatattggaatgtttctatggaatttcactgtaggcagacattatggaggtccattctccattgaacactctagggtgtcttgaggcagttacaaactagcttgaactgtactgcttcaaaagctaaacctgaactgaagtcagatgtcttccaagttctcagaggcttaaaagtgcttaacattagagtgttacactttttattctaccgactaccgactttttattgaaccactataaatcagtcaaatcaatactcgaaatggttcaatgccttagagttcaaatggaattttatctctttttgatgcaaaaattggaaaaatcttaccatagccttgtttttgtattgatctatcacaggtcttgctggtgccaatgcagatgtccactgttatgacgtgttatcaaataagtggaccaggtacaatgtttcagaaattgcctgacttctatgaatgtgttgcttagacactatgtttttctgttttcttttcctaaatttgttggatc

SEQ ID NO: 148864 - DNA, 697 bp, Zea Mays
caatactatctgttgccacgaaaaggtgtttagtgttactccaattgtggagtctattctgtagattgtagtatagcacatatataaactaaaaaaaaacatagagcattcaattctgaagggcaggccggcatgatacgtagtcttggtttatcccttctccagagcatttaaggattggtgtgctagtctagtcaattaggtttctgtttcttctttagtcattgtccacattaaatccattgaaccagaatcatctatcctgtcagttagctttccattgcgtgtgcaaatttaagtatcagtattaggttatgtggagggcctaaaatgacaaaaaggaaatcatagctcatgctgtgtagttccttctcaggtagctatgccaaggcaaataggtttgtgcttctccctcagtcaagacaaaacagttcattctgttattgaacttcacgtcaaatgcctttattaatcattattgctgttaatacattgactactactcggggtgggctacgaatggcccccaacgatttaggggttgtttggttacaaaataaggtggtgcatcattagttaattcctcaaatttggcggaataatattattcctcaaagctgagggtttagcaatccacaacagtttttgatggatataaggtgaaaaaaagcccaaacatcgtcttccgactcaccgg

SEQ ID NO: 148865 - DNA, 869 bp, Zea Mays
gacggcggccgtcgataggatcgtggctgatgccatcgacgccgatgacaccgtcaggatcagaggtacttcaacttaattcgcacaccgcgacgcgcgacttgctcttcacttccatgcttgccgtctcgtgagctccattgacgctgacacttcccgaaccatccttctccccatctcctcctctgcagcgacggcgcgacagctgagcaataggagcgaaatcacggcaaacaaggcacaggactccaacgaggtacatgatccatatccttcatggcatcgtgcatgagctctcctattgacatctgaacattaaacgttgcttatgcttatgcacttgcattgcagctgtggtatacagaatatactacatctgctaatttctgataccttaattgatatgcaggtctctcaacctaaaggggggaccaaatggcttaggttcagtggcttgtcgatcgtcgctgccgcttggcacaagcacaacttgttcagccgccaaagaagcaagccttcgccgcctcctgctgccgcttcagatgcaagctcccaaccctgatcaggcagcgctatatgggatcttctacattttactacgtctcagcttataaaaacacacacgcatggctcattcagtcatcgtttatgatgcatcgatgctggctttgcatcattcgctgatattttttcagccttggttagtccctgtaagctaaagctgattctgtaaatggtgcaaattagtgttaagaaaggagggcaatctggaaatccatccaagctttgcgtcatttggttatgtgtactgttgaattctgcgtggtcatgtagcagaaatgtttccgcaagatgcatgtttgttttag

SEQ ID NO: 148866 - DNA, 579 bp, Zea Mays
tctgtaaagccgtatgtaggagactgcaaggctgaaacattttgtttccattatccaaaaaataggccttttcaagcctacaaccgctgacacagtcatacagtttccttgtagcaaatcctccatgtggccagttatttttcttggaaattgatgagatgcagacataaagaacttgcgagctagagggattttactcgaattcaccccaaaaatgaagggaaactagtatctaaggttaggctcagatcctaaaactatggctccggtaccactgagagacctctatgaccttagcttgcaaccttaaccactataactgtagaacaaagggagtgataccttctgaattttgggaagacaccataagagggccagagtttggtactcgatgtcggtgacgacaccggtgacctttccttcactagccgcgtagagattagatcagatctcatgcgagtatacgccggacattggttcatgtgctagccccttatctatttatgtacgcggtacaaaagggtgctacaatcagtaggttgttgtgtccctgatcagaatgcgagtgtcgtatctgag

SEQ ID NO: 148867 - DNA, 719 bp, Zea Mays
cctcattcgcatatccttaggcgatcaaggctgctcgatcgggcggaggaggatttacatcgtgcactgatcgtcaatgtgcttggccagggggttctgactgcgccgctgtgattctggatgcgctagccttgaagtatgaccttgaggctgatgcgctccaaatccgacatgctgcgtccaactcgtacctggtcctcttcccctctgtggaacacgctgttcgtgccttggctggtggacaatccatctgcatcccccctcccgctgcatcttaggaggtggtctcgccaggcgtcggccactagaggaggtgtcctgccggtacttcttgatgttgagcttggcgggattcctgcacacctctgggggattgatacggcagagcatctaatcggtgggcactgcatcgttcaaggattgcatacggattctgttgatgggacggacatgtcggtcctgaagctgaaggcgtggggtttctctatggattgtctgccttctcgctatgatctccatgttgaagagccgacgtctattggagaagatggatccagcttccctcgcactttgatttactctgtttctgtgaaggttggtctttcggttgccttgtcagatgaggaacaacctccgccttcctcctcggatgatgatgaagatcgtgataacaaacatcagagacagaggccacaccttccgggacatcagttctcttc

SEQ ID NO: 148868 - DNA, 911 bp, Zea Mays
tgttgtgtcatgtaatgatgtaaatacgtaaaagagaatgagctactagaaactcaaaactgtagcgacatctttgatatgtttgtcccatatatttctaacctacagtggttttgctttactcttgcttgttactgttttgcctagtcaaaaactagcttttcaggacaaccttgtttgactcgcattttcttgtgaaagtgggcatacaccaaatctgttttgctgcacagatattttttgctttctcacattgttccatctgagaaaagctcctctgcctaattgatgatctgttgaatgaatattactttccaaatggactcttttccagatcaatctacttgaggcattagtcagacacctcatatttggaataaagttaccctctcttcacccaaatcgcctaagacaggtggcagatatgaattatggctatgaaccccttttggttaatggcgtgcccatttggctatagtgcctgcctagagttgactaggtctagagcgagaaataggggaaaagggagctggaatagcaaacaagccaaacaccatatcttccctcttgattagccaggatgggtaatttttgctggtaagcctcatctgactactatgatttatccttatcgatgaaaagcagggtcacttactgcatatgattccaaatagaaaagaaacatagtgtacaccttgatgtaaaacaatgttgtagatatagacacacaatggtgacattgatgtctctgtttctgtgttgcccttggcgtctagggaaggatgctaccatgacctctttgttaggtttggtgatctttgcagtgtcacacttggccaatccgaggcacttaggaataaacaaagtgttgatctattcttgtgcacaatgtgaacacataaatagagagg

SEQ ID NO: 148869 - DNA, 324 bp, Zea Mays
ggaaccctatccttactccatattcttccccgtgttcttctacctccagattgactgatcgatacgcgtatatttctacatgcttggattgattttcccaagtgtggaaacgattggatagttgagataagagttgttggagagcctttttccgatcttgctaaaaaatcaagactgggagtgggttctggaaactcttggagatgttcttagtctcagcttattttggccataaggagcttataagctgcattaaacgacactgcattacgtgtttaaatccaaaaatcccagttctactcttccaaaacaagggatggtctg

SEQ ID NO: 148870 - DNA, 306 bp, Zea Mays
agtgtatggtcctcaccaggacaatcttaaatcctcctttcttcaggaattaaaagaaatcagagatacctgtgtgggaccatggatcattgggggcgatttcaatctgattttcagggaggaagacaagaaccattccaatattaacagggctatgctgggggacttctgtaggcttattaattccttggatctgaaagagattcatttgaagggaaggaggtatacatggtccaaccagagggatgctccaactcttgttaagctggaccatgttttttgcactagctgttgggaagatctatt

SEQ ID NO: 148871 - DNA, 1073 bp, Zea Mays
cgcggtggcaagcgagatggcagccgcagcccgcagcccacaagcgcagggtgccatgtctgaaccatgcgtccacgcctgtcaccatgatcagccgatcactgctagtgctagcagactagcatcacaccgcgacccaccggcgtgttttagctttcaaggctactctccgtcatagtagcaccatcctcttccggagggaagtcgagcccgccacctgcttgtgcaaatgcgcaagacgacggccgtaacggcagcgccactcgtcatgcaccagattactctgggaaccacagtggataacgggggaccgaggacaagattgacattaggggaaccgaattccagcactcagacgcacttctgctttactcgtagtttgaagctaggcaattcgtcaagagccaggtacatgcagctccttgctgacgaggggcgcgcaggagcagcaattttcgcatgtgcagatatgttccaatgagaccatctcatggaaccacaggttgacttctccgtagtctttcgtcctggatgcatgtatcttttcattcttttcgtacctatgaatgaccttctatgaccacgttgtattcttttgtgaccttaccagaagaaagaaaagaccggcgatcttctctctctcaagtggatggcacagaactagcacacggttacatgctgagctatgccccatggatcacttccgtcgtaaaggtcagaactatcaactgccagttcgtcttgtagatgtgtcactaattaggcatttagatagtagatgatgcttcagacagatagcgtcgcacttgggcaattgagctatccgtaggcatagctgggactcatagccatagggttgtctcgaatggtgtaaaggtatgaatctgattgactattactgattaggctttgctctcacacagttttagtactagaagctgtactccgctttgcctaattacagagaacacgtgtcagaaaccattggagtactaggagcggcagactctgctttatctattcccttgcacatacctaaactttattttaaacaaatatgcccgagattgtgc

SEQ ID NO: 148872 - DNA, 329 bp, Zea Mays
ctcacctaattcacttaaacctaaaattgatgccctagactaactcggccatgaacagcaacttgacctacataataggttacataacctgatcctacctattctcaatatagcttaagccacctactaagtcatctgctctacataataagcaatttggtttacctacaaatctgttctaactacatgtccctaactcggacggcatcaccaagacctaagaaggaaggaagtcaacctcgtcaaggaagacaggagccaacccagatctctagatgattcaggacccaccatccggaatggaaactctctttgctataatcttttcc

SEQ ID NO: 148873 - DNA, 322 bp, Zea Mays
gtagaatttgagccgcacgattaagatctcgtggtctggattagatctgagctctcgtaggcacgcgagccataagatcgataatgcacgacgaggattttattaacgcgtgatctgatctctgccctacgatcccgaattagcgacctagatttgatctcgcgaatggttacacattcctcaatcacagccacacgcagctgatccgacggcgaccgacccatcacctaccccagtcagagctgagcggcagcgtagctctagtctccgtggcccacgacgatgcgccattaccggggcaacagtcaatccccaccagcgc

SEQ ID NO: 148874 - DNA, 509 bp, Zea Mays
tacttcacaggcggccacatacttagaaacgtcaaccttcatccgcttccaccagaagttttgcttcagatctcggtacatcttggtttcgccagggtgaatggtgtaaggcgttttatgagcttctctcaatatatccatcttcacctctgatttctgaggcacacaaaggcgacccctaaaacgaaccaaatcattctcatcgatggagaactcccggggtttaccatcgccaaccctctttcgagcttcctgcaataaacgatccttctgcagagccgcacgcactctctccatgagggaagattgaataagcatacgagtctcctcactagcggtgccgacatagcacaaagcgatccccaaacggtccagatcagcaatcaactgcaaggccacttttggaaccccggacctgttaagggcatcagccaccacatttgccttccccgggtgataatgaatagacaaatcataatctttaatcaattcgagccaccgacgctgcc

SEQ ID NO: 148875 - DNA, 669 bp, Zea Mays
aaggtaggaatattgtcgttggcatcatttacttgatttccattagggtccatcatctagtcagagggtaaaagagtttagtgagacagactacataataggcttgtatgacattaagataaagtgtgaacacaacattttgatttccaatataagattagttaaggatgatttccgattccgcatagcttcatcatacaacaagagttaacaagtgttataatccttaacagagatcttttgaactttatagatttcagagcatgatatccaaatcatctttctgatccaacagtatttatttgagcacaaattgagagaaagacttgagcgggactttagggcaactagaatagagcatcacattgtttgcatatagcagatgacaccatactttattctcttataaagaggcaaaacacaataggtgcaagagattctccaaatttattcatatatcacttaacacaattacaaatcttgaaaggggcaacaccttgacatttttttcttcgtgagacatactccttcttctagctaaatgacatattattcttccttgtcagatgcaccaatcagagctggaggtcgattgtcttcaactactattctttctccagatggggtttccaaacacatggttctcttagtatgttggattactgcctt

SEQ ID NO: 148876 - DNA, 307 bp, Zea Mays
attaacttagcacattggatcaactcaaccataagctaacccaaccaatagagtcatgatggattgcataatctgcctatccccacctaacatcaaacaaacttttgacctacatcatgtagtctatctcattcatatctatcttaaccatattccctaaccgatgatatacactaaccacgaatcaatgagaccaggactggagaagaaaagatcaacctcgtcaaagaaggagagaagtcaaactcaatcctcagatgcattaccactcacacggaattctttcccatcataaacttgcttaccc

SEQ ID NO: 148877 - DNA, 868 bp, Zea Mays
ctcttcatttgatgcctcttgaccccctgccttgaggcgaccctctcccttttataggccgagagagtggtcggtcagcggtggcttctctaggaaggatccgtaaggcaggggtaaatccagcgttttacctcgggtgaggccacatgtactcgtgtggcccgaggggtccataggtcatgagtgggaagcagaccggtgcccacaatgtgactcagtgccaggcgtggttaatgcagtcagtcatttatggcgggtcaatccagggccgagagtgggattcactcgagtggttcccttctgacacgctcatcctcccttgtcaggcttcgccatgtccggcctaggctcggtgccacggggttcgatcgagggcgggtccttatagggttggcgcacctgcctcttccgactgactaatgggccctagtgatcagaggctcttccctcagcacgctcactgaccggcgggtcctagggaccagcgatcatttccccgaaaacttcactcacaatcttaccgtaacgaacatcactcccatccctaacagcaaagcctaaccctgatccgctggttcccattctgaattggctgaccatcatgcctaactagggctcaccagtagacaccaagctcaagactgattgaaggtacatgttttctacctcgatcctagtattgccatgcctacaggactcaatctctagctacaaaccttcatagagtgcacactaagcaggtgcagttgcactcacatagctagccatctcaggcaaagctatccaagcattcttctctactagctcagtctgaaagctaggacaagtcttacacacacccaacaaactgaatctagatcgtaactcc

SEQ ID NO: 148878 - DNA, 488 bp, Zea Mays
tctttggctagtctcttggagatactagactctctcccgctattccccatggccccatataatctctctatttatatttattagagtaaaatatactggtggtccttaaacttatattgttgtattattctagtcactaaacccctaaagtgcaaatataaggtccttaaacttgtgaatttgtatcgttctggtccctaactctgaacatgcacatttcagtctttatacttgtaggattgtgtgtcgtctgggcctctaaacttatttttggtgtcatcaagggtctaaactatttatacatataatgacaccaaaaataagtttatggatccaagtgacacaaccatagaagtataggaccaaaaatatgtatcttgagattttagtgaccaagatgatacaacttaacaagtttagggaccttagatgtgcacttttagagtttagggaccaggatgaaacaacgctaaaaatatagggaccgc

SEQ ID NO: 148879 - DNA, 597 bp, Zea Mays
ctttgggcctgaacctattcaagaggcagaaaaaaaaccaagtccgtataattcgggagaacttgagggtagctcaaaccaggaaagagagctatgctgataatagaaggagaccattggaatttgaggaaggtgatcctgtgtacctcaaggtgtcaccacttcgtggaatgaggagatttaaagttaagggcaaattgtcccctcgctatattggaccattcagagtttttaggcaagttggagagatggcctatcaactcgagctacctgataatctatctgatgtgcataatgtgttccatgtgtctcaacttaagaagtgtcttcgtgtccctgaggaacagttaccaatggaagagctcagcgttcatggtgatttgatttatacggagtatcatgtcaagattattgatactttgacacgagttacatgaaataaggtgataaagatgtgccaagtgcaatggagtcaccacggggaagataaagctacgtgggagagagaagaagagcttcgcatagattttccccatcttttccctagtccttcctaaatctcgaggacgagattctttgtaaggggggtaggatttg

SEQ ID NO: 148880 - DNA, 1006 bp, Zea Mays
gcatcgacaagacctcgccgagactcccagctacctcggtatgtgacgccaaccacctcctcgctcgacacctgaacaatgagatgattatgtgcatcggtgcaaagacttgtgtagatggccgcaaccctaggtttgctgccaacaacgatgacgagtttctaggtctcctccccgccgagagtcaccgcgtgcgctccgcctacatcgccaccaataatgacactgaccatcgacgtttccactctggccctatttgcttgctgcagcatcccttccgcatcatcgccaccgagaagctccccgaccttatcttctatgcccgatacatatgatatgtatgcacgaagcattaattaacgctcgtctgacatgcagtttgctccaccctaaacaacatggagattctgctcgtcggtggggagatcatggtggagggccacagccccaccgctgctgccattgacgacaccaagcttcgatgtcgcgtgcgctcctttaccaggcctaccgcagggaacatcttctatctcgggtctctcgatacgtaacacccactaactcctcgctcgacatccatctgaacatggagtgatggagaagatgtaaaatgatcatgtgtgtgtcgctgcaaaggagactcggtacgtcggtggggtgatcatggttggccgcagccccagcaatgggcatcgacaagacctcgccgagactcctagctacctcgttatgtgacgccaaccacctcctcgctcaacacctgaacaatgagatgattatgtgcgtcggtgcagagacttgtgtagatggccgtagccccaggtttgctgccaacaacgacgatgagtttctaggtctcctccgcgccgagagtcgtcgcgtgcgctctgcctacacagccaccgataacgacaccgaccatcgacgtttccacgctggccctatttgcctgctgcagcatcccttccgcatcatcgccgccgagaagctccccggccttatcttc

SEQ ID NO: 148881 - DNA, 482 bp, Zea Mays
cacaccatgaatctttctaaaactggcatccattcactaaccttatattcctcttgccagttttatgcagccctgtgtggtcgattggtcgtttcttatctaatggtagccggtgatctagagtgtttgagtgggtgtgtggggtgcgtgttgtactgagggtctccctccttaatacaatgatacacaactctcctacgtattcgagaaaaaagttttacgctgtccttacccctcccccctgcaggtcgagttttattttttctcgaacacgcaggagatctgcgtatcccctgctcctccccctcccctcttgaagacgaaagttggtggccagtcggaggtgcaaggatcgtttgctgaaagtggacgccgaaaggaggatggctggcaggtggttgagcacaggaggcgccaccttcctcgtcgaggatccatagtggatctccgagggaagtgctacaagtgcctatccacctccc

SEQ ID NO: 148882 - DNA, 362 bp, Zea Mays
ggagtgcagcaatagctttatttggccaaaatccataattccaccctgggtctgaagatcgagcctttctcttagtatccttagccatctcagctaatactgcgggtagtgcagcaatagctttatcttttatggtagaaccagcagctgctgcgacatcagacgaagctgatgcaactgattcacgtgtggcagcatgatctgtggctgtgccatcaccttgaggctgggacaacctagatcctggaaagagaacttctacattattacgttggctcccatcctcatctgcagcaagcaaagagcaactcaagaagtgctcatctctgtttccagcaaaagaacaaaagactagaggaggg

SEQ ID NO: 148883 - DNA, 493 bp, Zea Mays
atctatgaattcatctggccacttcattctaatgtatgaagtttttataccctgcagttctgtaacgtgatctcagccgtccaatgccgatcgagataataaagctttcaaaatatattgcccgttctccgccaaaagggtcatggcggcggcggttcgcctcctccctctcctcggtcgcctcctcgtcgtcggcgagatccgccggagcccggactacctccgccgcatcataccccaccttccctcacacccgaaactagccgccgccgtctccagcctctacttcccgctcttcccgtcctccgccaccttcctccacaacctgctaatccgcgcctccgccgcgtccccttccccgcgcctctccttcgccgcattctcctccctcctccggtccggccacctcccggaccacttcaccttccccccgctagccaagtccgcctccaaattcccttccttcccgcgcacgggcgcgcaggtgcacgcc

SEQ ID NO: 148884 - DNA, 315 bp, Zea Mays
cgtgaaccccacggcgaagcccaggaaaacgcggccgatgacgagcatggccacgttcacggcggtgcagttgaggacggagcccacgaagaagagcgacgccccgatcagcatcgagttccgccgcccgatcttcttcgtgatgtggccggccactaggcacgcgaacatgccggcgaggtacagcgacgacacaaacgtggtgagcagctggctgtcgaagatgcagtactcgtcctgcgtcgcggcgttcatcttctccaagatgtcggggaagaaggccttcaggaacgactgcatctgcgtcaagccacc

SEQ ID NO: 148885 - DNA, 883 bp, Zea Mays
agtttcgacttgcattaagcaatgggagtgtcactttttctcatatttgggtgtggcaaaaaccatctgaatattctaaggcaatacttgactatatttttagcgcttcttccctccagctggttgattctattggttctgttgtttcttataagcgatgtcttaacagggactggtcccattgatgattcgaattattgaaggcttgcattgtgatcccaaaacaaattcttgaagccacttcttggactgcgaatggatggagtagatgactccaggttttctgcttaatcaattgcttgcatgtcgcgatggtcattgtttcttccaggatgtctcattctggtgtgtaaagtaatgtgcagctccttctacatcagcgcaatgtaaacatagaatgctatatgttttttattaacccactttcgtctctgaactagatgataagttgaactgtacgatgttgttataagttttcaaactctgaaggatactcttattgattgttcttggttgaaagggaagcattgggttgctacgcttcttgattgttcttccacctatgtgtttaggtctttaagttattagcgaaatatgtgaagtaataaatattctaatttcactgtataaattttactcaagaataagttaggtgtgtactcaaaggactttatttcattaattagttaaatacatgatgcttaaaacttatgtaagacatgagctagcacccagttaggaactatcgcatgtggtactctcgtgctatgtctgatattgttttgaacatggttcaatttaattatatctctccaaaaatggttgccattgctataaattttccttaccctgcaaagttcagatcatttgtgtgccgtcgcaa

SEQ ID NO: 148886 - DNA, 567 bp, Zea Mays
ctgatctagcgtttcagttcgggggagtgttgtggccaatgctggggctgtgtcctggagtggtagactcggtctgggtagcagtagcagcagcctcctgcggagcagtccttggggtgcatggaggacgcacgccgctgacaggcgccctgctcgttcccagcttcctggcatgagctggcgcggcgagctgcacgaagaagaagacggtgctgagaagcaacatgaacacaacgacagttctcgacagaatggccatggagtttgcacgggggaaatgctagttgttgctagctagtttggagtgggatgagggtggtgtgatatggtgagaactcggtagacaagttcgttgcaggctcacagctaggactggctcaccacttcttgagccagctcccttctttatacaagcgggatttacttcaaaaaggtgtgcttcaaaagcagatgagtaacgggaggaccacagcaaccgccagccaattgtttagcgtctggaagtatcagtagtttcttccttaacaaaaatcatatgctaaagggaacaccttttcctaatcagtt

SEQ ID NO: 148887 - DNA, 919 bp, Zea Mays
ttcaggctagggctgctgatatccccactaagctgggccaatcggccaagaaactttgcttcattcagggcatggtatggacaacccactgcgggttgccaaacaaaggagttagtaagaaaccacaaaatgcttagtctgagctttgaagagttctacttggtgagtaaaacagttaatcttaactactgcttggctaagataagatgttagtcaaaagaattctgtagatgtgcaatctcaaaccaatctgcctttgcatcatttagaaaactgctttaaaattcgaaatattttgcttaccatagctcatagcacagaagaatattatagaacaaaccaaggcaagtgactttctgaaacacagttttcaagaacaggttcagattaaactagataacaggatgccagcgttggtaataagtgtactccccaagagaagtcgctgttttgttctatctcaatgaaaaataacgacacgaaaatgaactatggccgtctgcattaatatggatactcagcaaaaatggacatgagtaactcaaaatcgtcaattgcttgctatgttaggcacccaagtcaatgatttctattccatgctatcacaaagattatctataacaagttctgcgtgtgtttcaaagattaaatggtccaggaaaggtaagcacttgtatttagcggacagtactagtctgctgtgggattaacccattttttatggttctcgatgaccttttgcttcaagataatatctcatccaattaatagacaaaatcacaactaatctttgttacatgtaatcatcgaatcctatcttctgtaggagcaaacttaaacggtgacatatcaagcaacactatgagaattcatgtgtatctgataatggatcattcacttcacatgtagacatatatga

SEQ ID NO: 148888 - DNA, 530 bp, Zea Mays
tgagtaccaatcactggagcaggtgccgacacaggatcctctggagctggacggtacgacccaaagatgaggcgagaggcctcaagagtaccctggaactgtgggggccaaatcagctgagcaaagatgtgacacagatagtgagcataaggcagctgtcgacgagcacgtagaccatccagtacggtgtcctcgatctcacaaatgagaaaatccacaacatcaaactctgagtgagaaactagggcaccaaggagccaaagctgaatatgagtggcagcctccctgtaacccatccgtggtagaagcgtccgtcttatgagctgatatataaacctggccgctgtggtgaagtctgccggagaacgtcgcgacccatctgagaagggcggtcggaacaaagccgcgacgtgagctgtaccaggagcaactccgccgtgagggcgacgaggagggtcagaggtgccatagcacatgctgtgaagacgagtcggtgactcgttgaatacaaacaacttgaaagggaatta

SEQ ID NO: 148889 - DNA, 356 bp, Zea Mays
ggcttccacatccactaggcttctgcatgcgatagaaaggacatccactggctgccacaagcagccctacaagaacagcaagagcacacgtcataaatccgatgtcccagcccaagttattctcaatccacactaagaaggccaatccaatcatcgctccgatggagtttgcgagcttaagcctggtcaagaacgtactcctgagctgtggtttctttgggtcactgtcgctgaactgatctccaccgagggatggtacgcaggcacgcatgcagccctcaccaacagcaaacatgaacaggcccaagtagagcagtgtcaacttccaaccccgagctgcctcacagctgtttggc

SEQ ID NO: 148890 - DNA, 637 bp, Zea Mays
gttcctagcctagtctcgcttggatgggatgttcgtgctgtcctctaatcaggatcttcctttgtgctattgggatagtcgctccaaaatccgaatccatagtcacggtgttcctcttttttggatcggtatagctgcttctacatcctaacccatgcagtttgttgtgaacttgggattcatgtgccacggggggtttgttgcagccccatcgccactgctgcagtgttgctacgagttaagtagtgggttgtgcccctgtaggggtagatggtattgacgatcgattgattagcaccagttccatatgatgtctttcttgcttcctgcaagtcgtttctgtacctttaagttaggctagatgtagtccgtctcacacccaagtgggattttctgaccagattgtccctgaacgtgtatttatgctgggatgctcccttcactcgtattccaggacacctagctgagtgtactatttaactgaacaaagcattgtttcctctattaccgttcaaaccctgatccattttgtagcatgttgacttgacattgggggaaaaagaaaaatactaggtataaaaccatggttggaagcaaaaaatccttgtcagatcattgatgcttttaaaagtaattt

SEQ ID NO: 148891 - DNA, 614 bp, Zea Mays
cgaagggaagacacgtcaaaaaaattctaatgtcctaataatagaccgccaaaattaaacagtctttaacaattcacttgtatggtcgtctaaaaaactgttttacaaggtagactgtgtagtgttggaagagtgaagtttaaatataaaaagatgaagatggataagctgctagtaatagcctaaaggaactcgtacgttatatatgcggccatgcggagtacgactatgtatgcatcaaggaagaaagacatgcatataggctgcaagctgctggtgcagtagccagtaaggtcatgcatgagtatgttgtagaacatcatcagtacgttgcggagagctaaatgaatttgtcggtttagattaattaataactctgccatatatgcagtacaccgatggcaacgcagggctagctgtgtttctgcatgctcatcgggcagtaaatagtgtttaattaacgtatgttttcaggagtattttattgcttgggtagctgacatagctctgagctagtgagcaggctgctggacagcatgagtagttgcaaatgtggagcgttccctataccatcagatcagaagcaactttatgtcgcgtatgccctgctgact

SEQ ID NO: 148892 - DNA, 377 bp, Zea Mays
agagaatagtggggaaaactaaatgactattcttggtatgagaaggaaagaggaacaagaaggggactaggttttacactatagttaggacattgtcgagtctatccacaacatgacaccgtcatcgtgtgcctactattgggtcaagccatgactctattggcctatcagaattggtctatggattgatctgatagtgtgatcttccataccactgctggctcatggctaaacctactaggtatatattattgctaggtcatggtttgacttgacaatgacaatgagctttactgttgggtcaatggattccaatcattgtcaatatcctagtcttaggaacccaacaatgaactaaattcactactggctctagc

SEQ ID NO: 148893 - DNA, 488 bp, Zea Mays
gttgctgtctcactgtctgactgtttacttttattctatctataatttatttttcttttgtcgataaggaggctgtgggctgcggttgtgtttgttccattttcactttgttttcaatgactacaggttgcaactttttaagtgatggaatcagccgtggaaggaaaggggaggaatgcaagtgatggaactgattcagaaagtaattcgtttgacaagagggatgatatgtctgaagatgaactggtagtgcttggtggaaaaattgatgattcagcggacaatgtcaatattgatgaatctgaggacaatggaagtaaaaaaggagtcaagagaaggcgcaagagggtgcagatgaaggctacagctgaaaggagatctgaattctaatactctttgttagaatataggggaaacatgaattatttagtgctatttgtaaactaattagaattgccttcacagaatttggaagaattggatggaga

SEQ ID NO: 148894 - DNA, 634 bp, Zea Mays
cgagtctgtaggagaggatttcgcggagggtttcttactggcatttggagagaccgcagaggtctacgacggcgcaagcaggggcagggatagcggggacccatcgctcctccggccagactccgcggcaaaacgacggtgcacgcatctccctgcgacttagtcttcccttcctctctcctggatcctctcggtcgcggtgtacctgacgtatgctcgtctcttcaattcgtggtgacacaagacagatgaggatcgggctcagactttatagccgtgagggataggctagctggcgtaacaaactttcgctcgttacggaaggcggttcatcgatcagcgtttgagaggaatacgtcgcgaggttgttacgctacgcaggaggcagtgactatcgaggcaagaattgggttacgtcatgatgcttagcatcacgtgggtttgtggcaagggaataaacaaatgaagaaaagagaaaaaaataaaataaagggacgtgggttgacagcctgcactagggataggctgagagaggattcggccgactgcttaatctctttctctctcttttcttaattctaggattatttaggatttaaatccccatttggatatttacatatttctttttgca

SEQ ID NO: 148895 - DNA, 681 bp, Zea Mays
tgagcttctaatcactgttgttccaagtgacttttgtagctgctcctagaaacgtgctacgaactatgctcctctatctgacacgatagtcgatagttattgggatctcatgcaagcgcactatttggtcaatatagatttctgcgtatttttctgtcttgtgggtggtatgcacgggcaagaaatgagctgtcttggttagcctatccataatgatccaaatagaatcgtggtgccaggaggtattgggcaatcccacaataaagtccatgcaaatgtcctcccatttccaagaggggatggggagaggttgttaggtacccgctacttttaaatggcttgctttaatcctttggcaagtgtcacactcggatacgtacttagcaatctctctcttcatcctggtccaccaatataaagatcggaggtcatgatacatcttgttgctcctggggtacatggaaaatttggagagatgagcctcgtccataattttcttcctaagttcgatatcctttggaacaaccagtcagccttcgaaccataaaatacccttactgtcccgacgaaagcatttatacttttccaccttttgattgagcatttccttaatgatttgaacacccttgtcaccaatctgtgctatgattatctactcttgcagggttggcttaactgaga

SEQ ID NO: 148896 - DNA, 279 bp, Zea Mays
gccaggtagtagaaggtgtagtggcagcaaaaacaatagctttgtcaggcgacaaaaacgaagaagaggtggcgtgcagaagccgaagggtgtagagggggtcggtgctgtcacatctgaggagggggcgccgagttgccgagtccttcacagtaagaccagaagagtcaaactcgatagaacaagaattatcagtggtaaaacgatgaatagaaagaagattgtggaccaaagaaggagcgacaagaacatcgggaatgcgaaaagagccgggagtgc

SEQ ID NO: 148897 - DNA, 1231 bp, Zea Mays
gaacatttagttcatctctgtactgctgcagccagtgattatgtgatccatcttcttacgaggagtatctgcactggtactcaaataaagatctcaccttttagggcctatgcctagaacactttcctaaatatcaactcagctctgtgttagctaatacaatttatctttcttgaatattagtttctccgctgtcttagctaacatattatgacttccctaaatgttagctcatttttttctatttgttaggtaacacaatataagcttcttgattattactttcctaaatccaaaatgtcagctttgtttcctatttattaggcagcacagtatatctttccagattattacttttcctaaattattaactaaaacattccaacttacctgacttttaatatcaactcagtcttcctgtttgttaggtaacgcaatctaatcttcctgattattacttttctaattattaggttcctaaattccaactgttatctttgttttctatttattaggcaacacattatatcttttcggaatattactttccccaagttattaggtaaaacattacgacttaattgactattaatcagctaacacaatatacctttcgtaaatgtttattagctgactgctagcaaacacattataactttctctgttgacttaactaacacattaatggtgccgctaacacatcatagcttttctattaccaaatattggtgcaagtgtgacaaggtttgttcgattgcaatcaatagttacaatagtagtcagctatagaattattcttttttgattgaacgtagaagtatgcttcgtcactggccacaatcaattttggttgagagaatacagatacacggtgcaagggggaactaatattcttggcttacatatttgcatattaaaaaagaaaggaaaatgtttaatcaacttgaatttgatgttttccttttttgacataatatgggggcagacaataatacacatttgaaaggcatcaaaacataataacctaaatatatggccatgttttaaaattttccactgttatattatgcactgggatttgtaataccaccattaccctacttagttctgaatatgagaatactttctgactttttaggtcatggtacctcaaaaacagttacaactaccatctccttcaaaattttcactcctcaacctagatcaccgagtctatgttttttgtttctta

SEQ ID NO: 148898 - DNA, 972 bp, Zea Mays
gctatttcagaagaatccctaagactcagatctctgccgccaggacggcgggtttatttctattttccaggagggcccatgtgcaaaaccagcccgcgaaggggtatgaaggtctctgggccatccgatcatgcgtggacggaccagatcaaagcgcatgcttatgaaccggtatcgaaccgtggtcgcccgatcgcgatccaacggttcaaagccaatcccgcgaaggggggcacacaatctaatctcccgcgtacgtgacaggatcaacggccagaaacccgtccccttcctccagccctggaccacggcggcgctgcttcggagcgcggcggcccacggccggagttctctaactcgcgcagcagagcaccaatttccaatcggatacgttctatgcgatgcttaaagaagagcgaacaacatagggtagctcaccaggtctttgctgcgcagacgacccacggccacgtgatgcggccccggttggagtccggtgaggaattgccggtgtaccgagcttcgattgcgcccaccgaggccgtgcgcacacaccggaggccgagtagaagcgtccgagttagaagttccgaccaccacggtgtcgaagtcgcgtatcgacagtagcggagacttcacccgcgcggcgagccgctctctctccctttctctctacttctcggttcgggccctaactctatcgcgaaacagaaaccccaggtgcggcacaagtgcttatatgcggggaaaggggctgggtccgcggtgcgcgagcgacggatgcgggaaggcccgttgcggacggaatcggcagaagcgcccgagcatcgcggtaacgacgagtccgacaacccggtcccacacggcagtccgtatgcgggcgcggagtggaaagacctgggtggctggcgaccgggacccgcatggaagtcaccaggcgcgcgcgcggggatggaatacgggccgcgcaaa

SEQ ID NO: 148899 - DNA, 675 bp, Zea Mays
ctccattatggtgacgtctattttttacttaattgcactcatcggccggctgccagagttttagaccaaaaatacataacttcacagcatcatgcatgtctatcaacatggctatgagattagatgttgtgtagtctttcattggtatagaatttgcttcagagtgataaatgttgtgaccaaaaaaacaaggttcagttctcaacctctcaaaaagaaccgatgaaccaaacaaaaaatattaacattcagattgctctgtagtatcccgcaacaccttcattttgtgaccgcatactgtatgtccatctgaccagggcatctcaattctgaacaaaatcaataaccaccaacagtccaaaagaagatacagttagcattacgctcgacagaattcaacttttccgaaagttctatacagcaaacagaggcaatttacatcaaatcactacagctataattaccttctgttggaaatttgggatacttggtcgccaagagttcattgtaacacctcaaactaatacaatgaaaggtgaagttttaaaccatggaagttatggaggaatcacttcctgcacatttggggctggtaccatctggaaactaaatgtcatgaatgcagatcctgttcctagtgaccatgtgggcatcagcctttcttgttcattgacg

SEQ ID NO: 148900 - DNA, 475 bp, Zea Mays
taaggacagatcatcaatctttgactttcttgggtgaacaacagttatagttagactggcaaaagaaagctatgtctaagttgatgggttaacaatttaaaattatatataagaagggcaaggaaaatctagtggcagatgcactctcgagagttggaagggttttggctttaactactgtcactgaagtgcaaccagcctagatcatggaggttactaattcttatgtaagagaccttgaggctcaacagatggtgcaaagactggctttgcacattccagacgaggctgtgttttatcttcatcagggcataatcagaagacatcaacagatatgggtgggtaacaactctactttgagaaccaagattgttcagcttttcatgagtcggctcacgggggacattcaggcatcaatgcaacttatcaaaggatgaagaagatgttttggtggcagggactaaagctagatgtg

SEQ ID NO: 148901 - DNA, 331 bp, Zea Mays
tccttgccattatgtcctcgatggcaaggtggagtagctggagaaaaccatggagtgccgcccgttcgacccggaccccatcctcaccatgccgtcctcaactgcgaggtgtagtagctggaggactacaggaagacatggtcctcgccatggcgtcctcggtaatcggtatcgtcggtacagggagacgaggtgcagcacctaggactgggcccatcctcatctcccatcacgagctcgcgtccatgcgtgaaggggacagcagccacggccaccggacctgcgccgacgtcctcgacaaggtgggagaacactgttgtgcgacgacgcg

SEQ ID NO: 148902 - DNA, 427 bp, Zea Mays
ttcgagcttcggaaaactcatacttcttgccatctcccggcagacagataattctttgttgtctgggaggcagtacaggaaatcatcttcgtccataccattaatcattaaggcccccttcggatacttcagttctcgggcatagtgtttagcttcaaaaatttcttcttcggataatctctttcccgaagcatgtcgaatgatataatcaagatcttcggagagtgcttcaggggcaaggggttcggcctctttggctgcactcttctcaaaagctatattaatatctagagttattccttcggccttttgctcggtggcggcaagcttcgtcttagtaggcaccgtgggctctgcctcggcttcagcctgggttattgtagtctcgacttctatttgcttagtatcagctttgggttgcgttttg

SEQ ID NO: 148903 - DNA, 605 bp, Zea Mays
aaaaaatggtgagccatgaagcatgaacccaaactacaatcctacaaacatgattccagtacctatgttattaaggtgtgtgcttttctttgcaagttcttgatatttcatcttgcaaatggctttgggttttacgttcgtaattgaatgtgaccattatggtcaatcgtctgttggcagttactcaattgtgataagtccgtgttcaatatggaaccaattagataaaaattttagaagcaacgatgtattgacctgagacatacacacacattatctatttcaagcaattgtgtgcatggtgaagggatcatgacacctaaccggggcgaggttcaattaggcaacttaaaaatctaagtcttaaactaaggcctctaattttcacctagtcaaaacctatacaagaaagtaatctatctagatgtgcaactatggttttgctaagtgtgttgctatctctactgcaaaagagttatgcaacctatgtttaaatcctatcactagcctagcaagctcaactaggaaagtaagcacccaacctaggtaagcaataaataaagtgcgaaatcttaattgagataagatacaaactcccgtcgacg

SEQ ID NO: 148904 - DNA, 334 bp, Zea Mays
cacgatgcgaagctcgcaggagaagaacacataggtggagagcatgatctgaaggatctagaaccttgttaggaaggaggtgcacctttttgctcttggttcatttcttctctccctttgtgctgcttcttatgttcctcagatcgtgtgcccatctcgattttggtgactcaattggcaagttgggttgggcacgtgagatctggaactatgttgcaggctaaaaaagatgcctctaaaggaagctaaaagaagaggagggctagagaagaggttaattaacatggaagtagatgattacgtccaagacaccacacctagggatgacgcatgg

SEQ ID NO: 148905 - DNA, 283 bp, Zea Mays
ggaatggtgtgccgcctggggccagagagcagcgccgagaggcgtaggaccgtgtgaggtggaggcgtgggccgtggagccaccgcaccaaatcgccgagcaatggtgagcgagagtgggatctgatgaactgttgatgtggagcgacgacggaagagtgcacaaagacgagaaatggcagatggatgaggcaataccgtgcgacgatgttgggggaccgagatgccacgcacggagacagcggtgtggcaggggcgggggcgcttggagatggcgattgtgg

SEQ ID NO: 148906 - DNA, 896 bp, Zea Mays
atttttctgtatatgtttttgcttctatttttgtctcctgaaaaatgattgtggctggccattcactcattcttcttgtagaattcaagtttctgttttcaaatctgaattgaatctaaatgaaagtgacacgagaaccatgcttcatgcttacttttgtcttatttgtgacgtttctcgcttaaagatatatgctcattcctgaaattgactctgctattgtgtttatattccttgaaaggtgatgcagttttcaaccaaaattggatgtgaacaaagtttgttaccaatttcatgtgcatgctcttggaagtttggattgaagaatgctggactgctgcttcaattcatgatcagggcatgaacaaccatggaattgggtgcattgatcgtttgttttctttcacaaaaaaatcacgaccatgtgattaaagcagtcgtaagctcagttgtatcttatttggtgggggagagaaagcgcatatagctcagtttaaaggaaaatttaggtctggagtccttacacaccttagcatgcaaggaggacgaagctgtcgtggctgtgtctggagcgagcaaatgtggtggaactttaatagaagagatttattcccgtggaagttggaactgaaaacaaatgttgaaatcatgattcagtttatgtactcaagcctgctcatgatgtgaattaattggacaaaaatgttggacagatccgatggcccttgcattgatgtcacattaattcaagaggttatgttctttttcctgaaaatgaactgtggtcaaggtctgagaattaaccatgtggttaggttccatactgacctgaaaatctgaaataggtactttgcaattggtccttgaaattcgatcaaacgtgctgagaggctatc

SEQ ID NO: 148907 - DNA, 606 bp, Zea Mays
ccacaccacactcatggtgcacggttctgcccgcagtgccttccactcccagaaccttccatcgacgccactccctgaattcctccatgccgctcctcgaaatcctccatgcccccgcgcctgaaattcctccttcccctcccagaaccttccatagacgctacgtcgtgatcccctccaccggccattcaaccatctgcttccaactcctcggcgtccaggttgtccacaagcacaagcagggggcccttccatacatggctcgccccgcagaggcaggggggccttccaacgatggagcacctcgccccgcacaggcagggggcccttccatccatgagagcacgcaagcagctctcccccttcctccgcgcaaggcagtccactcggattatccgcaaatcgtgcctgccccacggcgcccttccatctacggtgaaatcctctccctccgcgccagctcggcagatccgcaaaccgcgtctgcaaccacggcgcacttccatccacggttcgttcctcctccaccacaacttctccccctgcgccccatcgctggaggcgcgatcctatcctcgaaatcctctccctccgagccagatcttt

SEQ ID NO: 148908 - DNA, 2030 bp, Zea Mays
atggcctcttagttgagctgaaccatgcttcttgctatgatatgatcgaaggattctgtcattacattgggaagcaactgggaagccttcagaagcagaggtaaataaatccaatcggctcaactaaaattcggttttgtttcctcgcttctgttttcgacgacggtagcactatgaaattaatccacaaaacacattgttaatgggcatgagtgttggttacatagttatgagccttatggcatatcaccccatgtccgccggggccgacggctgcgatgcattttgtcaagtaatcaagacagtagttcaatagtgctagcattcataatggttctgcttgtatgtttggtgttagtaaaaatactctcatagttcagttagtgaattccaagcttccaactaccctttagtagtgtgcgaagagtgcaaacagaaaagcgttatcctgatgctcaaacaatgaacccattttgttttgtgtttttttctttccaaacagggattgccccccagaattcagggaagctgtctcaaccctgatatttgctgctgctcgctatcctgatttacctgaactttgtgacctaaggcacatattcacagaaagatatggaaattttgttgagcattttgttagccaggaggtacgcaatatgatgctaatatgttgttattgaattgtcttatgcttttgtggtcctttgctttacacacaatattataatttgatccttctgtctgcagttcattcggaaacttgacagtacagagttcactaatgaggaaaggttccaagtcatgcaaagtgttgctgaagaattatccgtcagttttgatgccaaggaattggaactcaagttatgggcctcactacaaacagaacatgtaagtcctccacaaatttattacctatttttccaaaacaaatttattacatgaactgtgatgtaggcacactaaaatgtccttaacttgaaatcatttaatgtgttttacactttcccttaggatatgcttgagaagggttcaaggaagccagcagaactagcaatgccttcatcgagcaagcagatatgtgtcgagaatgcttcatgtgaagaacaagaggatatccttgagaagagtttgacaaggccaacagaaccagcaatgtctttatttgacaagacaaagtacaatggggatgctccatgtgaaagaaaaaataaggatatgcttgagaattactcaaccaagcccatagaactagcaactgcttcatccaacaagcagaaggttactgagaatgttccaggtaaaagaaactatgatgctgaacctgcacaccataccgagaaagtggagatacagttggtccaaaaagatattcagtctgttgctgatgcacatcatacaattgatgagaattcgaggaagcagcaaccttatgtgtctgatgagaaggaacatttgcagaaaccagtgtctcctgtggacactaacaggacccaaaaagatgttcagaagcttaacagaagagctgtccgccatttggaaaaggagctgatggaggcagtggaacttgatctcaacggcctaccaaaatttggatttggcgcagtcagatttcccgaagcagaaggcaacaaaacagttcaactaaatgtcaagccaaatgaggccgtgagagatttccatattgaaaaagagaatgatgaagtccttcattgttcacgtttgcctggtggttctgaacacaatgggggacatgcagattcagggctaagagctcagggcctagagaatcaaggacatccagtgagtcctcttagtggtaacactagaaaaaaggctccttacactaagctgaatgctgtaaacataaagaatcctactgagaaacaagcaaacaatggtttcttgcatgataaaccgcaacatttagctgatctgggatacccggtgcagaaaggacaaggagacccagagagggcacttactatgctgcctccttatgttgaaccaaagtctaacatgcaacctgtgaa

SEQ ID NO: 148909 - DNA, 566 bp, Zea Mays
cgaaagtgcttatatacatagacttggaagtagagttcagtctgtcactgtaacgctgaacttttgcacctctacagactacggtgttgcattctctctttttctcatttgttgaacaagacttcacaaataatgcaaagttaatattgtgaagggagagaaggcgagggaacacctcagtgctgcgaaaagtgtatctaggcaggccacttgtttgattgttgtggcactttaatcatgtccaaaacgttatatgccttacattattgcgttaccaaattaatcttgccattcgtcaatttccaattattgtttcttccactcttctattgcacagtaaacagttcacaattattgttcactagggtttgcatctctacgctcgtgggacattcctttccatttggttatgatgtccaattttctaaggattaatttggtggataacctctgtcccacactcaacaatcgtcatgtgtgtgtgtttatacataaacaagattaagctttctaatgctgtagtaattgattagttcgcaatggttcggtacataatgtgttttctc

SEQ ID NO: 148910 - DNA, 598 bp, Zea Mays
tatgttcatggcatttgtattagctgatgcattgtccaaagtgatggaaaataccttatcaatcaatccaaattcagcaataacagttttaacacgatctgcgatattagccccactatgtgaaacatcaatcaacctcataccaattaccctcttttctaaaacccaatcagcattaacatagtgagcaacgacactgatataatcttcctttgcatttccagaccaaatatcagaagtaagagcaacacatgaaacaatagatttcaacaaatttattagcgaagtacgactttgattataaaacttgataaaatctctagtagtcgtttgtctacaaacaacagtaaacctaggattatgagcatgttttatgtaccgttcaaatgcagcagtggaaccaatgcctaggggaagatctaaagtacatatcaatcgacacaattcagtacgagcaatatcaggattatagtcccatgaacgaacagagccatcagcattaaactgaattaaggattgagtcttagcagcacgttgagctttagatgcacaagtaatacgatgtcgttttaaatgaccagtaccagcagttgacgaa

SEQ ID NO: 148911 - DNA, 303 bp, Zea Mays
cacggacgggagggtggcaggccctgtggctcttgaaaaagatccttaaatgtatctaggatcccctgcagacgaagatcatgtccaacttccaaactgcgtaactgaactgacttcccatgatgtagaaggccttgcaaactgacatgtccaccctcgaggaaaagagacatttggagggagtcaaagttccagctgatatcacccaatttctggagccattgcaccccgagaactgcatcaaacccttccaagggaatcaccaagaaggaatccgagaaggaatgatcctgtataccaaac

SEQ ID NO: 148912 - DNA, 620 bp, Zea Mays
gctgtcaattcaaaacgaacttatgttacgggtattgaacagaaatctgcagttttgcactggaaagtacataccgattgacacagagcgagtgcagcatgaatacctgaaaaagaacatcggacaagtgagttgagcaagaaaaaacaagatggcagggaagggaagagcatgcttacatgtagcacaagttatatgttagagactgcagagcatctgcggtgaacttgttgtcatctcgtagcacatggtaatgcgcaggacggcttgttccctgcaattccacgagcagctataatcttcagattctgaattagttgtaacacatgctacacacataccttggccccagcatggctgcacaggaagaaatcaaattctgttgggtggcagatattattatcaactacggtgcctgcaaattccataaacgtttcagcaaaagcattgtagaaaaaacgcaatagaaaaaacagcaaatgcgcctgcatccctaaccagctcgaatattcccactcttgtcctcgtattggctattgctggggaagagccttgtgtggtgcctcttctgcaccactacgaaggtgatctttggcttctcattgtaaagagctgtccat

SEQ ID NO: 148913 - DNA, 288 bp, Zea Mays
cacggacgcgccacaccagcaaccctcatgggcctcacacctcatggacaactctagcggtttcttctgggtctacagtgggcctttgccgggattcggcccggctaaaaggcccaggtagatgtgggcatggcgattccttttactgcaacacaaaccctaccttggttatattaaaaacttactctgacgagagattaagactcgaactgaaacaatttacaatggaactttatatgacttaatgaagcttaaaacctgcatactgaaccctgcaactcattatgc

SEQ ID NO: 148914 - DNA, 454 bp, Zea Mays
ggaacgctgtcttctcaatatcatccgggatgcgtacttggtgatatccactgcggaggtccaactttgtgaggaagcaggcaccacgtaactcattcaagagttcgtcgaccaccgggatggggaacttgtccttcactgttttggtattgagggcccgatagtcaatgcaaaagcgccaggatttatcagctttcttcacaagtagcactggagaggagtaggcatatgtgcactcccgaatgatgccttgctgcaacatgtcttcgcactggcgctcaatctcgtctttcaacaactaggggtattggtaggggcggacgaccactggtggcgtccctggcagcagcctgatgcggtggtcgtgacgacgaggtggaggaaggccgcgcggttcagcgaagatgtcgacgtaggactagagtagggcctgcagcagttcttggggttccga

SEQ ID NO: 148915 - DNA, 880 bp, Zea Mays
atctattaataaaaaagttaatggcaaaccacgtgacagatgggaagcacaaacactttatcaaagcagattaagggggacaaacacagtagaacaatgcccataatccttagactgattacaataatacacataagcatctaacagtttaggccaaaaagattaaaaatggaaatgctcctttccattttgttatcattcagcccaagaacccacagacggtgatccgaatcattagaggtcgaactctgcaccaacagattatgaaaatgatcccccaaacagctgaacacaacactctatctaaatacatcatgacaccagtggtaacaggctagctacttcaccctagtaaaccattagaaaggtggtctggtgtaacgtttgtcctgtccgaagcgtcaggggttccagttacttgacacctacatgtttctccattacattatcggataatcatatccctccacttacccttaacgtccacctacaatacatcatacatacaacccatcagtaccttgattggcaaccacagcaagttcactataataaccaaatacaaaccggtgttctgccgataaaaaacgtcaggattgttatctaaaatatcctttcaattgccactaccatacctacacatgaaacaagcacaatataatgatgaagatcatacaacaacaacaatcttctaaacacaattgttttagaacaagaaagctgagatgtcaaataataataaaataaatcacatcaagacaaaacatactgttcaacaccctttcttagtgtttcttcctctaacgagcaccaattccttgcctttgtacgcttactcttgttttctcgtggtgccacggcaagggcggacagaaagcac

SEQ ID NO: 148916 - DNA, 369 bp, Zea Mays
tcgcagcgcaacatatatattgaataactagtgtttcttgaatttagactacgtggcacgattctattggtggaaggctaaccatacgatggaccacatgaaaaacggtcatagaagatgtgggatccattgtgagggctggtttctaggatctcgtggatgcatgtgggtggggccaggcaatttgcaagcacatacggaggtgtcgtttgcatcacatgcaaggggctcatgcatgcggttgttgcacgatgtgtgtacggtggtgggatttgcgtgcatgcggccatgtagagtggaccccacgtcatttctactttcttccttggctgaaaacgcacacggtggtttcttctacgcgaaacgcgg

SEQ ID NO: 148917 - DNA, 589 bp, Zea Mays
agagagattttgacttactaggcatttaatcccctggaattcatatggattaaaacgaacatgccctcactagtcatcaaaccaacacaaagaaaatgcaggggtaaggttgtttcagttattctttcctcagatctcatttatgtaggaaccattattactggatctgtctttttttttcctgatggcaaattgatgtttgatcgtgagagaaaaaacctgactagtagcgtagcgttctcttgatacgtcatgtgtacctgttcttgtaccctgctatggcatagaaattcaattggcatgttgatctggtgaatctaataagtctaacagcgaaacagcctgtcgtcaccccttcctttccgctgtcgatggatttgctttgatgctgcctgcttgccttaccctgcactggaacaaagcataactatcaggcatttgttcttgcatgataagacatgacagcaaatgattcgagagaagaacagagcagatgtgaaaaagaacagtttgtatctagtgcgtactcgttgctgtctttggaattattgctgcattgttttcgaatcaaactgagccttcgcgtcgc

SEQ ID NO: 148918 - DNA, 437 bp, Zea Mays
tgctgagagcacgaaccggaccaaggttgtcctgtcggcaaggtttacaagtgaggccttccaactaggcagccagttagctatcttgtccacccactgcaagaggtccctcctccccaacttcttatcagaaacaggcagccccaaatagttgcatggaaaagaagccggagtgcactgcaaaatgttagagctgtcctgaacagtctgagcatcacaactgatagggatagtgtagcttttgtgcaaattcacaactaaacctgaggcctctccaaagcaatccaggatcatcttgacacaaactagatcttctgtaggcttgacaaaaagaaccacatcatctgcataaatggagagcctagatttcacgttcctgatggccaaatcatgcagcaatcctctcctcatacagaccatttctaaatgaatgcatg

SEQ ID NO: 148919 - DNA, 551 bp, Zea Mays
acagaaacaagcgatatgctggccacaaggcataaacaggccatgcaattcttttgcgtttcataacaacctagcgatcaaacttgataaagcgctccatgcttcccatggatgaacctcgtatcgaggggcgcttatcaatgatgagtgaaaaaacgggtagcttctggacatgcttcaacgctgcctctgcgatacgtcgcgttctggaatctccatgttggaaagcatgaacaagtgccgatcccagactgcgatcagttgaagcggcttgggcgatatcctctgcccttagaatcctctccacagcccacgtcaccctgtgctgaagactgcctgtcgggttctccttcaagatgtcgaatataggtgcaactccattagacctatggagcaccaagacgccctctgcagcctccactccatcttcaagcagggtgcaaatagcagccagagcagcctcgacgaccttcttgttagaatggttcaagcaatggatcagtcgttccacagctctcccttctaggatgcagaagttgtccctgatcgaa

SEQ ID NO: 148920 - DNA, 1347 bp, Zea Mays
tttctaagtcatgttattatataccaagtagatcacaaattgcataaatacatcatgaattctccttttaacttagtgcatatcaagatgatgttgattgaaattaccaattgaaatcaaattgtaattgcatgaagcactaagaagcatgagtgataattgaagttattcaatgatcatacaatagatgcgatcaaaagaacaacataggcattagattttcaaacaagctcataaataggagaatccgataaatatgctattttaacattgagagctacaatccttgataaaggtgacattattttaccaagatggattgaaatgtagtagcatgccttatgagaaacttgttttcatacatgagacaatatgagatttctaagttaatgtgctagtctcaaaataatcaagatatagaaataggctccccctagagatatgcaccaagaatgaaggaaatgggtggatgcactcacttttaaaggcaaatagggagaagcactatatatctcgatcaaggcttaaaagatttgcaataaacaatttttgcctagtattctcataatgaaaagtttttgaatgcttacaaccacaccattggatgttttgaagatctcatatccaagtaggtgttgttgctcttgatgtcttcctttttcatttgagtgtcctccctttatagttgactctttttccttccaaacttattgaaaatactcaagagagatgttaatagcacaagggagtaaaagatgaatgatgatttctttagagagaaagtaaatgcggttcatcatccatagatcacactgacatgaagtaaaatccttgacattagtgcacatttaaacatttgattaagcataggaatttacttcttcatattgaatttattaatcattacttaaaagcaagtcaatatgagaacatatatagcaaaggtatgaaatagattctaatggataagtgcattaatgagaatgagattgaatgcacatcttagccaattttaaagaatctatttcttcacaaagatataattagagtgaataatcattgatgggaactaaattaaagagatgagttcccatacctttgctttgacctttcttccttttgggtgaagagtaccctttgaggcttgtggctttaaccttgcacttactctcttgtagattttcataagtgagctcaagagaaatgttaatggcaacacaagcactagtttccctttgagtaatcattttgataaggaatggaaaatagattactaaagcatggaaactttataatatgaactaggttattccatgatgcatgcttagtttttgcttacaaaacaag

SEQ ID NO: 148921 - DNA, 476 bp, Zea Mays
attaaacatggtgctgtggtggagtgaacacttgtccaggttcagttgcaaattctattcaccccgctacttttctcgtgtgatgcattggttgttatggcatccagtctaccctctactcttctcctcgtgatacattgtttggcgtggctgccatttcttttaactgctaattcgagtattgccctttgaatgatcagggaaatgtactttgcagagtgcttgtgagtcatgacaaaacacaaaggagcgcatgtaaatgctaggcgacataaatgaagtcagaacccacttcagtatcacaaattcacaatcatctctgaattcttaagcatccgtccacgcgttcctgcattcctgtgcatcattcatgattgcttttgtagctgctggtttggttcttcaccacttgattctgttgcatcaatttaatgggcgatgatcaaaagggacatcttaatgggtgatactcgcct

SEQ ID NO: 148922 - DNA, 821 bp, Zea Mays
ctatttgtcattcgatgagccttttctttttcttcatcagtccaagttgatagagtgtcatgttttgttttatgtgcaaacaatgaatattccatttttactgtttcaggtaagattccactctcaaattggattaggtttccatgaactgagcaccgagttctttatgtcttctctaattaagctgacaggataaaaaactcatttttcatttggtggtctcaaatgtctaatgcagtaggtgatctgaaactaagtttctttttgtcctgtagtttgactatggcaatggtctttgttagtccataggatcgttagctgtggcctacggatatgttagctactttctttctttataaacatcaggtactatttgtgattgagtttgccatgcaattaagccttctaggcttctagcaacaccattgttaaccttttttcccctttagagtacattgatttcgtttatttttgttccaaatagtttctcagaagttgaaagacttttcaaatcctacactgctgaggcagaaacatggaaagatggaagttgtacgtaaagggtagtgatgctctttctgagaatcttgcaggaaaggagatgaccccatagttaaacatattgattctaaacttatttctaaactgttatttgtgagctaaccttatttgtcaccgagtataacaatgcaacactcttttaattctttaaacagcatcagttaaagactcgcgcggggcgcgaacgagttactagtttccagtgagaacatgttctctgcaccgtcgtggttaacgggtttaggacactattagagctg

SEQ ID NO: 148923 - DNA, 671 bp, Zea Mays
ttttgtttgtgcataaatttgatttgaaaagttaaactcagtgttgaatttgaatatcttaaactaaaataaaatagaaaatggaaactaaaaagaaaaaagaagttacctgcgcttttgggcccgttcacacccgccggcccatctctgcaaatatgcaccccggcccaactgaccatcccgcaccagctatccacatcaagcgctgacaggggggtcccacccacagcctcacgcttggtgccactaacatagcctatgggacccacatggcagctccatcccctccgcgcgatcacaacaaaccgggatgcgatcttaacaactccacaccaagatttcctcggttgttactacctctatccgggatataaaatctgaggcctagcaccttgaatcccaagtctcggccatggtcccgagcacgccagagcgccaccaccaatcgagcagagaatcaccgggagagggatgttggtcgctggcgccaatccacatgttcactgtcgccgaggtctcaacgcatggctctgggggctcgctggcgtccattgtgtgcttctgtggccacacctagcgggaaggagtctcgggtcgcggtggattgctcaccgaacttcggtagttcggtgtgcacgttcgtgccaccccacgtcgtggccgggcgtcac

SEQ ID NO: 148924 - DNA, 1473 bp, Zea Mays
tatctgtctatgctgccatctgcctttcttttaattttgtatacccatttgcaatcgataagattttttccttcctgtgctggtactaaatgccatgttttgttatcttgcaaggcactaaattcctcatccatagcatgtttccaatttttattaccaagagctttagataaatcatgtggttcattaccaaccgctaagcatccatagccataccttatagtgccatctgtgtatgcttttggttttctgatccggttggtccggcgtggaagatttgttgctgcagcattatctgatacagaagacccagtgccagggacatcctgatgtgaaaatccatctcggttgacaatgggccagtgggctcctgacccatgtccgctatcggcccaccatcggacgaagtcgatgggttgccatcattgcgcaatgatgcgctgccggcacctgggatcgtgcttgatctttgctccaagatttcctgcgcacaagcaccactgttttcttccaaagaggtatcattaggtgcagaattttgggtattttgaatatcaggcaacaatgaatcagctacattagtatcccccggataattcatggtggtactggaaggaaacaagtgaggaaggagattgacttcagcccgtaaacgagcgccgacattgggatggaactcacggaaaggaaaaactccttcatcaaatatgacgtctcttgatatgtagactcgtcctgtactaacatcaaggcatttgtagcctttatgagatgaactatagcccaagaagacgcatcgcttggaacgaaaagcaagtttatgagtgttataaggacgaaggttgggccagcatgcacagccaaatactcgaaggaacttatagtcgggtttcttatgaaagagacgctcgtagggtgtcatgaagtcaatgactttggatggggttcgattaataagatatgctgccgtggcaaaagcttcatcccataattttaaaggtatagatgcatgtgcaagcaaggctagaccaacctcaacaatgtgcttgtgttttcgttcagctgggccattttgttggtgtgcgtgaggacacgatactaggtgtgctactccaatttttgtgaagaaggagctgagtttttggtactctccaccccaatctgtctgtacaacaataattttgctgtcaaacattcgttcaaccatattttggaagtcataaaatttctgaaaaacttcagatttaaaacgaagcaaatagacccaggtgaacttactataatcatcgatgaaagaaacatagtatttatttcggcctaccgaatttgtggcaggacccccatacatcagaaaaaatgagttctagtggcttggatgaagcactagtggacacaggatacggaagctgatggctctttgcctgttgacatgcatcacagacagagcctttatttgactcaactaaaaagggc

SEQ ID NO: 148925 - DNA, 321 bp, Zea Mays
ccccttcgctaatttcatctcggcggtaggatggtgatccgagggatgggagcggatactagcgtggttggatctcggacgttggcctcgaatccgacggttgcggtcgattactggttcacttaaagcgccttctaatcgcgactctcggtgtgtgatccaacggcccagatcctagcgtaccccttcggccgtgactttttactaaagagaccctgaactatgcagaaaacaacccgcagtccactcgggtgttcccctgagtctggagaattcttacccgagaccacctggtgtctcctggaattgaggcccagtcca

SEQ ID NO: 148926 - DNA, 340 bp, Zea Mays
cacgtatctacacctttccaccgcatcgccgtgacctgttctcactctccgttgatcaccggagtaactgccacggcataagacacgaattcacgtgcgccagtaaactctccctcctccggtcgccgcgcgtcgtcgctcaaattcacggccaccgctcactaagcctataaattgaagccaccgtcagctccgcaacatcatcacgcaccacaccacccagtattgctcctagtcgatcaccagtgagcgcgaattttgaacttcccccaaatctgctcaagaacaccgtgaaaacaacctcaccgcggccagctcaactcaggtcagttcaagttgc

SEQ ID NO: 148927 - DNA, 1288 bp, Zea Mays
gctatttgttggaactgaaacacgacggtcggcgatgaacacgaactgtggcagcgcgacgacagagcgcgatcagcggagccgacggacgaacgctgagacagaggtatttttgggctgcaactcacgcgcagttttctgatgcattaacagagtcttattacacagagtgatccgacttccccgccactccccgcagctgcacgaagcccctcattttcggtggcccgtgcgacatgcacggcatacaggtggtggcggcgaatacccgaacgacgcggtcacgacgcagactgtgcagtctccagctcgccgtgatctacgctaaaacaaatatgccatgcagtaacacacgcgacagactaatgcatctacgtgcaactaatgcaagtactgctgacgcactacaagattacagcaacatttggcttcgtcagtatatctgctaactgattttcagagctgacatgcttcacatccagaacaccatttcccacacattctctgatgtaatgatacctggtatctatgtgcttgcttctttcgtgatagactggattcttgcttagttcttgagccgatttattgtcaatgaggagacaaaaacgcttcacatcagtgcacataaggtcccccaatagcctgctcaaccacaccccctgacaggctgctgaagctgctgctatatattcagattcgcaagatgacagtgacaccactctttgcttctgtgaacaccacgtgatgacattgttgcccaagaaaaatacaatcccacttgtgctctttcttctctcaagatcacctgcatggtcactgtctgagtagccaactaatgctgcatctgctccctttgaatatttgcagccatattggatggttcctgcaacaaacctgataattcgcttgatggctgtccagtgctcagcatttggtgtttccataaatctactcaccattcctactgagaaggcaagatcaggtcttgtgttaaccaagtacctcaaactaccaacaagacttctgtattttgttgcatctagaatcagctcaggcttcccaggtaacaattttaggtgctgctccattggtgtatccacaggattacaaccctgcataccacaattctccagtatcttttcagcatatgcactctgacagatagtgatctcccctggtttctgctttacttgtaagcctaggtagtaactcaataggcctagatcacacatattgaaccttttcatcatctgttgcttgaagacagctatctcattgctgtttggcc

SEQ ID NO: 148928 - DNA, 819 bp, Zea Mays
atttcgaaatttttcgatcggattcaccggtaacggtatttttcgaaaacggaatcggttttcggaattttctatcggaatcggaatcggcgttgtgttttaccgaccgtttccttcggttatcggtatttgtcggaaattaccggatttgtgtctcggaaatttccggaattgtgtctcggaattttttttcggaattttccagtatgtgattttttcgcatcacctatacgtctctggataagaattacttatttttgtattctttggacgttttaagatttttttgggataaatggtgttggaagacagttgagattaatcatttggtctctcaaacgaatccacgcttttctatgcacatgttatgtattagtaatatataatgatagagagccaacagtctgtcttttccacacactagattttagggcatttatgtgaggttgtgaaaaaactctttatgtgaggaaaaaatatttcatgagtaagcatgccatgtcagctaaatcgagtggatattgtgaattgtgaactttgagtctgtaaacttgtgatttttatgaacttgttatactgtgaacttgttatattgtgaacttgttatctttgtaaactttttatattataaatttgtgatccttgtgaacttgttatattgtgaacttgttatatcataaattgtgaacatgtggtctttgtgatcttttgtcaactttgttgtattgtgaggtttgatatgtttaccgatcgtattttagttttcgaccgttaccagtgtattttccgcaccgaactttcgtttccgatgtttccgaa

SEQ ID NO: 148929 - DNA, 465 bp, Zea Mays
aaacgacacatgtaaacagttgaattaatacgcgtcaaataggagggtaacccaaatccctgcaccggaggttgacatgacatgacatttttatgaacatactttcaatatgaacgaaagcatttcacggtttggtgcaaagctggacagtcaacaacatagcggcatgccggcatcacgattcaaccaacagaattgcagctcagcttgataaggcatgaacataaaagcattgaaggccagaaaagtgtatgtgatgaaggattgaagtttttggaaacgtagcagcatcaggatcttggagattatattatagtaggcgtacctacatttatacgaacaaaaaacgctggtcttaaaggccagaaaagcaagctaatgagcgctacagaaaatatgtgttattttgaactgcaatgttcagtctttatggaggtaaaccaaaagtactggttttgaaggggc

SEQ ID NO: 148930 - DNA, 365 bp, Zea Mays
atgaatcccaatgaagataaagtggatgaggtcaacaacaagattccaacctcgacagtggtgaaaaggaaggatgagtcacatagatatctgctgaatggaatgaagaacaacaagaggaccagaaaaatgtttgggtacaagattaacccgcctcaaccgcaagcagaagcgccaaagctcgtgaatacccaaacaggataatcaaatcaagctcagctgttcaacatgcaggcaaccgatcaaccatcatctgctggcaatcaagcaaagctgacacacagagaggtcaaagtaagaggtgcttgtttctactgcaaggaagaagggcacttcatttgccaatgccccaagaagtgtctaga

SEQ ID NO: 148931 - DNA, 1090 bp, Zea Mays
tggattaaattggagttgcaatgccaaagttatggactaaataagttttatgagttaattgatgtaaattttatatctggaattgcttccagaggattttctgcaaacgccaggggcctctatgcaattccctactactgtcgggacgacgggttcaattgtagaaaagggtaggggctaaactgcatactatccgggttgaaggggtatccatgtacgagggccgatgataaatctgtggtcagaattagattctcattgtaacgaaccataacgctataacgaccgtcagatcaaggtcagactatccggatcacaggcgcggagggactcgaccagagttgcacatcaaccaatctacgaccctgatcgggtcggatcaacgcggcaatccggttctaatccacaccgtctatcaccggatcaatgacttgacactaatcccccaacatccgcctagatacctaatcttaaccgtctctccacgaatcaacgatcgtgaatccgcgacccccatcctgcacgactctggcagcgctgtcaagtctgcagcggcggagccttcactggcgacatcgggttctaagtgccagggctctataccccaaattaatccgcccaacgcaacaccccctaaccctagatctggtacgccccgcatatggtatcagatagtgctccacggacctcggtcacggcgagtagctgcgccacggcgcaatccagcgctggtgagcaattcacagctgataaggcgcttatacgctataacacttgatggtacatcgcatggagaagcaggaaggggcagtgggagatcttcatcggtggtgacgccgcgaattgatcgacccgcggtgtggggcggaaacacgatagagactcccgccaatgtgtaattcgccgtgagcagggcatctccgatccctggcgacctccgctctagctactgcggcttcctggtgacctccccagcgtgtaaccggatcaaatcggtggcgagccgtgggctgcgtgtgatggctctcaattcgcagcgcgcaatggtgaccttcacccaattacagcggcgtatgacaatggctagggg

SEQ ID NO: 148932 - DNA, 629 bp, Zea Mays
acatacccatagtcatccctgactatgttctggggcgattgtgatatccttccgaggggcgaaccttcgaaccactgatcaataacgggcctagagcccatgtgttctagggcaatctcccgagccttaccgggggcttgaccttctaacccctaagcagtaggtgaggtctctcctcttctttctcgaggaaggaagcccgaggtggagacaccctcttctgctacctgcaaagtggaaaaggaggcacatgagagagtgggagaggggtgcatcttttgatgcgttatgtgaagcggtgctagctggctgacgtcaggaagagtgggtatttaatgcaacgggaagcttcggcccgtaggccgatcgttgcggcacgcgtgcacgtggatttcgaagcgacctagcccattcctggtttggactcaggatggctcagcccacgcctcggtgattctgctcgcccctataaattcacccgagaggggctcttcggttctttacttccctctcttgctttcctaccctagcctccttctgccttagccgcaaaaaactcatgcgctcttctcccatcttcttcgttagctacgatggctaagaagttgagcgttctccctccttgcgac

SEQ ID NO: 148933 - DNA, 531 bp, Zea Mays
gcggtggagacatcgacagacgcagtgtgtgacggaggcggcgcaacgaggatgggcggcgcgatagaaacgggtgcgatcggcaagcgaagagagacatcggtgacgacagatgtaggaacgtcacatcgatgtgtggcatggccggatcggagatggccgtagcgggaaggcccaagcgtgctcggtccacacagcaaacgaccaattaggcagaagaagtgtcggagaagtgaatgtcgtcggtcagaggagcaccagcgttagggtctgctgccctggcaaagttggatgagggcagggaaccatggtggtgctcggtagggcaagagatggcacgacaggagcttccacggcgacgaagaaatgggggctaggcgcaaggaacccaaggggcacagtgtcggctgctgggacgaaggggggacgtctggaggtgggaccggagaagatggcgaggttggaggtgatgtggggggcgttgcaatccgccggcaaggaggagaggtcgagaaggggcagagatggtcg

SEQ ID NO: 148934 - DNA, 493 bp, Zea Mays
ctatgtttctccaacctattgggtacagagtctaagagatttgcctcgatattgctttcaatgttgcaagtgaacaaatcactccaattcaaatggaattccatgattcaaacaacaaatctcataacgctttgttctcgtgtctcttgctacgtgagtttgagcaagttggacatttggctatgactcatgagatctagtccaccctcgagaaattccactagggcggtgatcaagtgaagactaggctctttgagacgtatcggcgggagtatgagaattgtatgaagttggttggagagaccattgacatgatgttttcttggttccattcgattgtgaacaagatgtgtaccaacaaggcacaactaccatatgttgatcatgagagagcgctcaagctaaaccatgctctggatcagagggtttgggaggtgaaggtcttgatgattatcgagtcgcccaactacgaggctttcaccgtggatgagtt

SEQ ID NO: 148935 - DNA, 540 bp, Zea Mays
aacaaaggtgcaccaatcctcaaatcaaacagttctactcgttgcggacacgcaggcgaacaagggcaagggatccataccgtgaatcgtgcgcgtaggtgtgcagtccacggcgaagcgcggtccgcgacggcggtgataacaacagtgaaaaatctccgccgttccgcagcttctcacgcccgattacgcccttgcgcacaatcaacacttgctttaggaccccagggatcgcttcgcgggcgttgggagacgacgatggtgacgaacgactacggcgggtctcacggctcgaagtgggtcctggtggtggcgccccaggtatgctcaacagaggccgagaggggttttatatgcgtggtccgagtctcctcctgtccgcccatagcgccggtccgatagggaggtagttgcgccctccagggaggtgcggtgagctaacgccgcgagagacggggagaagaggaacagtggttccggtcccacccgccaggttcgcgcgcgcgctcatccattagaccgtgcggctgccaggtaggt

SEQ ID NO: 148936 - DNA, 775 bp, Zea Mays
cggcgctgtgggcgagcttcggccgcacgcccgcgcacgccaggcagctgaggatcaccgactcgccgttcccgctcggggacgacgacggggactgtggccaggtggacctggacgccgaggatttcatcaagaagttctacgaccagctgcgcacgcagcaggcccttgccaccgccacgccggactactgcggcgggtatgcgcgaccggtctctggcatcgcctagaattcaacccacgcatccacacgcgtatgcatatgtaatatatatgtacgtgtccatagagtatttgtttgaacatgcatgatgcatgcatggataaagcatgttcgtttgagagctagctactggtggtagagctagtctagagcttggtctttgtgatatgagggagagattttgtacaacatcatcatatcatgtttgcaagctagatccatgcatgtatagtactcctatatatgtgtacgctgtatgtgtatattttgttgtagtgacatgtatcaattttactgcaagtaaggtacatgttgcaaagacattagcatataagaacactggtgtattacatagtataagaattgcgctcgtgtgtgtggttcctgatgtcctgcatgctggccctctgtccatgccagggacttgtacatagtgttgttctagaaaccactgctacatgtaattttcagacaatctatggtcggtatgctgacaaagatcgatggagctgtctggaatagtggaatcttctactcatgaatatattctag

SEQ ID NO: 148937 - DNA, 907 bp, Zea Mays
ggaaagcgcgcgcgtgtgcccgcgcgttggcggctttgcagaagggtccctattttcttgaatatcccgacaaagcccaaggcactatttaacacagtcgctgacaattgcaaagacaccctcgcacttctatctattctcggtttgaagtccccaacgacggtgaacgcggtcgcgctccggtgagcaactgtaccggccgaacggggccatgaccagtgctcccgagcgacagacaccaaattagacctgccccgagcatttcccctaagtcaattgcatgattggtgacctatttcgctctgcccacgaggacagcgaaagccatggacattagttcatgttcccagtgattggtgggctcctagttcaattggatggtttggagagcatcaccagcatacagggacatgagaacaacgcgcgaattggatggtgccttaccagaacggactggccacggtggagttgtgctttacggtggcggagaccaatttgggggaaaaggggaattctccggctatggtgggcaatcgaggggaagaacgggtgtgtgggcttcgtgatgacctaacgcagccgtctcggccttcaatttataggaggagcgagcggtggtcgcgaatttggacgagacacacggcggctggaggaaaggaagctttactggtgcagtggattcgtggcctctaccgtggcggtcattccggtgatcaacggagaggctagagggagtcacggcgatgcggtggcgaggttgggacacgcggtggacaacgacgatggcacgacggtgatgagattccaatccgagggcggtgagaaaggggaggggtatcatggctggccggggtggcatccagctcaccggcggcgaggatttttactaggctgtgcttatctgaca

SEQ ID NO: 148938 - DNA, 618 bp, Zea Mays
tgaatggtccgatgtgtatccagcataagattttgtggggtcttctctttgtttggaatgaatgaacacaacccacatgtcactgcacgaaatgttgctaatttgctcaaggatatagaaggagatcctgatttggccgaaatagagttatacatttatccacagctcttcttaagtagattgggggttctccctatcgctggttggaccctaactgtgaaaagctttcttgttccagactctgttgtaatgcttaacattatgattttctttataacataggcatatgaaaataaagaagaggaagaaaatgttgaggatcgagaacattcaaactagtatattctgtggcgagatttgaattccacatgtacagccaaaaaattgaattcaaaagagagaaaactctactaagttatcacaaatactctttcatcctgtagcggcacaccaggagtgtactagtgttaaatctgtagtagagtcagttgctacctcgcttgctattctttatgattcgcttgtgacaaagaatctattcttgtcgataacccaattcatagattttaggtcttccccgcattctatttacaatgtcacggagaaatgactaagcaa

SEQ ID NO: 148939 - DNA, 433 bp, Zea Mays
cgagaatgcttaaacaagggagcagaggggagggactaaccggagtatggctggcgacggtgagcttggtttcacggtggcggaaatcggatttgggggaaactccgaattcgagcacacgagtggataattgtggccgattagcggtggctggttagcttaggaccttacggaactggtggggggctcaatttatagggagcgacagcggcggcgatcaattcgagcaggttgtgttggcggccggaggggaagaagaaccttggcgcgcggttacgtgtcctatagcgtggcagtaactccggtgagccacggagagttcagaggaggtcacggcgacacggtgaaagagttgagccacgcggcacacgaccgagaggcggcggtcgacggtgagcactttactacgggcggtgagccaggggagatgtgc

SEQ ID NO: 148940 - DNA, 490 bp, Zea Mays
cggtgtagtgcagatcatagtattgcaatgaaatgtgttacaacttgtgtgcctgtgtgcgagaggaagaggggccttcccttttatatctcaagggacaaaccttatattgttctctcttagaaagagagagaaagagagggagagagtagagggagaaagagtcctttggtttttgtggcaggccctcctctcctggtcgtgcaacgtagtgcttccaatatggcgccacccgttactcctgttcctgtggcaggttcatggatgacctccctatgatgatgcgtgacgggtaccatggttcagccctagggcttgatgaacatggcacgactttctcccgtcatcatgggccctatgttgtccttccgtgcgtatggatttgcctatttggtatggcgtctcatcctattgcttccgtcacatcggctactatggaggctctggtactgaggttgcctcttaccagagctgcctcgtcccattagac

SEQ ID NO: 148941 - DNA, 344 bp, Zea Mays
ccgagccccgcaaaccaattcgccgtgagctggcccccacctagggcccttcctgtgaaccccatgccgactcgtcgtcgtatactcgtatgggtgttgctcaggagccaccatcgtggttgtgtgctttcaccatcgtcggggaccctctgtcgggtcagggagactcgcctatcctggctgatgcatccgttgcgtcgtcgggcggttagggtcactagctctgactgaattgctcactggttcttggacatcaccgtcgggccgcactccgccatgggcgttattctccacgctacaatccctggtatggaccctccccgtggattcgctttgaccacaac

SEQ ID NO: 148942 - DNA, 609 bp, Zea Mays
tggggtgtgctaccttgcagcagaagaacccagaagcattgagactgctctgaatgagcaatgttggagaaaagccatggaggccgagatgcagtcaatagaagaaaataaaacctggcagctgtcttcactacctgctggccatcgagctattggcctgaaatgggtattcaaagtgaaaaaggatccagagggcaatgtggttaagcacaaagctcggttggtagcgaagggatatgctcagcgtgagggggtggatgttgatgaggtttttgcaccggttgcaagaattgagacagtgagattgttgattgctctggctgctcagaagggttggcaagtgcaccacatggatgtcaagtcagctttcttgaatggtgagttgagggaggaggtgtatgttcaacaacctccaggatttgttgtcaaaagtggagttgacaaagtgctaaaactgaaaaaggctctttatggtttgcgtcaggccccaagggcatggaatgcaaaacttgacagtgaactgatgaagcttggttttgtgagaaatccactagagcatgcagtttacaggaggtcagatagagatggttttctgctagtaggtgttta

SEQ ID NO: 148943 - DNA, 301 bp, Zea Mays
acccgatgctcacgaggacgaactacagcgactgggtgttgctgatgaaggtcaagatgcaggcatgtgagctctgggaagccatcaaccccggcgaggttgacgagcctctggaccggttggcgctcgatgtgatctatagcgcagcgccgccggagatgatcttcacgctgaccaacaagccgtcgacgagggaagcatgggaggcgttgaagacgatgcgggtctaaagaccgccgcacagagattgagacgcgagtacgagaatctctcgttcaaggacgatgagtccgtggagaac

SEQ ID NO: 148944 - DNA, 1257 bp, Zea Mays
gccgccgaggctcaggaggtggaactccgaggttgttgatgtcatgttggaacaggaggcggcaccggcgcggagtagaaggtgggactcggaggtggtgggcgccatgccggaacaggacgcggctgtagcgccggcgaggctcaggaggtggaactcagagtcgctggatagcatactggagcaggaggcgagagtggcggcggcgaggagcacgaggtggggctcggaggtgatggacgccatgccggaacaggaggcagcggtagcgccggcgaggctcaggaggtggaactcggagtcgttggatagcatactggagcaggaggcgagagtggcgccggcgaggagcacgaggtggggttcggaggtgatggacgccatgccggaacaggaggcagcggtagcgccagcgaggctcaggaggtggaactcagagtcgttggatagcatactggagcaggaggcgagagtggcggcggcgaggagcaggaggtgggactcggaggtgatggacgccatgccggaacaggaggcagcggtagcgccagcgaggctcaggaggtggaactcagagtcgttggatagcatactggagcaggaggcgagagtggcggcggcgaggagcaggaggtgggactcggaggtggtggacgtcatgccggaacaggaggcggcggtggcgccggtaaaaagcaggaggtggaactccgacgcagtggatgtaataccggagcaggaagcgccggtggctctggcgaggagcgggagatggagctcgggggcggtggacgtggtcccggagcaggaaaagccggtgatgatggcgcctgctgctccaccacctcctcctccgcctcctcgacggcgacggcgcagcgtcgagaaactgccgacatcagaggaactggagcaagagatagtagtggaagaggtgagaaaccccccgatgccgccgccatcgctggccatgttcccgcctggaacgccaccaccccctccgcctccgcttccgcctccctcgacggtgtcgcgcagcaagaagaagcgcagcggcagcgtgggcggcgccaaggagctagcgtccgccattgctacgttctaccagaagaagcgcaagagcattaccatgaaggccaagaggaggccccatgcccatcaccaccaccactccgatggccaatactactcgtcgccgtcgtcagatgcgtcagcgagcccggactccactgctcgcaccaccaccgccccgccgcg

SEQ ID NO: 148945 - DNA, 389 bp, Zea Mays
tttcgagatgaacgtctactacagtgatcacgaaccgacgaacagtttccagaaactgagactgaacccgcgatgctgaactgaattcatgctgttctcttcagccttgtaggacaccgaaagcgatggagacgactacgatgaggacgattatgatacgactactacccggacagcgatcagcgacttgtatcacttcaaacccccttgctcaccagcaccgaacctttagtgagcggatcctccattcctccagcatttgctctgtctacatatgttcaagttcgattgtttaatgctggagtttcttctttacgacatactatctcatgtcaatgtgtttggcagcggcactaaacttgttgctatagaagtaaaatactctcggt

SEQ ID NO: 148946 - DNA, 565 bp, Zea Mays
ggcacagcatctgggttaatagataatttgctaattagggactgagcagtctcatccgataagtatccagccaaaacatcttgacaccactgtggagaacaaacagacatagcatataagctgtgctcatgatgtctgcgagataatgcatcggccaccctgttctcgtgcccttgcttgtagacaacacggtattgcatgcccaacagtttagtgaataccttctgttgccatggtgtactaagccgttgttcattaaggtggatgagacttttctggtcagtgtagatgacaaactccgcatggagaagatatggtcgccattgctccactgccactaagatagctaaatattctttttcgtaagtagaaagtccttgagttttcactcccaaaggtttgctaatgaaggccaaggggtgtccctcctgtaagagcacagcacccactccgtgtttacacgcatcggtttcaatagcaaaaattttggtgaaatcaggaagggctaaaacaggagccgaactaagggattctttcaaagtaacaaaggatatctcctgctctt

SEQ ID NO: 148947 - DNA, 597 bp, Zea Mays
aagcgtaggattgaatcgaacggctctcgttaccctccccaaatcggtatttcccctgctaacctagaccgccgatcgcgaaatcaacggcgatggcattccggcgacacagtttcaaattcctaacttctgcctagcgctgagtgtacaggaaatcatggcggttcgagtggggcgacccataccttggattgttgcccaggttgcagtgaccacggtggggcgctagattggtggaaatcaccactccgatgagcaatcgcgcggttacagtgacgtcaatgacgaaattgatgacggtcgaagcttctagagttcacggcgcagcggccgaatgctccacgatggcccgagtgtccacggttctcgagttcaacggcgtttctcccgtgcggtgcgcggcggcgtaatggtggtggcgataagttggggataaagaggggagaggggaaagaagcgcacgcgttctacttgtacccagtccgggcgggagaccgggtcagtccacgcccgtgaattcttcggcggaggaatcacgccaccgtattccacggcaggtcggcggagctgatggacgtggggagttaacagtgaggc

SEQ ID NO: 148948 - DNA, 373 bp, Zea Mays
tccaagcctgcgaaggcgttgtgtactgtctggtgtgttttgttatgctgtgctggtgcgcgtatagtcggccttggcgcggacagtttggtgttgtcgtttttgcttttgttgtgctagtccggctgcacccttatgcgtcttctgcacggacagtcttcgcggtagactttggttttttcgcacttgttgtgctagtccggctgcacccttaggcgacttctgcgtggatagtcttcgcggtagacttcggttttttcgcacttgttgtgctagtccggctgcacccttgggcgacttctgcgtggatagtcttcgcggtagacttcggttttttcgcacttgttgtgctagtccggctgcacccttaggc

SEQ ID NO: 148949 - DNA, 488 bp, Zea Mays
gtctagggaggggtttgggactagtgagtcagaatgttgtgactacaattgcctaacatgcttcccctagattctaaaccacttctttgatatactattagctttctagcactagtttcctcatttatgttttcctccattccgtgcataggacatgggatgatcccaataatcacctcttcattctcttcatcttagtggctaaagagaaatccaagaatgcatctagatcacactattttatgtagtatggttgaagcttatcaaaagtcacatccatactcacgaataatctttttccaatagagtcccaacacttgtataccttttatgtagaagaatagacaacaaaaacataattccctgcttgaggatccaattttctcattgaacaactaatgtctatgataaagtagacacaaccaaacaccctaggaggcaccttaaattctcacagtcccaatagaagctcaataggtgacttcatg

SEQ ID NO: 148950 - DNA, 339 bp, Zea Mays
atttgttatttctaagtttcagtttagccctgccagttgtcttgtgttaccaacttctaatgttaagtactgagtgtactaatatcaagcactaacactatcggattgttcaacacagttatcttagcctagactagatcacatggatgccatgtggctttacctgtgcttacaataaaaaacgacagccatttagtctaaagcctagagcaagttggggtaggctaggcctactatgtaattgatgtaaacaaatgctagatgagctaaactagctgttaatcaatggatttcctgaaatttattttcaccagttacttacaattcctgaaaaagaag

SEQ ID NO: 148951 - DNA, 522 bp, Zea Mays
cgatgcgggacctactggagatgtctctgctccatgcctccattacttcatgccgtcctccctccttccacgctccttcccgcaagagcagcttccctcctccctttcccccaaacgctcccctcctcttctctcgcgctgaactcgacctggcgtccgactccttcacggccccgtcgcagggtgtcgtcatgggtgatggtgtcgtcgtccctgccacagtccgtcggggtcggcttgtcctcggatctcgcatgatttaggagcagcgacatcagatgttacggacgcgaggccatcaacgtcgccgccaccagcgccgatgtcggccccggcccggcggatccctccccggtggccctggctattcttggctgatggcgatgcgggatctactggcatggagcacagacgtacagtgcaggcatggtcacggctgttcttagtttgtttttctaaatgagagtttcagttttaggattaaatacgaattcctatccgcaggacttaccggagatgtgc

SEQ ID NO: 148952 - DNA, 1124 bp, Zea Mays
ccgcatttcttctgccgtgccccagccgggacgttaggatgtctctgttggaatgtgaaaaataggagaagcagaactgtagactacactctttgtagagagatgtttgaaataaatgatgtgatagaaaacaagattgacggaacgtgaaaaataggagacacaaaactgtaaatgacactctttgtagagaaatgtttgaaataaatgatgtgatagaaaataggattgacgatatgctcgagatggttggccttagtagtttctatcatcctcatccctacaccctacccagatttaaagcttataaagctatttaagagtgctcttttagcatacaacgtaacatggttggatttaaagcctaaagctatttaagagtgctcttttagcataaaacgtaaaatggttggctgggattaaatgtctctccatattagaccgtctttagctgttcatccatggtcatcatccaaatcattgtttttgccctagatcatactctgtttctccacaacttaacagtaaaaagaatctaatgtgcttcctccacaccatcttcttgacccgtcgtctccatcccttgtgctaacttgacactttcgggctaccattgtgatgtcccgtctttaccctggccatggaggccttgcctttttttccacgctcatgactcaccaccaccaccaccaccaagcctatctgctgccgccaactttccagattatcgtgttcttcacatggacctttaaggatctgttaatggtctgtttgaaagagctttaagtctgaaaatcagattgcgctgaaaaaacatgtttgagagagtttcatggtatatctactaggtcggcccaatatataattgcagcccatgagtcagcgtggacccacgcgtcaatctcctcgtctctccctcgtccttcccgtctctctcacgtctccctcgtccttcccgtctctctcacgtcgagatggagatggtcagatggagttgatggccatggaggagaagagcgcaaggcgctgagccggtgggtggcacgtcgaccacgaacgcagcgcaatgggagcgacgcgccgtgtccgcgagcttagccgccgtgcaggcaagggcacaacgg

SEQ ID NO: 148953 - DNA, 314 bp, Zea Mays
accttctcctcgtcgatagttgagtagagcgctgcgcagctcgatcttggttggttgttgggaagggtcgccgccccatgcctccaactcctcgatctcccccggatgtgcttcgcttcagctagctaagtcccttcttcctttgagattttgctacgaacaaccacctcgatctgctctcgtgctcatccgccaagctccgtggtgccatactgccatgtcgctcacggaggtcagcctccacttctgctacctccactccctctccatcgtgctcctatacttcctctacgtgatctcctgatcgcctcggc

SEQ ID NO: 148954 - DNA, 432 bp, Zea Mays
ctccagggtgtccatttacctcggctttgcatgatctagtcttacaggtgtcattcactcctcactggagaggattttgcatgatcacatggcatctgattggcatgcaccgcttttttattgtattaaattgctttgctatgcgctgtagctacgtagaattactgaaaagggatcgaacactacctttgcatgcataaaaggcttagtaagacgcaacagatcttaactgaatctagtttctgttcatatcacagttttttgcctagataatgcagtaatatctgttttgtaccgtagcagttcacagcaacaaaaggttttatccccttggatgactattgatgtaggtgatctgagacctttggtttatgatagaacatggtcttctacttgatctggtatgataatatggactctcagttaaagcta

SEQ ID NO: 148955 - DNA, 490 bp, Zea Mays
cgagtccttcatagtaagaccagaagagtcaaactcgacagaacaagaattatcagcagtaaaacgacgaatagaaagaagattgtggaccaacgaaggagcaacaagaacatcgggaatgcaaaaaaagccgggagggccggcggcacccacagatgtgacaggaagacacgtgccattcgccaccatgatagacgaaggaagagaggaagaaggagggcgaacagaggtgagtataccagggtcaggagtgatgtggtaggtagcaccagtgtccgtgatccacttgggacccattggcggagtcagagtgggagtctggaaggcagccagggcggccgcgtcccaaccaatcagcccggacgggggtgcggccggcggcgtggtccacgacgaagtggtaggcgacgatgtccagggcgacggagaatgcgacggagaggcgaatgcaacccccggcggcgaggtgaagtccgacggtgcaccagcg

SEQ ID NO: 148956 - DNA, 1150 bp, Zea Mays
tggaagggcagaaaagatatcaagggaggccattgtgctgttggatggacaagggtgtgtagaccacttaagtttggcggcttgggtattcacaacctggaaatccttggtttgcctcttaatgtgagatggctctggctcagaaaaacacaggttgagaggccatggactgagttcgacataaaagtacatcccaatgctgaagctctcttccaagccttggttcactcttctgtgtgggatggtgctataaccctcttttggacggatagatggattcaagggtagtctattgcagtttttgccccttacctgatatgtcgtattccaaggagggtcaggacaggccgcacggtgcaggaggctcttgctgataatagctaggttcacgatatctctgggagtctgactgctgttgtcattagggagttccttcttgtttgggatctgattcaagatgttcatttacagacaggagttcttgatgtccacctttgggtgccttgcgcctctggcctctattcctctaagatggcttataacagcttttggaccggtacaacatcttttgaaccggctaaaagaatttggaagagttgggctcctccaaaatgtaaattcttcatttggctagcatcactgaaccggtgctttacgactgacagattggcccggtgaggtacggatcatcatgacaaatgcctcttttgcgatcaacacgaagaaacagtccaacatattttgctctcttgtgtgttctctagaaacatttggtggcaggtgttgtgtaaagtggggctgcaatacctggcacctggacctgaggacatgattttccaagattggtggagaaatgccgaaggccaccaggtatctaaagagaagaaaaaaggttttaacacattggtaatccttgcggcttggtggctttggaagcattgaaacacctgtgtcttcgatggagcatccccgagcactagagatatcctgcagcacatccaagaggatgcaacgctatggggtatggccggggctagaggtcttaggggcattttgccttaagactagcggtggcctgtttgttgtgccttagatgtgggatgagtgtgtttctgtacttgtgttttcgacctccgtaaggagtcgtttg

SEQ ID NO: 148957 - DNA, 476 bp, Zea Mays
tagtcatgcataatgattgccttatagaatttagttaggctttcctcaggatcaaacttgaaattttgaataactgtgctattacctgcaccactctgaagatgcaattattgttgccctctagtcaattggtgctttgctttcatatgattccagaagacagttgtgccccttgaggactcaccacgagttttgaacgagcaattcttgcattttgcccaaacttacttctcaatgttgccattatctcccttttttccactatggacttggtgaagtgctcccaaacctcagatgtagcctttttctctctcattttctttgcagcaggctctaatggttcatcgacatttttatcaacatgaataacaagtgttgagcctccaccaacaacaactgttgtgggatctgtagatgtttgcttcatcacaataggtagtggtggcttcggtgctgattgactagtaccaaccaga

SEQ ID NO: 148958 - DNA, 605 bp, Zea Mays
gggctaggacccgtaggagtgggggtgaggcctaggacctgtcggtcatgagtgggaggtggaccgactctttcccatgtcgtggttcgatcgatgccaggcacaattaatgtgtcatgcacggtactgatggcgagaacattccttcggtcagacgcagaatccactcgagtggctccctagcgatttgtctaatccccttgctaggcttcgcctcttccgaccctaggcgtggtgcacaagggtcatctggggatggattcacctagtcaggcatgtccttatcttctctttgactcgtggccccttgagacatggggatctgatccccgacataatggttaaagcatgcatccgcaattgcaacgacccggattcaattcttagtctcgtgccctccttttttctctaaaggaatggttcgtttcaaatcttaggataaattttctatgggagatgactttgtccttcttgttcctcatccaaaacaccactacaggcatgtttggaagcgaggagaatataagggatagcaagggattttagcccctccaatcccctcacattccatgtcttctcgtttcctgaaccaaaccctaccttcg

SEQ ID NO: 148959 - DNA, 526 bp, Zea Mays
gatggaatggatgtatgaggagggtgggagtgagataacatgtcggcatcaggagtggtgtggtaggaggccctggagtcgaccacctaatcgggcaaggtgagaggcggtgtcaatgcaatggtgttgaatgagttggtgagggagacttcatcccaaccaccatccctagggaatgatggaggcagaggtcccctgagcgagaggagaggtagagtcgacgacgagtgtggaagaggggacgctgaaggcggtggagcatcgaagtagacgtggttagtagagctagctggggtagacacgacaaggaagcaccctgggtcaggcttggccacatggagatggtcgtagtccaaggtttatagaaggatggccacacaggaccacccccacgaccgtgaggccaccatagggaggccagtgccctcgtggctattgtgtgcggagatggtgaccatcgctagagctagtagcctaacgagaagctttaggagtagtgagagcgatcgaagggcatgcagagcgc

SEQ ID NO: 148960 - DNA, 558 bp, Zea Mays
gttgccgagagcttctctaagtccacggtgtatgtcatcggtgaagtagatccaatatttgtcaaacaaagcacgaacattgcaaacagtacaatgaacgacaacggtaacgaatagttgccgaagctgaaacgacgaggcagagactattgcctcatcaaatagaaggttccactcgttgtcgccttcgagcaaaccacgtgcttcgcacgcctctctgaacgtttcgtacacagtatcctggaaggtccttacatcaacgaagctcgttgcaccggaaacaaacatcaagagcatgcgtagatagtatagctccccagctgttgggtgcacgtagtacatgcgaccaatcttggcagacgtcaacctccttctacgccaacatctagtagaaacgtcccacgaccactcttttgggaaatcacaaaaagtgaggtgacgtgcatcactatatttcaagtttatttgaaaccattcagttaacattgtcttcttcgctgcacggctcaaaagcagcgcttgtaggtctgtcccaggctcgtattgtacaacgttttt

SEQ ID NO: 148961 - DNA, 303 bp, Zea Mays
caaaccaagatttaagaatacgtaccttcgcggctggccgcctgggactggctagcccgcttggctggtggctgcgcgcctgccacctcctgtctgggactggctggtgcgcgactgtgtgtgccgcagtgcgcctgcagctgcatgggactgggaggacgccgcctgggaagacttgaatttgtagacttgcagcggcaaactggcaatggccgaggggagtggcgccgctgtagcctagccgccgctggtgccgcgtcagggatactgggatagccggagtgcaggatagagattagctga

SEQ ID NO: 148962 - DNA, 726 bp, Zea Mays
ctgagctttgtataaaattctgtggaggaagggaaagtcctagggtgccagcaccactacgagcagggacactaagcagcagtgcatggacaacacgtagaagctaaacacaaggatgatgaatctcagccaagggtgtgcacaaaaggacaggcagggggaaatcactgaatttggctaacaccaatgcagaagaaaccccagggcgccaacactgaatggaccctcatacgtggctctcaaactcacaccccacgcaggtaccaaggaacaacacaaagacatggaacttggtctactccagctgcccaaaatatcactggacacaaaccatgtaaatataaactgggaactccaccgtgggcaggttcaagtgagtccaaacgtgatattttctggaggggtgaagccacaaatatccctgttgtccaacctgaaggcagtgaataaaacaattcataatccagctgcccacagctcataacacagtccaatttagatattttagcatggagcagtcccaagatatttggtgatgtatctcacccttatctccattctgtacacacaatgaaacactgcaggacattgaacttggtccaaactgataaaaaaaacttcatcacaattagctttgaatcccctccccacttggatattttcactaggttcctctctgctaaacaaccccaagctcttccctaatacattcctactaacacttac

SEQ ID NO: 148963 - DNA, 367 bp, Zea Mays
gaaatggaataaatgaggctaaaaaaataggtatacatcatggtaaatatggagagaggtcaagggtcaaaggtgataataggcaaggatataaaggaagaggtaaatgtgcataaaaaaaccaggaatctaggtataatcaagaacagagataagataagtcttgcaagtggtaaagtataggatataaccacgggtgagataagtaagagaccacgcttgaactaaggtgggagattggaggttttagataacgaacatagcgtaatcgccaaggtaagattgagagatgagaagggtaaaggcaataagaagcaaaagcacaacaaaggatgaggttacaaactcgcgagccaaagaagattat

SEQ ID NO: 148964 - DNA, 543 bp, Zea Mays
cctcccctctctccggtcgccagcacatcttctcaaaattgggcgccaccactgatgaactctataaattgatgccccagtgagctccgctaggttattacgcatccaaagcaccagctctcgcctctgatcgttcaagagagcctcccaatttcgtatttcccccaaatcggtcggaacaccgccgtgagacatctcgccgtggccagtcgtctacgggttagttcatgcccttctgtgtgatgttctagcctccctcaagtctcctgttgctcgtagacccgtttgattgaactagaccgcattaaatcgtctggaacaccacgatttgtctctgatattcgtcgctgccatggacaagcgaactccgggccggattagtgcaattagttgagggattagtgtcgctaagggtggaattaggtgtcgaccaagctagggcgctggtcattgagtgtctcggccggtacaggttcgccggaaggcgtgctcaccggcggtcaccatcggggacctgacgttgtgaagaaatagaaatccgag

SEQ ID NO: 148965 - DNA, 417 bp, Zea Mays
tggatttcaacaattgttatgattgcagaagtaaatgaagtgtgctggttttgaagctttttcctattttatgctaattgattagctaatgaggcatagagatcgccctaagatgagtgatcgtaagcatgttataataggtcgagtaggcgtgagcatggtgcaccgtcttaagtcattaccgacttaagccaattgctctgttagtagggtatagtggtcaccctaagttgagtaagcgtgagcatgttgcaccgtcttaagtcactgtcgacttaagtcgattgctccgttagtagggtatagtggtcaccctaagttgagtaagcgtgagcatgttgcaccgtcttaagtcactgccgacttaagccgattgctccgttagtagggtatagtggtcaccctaagttgagtaag

SEQ ID NO: 148966 - DNA, 327 bp, Zea Mays
ctgcacacgacaaatggaagctggagaattcaggacacaaaaacagagccataacgtcaattgcatcacatggtcatttacctagcatctatcaatacataagagggcttaattattaaccttacaatatctaaatagtatgctccttctaattgtgtggataacctcaggacactgatggcacatgtattggtgtacaatgcccagcttttcccaatatactggtgctataaggtagcatttggctgggatgcaagttcagtcactgatagctttccagagacttaccaaccacgttcatttacgagctgctcagtttctcagata

SEQ ID NO: 148967 - DNA, 374 bp, Zea Mays
gttagattagggttccaaacctgggttgaaaattgggatgttacatcggcctcttccttagctcctagcaggaaatcggcaagcacaagtcaacaatgcagcgcaccgtcacgtcggcttacaggacacatgacatctccctttggaatacaatgaccccatgcttcacagtgtgcatctcctacatgtataaataggacagagtagttcttccaaagggcagaggtagacgcacatgtgaagactcagttgtttcccgctaagtcttaggatattggcacttgactcaatcattttccagggacttgggaaccttccctctcccgtcgtgcttgtaatccctactacaagcactcaggtgcgagtaatataag

SEQ ID NO: 148968 - DNA, 1087 bp, Zea Mays
gagaaaaggaaaggagagtaggagacaacacgaggcgccgaatcgaaacagggaaagccaaggcccctcccccgcgtacgcgtcactgtgcggcgcctcccccttcctcgctccgctttctgctctgttcgtgtgtgagtcgttgacgaaaccccaagtccatgtgggaggttttgacttgatccaaccaagaacgcgcatttcagccgtaaaatactcgtaccggtttccaggtccggtcgcgtcttgctctcttccgtccctcatttgccttcccgtccctgctattcgcgtgtgggcctttgcttacccattcttgcttccgctgtctttgctgcgtgtaaatctgatccagtacttgtgtgtccgcgtcactggggattctttactttaagttggatttggcaatgtcaatggaaggagcgatatctgatctgaattggtgacatttcttgctgctgctttggtcctggggtgggcggattggagagcgaccactgtcttgccggttgcttttggggtagctactgttcttgtgaatttctgatgcggagtttcgctcaggatagggaaaggagtgatctatagatttctaggcttctgtagggaaagaagtgatctttgatagatttctacgcttctgttggcgattcctcttcatctcaacttggggatttctgccgaggagactttcctgactggtttgggttcagctgaggagcagagatgaggttgtctgttcgtgtgatcgaggcccgcaacctgcgggccatggactccaacggcttcagcgacccgtacgtgaagctgcagctcgggaagcagcgattcaagaccaaggtgatcaagatgaacctcaacccgacttgggatcaggagttcagcttccttgtcggtgatatcaaagatgtgctcaagcttgatgtctatgacgaggacatcctccagatggatgacttcctgggccatttgagggtgccattagaggatgtgctgtctgccgatgacttgtcgcttggtacccggtggtaccagcttcttcccaaaggcaaaaccaacaagaccgtcgactgtggtaatgatggac

SEQ ID NO: 148969 - DNA, 476 bp, Zea Mays
gtgctgcttgtccccaagcaggagcccgtggaaacaactgacgaagtgaagtcaagtcttcccaagtagccaaggatgccggtaattcagaccactgcactaagccttcaaggttacccttgggatcccagcggcgttgaagaattttttgcggaacttgcaacccatccagctgatccggtaactgggcaactgataccgacgatggcagagctttcttgagctgagaaacgtgaatgacagggtggatagaacatgactcaggcagtgccagtttataggcgacgagtcccagcttggcaatgattggaaaaggaccaaagtaccgaaaagccaatttctgatttgcccgaggagccaatgaggattggacatacggctgaatcttcagatagacgtggtcaccaacagcaaaaaccctttcagagcgattcttatcagctgccactttcatacgattctgcgcacgtgccaaa

SEQ ID NO: 148970 - DNA, 332 bp, Zea Mays
aagaaaataaggacttgagcatagaaccataattatgcgacaaattcatgcacggatccataatcagggaaacgactagctcacaacgtaatcttagaactcgaaataaaaacaacaggccttacataataccagctaatgccaagtaatgggcactacgacataaactgccaccattacttgttgattgtagcatatcgcaaaagcaaacatgacttggcgtcagaagacaactatatataattgcatcactttataactccttaaaccaaattccagtagctattatgtgtgtacctatcagagtcattgaagtaccactcatcactaac

SEQ ID NO: 148971 - DNA, 704 bp, Zea Mays
cagcaccattgctcttcagtagttcacaaatcagtaaggtaagttcactcgccattagaaagtttctgcattttttagcccatttctcttccgacgggcataaacacaaatgcacacatgaaacaaaagaaaaacatctctatagcatattttatctgttggcttgaagctgacatgcaaattacaaagaagccaggaagaaaaagcgtcatatgttctaatggcttcggcgctgcagcctaacagaaagaagcagagaggagttgacactttcactactggtcaagcacatggcatactggcatgtgaacaagctttagtcatgtttttgtaattaccgtgaaactttatgagccatagccgccgcgccagagcatgcgaacacatgggtgtgggccttgtcgatggtgcacgccgccgccgtgagcaggcgcacggccactggctgtcgccctgcatgtgtcgaagttgaaggactgtgctgttgaaagttgcagtgtgtgcaccagccacggcacgagcacgcaggcgcagagcggcgtagccgcagcacagccacagagcggcgtagccgcagcacagccacgcaggcacagggcaccgcctcgcagctccggcccaaaggaacccgggctcgggcgcaccaccaccatcggagcacggacacggccgcggttgagagctggcagccgccgccacccctg

SEQ ID NO: 148972 - DNA, 315 bp, Zea Mays
taagtatccaaactagatctcaatgttttacaccagtttgtaataggtgagatagaagaaatgctggtggagtttgaaatagaaggtgaaaaaaatgctccagatagcctagttgtctcctgtggcctctctatcccacctctatacattcactatttccaactccacgttataaaaagtgtagtttaatattatatacgtctatatatacgctctactaagtatggcattggaaatgagaaaaatcagactttgactatctacaatggtccttctaaattaacctcctatatcctaatttcgtgccaccttata

SEQ ID NO: 148973 - DNA, 630 bp, Zea Mays
gcgggtccttctgactgctgagtcgagaatcttcactggtttttcccggtactggagatccttttgaatttgaattgcatctgcctcgatgtgggtttctggtacctttaggcatttgcggagttgggacacatggaacacattgtgaatatctgacatggattctggtagctcaagacggtatgctgcgggccctaatcgggaaatgacggggtagggaccgacgaaacatggtgccagttttcctttcatttggaaccttttgacaccacgcatcggggagaccttgagataaacgaaatctccttcctcaaatctgagttcccttcgtctattgtctgcgtaactcttctgtcgactctgagcttcaagtagcctcctgcggattaaagcgactttctcttcggcctctttaacaaagtcgggtccttctagcgtcctttcccccacattggaccacattaggggagtctggcattttcttccgtacagtgcttcgaatggtgacatcttgatgctggcctgatggctgttgttgtacgagaattcggcgtacggcaaactggactcccaatctctgtcgaaagttaacacgcaggctctgagtaaatcttcgaggaccttgttgac

SEQ ID NO: 148974 - DNA, 354 bp, Zea Mays
ttagtagctatacccgtttgtacttgcagatagaattactaaattgttattctttggttgtctgcgaactgttgcgagatgaagaggtttggtaattgatggtttatcgtgcatagcaaaaggctcttgtgagaaactaatctttatctacactactccttaagacattactgacctaaactctaccgtcccttcctaatcctgatttagctggaactcaatatctttagttggaactcaatatctttagctggaactcaagcatcggtaagggggtggtgtttatgctgtcagagtttgtgaacttgagaaagttcagataagtaatgtttgcactgaagaaatgaattgggc

SEQ ID NO: 148975 - DNA, 441 bp, Zea Mays
gtcacggctttggttatggtaagctttcaatgttcgtcttcttctgcctctagccgacatctccgacgaggttgagacttcctaatctagtgcttgttcttgtgatctgtgcttgtgatctgtgctcgaaccccaaaccctaatctactctactgccttcttgctctgtgattgtacccgtgagggaccgatctggtgctccggctttggtaagtgcttaatctggtgttagttcttgtgatctgttcttgtgatctatgtttgtgatctgtgttcgaaccctaaaccctaatctactctactaccttgtgttctgtgattttagccgcccgtgagggaccgatctggtgctccggctctggtatgttcttaatccggtgcttgttcttgtgatctgtgtatcgtaaccggtgcttgttcttgtgatctgtgtaccaaccc

SEQ ID NO: 148976 - DNA, 966 bp, Zea Mays
gtgggaaaccctaaccctagaatagggtggggtgatgtattaatagtttaggagtgttgggccaggcccattacagagggggcgagagggtaattacataggggagagccccaaaccgtaataaccctaataggtattctaacatttgagtttgcccaagtttacaaagtttctattccatactgctgacactgcatttagcacccccctttgattgtgttccaatagtctttataaaacctcccagtgaaaccatcaggccctagggccttatcagaaggaaggtttctgatggtatcccatacttcctgatctgaacaaggggaatccaaatccgagaggtcatgatatggtagtccaagagcctctagatcaatagttctctctgtgaattcagactgtccaatgaggttgttgtagaattggtccaccagagctgttttttcaggatggttaatacagatattttctctatctcagcctggtcaccaaatttttcttttttcggtatctggcatgcatatgaaaaaatttagtgtccgcatccccttcctttagccatgagattcttgatcttaaccttgtcattgttcttctaaaggaggctaacatcaaggactgcttcttgagtttattccttagccataattcagcaggtgtaagagccctatgatcctgggcaatctcaaatttatgcaatagcttctttgccaaagaaagctaggaagccacatgcccgacctgcctgtcactccaactctgtaatcttgtagctgtctccttaattttcctatccaaggtcagaaaaggacaactggaaggctcaacagcgttccatgcagcctgacaacttcctgaaaaccttccatcctggtccaaaaggattcaaagtggaacctcttcttgccaagagtattgtccttaacacctaaaagcagaggcagtgatctgaatcctgagaagatt

SEQ ID NO: 148977 - DNA, 361 bp, Zea Mays
tgcgcatgggcatcactggaatatccttccaccacttgagtcaaccactgtggtgtacctgatgaaatactgaacagcgaggattcactttcagacactggtcggcatgacaaagcatcagcagccccattgtcaacccctttttatatacaatgcgatactgtagaccaagcagcttagtgaatacacggtgttcccatggcgtgctcaaacgctgctctgtcaaatgagacagactgcgatggtccgaatatataagaaattttgcatgctgtatatagtgacgccacttgtccactgccatcaatattgccaaatattccttttcatatgttgacaaacctcgatttcgagtcccaag

SEQ ID NO: 148978 - DNA, 562 bp, Zea Mays
ggatcctacaagtgagagagtgttgacgtagggcatgtacaaccccattaattgatgggtctcttgagaggtatataagggttaagtaaaaaaatcaagagacgggctcttcgcgaagatcccgtctcttcacgactttctatatataatgtcttttaagtgcattaatgatgtaaagaccccaagttgtatcatgcaatctattagatacatcttgtacctagaaaaccgttccaagggctctaggttgtacatgcccattgagttgtccacctttccccatcaactttaaacttttaggacgaattggttagttgcttggtcatttcttgtgtgaccataaattcaaagcaacatacacatgcattatagttatagcagagaatagcaagtgccttgctgccaagcacccaaagaagacttattaaacttcacgcaaagatgttagtagatcatccaccagttcaagatatcatgaaaggctaatatttcagaacaagggacttcaaaattcacatgagaaaattgcactaatctctaagcaacattatcagcaagaaca

SEQ ID NO: 148979 - DNA, 1481 bp, Zea Mays
gacttcattaacgcctgcaaatccactcagaagttcgttgcttgataaaggttcttcctttataacttctaaacagggtgtcttgagcctgatacaaaccttacgatctcttactacaaatattcaattctcatgagtctctgcttattgttttgattgattttatatttgtcagtcaaccctaaactttggtttggaaacaagggctccattacttctacatatttgctcagaaagttgttgcttaatcagggctcattccattacatatacctttatcccttccaaatagtgagctcagcttccacaatttgttttccattgttggtagtattacatatttcttcttttgataattgtgcattttttaaagggcttatgaatgttggatgttttctaaatggtatatctaaatgacattataaaaaatcgatccttctcttttctatgactgtgtgcttaattgcaaactaggtatacaaagcaagtaaaagcatgcacatgaaataaatagttgcgactaaaaaaaatacctaccctatgttctaaatttttcgacaattatttttcatgagatgtggtccatggaaaacaaggtcctctacttattgtttttgttgttttttgtagtacattctaaactcctgattagcaacatcggcttcattaacatctacaaatatactcagaagtttactgcttcgtaaaggttccttctattacgccttcgtttataacttcctcgcatggtgcattgatcttgatacagacctttcgagcatcttacaacggatattcaatattcatgactccctgcttattgttttgattgcttttttatttatcagtcaaccctaaactttggtttggaaacatgggcttaattatcgtctacgtatctgctcaaaaagttgctgcttaaacaaggttcatttcattacacattcttttatcccttcctaacagtgtgctctccttacctttttacgttgttagtagtattacatatttctcatttagataactgtacgttttttaaaaggcttatgaatgttggatgttttctaaatggtctatctaaatgacaatgtaaaaattatattcttctcttttctattacaatgtgcttatttgcaaactaggtatacaaagaaagtaaaaaaaaaacatgcatatatcaggtaattactacagaaaatttatcaaccccatctgttacaactttaaattaaatagatttatgttcctgtcaatccacagcatatgctgtagaaaatttacatgtttatcatttattctattcagcttattttctcttaaaaatatatctagaatactgctattacattgcttacatgtgcgcgctggcgcgcgcaagtgactagtggcctaatagtccttagttataatatctaaattagagctcgacttaacttgagtttgcatcaccaaaattttgaatcatcgggccatacttaaat

SEQ ID NO: 148980 - DNA, 764 bp, Zea Mays
ctcttcgccacgctagtggataatccgcacccacatctacgtaaaaccaaattcactgccccccaggccgattgagataagaattatcccggattgcagtctcagcggcactaaccaccacgatccgcggccatggtgtagcggcggtggtgcccggccattcggtctaccagaattcaaattctaacacagctaaggacaagggagcgcggtagaagtcttgagcaagatggaattgctcaccggttaataaggtcacgcaggatccggttcttgacgccgagatgggtgatttgctccggccacgaatttcggcccgccagtcggttaatccaccccaccgaggcaacgtacacgtcacacgtgccctagtactgcttcggtagatagccgtcgagggccaaacaacaggccaatcccacgccgacgttcgcggcactcaccttcccttctccttcaccacgacactctggtgattaatttggtcgccgcagcttggatgtgtttgcgagtggaggatgaaggacacaacgaaccagcttttatctacggtcaaggcctcccgaggatcccacggtggtggttgagctcatgcccacggagcccgcggcgtccgccaccatcaacggaaggaaggcagcttctgacctaggtaaaccggacccacacgtcggtcggtcactatggcttgcggttgagcggatgagaggctgcgacgcgggcctggccggccagagacagcgcacgcagggaataaaattggg

SEQ ID NO: 148981 - DNA, 288 bp, Zea Mays
cttgaacacttggtccagatgatccacatgctcggtcaggttcctactgtaaaccaagacatcatcaagaaaaaccacgacacattttcgcaacaacggagctaagattttgttcatgaattcctgaaatgtggcaggtgctcccgtcaggcagaaagacatgacctaatatttgtaatgttcgtggtgcgtctgaaatgttgttttatactcgtcaccctctttgatccgaatctggtgataccccgatctatggtccagcttagaaaacacctaggcaccatttag

SEQ ID NO: 148982 - DNA, 355 bp, Zea Mays
tttagtggtgagtggtgatacacgcttgtgaaatctactactatgtagctctaagtaagctcaagataagtttgagatcaaacgcaactcaaagagtgtttagaatatgagttggtggtgctacaggtacacatacatgtccaatatacatcgaatatgaggcaccatacaagaatgtgtcttgttgcatagagaactagcatggatacgtatggtgtgcagaactagcatgggtatgtatggtgtgcactggttatggtgcaccaaacacaacacccatagaagactacaaattggcatgctggcaaatatactcatcggacatgttcgatgggtgctgatcaacaagcaccat

SEQ ID NO: 148983 - DNA, 1401 bp, Zea Mays
gtcggaggccagcaatatagccttgatgttgcctatggctttgcagaagaatttgggtgagggaagcggtgatgggaactagatcagctacttcagcaaaaggaggtactagtcccctgtctctactattttgaccactttgtttcttaacactagccttttatttctaatttacatgtactgacgtagttatgtatcctcaatctgctagcccattattttttgtcttgattcaccttgtagagtataattatacctccttttcatgtttcaaaaggcagagatgaaacaatttgccaagagtgatatttttgttctcaagcaacattatgaaaagaaattagatgacttggaacaagaaaataaagctcttcaggtttttactagcttaccttgcggacactatgctcttttttcccctgaattcttgtttgtagaaagaaatagagaatcttcaccatgcattaaccaatgtatgttcttctatggatgagaatgctcaaaaactgaaagaaaactatcttcagaagctgaatgcacttgaatcccaggtttgtacattcagctaaatgcttgttgcattgcatttctcatcatatgctaagaacacaccatttgcaggtccatgagctcaagaaacaaaaaagtgatgaggcagcaaagcgtttacaagaagatattcagcatataaaatctcagaaggtgttttttcctcaaaatgtttcttaatgcgatttaagtttttttcctgacatatattcctttcattccatgtaggatcagcttcaacaaaaggccaagcaagagtctgaaaaatttatgtcttggaaggctgcccctgaaaaggaagtaatacaggtacttgttcttaacatgttgatcatgtttatgaacttctttctcaaagatctcgttgtgatagtgctgtatatccattaattagctcaagaaggaagggagacgaaatgaatatgacatgcacaagctcttggctttaaatcagaggcaaaaaatggtaaattcttcatttttcctctttcagctttaagatagcatgattgtcgcctacaccattctgcttgaaattgtaggtcttacagaggaaaactgaagaagcagcagctgctacaaaaagattcatggagttgctggaagcaaagaactcatcacttgagacatatggtaggaagtgatgtccaatggcttcatatttttaccattaggtttcatgtgtgctcattattcctagctggttatacttttactagttttggtttcttgtttttacaggcagtggaaatgcttcggggatgcaggtatccttcgagaaatctttgttagggaatgaataaactatttcccatctgtgttctgtaacgtgtctgaaacattatttttatg

SEQ ID NO: 148984 - DNA, 408 bp, Zea Mays
caccaatattttttaaggcaaagaccaacatccaaccaatactaattgaaactgagaccagcttgggtgttagcatggttcgctgacagccaaagacaatcaggccctgtttgtaactcttagctagttaataaattgaactaacaattagctggacctctaactattagatctacgacacgagcaattagtaacaagtagaaccaagggtttagtagcatacgggtgaagtgtctatgtacttgagaatgaccctacagtaccgaaagcgagacacatgactgcagttttgcttgcagtaagctgtcaatcagaaacaagcggaatgcaaaatcaggtacagccctgcaaatgctaaaacccgattgtactgcaaatgactttttttagcaccaagtttgaccgacg

SEQ ID NO: 148985 - DNA, 807 bp, Zea Mays
atacaacgttctgaacctaacataatgccatcagaacaaggccatgttgtgttcaacacttcaacctgtattctggttcatgtcaattgccttactttatattttttatttatacaaattagaaattagtttaataccatcatccatcagtttttttcctgtgcttatttaggttctaattctgttcattatcaacattaccagcccgtgataagccaacatcaagctagtgttgtcaattgtgcattgtgctactctattggcaaagcaaaccaaaagattaggtgtttgtgtttgtaaatcatatgtattcatgaaattggtactggccgtggtatgtttcctgcctattttgtgactccttatcaagctgcagtaacattgtcgatttaggtcaaatcataatgggaacacctaacgttattattggggtctgaagattaaatatttcatgagtattcttctatggtatctgttcgaatatgcagcttggatggaccatttgaatttcctttgattccaaaagtaagtttcaaatgaggccttcaataatactcagtggtaaaaatatttcatcttgctggtgtgagactactttacactgccaagttcagtttgcgatgattatattaggcaactacaggcaatgtatttctatccagtgcatttgtgacttgtctgttggaatactcctctactgattgattatattctccctgcttagagctgcgcttgtttgaatttatctgcgtccttttattaccaaaaaggcttctgatttgctgctcccgtcgcggacgtcggggt

SEQ ID NO: 148986 - DNA, 510 bp, Zea Mays
ctctgccgcgcgggtgtgctcgccagcgcagtcacagctcgggatctcatccatctccggctggctggctataaattgagtccgggcactgcttcttcgttgcatcgcgtgcacaagctcttaggcaactgacttaattccaccaaaaaaacccacgtagctcccaaattccctcttcctctgttcttactccgccgcaagggactccaccgtggtcagcgctcttcgggtcagtgtttatcaaattgcttcttgttctagtttgcttttgatctcctattgctctccatgccaaccaattgaaattcggctgaagcccatcaccggaacacacagttactctgtagaacgccatcgtgacaccatctccgtcgccccacgtttctattcgtgcccagtccaaattttagtatgtgcggcatctctggtaaacctgtgaagctttctcaagcttcaattgggtcagtcacgtcgtcggttggtcggaacgtgttcatcccttcgatcctc

SEQ ID NO: 148987 - DNA, 799 bp, Zea Mays
gtaaacctcgccgctccgctctcctcgtggcgctgcgatccctgaatccatccgggcgcggtttagctgttcggagaggggccttgcttgctcggtcgggatcggaacagcctagctggagtcctgattcacatatgcttctagttcaaaatctagtggatattctcttcagtataagagcagggagcacccgagttgtttcacatctggctggacagcgtgaatatttctgttattcctgatcacgcttcacagtaaggaataggagctggagccgacattgaaaattggaggcactagcagtagtttttgcgagacattcagcgctggggttaatgaggtcaatttgattgtgtgtgtgtctgtgaacctcctgcggtttgtttgcgtgtcggtttttcatcatcgcactggaattggaaatgaacgaaaagcttcactgaagaaggcggcgtttatcctgcttctcgtggagtttttaacatgtgttgtccctggccaactgtaaggcaaaacgttgaaggtgtgatactgaatatgacgatcaatccgatatgcatgagcaatttggatgtgtgtttttgtgaattctcatgcgtatgcttgaaacatgtgtctggtagtatttgagcatgtgtgcccactcttttgtggattatcatgtgtatgcttgaaacatgtgtcagcttgtatttgagcatgtgtgcccacttttttgtgaattctcatgtgtatgcttgaaacatgtgtctgctagtatttgagcaagtgtgcccattctttcgtgtgtgctctgtcc

SEQ ID NO: 148988 - DNA, 293 bp, Zea Mays
ctgctctgttagtagggtatagtggtcaccctgagttatgcgtgagcatgtcacaccaccttaagtcgtcgctgacttaagtcgattgctccatcagtagggtatagtggtcaccctgagttaagtaagcgtgagcatgtcacaccgccttaagtcgtcgccgacttaagtcgattgctccgttagtagggtatagtggtcaccctatgttaagtaagcgtgaacatgtcacaccgccttaagtcgtcaccgtcttaagtcgattgctccattagtagggtatagtggccccc

SEQ ID NO: 148989 - DNA, 279 bp, Zea Mays
gccttggatgtggcagcggcggagtcttcgccgcgtgctgtggatgctgaagttgtgcctagtccaagtgcggggcgtaggcggcgaagggcggttgcgaagcgtagagtgagtgaggcggatggcggtcggcttcgtgtgggcagggctggcaggctagacctgttgtccttgccggccgctgcgagtgtaggtgagggggagctacgaggtctttttgcgggtgaggagctgaggataatgctatttaactatagggagatgggaattattccgaag

SEQ ID NO: 148990 - DNA, 707 bp, Zea Mays
aaatcaactcataatgagttggtttttaagtttgtgaaaatacttcccctccttatataatgaagaagacttctcctcgttttgtgcgcgtttctcgctttgccagcgtttcttttgtaattggtcgatcgactgtatttgtgtttaaagtaaccgagtccttttgagccatctcgacgttttagatataatggccgagtgattacaggtgacgtcggcgttttagaagtaacgaccgagttatactgagccatgtcggcgttttagaagtaacagccgagtgaagaccggcgacgtcagcgttttagaaataaccgctgagttatatcgagccacgtcggtgttttagaagtaacagccgagtgaagaccggtgacgtcagcgttttagaaataaccactgagttatatcgagccacgtcggcattttagaagtaacagccgagtgatgactgggcaatttttagaattggtgcttggcctgggaaaaccccatttgtaccgcaccgtcgcacgcctctactttctgagccctagccttactttccgcttccagacctcctctgtttccatttgatctcgcttccgctcagttcgccagcgagattgagatggcacccaagcgaaagagtcagaattctaccgctgcaattattcctcccatcgatcccaacagtcaattgcctttcgcaggtaatcacatgtctg

SEQ ID NO: 148991 - DNA, 613 bp, Zea Mays
cttcagccccaacgacgacatggaaggagatgccaacaagcagatcaagaagaggaagatcatagacggcattgggttcagccaacaggaggtggacagtgacaagtcgatgctacctctttcgctctcactgtcactccgtggcggcgacatcggcggcgaggatgcagggaggttcgaggcagcggcaggtagcggcggcaaaaaggccgctctggggcggagcactttggatctgaccatgtcgatcaaggcattggagtgagaagatgtttcacggccgctctggggggtgagtactttggatctgaccatgtcgatcgatccatcaaaggcattggagtgagatctttcaagtactcgtcccaaggccttccaaaacttgcacactgcaccatgagattaattaagtcataagactgtttgtttaagttaaccatgcatgagcagaccaggccagaccacatatacttacaaataataactgtcttcgatgagatgcactagacatagctacgaactgtacgtttttctctatgtatatgcatatatatagttacatgcttattacatgcatcatcaattgttacgcccacgaatagtgagaggattc

SEQ ID NO: 148992 - DNA, 396 bp, Zea Mays
cgtcagtgttgttggcttccggcaaattttcacggggaaagtcctcgccgtgatacacccatacttcatagttaggcatgtagccatatttgcaaaggtgcgccgacagagttctcttgtcttgacatctacaaatccgacacatactacatggacaacacacatccgtgtcggttcttgatatagcaaaagcacgatcaataaaatcctctgtctttcttatccaatctgctgagggatcattcatacgccaaccttcatacatccatcgacggtcctcgcccaccatatttgattctaaaatagtagaacacatgattcataaattttttccggtactaaacacatatcgatcgtgtcactacatctatagaaaaagatagttcctaaacccac

SEQ ID NO: 148993 - DNA, 543 bp, Zea Mays
gcgggtgctatagcttcgggatgacttagcgcagtagcccgagccatcaatttataggaagcttcgtcggtggcgcttaatttggtcgggccgtgcgggtggccggagataaggaagaacgcgggtgcggtgaatccgtgttcaccgtcgtggcgagctcatcggcgatgattgcacagccgtagcgagtcacggtgtcgcggtggaaagcaaagccacgcagcgcaaggccgggaggcggtggctcaccggcgagctaatccgctctagccgcaaagcagacgggggcagccacggtgagtcaccggagttatccccagggggtggcttttacctggcgaccttagcgggtcatcggcgacgcgaatcctacaacggtggcgtgaatcacggcgagcggcaatcaacggcgacgggccaccggcgacgagcaagggataggatcttctttagtttaacatttactgtaccatggcgtcccatttcagttaacctgacagagcaacttggagcatgatttactctcaatttccaatgacaact

SEQ ID NO: 148994 - DNA, 455 bp, Zea Mays
gcggaggcttcgacgagctcgtcagctgctgctgctgccggcgggagcgggagcgggagcggcagggctgctgctgcttcgtccgccgctcaggctggagggagtagcgctgcaccgagcaccacttgagatcgagtacagtagacctgcagatcttgtttaattatcgtctccgcatcgcaagatttgagctttcattctacttttgctccacatatgctgcttgcttctttctttctctcggcagtttcatcctttttttgtaacgtgtttctgaatcttttttcctttccgatttattagctaggtcagtatatgactagctagagagttcgtagtagcagccgaaggggggtgaatgggctgattaatcagtgtgactatgtgttcatgatctgatacgcatatgtgtatatatatatccttggtaaagcaagctaggacgatttgaggca

SEQ ID NO: 148995 - DNA, 577 bp, Zea Mays
cacacacaagaaatatctcattgctgcaaaggtatgaaattaattgactcatctcgtgtgcactcattcagcattgtcgttagtaaatctttctttactctttattcattatgtgaaggaagaggaggtcaccgaagggaagaggcttcctctcgaggaggtggaagagaacgcatgcatcagccactgaacagaacaagcaggcgatttttttgtgtggatggcgtctgccacaaaaggattgaatcgaggagtgtgctctggttgtgaagtgataactaggctaccacatgttcattttcaaaagttttcgtgtgtgatcgtgatcaggggtgaaactgtggtttcagccaacaaacttgcagttcctattgcttctccccacttttttcctttatatatattttgtatcggttacagaacatggtttatccagtggtatgctgatgaaagatgctaagtttcgcttaatataatgtatatgaaggtcctgggtacctcaaattttgtccacattgaaccagtacgaatgacatcttccttgaaagttatagaaatgcttcaaagttcaaatggc

SEQ ID NO: 148996 - DNA, 440 bp, Zea Mays
atattggaggagccggcgatggctgctagttgggagaagaggaaaacctagctgataccatgttggaatgggaaacccttgattgtattgcatagagctggtggttacatatatagacacatgacggtcggcagcccaacagtggtgcccgcctatacgcacagtctaacactatgcctctagatcccccaatatgatagttttatggcgatgagaagtcatattgggagacttgttggagatgctcttaggaggcgccttgtcagagtattctatctctctgcagccaaatctcgcagaatgccatcccaagataacatgctcgttgaagatcagtttcatgttaaaaattgtcccatcttcaatctttgaatgatgtgaagagggagataggagctaacttctattaaactagaattcattatgcagtactatttgct

SEQ ID NO: 148997 - DNA, 427 bp, Zea Mays
tgggagtgagcagagaaggaaagagagctcggcgcgacgcgtggccaggttgaacggcgagcggcgctgctcgaaaacgacgaaggggccgacgggctgagcaggaatagggaaggcacaagcaaagagggaaagatggtgagctcatgtatcgccaattttatagctacggaagagagaggcctaggggtgccagataggaataaacggcgccaaccattaatggtggatggagaaacggctagcactaatagagggggaggtgaacaggctgggtagtgcgccatgacggcaggtgagtgggcacgtgagcgtgggaggggtcgcgaaatgtaatgcgcgatacgcagcatatagaagcagtgcgcgtgcgttacaaagcaggccacagtaggtagggatgaaaacgggtcgagtatacccgtcg

SEQ ID NO: 148998 - DNA, 1135 bp, Zea Mays
cctgttcgaacattggaacatcaaattaatgctggagttgcaaattatacaaaagacaacgaataagcaaaccatgacatggttaatggggccatgaagaagctatagcgccacaagtgaacacatatccaacaaaaatgtatcgctgcaaatcaccacgactcacaccgatacggaatccagtttattcagttcccgaatttcaaatcaagtgaatcatcaagttccacagctaatgaagtgtacatacatacaccccactaacttcccatgtctcagataacggagcacaactggagagagggaagataagtacatggaggcataagccagaccagaaagatgtgctaaaaacaattgcagcggctttagtctggcaacaacaactgcagtggcttcaacaagggatcaaaaagctggtgactaggccccacatatctaaaacccgcccatgtacaaacatcaaaatagcatgtgccaacctgacattcagttctatgcagatatggtgttcaagtttctgttaaacgtgatgccatgtctccagatttgatgcccaaaaggcatatatctccagaacggcaatgctttgaggaatgagcatgaccctgttccgaccaaaggccgggaaaatggatgccggagttgagaacgacgattctggaatgcacaagattctggtgcagttctaaactgcttttctggactctatgtgtattaactgaaaactaaagaaacacgggcttattacagtgtcgagttcatcagccagggcactttcacaaccgtgccatcccacggttcccgctcgacacgagctccactcacacacgaccttcctaagacacgctcaatcgttcctcgagctcaactaactagctaaagactcggactccatacaaactgaatcaaacagaaaagaacacaaacgaatgactgacgaaactgacgacaacagactctgaaactgggaatgcagacctctgaatggtggctgaaacttgtctcagaccctgtctattactacagctttgtcatattctcatggtggagatttagatgcaatcacatgggttagaacgttaaccattcatcatatgcagatatgacattgaaaggctgcatctttacaaaa

SEQ ID NO: 148999 - DNA, 588 bp, Zea Mays
gtgccctgtctcgtgcaccacatatagtgcacactagacacatcgatgccaactcaatgtgataaatgactacttctatctggtgcacatcgatcatgtcttgtgcacctgtagcatcaccaactcgaatgtgtaagcactctttgagttgggtttatctcaaacttaacttggacttccatagagatacctagtataaggtttcacacgtgtgcatcatcactcatacctagacttaccaaggtaaagctacccaatccatgcccccttatttatagtacgaccaatggaaaataatttttctgtcactaatctatatgtccaccaactctagtgacacatcaacctagttgattcttaaccttctcactcatcctttgaaggtcataaatgaatatcattaatagggaaaatcaatcaccattatcatgaccaaacttatattgcttctgcaaaacacacattagtcacaataatttattgttgtcattaatcactgaaaccaactagggttcctagatgctttgatttctcaagtgatttaatgttggataagttaacaatttactcttctgtaaagtgctagct

SEQ ID NO: 149000 - DNA, 416 bp, Zea Mays
gacgtctctttttctttttcttcccctcagcaggagaagttggatgattggttcggcgaggacgcttcgggcgaatactatcagacctctgagtatccacagctttgccagactcggggatgggtgctacagccagtgtttcagcaggggctgcatcagaggaatctttagccaacatgtccagcatggcacttatttctgcatcactcggattcaaaggcacctcgaaatgaacccgcctctcgtcgtcggggatttcgccaagtgaagcaaccaaagcctcaacctcttcgggagaaggtcgcactctaaggcccaaaccgctataaccagtagcaatatttgacacaaaactgatgaaggccttggaaggaggcagattccaggctgagtatgcaacaggagcaccaatatta

SEQ ID NO: 149001 - DNA, 725 bp, Zea Mays
cttaaaagatcaggggctaacccgcaagatttacgcagactcagaaatccctgagttggacgacgggttaatactaataaaacagaggggctcttttgtaaactagcttcggcgaagggggtacggttgtattctgaccgttcgatctattccgaatggtccagattaaatacgtgaagggtacacaaagttctaatcctgaacctacaactccaatccaacggaccctatccatcctcaatcctgcccgtggatctatccatctacggcttgggttcaacctccgaatgggtaagttaccttctaatcctagacatccgcatttgatccaacagttctaagctttcttcccaccaacctcgagcagtgtcaccgccgccaggttcacacggcggagcatctctggtgagcagtgctccggcacgcaggtgccccagctaggctacggatctatgctaaacagagcggagggtatgaagaacttaatggagtgcatcataccggttatcgtagcgtctacagtgttgtccacgccgcggcacggatccacgacatggccgccaccgcggcgagaaattgccgcccttccgatcacccacgggcttggcggcatcatcgaacacactcggggttcaccagcgaacgcccccgaacgcgccgtgcgtgcccaaccagtatgaagatgagggacgccggtggcgaatcccgtgccgtctacagcagac

SEQ ID NO: 149002 - DNA, 309 bp, Zea Mays
ggatcatcctgcaacaaggtgtgcctgacatgcataagtgggatttaactcagtctggagagtatagtagcaggtctgcttatgctgcgttctattttggttccatacgttttgcaccttggaagagagtttggaagagttgggctccactacgctgcaaattcttcatctggctggtattcaaaaaccgctgctggacagcagataggctagctaaaagagggctatctcatcctgagacctgtcctctttgtgatcaggaagaagaaaccatccatcaccttgtgtcttctcaagatagctctggtc

SEQ ID NO: 149003 - DNA, 393 bp, Zea Mays
gttacaatcaacagtttaatatattacatgtaatcaggttacttttctttctcttacttttttttggatgaccgaattagtttctggtcaacaattatttcgcatcaactgaaaagtgctgtttaatagcatcattgcatatgattatacagatgcaatgatcacagctcattgttttgaagtaatcattttgtctcaaacttacataatgtgtccatcagtctgaagtctgaactaaaaccagtttcttttcagaaatatacctaggtatgattcttgtacataaatattatatcaccatgcgagtaatagtcaatcaattgtggtgaactatttatctggtttcctttccagaactgcacctaggaggcatagtaataaatgtaatcacac

SEQ ID NO: 149004 - DNA, 307 bp, Zea Mays
ggttcgactggcactcgtattgattggtagtaatgtagcggaattacagcagaattaacagagagtagcaggaaggggaagaaggagttctaaggaactacaataggagaatcagctctctctgtcatttcctgcccttcccacgcgacgccagtggaagaagtatactctccgaacgccagtcatgccacccactcaggcccatggacccttgtgctcttgacgcgttgtctcatactgcgcctcggcccactcgcaggatcaacaggcggcccactgcttgtgtttccctgatgctgcttctgca

SEQ ID NO: 149005 - DNA, 885 bp, Zea Mays
acaaaacagagacatgaatttggacattaaaaattaagacaaaatagagacagcatgcagaaaatatatgaagaaaatagtatgaaatttatggaatttctatgtaaggacgtcgcttcagttagctcactcatccagatcaaacaactgaactttggttcctctagaacctccttcacagattttggagatttaggagacagggggcgatctggctcaaagaggcatgctcactgttggacacaaaatagagcctctcgagcacgacaagggactcctatatatccatagtgcctctcaggagtatgacaacagttagctcactcatccaaaagctatggtcacgtttggttagctctaccaaggacaactaggctcctccggtgcaagcacacatgattggttgggtgcgcttgcaatctagccaggctgagcatgtgcagaaggttccgccgggcctggctctctctgtgcaagatttttatccgtttctatggagcctggctgatcatgggaaccaaacaaagactctgtcagaccaagctaatagtggggggctgcccatcgcagccgccaccgatcttgcctttggttgggaatactcctttttttgtttcttcgataactcattagggacagcaggaggatctccatccccctcatcatcaaaaagttgattcacccgaatggacactgaacctgccggtacaatagccatgttgttcataggcagttggctgtgacccgatgaattatccgaacccggttctgacatcttagatttccttttccttggaaggcccctggttccctctgaactcttcttgaacataacatggcgaacattcaggggggtttgaagcctgccctttcccaactcttaaa

SEQ ID NO: 149006 - DNA, 490 bp, Zea Mays
gagtaatagtgaggtatgatatgtctagtttatgagtatcattaatccgatgttctacaataaaatctgctacgacctggcctctcatagatttcagtggttcataggccaagtcatattctataagtgcataagcccacttaccaattctaacactcataattgggttatgcaacatgtatttaattacatcggcttgaccagaaacagtgcaatgactagacagtaaataacacctacacttggtgcatgcataaaacaagcataagcataacttctcaataagagtataccttgtttcaacatccaccaacctccgacttagataagtcaccacatgctcctttcctttagtttcttgtgttagaacagctccaatgcaccttatcttcagcggcaatgtataatcggaatggtactcctgctcgtggtgcttttaatacgggagccgaagacaagtatttttttaatgagatcaaatgcttcctgc

SEQ ID NO: 149007 - DNA, 580 bp, Zea Mays
tgaacacgaccgagtgtcgggcgactgggttcactcctttccgcctgctatatggatcggaggccatgaccccgcaggaaataaaacatgggtcaccacagacaagcacttcagtcgtccccaacgtagacgaaccaacttcgaaggacctcatcgacggagaccgtgtcttcgccctgcaggccctcaacaaataccaagctcaaacaaaagcatggcgcgaccacacagtcatcccaagagaattcaacgaaggggacctcgtactcgtccggacaactcggacagagtcacggggcagctgaagccaaagtgggagggtcccttcatcgtcaagacgaaggcgtcccccagcgcgtacaggctaacaacatcatccggcgaagacttagagcattcttagaatattgacaatctccgtaaattttttgtttgaaccctcagggctaacacgcccttgtaattcaccaaacagttttattccggcccgcactcttttcctcccggggggtgaggtttttaatgaggcggagccatgtaatatacacgcaaaaatcccccgcaaaaaattaaaacaatg

SEQ ID NO: 149008 - DNA, 462 bp, Zea Mays
acatgggtagaaatgcataacatctcagtagagtcaatgatgccacccatgagggttaattcggtcggtggtaaagtgcaagcatataagatatgctcaaatgtaagggtggaaataagggggattgggttccccagcgacctaatagtaatagacaccctggggtagatgtcatcctagggatgaattggttaatgaagtatgaagcgagtgttagctgtgacaagaggaccgtaacattgaagttcccgcctggagagaaggtagtggctgagctaaggatgcctaaaacagcaaaaggagattgtcaccagatttcggttgatagcaaggaggccaacccgctcgaggctatcagggttgtgtcgaactttccagatgtgtttcccgaggaactaccgggcatgccacccgagagaaaagtcgaatttgccatagagcttatccctggcaccgccccca

SEQ ID NO: 149009 - DNA, 477 bp, Zea Mays
aatgatgaagccatttatcgttatcaaattaatcttcaagaagagacatcaagtgcaagatttagcaagttggctaccgcatacaaaaatcatgcacgattcaggtacgctgtctgtttttagtttgatgtgactaatgaataccttgattgattaaattgtggatatgtttctcaacacagtggaactgaagtctgcctttgtctctcaaatgatgctgatgttgatgattttgtattatggttggtttgtttcttcaaaaaggtgatttctcaacatataattattagaatcctaataatgatcttatggtagggtatttgtagaatatattggcaaagacggtagaattaagtgtcaattttgcgcagctaagtatgtcacttttgtgttgttggctccattatgtctgagctgatatttttttcttaacctgtgcagatacaagtgctaagagcagcagtaagtatatctgaa

SEQ ID NO: 149010 - DNA, 533 bp, Zea Mays
tttgtttccttagacggaggagtcctcggatgaaggcttagattattttgttgcgttggatgtggctgtggtggagactttgccacgtgtggagggtgctaaggatcttcctggtacgagtagtgggtgttcgcggcgaagggtggtgggaaaacagtgcgttggtgaattttcgcggagcggcaggtgccgtcgcatggagatggagcgtggccgacttcgagtagacggggctggtaaacgagaattgttgtcttcaccgaacggggcaggcataggcgaaaagaatcttcgggagctatttgagggtgaggaattgaggataatgctgtttaattacagggagatgggtatcattccgaaggttgagccgatgtgataggcgatgccctcgccgtgtgtgtgtaattgtaatggtgatgtggcatgttggccgtattcgtacacttgtattgttccggctgcgtacgtgggcggctttgtgcggagtatctttgtaatgatagacttcgattaacgttattccggttgcg

SEQ ID NO: 149011 - DNA, 2521 bp, Zea Mays
gcatgtgatgcgggtatgtacatcgttgttccaaaattcatgtgtttgatgccggattgcgtgtagctagcagttcatagtagggattagcgctgaaaaaattgggggaaagcaaagtacactggtgacctcaagttcaatcgaatcaatatggcacattagttagattgttttcttatcttagaaaattgatttttgttctttttactactaaagccttacttctctcttctgtgattaaagtggtgaccaacttggaagggcagttcatatgtcaagttgggagttctgaggaaggattgtttaatggccaatttgatgctgccctatttgaccaccctcaggggaagaaacaactattatttccatgaaatagatatcgctcttacaaaaacatgctatgagctcttaacgtttgagataacttggcaatagtagtcatacatatgcaatggctgctaaattgaatgagtgtgttgtgtgttgtcatgtcctgagtctgcatgctctgaagttatgaactaatgttctttttcttatgcctatctttcttgagacaaaattatttaaatcttcatgatctgaattttctcttgtcatgcatgtaaagtcatacaactattccttgccacctattacagggtcttgcttacaattccaaaaggaatatcttgtatgttgcaaatacggagaaccacgcgttgcgaaaactacctccactaagttcaattggatcattcgatttctattaacttctaaaatggcttagaaatggcttgtgctattgtgcagtttgattcactactcatttatgcaattgatagttatattcaaacttgttttcctcgtcacttgtgccttccacaattttctttgtcacttgtgcctcgtcacttgaactaatgacatgaatgaacactatcctacagtaagaataatatttgtgaaatgaacttccaatcttcaggacagttccatattttgcatttggccaattatttaagttagtttgccttttcattttattcagtgttattgtgtgtctgcattgttttcttatacactcttctccttgcgttgatgcacaactctctagatattcgagaaaaaaatgccattacaatttctggacaatcccattatttagttaaaaatgccattagaatcatctgaatgtaatatgtggagttagaattaccgttatatgtttccctttcccatacgccaatgtctaattttttgttatgttcatgctagctattatcatctttggttattttcttttaaattattctactcgatagatggatgtaaccaacctaatgctattttgactaattatatgcttgtatgatttcagtaggaagggagaagaacctcaagttcattgtgcaggtatggttcttcataatttacaccatgtctggtagcaatcatctttccatttttctagaaaattacatgaactcgatctgaatgtaacacgtagagtttgaaagggaaaatagaaacacaactattgtacatgaaaatgagaacacaaaaccatcagctattacactgaaacagtttattgtatgtgtgactacatatgtggacggttatgtcaatcctattggtgttttgactaattatatgcttgcattgttttagcgggaagggagaagaacctcaagttcattgtgcaggtcccagtaaatttcaacaaagaggataacatagttgtggtattactgatgaactctacccgcagctcattagattaattatgtatttatacaacatgtcgtggtcgtgtttttctcacaatgcaatgatctttttatcttgcttgttcttctcttgatccaccatgtcatggtcatggctacatatgaggttacggctgcaacatagtgaattctgaattagcatgggcttctcgtaggaaagatttactgatgttttcatgtctccttttgttgtatacattgtccatgtaagtgaataagaatatcacaattcttgtagctagagtatcatttgtttgtcaattgcagtatctttgttaaggagaaacaatgaacataactgcatgatagttgattgcatagattgacaacactttttatgtacaatgatgatggacctgaagcactaaaacattgcccatttttgttttcacagattgcagcagtgatcggagtctattgccttgggtttgacgtgccagtgtgcgtaggaactccagtgcatatctcaagatttcattttcctaaaaagtctgtcacacttgtcattttatttatgagcctacattttatttatgagcctattaatctaagtatttttcaagtacaatgcaatttccatatgtgattccaccaaatggaattagctcatcaagttacttcagtcaatggagcataaccttcaagcttgcctcttttacataatccatgcagcgacgtcttggtcaatgagcaccacttccatgtcctttgctagatcagcgagggagaagagcaccagcctgcctctg

SEQ ID NO: 149012 - DNA, 322 bp, Zea Mays
cgcatgtcatcccggtcacggcgacattaacaacccgcgcggatcgcacggtgagctccccctttctcgcgtgaaccgaaccacctcgccaatactgctcgatcagacgctaaataggtcgctcccatccatcctcgtctccctctcacctgggttcgcctattcctcccccgttcttgccttgcgaccgcctcagacccccaccacagaccatcgtcgcgtcagcccggaagtgagccgccgccggtgattcttccccttacctgcgctcgggtccgcgcgtgtggtcgggggcgttcgccaggaacccgtgaagctgcgg

SEQ ID NO: 149013 - DNA, 420 bp, Zea Mays
gtacgggctgcaacccagcccccgagggtgtccgagcgggctccccttctcatacctccatggatgtccacgtcgggtcttctccaccacactttggtggtgtactaacagcgcatgcttcaagtgagggagtcgccttagaggttggcacaccggatgctggagttctgatgcctgttagtggtgttgaattaatccctggtgatgttcttcagattgccccggttgatattccttcatcgagccaccacctagcttcttgtgacttgggatttccgtcattcttctctactctttaggtaatttggcttgttctggcgatactcctagcaaattactgtctttgtactcatttgtttttaatatcaggctttggtcgatgggatggctggtcaattgagatcacaaggtgcctctatc

SEQ ID NO: 149014 - DNA, 279 bp, Zea Mays
ggcacccggaagccagccttagcacgcgtgaccatgcgatggtggttgagcactggggagacagccaccgcgccgggtgggagacgacgatccaatgcgtccacaggagatagagcagcgacactgccaaccgtgatggcagagccgtccagaccagccggggtggtcggggtggccaggtcctggactggtgggtgtaggcgactcgtgaagacctggccaaaccgttgtggtgcagtggcgttgggtgcaacaccagcaacactgggtggagcagcg

SEQ ID NO: 149015 - DNA, 393 bp, Zea Mays
caaacctaaccactcgcccgaacatctagcaaccctaattgatttcctcgtcgctctcgccgtcgtgtgctcccacaatcgccgtctccaagcgcccccgcccctgccacaccgccgtcttcgtgcgtggcgtctcggtcccccaacatcgtcgcacggtattgcctcatccatctgtcatttctcgtcttcgtgcactcttctgtcgtcgctccacatcaacagtgtcgtcagatcccactcccgctcgccattgctcggcgatttggtgcggtggctccacggccctcgcctccacctcacacggtcctacgcctctcggcgctgctctctggccccaggcggcacgccattccctccctcgttccttgactgcaagttgccaaaagcgac

SEQ ID NO: 149016 - DNA, 441 bp, Zea Mays
cctccaaagctgatatcatttgacttcaagaaaccaaggtgacagatttctcctcccacctgctcctatatgtttgtggatctgaatttgataagtttttgaccctttctgcagatggcacccgtggtggaattctaatagcttggagaggtgctgtgtgtcaggccatatcttctcgtgttgatatctagtcggtctcagttcagtttgttgggcttaatggcatgaattggtggtttactagtgtgtatggccctcaggaagatgagcttaaaatccaatttctgcaggaatttaaggatatcagggcactctgtataggtccttggttactgcctcgagactttaatatgatctaccaagctgcggacaagaacaaccccaatctgaatagagcattgatacgaagttctcttgatgtcacaagccttaaagaaatcc

SEQ ID NO: 149017 - DNA, 450 bp, Zea Mays
atttgatcgcgttcccgatgattggtggtctctcagttcgaattggtgactcggtaagcatcacagagctatgagagtgctcaaacgagggagagagagggataagctgaccggattggggctggccgcggtgaggttagtttctcggtggcggagaactgatttggggcgaaaccaaaattctagctctcggatgcacggttgctagcgattcttggtggcggggtggatgatgaccttgcggagctggtggttgcttcaatttatagggctcaacggcggtgaccggaaattcggatgataatgcacggcggtcggaggaaaggaagggcactggtgcagtggtttcgtgtcctcagtcgtggcgatggctccggtgatcaacggagagcaagggtgagtcacgatgatgcggtagatggacagagacacgcggcgcaaggccggaag

SEQ ID NO: 149018 - DNA, 353 bp, Zea Mays
gaggtactaaaagaggatggagctacttttgctacaaaagtggcagttaaacaacttcgatatatgcccatcactccaaggcttaaacgtctgtttttaaccccagaaactgcgaagctaatgttgtggcataaggaaggagaacgtgagatccaagacccagacattacgatgcatccatcagatggcgatgcttggaaggctctggatcgttttgacccagaatttgcaagagacgctaggagtgttcgtctaggcttgtccactgatggtttcactccttacgacaacagttcaacttcatactcttgttggccgattttcatcatgccctacaacccccctcccaacaa

SEQ ID NO: 149019 - DNA, 572 bp, Zea Mays
cggcccacaaccaggcaaaatgcgcccacgtgcgcccgtgttggccattttgcacagaagtcctcagctattcgaaaaacccgtaaagaatacttattcactattcacttgtgtctctgacatgtgcacttaggcccctcacttcttactccttcgcaataccgggtacctgaccacgaacggcggagcggctgctccgacgagcttgtaccggccgcagtacccaataagccacgctcaatttcagtctacgcctaattctacccttggcgctccactaggaatcactaatttggtctgaacgccattctagagctcggtccacgtacacccacggagtttgagacattcccgacgcgttcctaacgacacagtgcagtaacatacgaattgggagcacggtaagctttatcaacttaccaggactcaagaatggtagctaggaaggctggtggagggacagagcggtgggtcgacagaggaggtgttcacggcagtgcggagaactgatttggggaaatccgaattagggcgctacggtgaacgatcaggagcgaggagtggttcactag

SEQ ID NO: 149020 - DNA, 378 bp, Zea Mays
caccatatggttcaaggacaggatatgtattcctaagattgatagccttcgtgagactattttaaatgaagcccatgacttggattattctattcatcctggtagtaccaagatgtatcaggatttgaagcagaagtgctggtggtatggactgaagagagatgtagctgcacatgtggctatgtgtgatgtgtgttaaagagttaaggcggaacaccagaggccagctagactactgcatccactgaagatacccgagtggaagtgggaagagattggtatggatttcattactggattgcctcgcacccagaaaggatatgatgctatatgggtgattgtggatagactgaccaaagtggctcatttcattccggt

SEQ ID NO: 149021 - DNA, 508 bp, Zea Mays
gttgtccaacacttcagcgtgatccattagatatgttgtttggttgcttgtatgaataattgttgcatgagctcaaaagctactcaattttattatttttcatgtgatgatgttataataatctatagtttaccttatcaagcatcaatccacttctaaataaattaaaattctttaatagacactaatcatatgataatacattgttagagaagattaatggttacaccagcagagcctgactcctcagaaacacccgttttgtgtgtatcccaagagcctgacctgaggccaactcgcacatcccacgtataatgcagcgtataatgcagcaacagacgggtacgggttatagtttttgacacaaataagtcataagggagtgagacagggtgaccctctatcacctattctctttaactttgttgctgacagtttggctagaatccttattaaggcacaagagaataatgctattactggtttatgcagtcacattatccctaat

SEQ ID NO: 149022 - DNA, 412 bp, Zea Mays
gccccggcggcgcggccccgtcgagctagctctgcgcgttcgcggccccggtgtacgtaggccccaacgcttggccgcgtagatgacaacgcgggcacgtggcttggcgcaggtgtgcatcacgacggccggcctggcacgacctcggccacagccgttgcggccccctacaagcaagcgggtaggccggtaccgtgccgctgccgtcggtacatgagcgagcaggttactcgtttcttcactcgacgtgtgagtgttcgtacaatgccgctcatcacagaaacgagtactcgtacgctgtgatcgtggccacatgcatgcattgtctttgcttgcaccccatcgtcgagaaagccgacaagaacaagaataattaaacaagggtgccttagtaacacaagaattcttactg

SEQ ID NO: 149023 - DNA, 386 bp, Zea Mays
ggaagcattcaatgaggtgctatggaagatggttgaagattatgaccttcaagctataatcagtaaacaagctgatgagtatatgaatatggctggccatgccttctcatcgccattagcaattagagaatagcaaaaaaagagccccaataagttccattacctcattaatcatttaagttttgtatggctggcaacactaattcaacttctcttctcttttttagtttgttggtgggatgcatatggtggccttgcatttgagattcaatcctttgcaaagcgcattgttagcctttgttgttccgcttccggatgtgagcgcaattggagcacttttgaatttgtaagtaaaaattgtcatttcagtttctatcttgttttaa

SEQ ID NO: 149024 - DNA, 1035 bp, Zea Mays
aataaaagcacacatgattttcgccatgcctttcagctaggaaagcatacccatttacctttctctagttcctccagtcgagcttccaaaccatttgagttggctcattgtgatttgtggacatctcctgttgttagcatgtatggtcacaaatactacttggttatttgatgatttttctcattaattatggacctttgctccgcgtttgaaatccgacacattcactactttgtcccagtttttctcatgtgtttccactcaattcggttactccatccaggccatccggtgcgaccatggcacgagtttggtaatacttacactcggacctttatccgctctcatggcactttactctggatgtcgtgcccctacacctcttcacagaatggtaaagccgagtatattattccttttactattaatgtcattccctctctgcttttccatgcttctgctccaacatgctaatgggttgaaggtctctacaccgtgacatacctgttgagtcgtctacccacaaagaacatcaacaccttctgcccccatgtggtgttgttctccccctcttacgaacacctccacgtttttggttgcgcccgctatcccaaccttctgtggatgctccccacaaacttgcacttccttccacttggtgtgtcttcctcaaatattcttttgatcgtaagggatactgatgtattgatccctcttccaacctcattattgtctcccaacacgttgtgtttgatgaggtagatttctccttctctgcctcgccccatctaactaaccatgattttttatttgagtcatgttctttggttttcgccattgggatcccactccttgcatgtacatctccgccagcacccatggtaccgcctagattctaaccttgggcggccctggctcttgtgccacgcgtgcccctggcgcccctggccccgccgggcttctaggcccgggccaccacgatgccctcctctcccatgccccgctcatctgcaacaccaaccatcgtctccatcc

SEQ ID NO: 149025 - DNA, 471 bp, Zea Mays
gagcgtttcaggacaagttcatggtcacggagggtctgtagaaccaacttgacatgctgcagatgggttgtccagctattactgtaaatgaggatatcatcaaaaaataccagcacgaactttctgataaatggtttcaatatgtcattcatcaagctctgaaatgtagatggggcgttagtgagcccaaagggcatgactaggaactcaaaatggccacgatgggtgcggaacgctgtttttttccacatctgctgggtacatgcgtacttgatggtagccacttcttaaatctaacttggtaaagaatacagcaccacggagttcatccaataattcatcgaccactagaattggaaatttgtcctttactgttttgtcattaagggcgcgataatccacacaaaacctccaggaaccatcagactttttcacaagaagcactggggatgaaaaagcggaggtgcattc

SEQ ID NO: 149026 - DNA, 457 bp, Zea Mays
tcctgggggtcctgctacacaaacatcattcggtcaaccacagttggtaccactcattccatgtccacaggtttccacccatgttcccaaccagactgaccctatcaattttgaatccgaagcagaacatagtgtccaggaagttaacagccctagcaaaccttcagatacacctgggacatttaggaggacaaaggaacagaacttcaaaccagatgaagacctgttgctttgcaaaacatggctagagattagtagtgacccagtcattaacacagggcagaggaaggagggtttatgggctagaattgagaaaaggtacaatgaacttagaggtgagtttccattgagacttaatagggctctgagcaacaggtgggacaaaataagagctgaaacaggcaaatttgctggattctacgcaagagtcctaagggaaaaccagagtggcctcaca

SEQ ID NO: 149027 - DNA, 1389 bp, Zea Mays
ggataattgtagcatgttatacaaattctctttggagcaaacagaatcaaagtaatatgaaaaacataagaacacatccaatttgtctgtactattttcctttcaaaagtaattacaaacaatgaaggttagtaaaaaaatcttacagttctgttaaattagtccagctcccaatataatctggtatttccccagtaaaatcattatctgatgcccacctaaacaccagaaaataaaatataagtttgaattgcatggaacaacattttcaacaaaacaacttttataggcatacagtgtcttcattcttgttagtctagaaaacgatgacggtaggggaccacttaggccggcactgtcaatatacctgcaattaagagatatggatatgaaaaaatataagtcatggcgcctactattccaagagaagaatgaaagagaaaagttcactttacagctaaatagtatttgaattttaaaaacttatgcatggctttaaatttttgaaaccatctaaataagtttttataagtaaaataaagtgtaacagtacaacaaaacaaatactatttaaagtaaactaaccctttccacaatgtcaatccaacaaaactgcattccatatcaaactgttttaggttctaaacaatcttacgtgcaactaccttttcctattaaaaaatgtatggagtgcaacaatcctagactaagcccatcgttgacagatgaaaatttgatttttctcaaaatgaaaataagaaaatgtatggaatgccccaaatcagtaaagattctagacgcacaattgctcaagttttgccaggtttcccaactccgaaggaagggaaccatttaagtagttcgagccaatgcctctgcaaaattagcaaaacaatgaaggttagtcaaaaaggaattgacaactgaaatatctattcttggaagcatgatctgtagcttcttttccaaacagaagataattactagaatgaacgaagacatgaaacatatatttctagttttatgattccaaatttagaggtgatttctaatggaatagtgtcatggtatcaacaaaatattttccttacagagatacaagattcacaaggttcccaagctcctttggaacagatccagacaatgcattgatgcccaaactccttgtaatttgaaagagaaaagtttaagatttgatgttaagtaaaaaacatgtaacagggtaatattttatgttgtaaatctcacatgtactgcatagcagtcaaattcccgaggaaagatggcaaaggcccggttaagtaattttgtgctaaattcctgaaacaacatcagatcagacagtcatgaaaagagaccggatcattccttcattaggtattatatata

SEQ ID NO: 149028 - DNA, 376 bp, Zea Mays
gttgcaggcacgaaggtaataactgttattttgagttcaaatccatagttcaaatattgtggaatttaaagctggaaacaattcacaactagaatttgaaattgactgatttttgtctgaatcaagttatttgggtttatggttattcacttctttaagtcttgaagtctgaagtgcaaaaacatgtttggaatcaaaatatcccataccaaacattacagtttacacaaaaagctaatcaattgttattgcaatattccatagatctcaggagtcaggacataaaagttactacaaaaacaatggtatgttcagacatataaatggatttagcactagaattaagttcttgtagtttaactttaaccaaatctgc

SEQ ID NO: 149029 - DNA, 606 bp, Zea Mays
gaattctacatggtataggctcccgcttatttctttgttacaagcagtaatctaaatttgcaccattagatcctcaagccaaatttagatgtccttgctctgctattttgatgctcgttgttgtaactatgatctcgctcctattttatcctgtgtgttcgtccccgagtgtgtagtatgaagttatagcaagatgcttgtatattgtatatatatgtttaccgaaatgacgaaaacattagtggagcagttaccgacaaggtaagcagcgcatctacatagctgtccccgatgcatgcttgtcgtcgatgcatgtctcctacagtacgtaacgggagtgcagaattgttcgaggggggttgtgcttgtgcctgtgcatgcatatgcgttgaggccctttgtcggtagcgctaggtcgctagctctgcattcgtactccgttccgttctcggttcttctttggaacgtccggagcattcgagcgccgttccggccggacgcgcctgcctggtctgccaaagcgaacccgatcgatcgcccggcgcccggcggcgaaccgcgcatgcacgagcgagcgacaggggcggggcccgcggggcatttact

SEQ ID NO: 149030 - DNA, 276 bp, Zea Mays
acgggaggaggagatggaggcgtcgacgacggacggcgccaccggcgccgccggtgtcggcgagtccaagaggcggagccctggcggcccggatcctcagcaccactgaatcgaaacaagacactgtcggtgctgtcagccggaccgcgtgcgtgcgcgatagacctgaatgtacggttggattcgaagagctctagcttatgtgctcgtatacaaataagaagaagatgatgttgtttttacttttatggttgcagctatattgtagaaccgctt

SEQ ID NO: 149031 - DNA, 347 bp, Zea Mays
tccacatatggattgaacggattcttcctgcgatggtttgaggctatgtccgtgagcatgtctggctagcgcttttagagttgagctatttcttccgtcagctttgtgcaaaagagttatctcggaccgtggttgcagacttggaaagattggcacccgtgttactgtgtaagcttgagaagatatttacacccggcttcttcaatccaatgcagcatttgattcttcatctcccctatgaggcacgaatgggggggcctgtgcagggacgttggtgctatccaatcgagagatgtctaaagactatttgaaagaaatgtagaaataaatgcaaaatcgaggcttcc

SEQ ID NO: 149032 - DNA, 427 bp, Zea Mays
actaaaaatcattttcctaacttaattacttgatttaatcaatccctgggctgcggccacaatttcagagaagcgcaggggctaaatcgaaatgtttcccagactcaggatttccccagtgtggactgcgggttgtttacgaaaaagagaaggggctcatatgcaaaagaccatggccgaaagggtaaggactgctctgggccgccagattagaagtctacggttcagattggactataccattttatgaatccatatgcatccatggccataggatcaaggatccacggcccaaaactttcgtaaatcgaaggggtacgcgatctaatctcgactgtcaacacagggatcaacgacggggatcggattcagtcaaaccactacccgacccaatccgagccgtcactggagaatccaacggtccgcg

SEQ ID NO: 149033 - DNA, 1036 bp, Zea Mays
attcgtttgtggtcatgctggctcgttaatttttttccctgagacagtgcacttacaattacaagtgtcctactcctaacagttcataggacctccttgatatggctaggtggctctagctccggctccaagtcgtaccaaatgtccaaatggcaccgtagaaaatggttttagcaccgaaattttagatgatccggagttgttttacactaggggaggatgtgggtggcaaggaccctaaatttatgacttcttcggtgaagatagagctgtggctatttttagatgacctatttatctctaaaatggatgtgaatacgtacaatagtatgatgatatttttttattgggctcatctttgcctcttcaatgcattattgatattaattactggcatatgatgagagatagataagtgggttagaggattgcctgccactccttgtttttaaaataaattgacatccacttgaatgttttgattataaaaatgcatgtattctgtcaatcgagtgaaaccttcaagtaaaattttaaacaagatttcgggtttttattgatactttttcttgtctcgtcatgtttttgtgccctgaaatttcattaatatgcacattatattgctcatatgatgttgatccatcaatattctatgttcatattggggatagattggcttcaggattttggtgcattattgtcaatattattgtaagtaggagtatacagtatgtgctgagagcctgagagggggtatattatacctgagcatatttcagtttgggttgaaaaaaggctgaaagatcttacccacaaacgtcatacggatcattttggattggctttaggttgagtctaggcctgatgaactgccgtgcacggtagatttcagtatgaaaataactaaataatataccaagttaggcttgtgttttcgttatacatgctgttcactcaagaggatatgtttggttcgaggacaaagtaggatgaggtagtggacacattgttccttcgattttttggatcacgtcgc

SEQ ID NO: 149034 - DNA, 859 bp, Zea Mays
tgtgcatgggcgccgccctccccgctggatctgcagccaccccactccccgtcgcgccgattccatgagaggtctctcgctcgatctctttctcactgctttgagttgcccggatttatctcgtgttttctgggttgagttgcccgctggatcttgagttgcccggatttatcctcgcccaggggtgcgtctccgagcagcacccagacacgccgtaccagcagatggcacgcaggttccaggagtgggggctggagaaagaatggggcgacattgacagagcgtgcggggtctgggtgcccgaggacgacgacgagggtcttaacaccgtacccactcgaaggcttccaccatggcctccacctgtttgggaattctggatgtcaatgaagattactgatccattgagcttcaagttgggtcacagatggcgagtggaagggcttgtctattggaattattgcagtccacattatacaatcattttccatggtcacaaatgtgctggtaccattcagcttcatgccattgaagaagtttgggacctcctgattgaggaagagctgacaaaagtggtgcctgagccttctgaacatctatggatgtcaattgttgttactgcttggactggttatgctgcaggaactaccctttgtctcaagggccaacttaagcaacatgcactcttgatgttggtcgactctggatccttgcaatcagtcttgaccagcgttcaatcattggagccggcgttgtccgtcagggtggccactatgaaaacactctcatgccaacatcagttaccagtaaccacctggaatatatcgggatgccagttttcagccaagtttaaatttct

SEQ ID NO: 149035 - DNA, 611 bp, Zea Mays
tcaacatcttcatcttcagcagacatgaatggaacaccataagcttgttggtgccattcattgatttctggaggggtgcatgaaggggcacgtcgggcgagcggggggcaaaaggaattcccatggtgatagactgacgatggagattgtcatccgtctcccgctgccgcctggccagctcatgaacgtcagcagaaatgtccctgcacatagagaaaaaggctgcaatcccatgagccaacctggctcccaggccatgacctcgaccacgaccacggggagtgagagagccacgaccaagagaaggatgggagggaccagctgaggtctgctcacgagagctggcaggagccttcttcatcctgcctgctggattattggggtcaatccaaaaaggggtgtaggaaagatgtctggtgcctttttcatatctgaattgggtgacaacctcaatcatctacatgatgtagggggcatgcagacaacctttgagtggggagcaagaggcatgaatgatttcttgccagatcatatcaaacacattcaatctctcactgctattgggcttcatgaaagagagaagtaccttgctttcacccagaatgttcatt

SEQ ID NO: 149036 - DNA, 574 bp, Zea Mays
cggcacggaaattgggaactcatgaaatatagaacatctcaggaagttttacccctagctagatttcaaaagctattgggacgaccttgtattctataaactgggagatatatcatcaataaaaagacttcattctcaaaagcactcaaattgtttactgccaacctgcatgcttacttaactcagggtgaccactataccctactaacggagcaatcgacttaagtcagcaacgacttaaggcggtgtgacatgctcacgcgtaactcagggtgaccactataccctactaacggagcaatcgacttaagtcggcggtgtgacatgctcacgcttacttaactcagggtgaccactataccctactaacggagcaatcgacttaagtcagcaacgacttaaggcggtgtgacatgctcacgcttacttaactcagggtgaccactataccctactaacggagcaatcgacttaagtcggtggcgacttaaggtggtgtgacatgctcacgcgtaactcagggtgaccactataccctactaacggagcaatcgacttaagtcggcaatgactt

SEQ ID NO: 149037 - DNA, 716 bp, Zea Mays
aaccggtcaaccaaatgagcattaagaaatttacttttacctcctctgtatagttagacaagagactgtccattgatgtcatcctctgcagcaagggttgtgcattcaaatctgtgagcagttggatgggcaggaatcacatgcatggaagcggtcctccatgtcatgatcacatgactcacaattagtctgtgtaggtaagtgtcgaaagcatttgttagctcgtgttgcaatccattgtttatgactttccatgcaaagattctgatttttggacgaatctctaggtttcgcccagtatcttcagctcccatagctcctcccaaatctacctcccttcctcagatgttgagtttccaccagtttcacccacactttagtgcaagtggccaagcacatggcaactctatatgcactcctggttgtaaacagtcccatttttttttcataataatgccacacaaagcagtcctgttgtctttttcaccaagaagcctaatcctcaaattttcagcatcttcacatggatagaaaaaaccttctcactgtagtttcatcccaagggttagattgagaatcaattaattgatgcacccaccaaagacaagtacaatctattggtttcagcttgtgtccccgaggaatccagttatccctccatatctttgtacttctcccatcaccaatcctgtacacaacaccaaattttagaagct

SEQ ID NO: 149038 - DNA, 446 bp, Zea Mays
gaaacctgcaccagcaattaccttgggtgcaatcagctttgttggtgatccccctccggcatggaagccaagcgcctcctgcatgccagcttcagtgccaccattcagcaagagcctgtcaacaccagtcgccccctcttcgccctcgaaaggccacacagcagaaatcagcggaacagcgaaagaaacagctttagcttttaatttaggaacccaacgctttgagtgtggcatccccatctcatggcgcctgaagggggtggaagctctgaattttccattcgagctgatgcagtcagcagtcccaccccgacagcgcgacgaacgaacccagccagaaaggctgcgatgtcgacgagggccgcgccttctaccatgctgatactcatcatcatcatcttggtcccagtcccggcgaaccacatcccttccacgacgaacacccg

SEQ ID NO: 149039 - DNA, 451 bp, Zea Mays
caagaatcttgcaactacgaacagctctagatcccacccgaggccactcttcttcaaacaccggcgggcgcaggggagttacgcaccaaccaccatgaaaaccagatcgggtaaagacagggagcgaccaaagacgcgagaggaaagcagtgcagtgatggaaggagtgcgaacccacatagtccggaggaaaccctaacctcgacttgggagactcagagccaggagacgcgacaggaggaagaaaccccaccgaatgggctagggtttgggcaagcggcgcgatcccctgactccaacccgaccaataacccgaggacgcagaaacagccagcgtgcacttaccttgggcctcaaagcgagaagcaggcgccggcccaacgaatgcaccatgggacgcaccttgcacatcctgaacagtgacgcgcggagaagacggagccccggccca

SEQ ID NO: 149040 - DNA, 675 bp, Zea Mays
ccgggcgcgaacatcctcgtttttttagcttcgtattattgctgctagtatcttgaagcaggtagagccttatacctaatgtttatttaatgaagtgaagttaaactagtgtatatatatacacaagagcctgtttcgtgcgccagctaattaagttgagccacaagagctagagcagaggagcaccagtgttcacagcatcaaccgatcgattgtcggagccacgaccatggccgaggcagctgctgagaagctggtctgcgtgaccggagctggaggcttcatcgggtcatggctggtcaaggagctgctccaacgcggctacgttgtgaggggcaccgcgaggcaccctggtgagtgagtgtgcaagtccactttctagaccataaataaatttagtaaaatttttaaaaaaacaacagaacctgtaaatttccatatgatgctaattactttctatcctttacatatataatactatcttttttctatatggtgccagaggaccccaagaatgcccatctgctggcactggatggagctcaagaacggctatctctgtaccatgctgacgtgctggactacatgtcgctttgtcgtgcgttcagcttatgtcatggtgtcttccatgttgcctccccggtgtcgaatgatcctgtcagtagtctatacttc

SEQ ID NO: 149041 - DNA, 740 bp, Zea Mays
cccaaagcttcgaccacctcttcctcctcttagaaccggtggacgaaaattgccctgctaggattgttgttgtgtgcctgatttgtggggctagtttggctagccttgagactgaccagtcaattctttgttttggtctaggttgtgtaggcttcggatgtgtcttggatgaaaccttcccccaaatcccctgaccgtctctgcatatctatgtgcttcttcccctctttggtgtaaatcattgtctgccctgatatactcatccattttttgcagtagcttatctaggggatggaggggtttcctagcgaagtactaggtcgtaggtcctggacgaaaccccttaatcattccttcgatgacaatctcatcttgtacggttggcgcatgtacccagagccgaagaaaccttcagacataagcctagaggtattcgtcctgctcttgtgtacattgaaacaaagcttgtccagtaatgggattcgtctgaaaaccctaaagctagtgaggagcatatccttaagcttctatcatgatgagatggtgtctgagagaagagatgaatatcaggtatgagctgcactactaactaccataacaaaggattttgccatcactatggtatcgccaccataggatgatattgtagctttgtagctcattaaaaattgcttcggatccgacaagccatcatacattagtaattgaggtggcacatacagtggtggccatggtgtggc

SEQ ID NO: 149042 - DNA, 362 bp, Zea Mays
ggagtcctcatgaaatgcattctctcagctactggaaagaacttatggatgaggtccatgctgggcaatgtggagtacacgtagcatccagaaccctggttgggaaggtcttcaggtcgggtttttactggccaacagcaaagagtgatgcagccgagttagtccagaggtgcgaaggctgccagtacttgtcgaaacagcagcatctaccagcacaacagctgtagactatacccgtaacttggccgtttgcatgctggggattggatatgattggacctttcaagaaagctcaaggaggatacactcatgtactggtggctatcgacaaattcactaaatggatagagttcaaacccatt

SEQ ID NO: 149043 - DNA, 2296 bp, Zea Mays
taaatagttcagtccagaactggctagtgaaaactgtgtcccgatcactgactatcgagcatggcagaccatgaagtttgacaatttcgtcaaagaaggcttttgccactgatgctgctgaatatggatggcctaaagtaataaaatgaccatacttagagaaccgatccaccactgttagaactactgacttgccaccaacctttggaaatccttcaataaagtccattgatatatcagcccacaccatagagggaataggcaagggttgaagtaggccggctgggtgaagatgctgagtcttatgttgttggcaaactgcacagctgcgcacaaactccctaacacgttggagagttttagaattgtaaaatgatgtgcgccacctatgggctatcttctgcacgccttcatgaccagactcatgtgcttgggccagaagttgaggccacaaagtggatgcatccgggatgaataccttgcctttgaactgtagtaagccatctgccattgtctagtcaggacttgcttttccctctgccagctgagcgcggactgcagccacttgagggtccgagtcagcctccgtttgcaaagtagagaagagatcaaaggaaggggaagaaagggtatacacagttcttgtatcttcctctcgacgagacaatgcatctgctgcgccattcaacttgccgggcctgtattccactgttatatcatacccaaacagtttgctgacccaagtatgctgagggattgttgacagccgctgatcgagcaagaattttaagctatagtggtcagtgcggactgtaaagggtcggccctagacatatggccgccagtgtcaaactgcctttaccaatccaatcaactcccgctcatatgctggaaatttttggtgacgaagggacaccggcctgctgaagaaggctatggcaccatcgccttggtgcaggactgctccaaatccagagccggaggcatcacggtcaatgaaaaaccttttgtcgaatccggtaactggagaagtggtgttgtcagcaaggcttgtttgagttgacagaaagcctcggctgtttcctctgtccagtggaatgcatctcttttcagaagggctgtaagaggagctgccactgacccatatcctgctataaacttgtggtaataccctgtgagtcctaggaaactgtggagtgctcggatggtcctcggtatgggccatgattcaactgcgtccaccttggaagggtccatggcgaccccctgcgcagagacaatgtgtccaaggtaagtgactgcagatttaccaaatgagcacttggacttcttaagaacaaggttgttgtctcgcagtaattggaatacttgcttcacatgttgtaagtgttctgtccaagacgagctatatatcattatgtcatcaaagaataccagagtgaactttcggatgaaaggcttcagtatatcattcatcagagcttggaatgtggatggcacattagtcaggccaaacggcatgactagaaattcaaagtgaccacaatgtgtacggaaggttgttttgtggatgtcatccgagtgcatcctgacttgatgataaccactccggagatccagctttgtgaacaaacttgcacctcggagttcatcaagtagctcgtccaccaccggaattggaaatttgtccttgattgtttttgcatttaattcatggtaatcaatgcaaaacctccatgttttatctgccttcttgaccaataatacaggtgacgagaatgctgatgtgcactctcgaatgatgccttgtgccaacatctgatcacactgacactcaatctcatctttaagcagttgagggtatcggtagggtcgtacaaccactggttctgtaccagccagcaaccgtatgtgatggtcttggcgacgtgatggtggcagaccctgagggtcctgaaacaaatcagagaaagaggacagcaattcttccatacaatccatgttcttgtccatggatgcaaatcccaacactaagtccccaacccctgtcaattgtaccaaccttcccttcctccagaatgccattgtgtgtgtgtcaaagttgcagaccaccggtcctagagatcgtggccactacactcctaatacgagatcgaaaccatcaagaggcaaggaataacatgttgtggtgaatttctcctgccgatggtgagggttgctgtgatttgacccttgcttgaaatgcgttctccattggcaacttttaccgataggcctggctgagatagcacttgca

SEQ ID NO: 149044 - DNA, 287 bp, Zea Mays
gggggatgaagtggccgtacttggagaagtgtggtccacaaaggtgaggatgacagacttgcctttggcagtccatcgttgaagtccggcgcgatgtcggtccaaaccagttttggaactggaaggagaagcaggaggccgcctgacagcatgtggtcggttttgtagcgctggcatgtgaggtaccccttgacgaattcctgcactgcagcacgaaggttaggggcgtagaagtcacggcagaggcgatgaagagttcgctagatgccctcgtggtcatcattgtg

SEQ ID NO: 149045 - DNA, 475 bp, Zea Mays
tagcacttagcagtgacctctttgtagtttcatgctttcagtgctcttacaaatgctgagttatctcaaaaataacaaatataatggctatctttttcttagttgttgcactttgaattgatagttaatgatacaccgatgtggatttcatacctgcatgtgaattgaagagcacactagaattgaagggcaatagtaacagcaccgctcaggtgattctcaacctcttcacttgtagcgcaaactccagttctaaaccatgaagcacgcaattgcgaaaacaatggaaaactgtaaaatttatgcatttgcttcaagttcagctggctgaaacatgggtggaaaggattagctgccccctttctgctcatgtgcttcgttctctagaaacaaaatatcacaacaaccagctaaaaaaaatatcacaaccactttgtgtgctcctaatgacttgaacctgtgcagatggtcccag

SEQ ID NO: 149046 - DNA, 693 bp, Zea Mays
atctgtgcgaggcttttcttgggattctcccccatttcggactctggaagtatctttatcattgtcggcccgggatggctagggggtagcatcagcttgttggcggcgcaagtttggagcttcgccgagggaggaaaatagagtatctcgatatccccctcaaggacaacattaagggatggtgtcttgagtggttcatcgtggaaaatcatggcaaatatctccccctcggtcagggaggcaaccagatgttcgtacccccagctgggtagagtctcccaccttttcagagataactgaggccaaagtgctacttgctgaagtctgctcattgaaggactggggtctgactgctgaggccgtggtcgccgactttgtcttcaagaacattcaacccttgaaggacagagtctaccccgcttatttgtataccggcatcaatgattccacccgagtcatagacatatagattcccaatgaggatttgttgagccgactggatatgattctaaggggtagggtctcgaatgctggtgctcatgtagcttactctacgtggaacctaccgccaaataggccattctctgaatttgtctccaaccctcctgctcgtgatggtagcccgggtcatagaatgcgaccctctcccgaggacattgaggccttgattgctccactttggagtcttcccga

SEQ ID NO: 149047 - DNA, 358 bp, Zea Mays
actttaaatctcctcattccacgaagtggtgacaccttgaggtacacatgatcaccttcctcaaactctagtggtcttctattatcagcgtagctcttttgactggtttgagctaccctcaagttctctcgaattatacgaacttgttcttctgcctcttgaataagttcaggcccaaagaactgtcttcctctagtctgatccaatatagaggagtcctgcatttcctgccatatagagcctcgaacgatgacatcttcaaactgtcctggtaactattattatatgagaactcagcataaggtagactcttgtcccaactactaccatgctgaagggtacaagctctcatcatgta

SEQ ID NO: 149048 - DNA, 428 bp, Zea Mays
catccccacaaccaccagcaatgccacccccatgtcggacttgccacatctcccaactagttgcatcatctcggccaccctggactcgtcgccatcaacacccttcgaaataactcctctattccttgtaataaaaggtgtctgaccttgtgccattcgtgtcagttgggccaacatgtgcaaactgcctttctccacttctagttcatgcagtattgttccctttgaaatagtacattgtgatgtgtggacttctcctgtgttgagtatttctacttgtcactattatctggttattttggatgattacacccacttctgttggacctttcccatggttcacaaatctgaggttcctagccatattatccatttttgcacctacacccgcacacaattcaccccctgtcaaaaatgtccaaacagac

SEQ ID NO: 149049 - DNA, 500 bp, Zea Mays
ctcctgctgaggggaagaaaaagaagaagagacgtcttcgtcgagtgtctagcttggatcaggatgtcggtccttctgttcctgctgctgaggaagtgccagtgcctgcatttgctgaagctgacgccaatgggtgtgacccgactgctgtggatcctagtgggtgtgacctagatgacattgaacccaatgggtgtgatctggccaaagctgaacccaatgggtgtactgtccgcgttgttgatgaagatgaggaagaggaggatgaaatccctctaattcggaagaacaactggcgttacctagccagtggggaaagcagtggtgttccttctccagctttatctgccctcattggtctgcaagaattatctctggcgaatttcgatcagactcttgaagacatggtcccaggagatctgttgtcagagccagcagacggtggcatgatggatgtttgcactgatgtgcctgatgctgggctggagttatcccgggcg

SEQ ID NO: 149050 - DNA, 575 bp, Zea Mays
gtaaacctaagtttggcccaccgtggacgagattgccaaaggagagggaggtagtggaaagagggtgaaagagtactctaaaagcaacaaataaattattttgtggttcccctcgtgttgtgtcatgtggacatcataccctcgcatcaaccatgtccatcacaaactcaaggatgagttgtttgacttgggggaagagtaattacgggcataggtccaaacagtgaaacgacaatatgtaagctgcacaacaagttatgacaactcatataaacaattacgacaattcagattccatggttgggaataaattgattggtaagccattttagtaatagcttgccttacttgaaagattcagcttttgctttacttgtttaagaagattagaggctttcagatgggatggggtcgataaatttagcaacctagcacatttatttacttgtccgttaccgagtctgcgcctttcttggagtttggcgtttctgttcctctgtgcccatccgtgcccttgttacggagcttatattgcaaagttaagttgtcgagactcataaatctaaagcaaccac

SEQ ID NO: 149051 - DNA, 392 bp, Zea Mays
gcgcctgttccaggcggaagtggacgtcagcgaggaaggcagaacgctcctccatggttggtgcggcagaggtaggcgatggtggcggtgggggtggtggtgggcggctgcaaatgtagaggactgcatggagcgggtgggagaggatcgtcgagacctcgataccaggttgtcaagggcacggtgatcccgagtagctggccctcgactgtggagctcgtagtcggtggccgattcctccagggcggaggttatgcccctcacggccgcctgggctttaacactagggagagagagattgatagttgatcttgcttgcccctttcataatctgagtacaatgtatatataggccaaccggccaacaacttatggaaacaaactcctatttt

SEQ ID NO: 149052 - DNA, 585 bp, Zea Mays
gtgcatcatctccttcaattctagatgggagacacactcaccatcattaggcttaggacccttatccttgttcgtttgggtctttggtcttgtcattgttagtacaaaatagaaacaaaggaaacaaaaaaattataaaccctacaactactcttaggtgtggtggtggaacacgagtaatgaagcgtcttaccccgcacttacaaggttcttaccagcactttaggtggcaaatggtggccggtgtgacaaacttagagcatggatgtgattgcaaagaagtacatattctgctcaagagaaagatggagctttgggaaggctccataaatatatatctatggcacacaagtcagtaatatatagcaatactgaataagtgtccaaagtactcgtcctagctgctgtcctagagaatgtattagcatagttggaggaagacacaaaggaggtaaaaggatctaggtacaacaagggaacaagttggaaggaaaaacaatcacagaggtggacagatcaatggtgttcctgcttatgcgcactctttctctcttttttttcttttttctttgttttgtgcgggga

SEQ ID NO: 149053 - DNA, 530 bp, Zea Mays
caaaaatgtggcgaagtgatactgtgtctgtgtgtcaccactcgccagagcttattgaaatgactttgaaatttagttaccaaaaaaagagaacaagctaaatttagtttccaaataaaaaagagaacaagctcagagtagcgagtgtcatctccacaaagttcagaagatcgcaccggacccaccagtgctaatgcatttcatcacaacttgttatacccttgttagttaatcttgatggcacgatttatatgctcagatagggcttgctgtctggccggtgtggtactagtcttgctagcgaatgtggcggagtaataatgtgtgtcaccactcgtcaccgtgctttatacttattcatcacagcttgttatacccttgttaattaatcttgatggcacgatttatatgctcagatagggcttgttgtctggacggtgtggtactagtcttgctagtgaatgtggcgaagtgatactgtgtctgtgtgtcaccactcgctagagcttattgaaatgactttgaaattt

SEQ ID NO: 149054 - DNA, 735 bp, Zea Mays
ctttgtccaggaatctaacgagcccacaaggaggtctgggtcctatttgcaggatcccagacctatagctgaagttcttgattccttccctttatggggtttggtggagacggcgatccagcccaggagacaagcctgggctggccacgactccatatggtgggccttagccccgtgttggttgcccgtggaatcctcaatggtgaccaccgagatctcaccttaacatagcaggggtgggtaccccgtattcagggtaccaacacataccattttggaaaaagaagagaagcatatatatatatagaagacaaaataaagaacacgaagagacataatataaaccaatgaattcgtagaaactacttagccaattgggaaccttcacagaatctaaaggtcccagttttaacaaaatctcatcctaagcataacgcctacatgtgtatgaaaaacaacttgcatgatacttgcttcacaaaaaaataatgtggagttgctacattctcactatcaaagatataatgctataactctacactttacactctcaatgcaggactaaccccacaactacattacaattgggccccagcagctcctagaacaatttccaaggtgctatgggtccggagacccagcgccccagcccacctgcctctcatgggaagggataaggactaggaagagattagattacttactatagcgtgtccaatgaggaattaatctgat

SEQ ID NO: 149055 - DNA, 537 bp, Zea Mays
ccctggttggtcctgattgggttcagcagacttctgaaaaggttcgggaaatacgtcagaatattttggtagctcagagccgtcagaagagttatgctgatatgaggaggcgggatctggaatttgctgtgggtgaccaagtccttctcagggtatcacctactaaaggagttgtgcggttcggtgtctctgggaagctcagcccgagatacattggaccattcactatcttggcccgagtgggcagcctggcttatcgcttgctactgccggattccatggcagcggtacacccggtttttcatgtctctatgttgagaaagttcttgcgggatccggaccattagatcgagatggaaccaattgcggtgcagcaggatctgactttggagtgtcgtctggtgcgtatattgcaattctcggagcgtgcattgaggaagagatcaattaagtatgtcaaggtcttatggactaatcagtctgagcgcgaggctacgtgggaacttgaggagctgatgcggcagaagtatccagaac

SEQ ID NO: 149056 - DNA, 422 bp, Zea Mays
gcccacgaggccacaagatccgtgtgcttttggataagttgtgccgttggtgagcccgtgctgcagtttctggttcccgattccgtactggcgtcagccgtcagtgttcccggttctgtttgggtgtttcagcggtttaagccttgcagaaatcagcctctatactgtagtggttcatttcacgtgcgcacggcagtttaacccaaaattacatgtgagctggttgtatctagatcggaggggattagggggattgaatataattttgaatagaaagagatttaattctctcaatctatctctaaccaaacaaattctaagaccttgtttggttattccagtttcatgtggattaaagtggattgaaatagattaagatagattttaatttactatagatttaaaccagtccaataccattg

SEQ ID NO: 149057 - DNA, 359 bp, Zea Mays
cttgatgatctcatcgtttccttataacttccctcggtaataatttctgttacttcaacccttctgttggaaccttacctatcttacccttgattgttttctccacttcgccatttcgcgagtcttgccttaactctatccttggttatgcttttcacgattatcatctttacccatgtcacctctatatcttaccttgatgcttatattatacctgttcaaaaaaaccttttatcctctgtctcaatcttatagttgtattttacttatttgcccttggtcatattctcttccttgttgcttgcgagttttcaactccatcctttgttgcctgttactaccttcaccttcattgtccc

SEQ ID NO: 149058 - DNA, 778 bp, Zea Mays
ttccaggtcggccggtgtgtgccgtttgcgctggattggctggttggttcgcacgacggcgagacgggtcgagttgttgggctgtgtgccagccatgtggttgcttagctggctactgggaatccggttgaagctttgaaattgatttcttaatttttgggtccccttttgcgacgcggtttctggttggtgagagggatctgcagcagtagaaaaaaatgtggtgggctgttcttcctgatgttaaactggaagtcgtcgagaaattactttcatggtggaaatttgaggattctgatcatagttttatttcctgattttgtttgtcagacgagctaagttgatttcggagaaaatatttatttccttggccgtggtagatttggtcacggcagaaattgaccaccatgagagcaatgttcactttgattggtggagaaaaaggttgcaatcattgacggcgaggcatgtcgagttgtcaacttggtgtctatgctgatgcaaaaaggtttgcttgcataaagtccaatggagccaagggtgcttgtttcttgtttgtgcccttcagttgcaacctgcaaaggaggctcgctcaactagtaaaaaacaaaaacgtttgtttgtcacttttgttttacatttgcaatggcttttttgaaacaagctgagtgaatctttgtttttgttaacagtctatgcatcatgactgattcttcgtctggcgaatatactgatattattcatttgtatttcataaatttgcccttttgctttcctc

SEQ ID NO: 149059 - DNA, 362 bp, Zea Mays
ttgggtcacactgtctgtcaagcagacatagctgttgatccggataaggtgcaagaggtgatgaactggaagccgccaacaactgtctgtcagattcgaagttttctgggattggccggttattatcgaagattcattccggatttctctcgaattgcgaagcccatgactgaactgttgaagaaaggagccaagtttgtttggggtcagaagtgtgaagatgctttccacaccttgaggcaacatctgaccacatcactagtgttagcgcaacccaacaacgacaagccatttgatgtgtattatgatgcctctagcactagactgggttgttttttgatgcaagacaaccgggtcattgc

SEQ ID NO: 149060 - DNA, 458 bp, Zea Mays
cgcggtactcgttgcctacttctacttgtgcgagccccggtaaattccccattctcgaattcattccccggttctgcccgacctaaaaatctttgaatgatcaattaactaggtcgatttttgtagagctgcacgatgaagaggactaagacatttttttctcttgctcctccagttatacaaccagtggcacggaaccaactttctagacaagcacaatcagaagtagtagtagaaacgcaggttatagaagaaccagaagtagtagaaaaaccagctagcaatgcaaatggcttacaaaataggttcaggttcacttgctattgttgatgaagatatgagagactagggagaaccagaccactagtgaggtattttccaaccactttcatgcttccatcaattatgttggggatttaagcatgggattgagataccatctaagcttatgcatttat

SEQ ID NO: 149061 - DNA, 308 bp, Zea Mays
gagtcggtaggcgttggggaacatttttatcttgacgatgtagggccctttccattttggatcgagtttgccccggaacactgttctggtggttctggtgaggactaggtctccttcctcgaattctttggggatgacagtattgtcgcgccatgccttcgtctatgcttggtatttgtttagtgcttctagggcgagaacacggtctccgtcgataaggtccttggaggttgacccatcgacatctggtgtagctgtggagcttgctcgtggggatccgtgctttagttcttgtggcatcattgctt

SEQ ID NO: 149062 - DNA, 391 bp, Zea Mays
agatcgggtcacataaagacatacagggtaaatagatgtaatttatgagatctagatatggccctcttctaccttccttctctctgtgtgcttctgcggtagtgcctggagttcggcgaaggattctcggcttgaaatcacggtggctccgaacttctttcacgctcgacgatgctgtgtaggcctctatggcatcatcgacatctaggtaccggtgtggacaactagattgcgatggctctctctcaatatcattgttttcctcacagacgctaatggcgagctctccgcgtcctgttgcccctccgacgacttcgatggatatgcgatgtgcttggagctttttatgcccaagcggagtggtccgcacgccgtatcagctggagtttgt

SEQ ID NO: 149063 - DNA, 527 bp, Zea Mays
ccaacttctcctgctgaggggaagaaaaagaaaaagagacgtcttcgccgagtgtcatgcttggatcaggatgccggtccttctgctcctgctgctgaagaagtgccagtgccagtttttgctgaagctgatcccaatgggtgtgacccgactgatgctgatcccaatgggtgtgaccttgatgatgctgaacccaatgggtgtaatctggccacagctgatcccaatgggtgtaccgtccgcattattgatgaagatgaggaagaggaggatgaaatccctctaattcggaagaacagccggcgctacatagccaacggggaaagtagtggtgttccttctctagctttgtccgccttcattggtctgcaagagttgtctctggcaaattttgatcagactctcgaagatatggtcccagaggatctgttgtcggagccggcagatggtgggatgatggatatttgtgctgatgtgcctgatgccgggttggagttatcccgagcggcgtcccgtgcctcatcgac

SEQ ID NO: 149064 - DNA, 271 bp, Zea Mays
tgtatatcgatgcgctcttcacacaataatttgcattttaacttagacatcacatgagcactactacttttcatccacggccataaccatgcgcatttaggccacaacaagcaaatcatcgtgatcgcgagcttaaccaagccatctagcaagtcggctaaccggagcaacgacatagcccgctatacaacatacacgtcggcttgcctattattatcgaaatccgagacacaacatatatataacaatcacagattcagtttgagagcac

SEQ ID NO: 149065 - DNA, 390 bp, Zea Mays
ggacagtaggctgggaggagacgcggatgtggaggagctggacgtcgcctgcagagtcgcctgctggtgcgtacaggacgatgagggcgaccggccgtcgatggggcaggtcgttcgcatgctggaaggcgtcgtgagcgttgcagtccctccgatcccgtcttcctttcagaacctcgtggagggcgagggcagcgtcatatactctgacgaagaatgagggctctgtttagggatgaataaattcaaggcaaacagacagaaccgtagcgctagttctaaatagtttttgctgcaaatatacacgatccatgggcgggcatttcgtaatgttcctgtgaaaacgaacaccgcttagcctaatttaggggtttagttctctgcatgtat

SEQ ID NO: 149066 - DNA, 530 bp, Zea Mays
aggcacatatgtattgtatgcagcctgaagattttggtcggatgtgcctgtcaatctaccaatttcgtcataaatggacacagatgcaacatgtatgcagccatcacttcgtttggtaacgctagcacccatatcacagatgtttgcaaaacatgataggatgcaaatcttacttattatggaatgataagagagaattagttcagcatcaaataaagcaaggcacttcttcccattaaacttcacatggaatggagaccccattaccaagcaacactagagctagaaatttaactagaacttaggtcaatcgcaggcgacacatcactacacacttgcaaaacggcaaaagtcaacatccacaaccacagtgtatagcacggggtgaacgtgagacgagacactacttcggctacttcgcggcggccttcgtgggggacttgctgctgcctgcggcggcgacgaccttgttggggaggagggcggggttgatgttggacaacacaccatcgtgcgtgatggtgacctcg

SEQ ID NO: 149067 - DNA, 854 bp, Zea Mays
ccagccgtcgtgtcgcgtgcccactgagcctcacacagcagtcgccgtcgcgcagcctgcatgcctcaccgtcgcctagccgaagcctcgacgccgtcgcacgccagagtcctcgcctgccccaggcccattgtcgagcagggagtcgcgccccatcatcaccgtcacgcccatcaacatcgtcgggcccaaagctacctacgtcaagcccatctcacgccgaggtgagaacattgtctacccgtcgtcgtctacccctaaacgtctaccaactcccgcgcctcgcctttgcgtcgtgccttcgcatgaaatctgaaattattaactaagcattagctttcgcattatgtatttgttttgatctatttgtgtggcgttaacttcataataatggtgtatacacgttaaacatgttattttgtcatgatgtatgtttgttttatttacttaattgtcagtctatccgttggttattagcgtagcaatgtagtcaaaactagtttatgattttaagttgcgcgtctagtaaaatcgtttcgccacttcgtgtatgttgaataattaattagtaattagttgtttagtggtcggctattaaaataacaattcaaccgaaaacgaactggtaattttaattatacacttcgtcaatagctattaaggtagttgtgtcaatccgaagcgttttcatttatgtttggttagtgtagacacgatatcgattagcgctgcggcaataccgtgttcgttctaaattaattgttcagtcgcatcgattttgtattagtaatgtatttcatcatgtcccaagtctatattatttaattagctattcattcgatacttattaaaat

SEQ ID NO: 149068 - DNA, 788 bp, Zea Mays
cggcggcgcagggcgagcagcgtgggagctcgcgcggatcccgccggatctcggggcggccgagcgggcgcacgcgcaggcagcggcggaggaagcgcagcgggcgcgaggacaggcggtgcgcggcgaggtgcgggcagggcggtggtatggacggggtggaagcgagcggaagtggaagcgcgtcccgcagcttctccgtgctagctgtaacggacgcgcgctgttgtctgtgcatgggcgccgccctccccgctggatctgcagccaccccactccccgtcgcgccgattccatgagaggtctctcgctcgatctctttctcactgctttgagttgcccggatttatctcgtgttttctaggtttttttttgtgtgtgtcggtggaggggtttgggtcgcgcgtagcgacgtggcggcagtagtgactccgtcaccgcagcgcagtgcggctggtttgggtgctggattcggtgggtagacgggaatgagtgggtggtagcgccgccggctcgtgatctggcttgccgggtacgcaggtagctgggtaatcgctgcttagtgcagctattcgtggaaactggtttgatggttttgcaattcggtagtggccgattcacttgatcgtagcggtagcggtagctgtagcatatgtgtttgtctagatctgggttaattgctgatgcctgaaacgaatttgtgcttgttcgatgcattgctgttgattgaatcgtgtgtcgtcgtggatctgacgcacgttgtttgctctcgagtgggtttcaggttg

SEQ ID NO: 149069 - DNA, 589 bp, Zea Mays
aaacaagcagagaaaacgagccataattttcattcctaacttggcacaaactaatgtacatagctcgactaaacaaacacgataagctttaccttgagatagtatggtcgatgatggctgtgaggccggtgtagttggaagtgtgttgccaccatccatttctgcatttatagcattcacttggaaggaaacactgctataaataattgtgctttcggtgaagctaacattccactcgaaagacttctccagtaggtttgtaatttcgtttggaatgaaaccaggtggattagttgatatgagggtgtccacatttttttaatgaggcgctgcgccatccgtccaaagaagataaactcggcggtgtcagtgtcgtcttcagcggtgaggcatatcttgtacgtgcagagagtggtttgattggtagacatcactaaacatggaatctgtagacagtgaaggccttagttcaatttagatctaggttttggccgagacactaaatatgtcctctagttgccatggtctgttttcacaaggtttctttcatccatatcacaaaaaagaagcacactatgcacaaactgac

SEQ ID NO: 149070 - DNA, 589 bp, Zea Mays
agtcataattaggaggacaatcgcagcaacaacacacctccttactcgtagtgtattgtctactaggacaatctaccataggtttcctgtgatgataggtactcatggtggttatggaggaagccatggaggtcatgcaggggatcatggtataggctatggtgtcccttgggccaattggactaccatagaggagcttgggatccatctctcgctttgactggggaacaattgtagcaacaatagcaatggtaggagggcaaggtatgtgagacatcaaacaccacctcaactagccctagttataccaccattcactttggtaacttcatcaactatgcccgcttagacaaaggtactcaagcataggcacttgcatccacatatacacatgatatggatgggtcatagatcgaggagcatctaagggatacctaatttgtttaagacatacaatccatatacccactttgaaactaaatagttgatggtacgtcccaaacaatctaatgagtatggtcaatagagtgtacaccatccctttgcctatcatctattttgtctgttacatccttcctagtcaatctcc

SEQ ID NO: 149071 - DNA, 294 bp, Zea Mays
gctagtgcatgcgttaggaggggggtcttctcttttatagctcaagggtaaggccatatagagagacttgtttcctacaaacatgagcggtaaggatgtgatctgctgcccagttgacacgtagtgcccctgacgtccttgtagggtcgtgcttagccgtactccggtatagcgtatcgcttcgcctgtccggtgtatgggtccctttaggctgtagcgagtctaatgctgatgtcctcgtcgtggtgtatgataggactggacgaaatactcgtggcttgtcggctcgattgg

SEQ ID NO: 149072 - DNA, 1398 bp, Zea Mays
atctttatcaagggttgtccagtttgaccccaaagtaagactgtcaattgaaaacgaagttgttgttcgacttgttgactcattcatgaacccggtggagtcttccaagtcaaaattgaaatttcggctgacatctgcaagtaccacaacccctgtaactacgactacgagttttgtggcaaaagaatttgtcaacaacagcgatggatcatatactggtcattatgcggcagggggccttggttcatatggcatatgcgttctttttgaggacaaacagctgcctccatgtccattcgaggtcactgttcatgcaggtaatttttcagtcagtacagaaaaaggctcggcacatagaagaaaaggaaatggtcacacgagatagataattaagctctagtttgtgactgtctcgttatgtaccgaaatatttccaccattcccagtttctctgcatgtttgtcgagtactgatgaactgtatctctttgcagatgagtacttttcagatgttaagaatgacactgtttcggtgtgggaggatgaatccgtttccttcgacgtattgtcaaatgaccgcattgcaggaagtaaagcggagatagcgaactcatcttctgtaagttaatgccgtgaaacatgcgatggccacatcaaacatatatattctcattacttcacatcaaacatatcttgcgtaaagttaatgatatcccttttctctgaagccacttcacgggtcagtcctgcagttcggccaaacctaccgttacacacctttccaaggattctttgggaatgactcgttctcgtatacagtacgcgatgagcataacaatgtcgtcactgcaacggtcttcatatctgttctctgcagaccacctcagttcgtatctttacccgagaagttgcatgttactgaagatacaatcagcccactttttgggtaagccataatgtcttttacctaaggctgtcttcagcagcttacacatgctatcgtatatctcatttgttgtttcaaactttattctgtgaactatacaatctacggtgcaaaaaaaagtgttttgcacgatcatatacatgatttacagaagacattgcatacttaagattaacctcacctcttttgttctctttctaaagtaatcaaatgcgtgtatgttcttggcagtggattcccggggatgaaaatggtgtattcagatacgacagaaaatatatctgtcacggtgacagcacagtccgggagcgtgtcttttgatccagtgagaattaaacttggacagttttcagaagatgtactttcaatcagcagcagaggtggcaaggacctggtgttacaaggaactgtagaagcggtgaatggtgcactagactctctgctgtacactgg

SEQ ID NO: 149073 - DNA, 1333 bp, Zea Mays
agcttgttagggccagcctatcgacgatcaaccttctagcccgtttcctggctcgaaggattgccctgcttcaaagacacataaaagttatgtgtgagtacgacgaggtctaggatgaaatacgggtcgggctaggacccgagtggagtttccacgtcactacccatagcaccctagttcgtctttgtgtgggtcctatagcgacaatatgctcacgcttcccgtaggcattcatgccctctttgagagcaatggggtgtacgggcgagcagcaacaacaatgcctgagtgcaatacaagtggcctcgtggccccaacaagaaggatcttgttcaatggttgttgaagacgtggaggacaaggccgagacactaaccgagggtaggtggcccctggtgtgacgtgcacctgcgagagtaagtggcccttgaagtcgacgcacccctacgaggccaggaggccccaactaggagatatcccagaaggggaagaggtagcacgaacgaggccgattcaagtcgttctcgtaagagggtgacatagcttggggacccctcccccacaagcatcaaaggcaagatccagagatccttttctcgggtacctggcacctattcaagtaagtaggcttctttatttcttctctttccctttttacatattcttatgacttttttagacctattgcaacatcagcccagtgtggggcactcagaccctgaggtcggcccatggcccgactcaaatggagtttggggcatcatttcctcgcgatggcgagcatgcgccaccgcagggacatgctgatgtgccactgtctttgggcaccgcaaggacagatccccctagggtcttagatgtgggggtccatgtcctagggccatactgcccctaatggagtcgctgcatatttctgccttgagacatgttagatttagccaacctaagtcctcgacttctccggaggacccttggtccctagaggacatggttcccaattggcgtcggagtataaggtcgggaaccaaagggtcccaagcaactaagcatagcatgtgttttggggttggtctgcaccaaggacccatcttactgcctcgagacgcgagaccccgagagaccctgagggcctataacacctagtgccccaagggcttatactgtcggatgccccggggcgcgtggggcccaaaggcttataccgtcaggtgcctcagggtgtcagaggccctgaaagcttatattgttaggttcttggggtgccaggaaatcaagagcttatgctatcagatgtctcgggtgccaggaccctagcggcttataccgtcaagtg

SEQ ID NO: 149074 - DNA, 788 bp, Zea Mays
attggctgctcaaaatggtctcacacaaccataacaggatcatacagtttgggtctagaaaccttgtccattgtcatgggtacaccaatactcaattagtttctcgtccaatcctggtcatcagagcgataaaaggcagagtaccaaccaattaaaatcagtcatgaatagggcaatccaattgcacaagctactcatttgttgaatggagtctttgtccagacaccatgaacacacagattctcaattccaaactatcgccttggcattgattctttttctaggtgtccttggcatgtattcatcctcaagttgcctgcatatttccggtgagctatgcttttcatcaatatgcatttctcatcaatccacctaaatctttttttcttattcgcattgccggcatccgaatctcaatattcctttgttgtgcagcaaataagctttctgtggctttcacagaacatatgctgccagacaataaaaataaactatcgcggcggcgactatcttacgcttagtgatggttactgttcggggatgctcttttagcaactagtctagtctagtggttatgtgatgctcttgcagttcacaggcagcgaggaggcacctgaaggattcattcttgatatggtatctaatgcaaacttgcaccctatattttcttgcattgtttatagctgtacatgtataatgtgtgctgatgcgtttgtgctaatggttggatttgtttgaaggaaatctgtggttaaagtaaatcaaattgaggcgatgaggcgaacaac

SEQ ID NO: 149075 - DNA, 693 bp, Zea Mays
ggaggacgcgcggcggccggaaatggagaagaagacgggcgcggtgaattcgtgtcccgcggcgtggcagttgttccggcgatcaacggggagcgagggtaagtcgtggcggtgcggtggaaagtgagagccacgcggcgcacggccgagaggcggcggttcaccggtgagcctatcactccagccgcaaagcagaggggaagtaccggggaggttcaccggagtgccgtccagcgcatggcttttaccgagcggccttatctggtcaccggcgacgtgaatcgcaacggcggcggcgtgaatctcaacggagatcggtcgtcggtggtgagggacggtcgtgctgtcgttctgatctgtccgagtcactgtaccatcagaagttcggtttcggtttcttgctacatgcctgacagagcaacttcagaactctttttctctagattttctatggcaacgtgatccacactctgcagcaaatttgtcgagtaatataccatctacaaatttgttatgggaatcatacccaaatttgcactggatcatgtttaaatccaagtccaaagttagctctgtttcactgaaattctgaatttcagaattccaccagcctgacagtccaactttgggcttacttatctctgattttttcttaacaagtgagcttaccaccttaagcaaagttgttcctct

SEQ ID NO: 149076 - DNA, 411 bp, Zea Mays
gcatgatccaatacaaggaccggctctacataccgcctgccgccactctgatccaggaaatagtccaggcggtgcacgaggacgtccacgagggcgttcagaggatgctgcaccgactccgccgagatttccatttccctaacatgaaacaattggtgcaggatttcgttcgggagtgcagcgtttgccagcgttacaagtcggaacacttgaatccggcgggactgctcatacctctgcctgtgccgaacagtgtctggaccgacataacgctggatttcatcgaggcgctgcccaaagtgcgcgacaagtccgtcattttgacggtggtggaccgtttcagcaagtactgccactttataccactggcgcacccgtactcggcagagtctgtcgcagaagctttcttca

SEQ ID NO: 149077 - DNA, 818 bp, Zea Mays
tgcagtcaggaccacaaggatgtggtgtgtaggagaatcctaatgggaagctcagatgggagccggtgacttcctcctcctctcagggaactatcaacatgatgtcaagtgctgagcagcagttttcagttccacttcctctgcagcagttttatgtgccttggacttctcagttcatgccgatgcagggttttcctcagtatctggctgcgcctactcctgcaccgactactcctatgtcatcttagtttggagctccatgtctgccttacccggcggctcagtggggttcttctgttaatttcactctgggagcttcctcttctacgggtatttccggagcttatgtcctacccgctgtggatggcagagagcaaggagatgtggtgacaggtacgatttcagttgattcgtttgtggcccatgctctttttgactctggcgctagctattcgtttgtttcggaggattttgtgtcgcgcgctggtctttcggtgcagaggttgggtcacccaattttggttagttctcctaatggctccattagtagctgttcaatttgtcaggggtgttccgtcattcttgctgatgaggtctttttggccaatgtggttgtgatttccttgggggcattcgatgttatcttgggtatggattggttatcccagtatcgcgcagttatatcctgtttttggaagacagtgttattgcaggcgccgtcgggtagggaggtggtattcttgggaagttcccctaagttcacgttatccttgttggcgcaattgctttcggatcgccggtctaggaagttgggaatc

SEQ ID NO: 149078 - DNA, 321 bp, Zea Mays
tggcgaataccttagactcaaatgaatttgtacctgttatttatatccaaagttttagatcgggcgagacgtcgtcagaacaaatccgaacggtgtgaacaaccgtatttcagacggtgttcaatttgatttgagatcaaattatttcatccgcagtcgacacccgattccacgtaaacaaataatttatgtagagaatcgaatctcaattataaattctcagacgcgattttctcggttgatgagtggagacagaattatttgcgccgaaaaccttagtcgacgaattctatttaattggaccgagataaatcgtccgag

SEQ ID NO: 149079 - DNA, 358 bp, Zea Mays
taatgttagcgtttgcagatacttaagtacatggaaagtttcgagctaacttttcccagattgaaacattttgttattgtaacaaagtagcaccagatgggcagtcaggagccacacatatcccctctccatccaacataaacaagctcgaaaccttggcaccaaggcagacgatatgaccaaataaaatgcaatacatttctactatacgatggctgaggcaatgcaagcaataaatatcacctcataaacaggcaaaatcttgaagaactttaagcaaagcaccctcttctccagccgaaaaaagtttcaccaatccggacccaaacaacagaatcaaaccaagaaaacccctgcc

SEQ ID NO: 149080 - DNA, 645 bp, Zea Mays
atatggacggtaacaggaacggaatcagtaagagttgtttcccgaccgaattaacggttcccgtattttatccggaataatcccgtattcccgtgtgtatcccgcttgcgcttggcccaaatgcgtgtgtggcccaaatgtgtacagtgtgcttggcccaacaaatgtaactctagctggctagcgcttgccgtcacggacgtggtgcatcagtgcatgtgccgtgcggacgtggtgcatcagtgcatgtgacgtggcttctctctcctcctctgcgtgcggcattgccgattgcggctggacggcgaacgggctggttgctgagcgcctgagcggagtagaggaagcgattgctgctagccgattgctgctgcggatggctctgctgttaggcacttgggcatactactctctgctgttcggcactggtagttctaattcctaaactgaataactgatattgttagtctataagtaatagtcgtgatatgttggtctattgggcacttggtctgcaatttttcgtgttaccgattcccgatcgtaatcgactcgttcccgattgaaaatgttccgttcccgatatctcgtaatatcggtttcgtttgtccgtccaacatttccgttcccgtttccgatttcggc

SEQ ID NO: 149081 - DNA, 307 bp, Zea Mays
agtgttagtggagttggtcttgtctggaccaaggaaaggaagctgtcaccaagtcaccgcccatattgaggaaatcgagccattagaaactatcaacgtagtatcagaattcccagatgtgtttctcgaggagttactaggcatgccacctgaaaggaaagttgagtttgccatagagcttatacctggcaccgcccctatttccatgagagcctatcgagtgtccggaccagatttggttgaactcaagaagcaaattgatgaattgttagagaaaggctacatcagaccaagtacctcgccttgg

SEQ ID NO: 149082 - DNA, 279 bp, Zea Mays
atgacattaagtggtaagccacactcataaataaaatcagcaacataaatatctgttctttccttctcctccttgctctttcgctgcaatgtagtttgagtgttgcccttgcaatgcctctcacgaaccacatcctcaggtgctttgcgaagcatggatgcaattgacttagaagacttcgacacgtgttgattgttttggcttgcttcagctgagagccttctcttttgggctgttccggaactgggctgaacaactggatgagatgctctactttcc

SEQ ID NO: 149083 - DNA, 349 bp, Zea Mays
gtcgcagtatgctattgttatgtgcaccggccaccggtggtgacgacggaagatatagggtcggcgctggcgggcgaaagggtagcggaccggatggtgtttgcacccacaagggaaagcatatacacaaaaatggtctttgtttccctcaagaaagaagaggatggaggactggtccatgagagatggaagacgatgaaaagatgggatcagataccggatggaaatggacaagtgtaaggatacgtgggcgtcgcccgtgtggtttttgaccttggaagctaggaaaaggagggaatcaagaaacgacgacgagcaggagcagcggggttgcgtagtgctatgccga

SEQ ID NO: 149084 - DNA, 292 bp, Zea Mays
aaacaacattatcctcagctcctcaccctcaaaaagacttcgcaactccccctcacctacactcgccccaaccggtgaggacaacaattcccgcttgccagccctgtccacatgaagacgaccaccctccacctcactcactctatgcttcaccaccgcccttcgccgcctacgcccagcactcggaccaggaaaaacttcagcatccgtcacacgcggagaagcctccgccacagccacatccaacgccgcaacataatccaagtcctcatccgaagactcttccgtccac

SEQ ID NO: 149085 - DNA, 737 bp, Zea Mays
tgtgaataagactcggaatgttgggttgaagcctgttggtaagcattttggtgatcaactttataggtatacctagcaaagaaataggcctgcaatcattaattgtggccggattgctcactttagggatcaaggtgataaaagaattgctgaggccttccagattgattgaaccctcaaagaagttatggcacaagttatagaagtcatttttaatgatattccaacaggtcttcatgaaacgaccattgaaaccattcgggctgggagcttagccagttgatgaaggccaccctaaaccctcaaagaagtcatggccagttcatgaaaccactctatgaataagactgatagaattaattgtttctttcctcagctaaatgatagaagttgaaatcaccaatcaacatccaattatccaccggtgaaatgcataggttgctcaactagttgatgaaggccacccgatcagggtcgtgacagggaccataaatagtagaaagaatccatctttcagtcgacagagacaaattccatagtcacagaaaagacattgctcatgaaccgatccttgaaacaaggactcattccagccaatcaggatgccaccagattcccctctagaggggctacaagcaaagttgctgaaacgcttgagggcaagcttttttaggtgtgaagtagttatgacatccaattttgtttcttgaatatagaaaatactacaacaactttcc

SEQ ID NO: 149086 - DNA, 324 bp, Zea Mays
tggagagctcagtagacatacgattacgatcatcaaggcatgaacttgagatgccatactcggttcggcgagcgagccatcattgtttccatcactgtccttccattaaaatccacacgaaaacgattgcggtaaataaactcaatggtaaacagaaaaacaggtgaagaaaataggcatggtaaaagtggaatcgtagttcaaggaaccagaagcacggggactttggaactgagagcgagaggaagagctgtgggaagcataaccaggatacactgggataatcagacagagacagaatgaatgtgtttcactgctggagca

SEQ ID NO: 149087 - DNA, 326 bp, Zea Mays
cttcattcccaattgcgattgatggtcttctaatgctgaaacacgaccatatgagacgttgaatgatgcccctcacatcctccctctgattcagatcattctttatgtaaaaccattgcttcatccaagagcccgaccatttattccgaaatgcaggcacatgataatttgcctcagagcgtggcacgaagctgtaacagccgaagttgttatggtattgctcttttctggttgccttcatctggtaggataactcgtgaatattgcaaaagcacctagcatccggctcttgcccctgactcctcatagcccatataaaaacccgc

SEQ ID NO: 149088 - DNA, 628 bp, Zea Mays
ccgtggttttggatccactttctccccactacaatcgctggcgcgatctcattctgctcgccctcgagcggtacgccctcaccgaccatgtcctctccgacgcctgccccgtcacaccatcctagcggcgcatgaatgccgttgtgctgtcttgggtgctaggcacactcttccccgagctgatggagtctgcttgcacctctggtggcactgcgtgctacgcctggttgaccatcgaggagcaattcctcggcaatcgcgaagctcgcgcacttcacctcgacgccgagtttcatgttttcatgctgggctatctctccatcagcgactattgtcgcaagatgaaggggatggtcgaggcccttggtgatcttggtgtggtcatccacgaccgtacccacgtcctgaacgtgctgcgtggcctgaatgagaaactcgcccacatgaaggtccacttcaagcgctcgaagccgttcccctccttcgccgacgtccgcaatgatctcatcctcgagatcggctccagcatgccacctctgcctttggtcaccgctctcatcgccagtaccactatttcctccatcgcccctcccccaggaggtgtcacggcggccgctggtggtagtag

SEQ ID NO: 149089 - DNA, 634 bp, Zea Mays
cagttctcgagctaatatcataggtttagctaacaaatgccgcaagaaatctacaaccctaactgattcgaagcacgcgccgttacggcggattatccgaaccgcggatcggctggcctcagaaccggactgtccactgccctattttaggtctcaacagtaagcataaccaaattcacaggatttttttttgctaacatcctaccttgcatctccatagtctttccgcacggagtttcgacgtgtatttgacttatccatgcccgtataatattaaagctcctgtctattttctcagattttgtgttccggtcggatgtgattgaaaaatcacacgggccgctttcacccacactgcattacacgcacatggtccatgcctctgctgctgtattgattcctcgcgtcatttgaccgcatacactctgatcgattacttatcgcccacatttaccttacgctgctgttctgaatattcaacaagcgattcccattgggcaaaccgtagagagttacgtacaggatgctctcaaaccattttacagcgacctcaagagacaccgctgttatttgacagggtcacaatgcacgttgccgtcttcgagccgcctctttatttacctcggactgtcaa

SEQ ID NO: 149090 - DNA, 334 bp, Zea Mays
ggcattttcttccatacagtgcttcgaatggtgacattttgatgctggcctgatggctgttgttgtacgagaattcggcgtacgacaaactggactcccaatccctgtcgaatgttagcacacaggctcttagcaaatattcgaggatcttgttgaccctttccgtttgatcatctgactgggggtggtaagcggtgctgaaatctagcttggtgcccattgcttgctggaggcctttccaaaattttgaagtgaactgcgttcctctatctgatactatcttccgcggaatgccatggagcctgactatctcttttaggtatactcgggcaag

SEQ ID NO: 149091 - DNA, 656 bp, Zea Mays
cgcttggagtggtttattgtggagaatcatggcaagtccctgccccctcggtcagggagaaaaccggatgttcatgctccaagttggactgaatcccccacagacttggagatagctgaggccagggttctgcttgccgaagttggtttgttgaaggagagaggtctgactgctgaagctgtagttgcagactttgtttttaagaacattcagccactgaaggacagagcatacctggcttatttgtatagtggtgtcactgactcaacccgggttgccaacaggaggattcctgctatggatttggtaagccgactagagatgatccttagaggcaaagtgtcaaatattggtgctccttcctggaatctgccaccttccaagacttttttctgttttgtgtccaatcctcctgctagcgatagtggcctgggtcttagagtgcgaccctctcccgaagaagtcgaggctctggttgcttcacttggtgatctccccaacgatgaaaggcaagttcactttgaaatgcttataaactcgagtgatgcagagataagtgctatgctggacatgatggctgaggattcatctgactccgtccctgctaaaaccatagctattgcaactgtccccgagcctgaaaagaccttgactac

SEQ ID NO: 149092 - DNA, 469 bp, Zea Mays
gccgctagcttgagatggcgggcggcaaacggtttgctgaagtaagcaaggggcccgacgccttgatgaaggaccgcaccgaaccccactcccgacgcgtcgcagtcgacgatgaagagtttggagaaatccgacatctggagcactggccctgtcgacaaggcgtgcttaagtgcgtcgaaggcggctgtcgcgtcgttgtcccaagcaaacgcgtctcgccgcaagagacgtgtgagcggggcggcgatgaggtcgaagtccttgatgaacttgcggtatcctgcaagccccaagaaaccccggagtcctcgcgcaaaccgcgggagcggccaggaggccacagtcgcgaccttgtctgcgtccatggcgaccccgcccttggagatgacatggccgaggtaggccacctacggggcgccgaaggaacacttagagcgcttcaggtggaggtggtgtgctcgaaggg

SEQ ID NO: 149093 - DNA, 397 bp, Zea Mays
ctagaggcaaacgaacgagctcttaagacagtatgaattgaaccgccacaagtacttgagacccaacaaaaaaaagctccctagccagtaggctttagcccagctttactagaaagcgcaatgttgaaaccgtgacccagcaacaggtaaaccagttgtacaatgaaattttgggcatgtttagcatagctccaccgcttcaatccagagcagctccactttaaaaccttagtaggagcagctcttatccaaagtttaaattattttctcaaaccaatggcagtggcggtcataaccaatggcagtggtagggaattaactccaaactccacgtctagattcatttaataaagttttcaaatcagcaaaagagataatccaaaattttgtactgcag

SEQ ID NO: 149094 - DNA, 395 bp, Zea Mays
agtctggtcattgacactcgagggcagagaatatgtccgagatggaccatctggggctactacttccttatcctgcatagggaagatgctctcaaagaatgtcacatcccgagactccattattacatttatagcaacttcgcttgtctcggaatggaccactagaaatctataagctacactgttatgtgcataacctaggaagacacaatctacggtcttagggcctagctttctcttcttcggcaacgggacattcacctttgcaaggcagccccaagtccgaagatgtgaaagatctggcttccttcctttaaatccttcatagggcgtggcctcacggttgcgaggcggcaccctgttcaggacatagcacactgtgagtactgcctcgc

SEQ ID NO: 149095 - DNA, 609 bp, Zea Mays
gttgcatcatgctagaggatatatttatttatgtctttatgagcgaccttgtgaagcagacatttaaataggaactcaaattaaagtagtaagaaaaggagagagtagaaggaaaaaaataaattaaaaaggaaaagcaatccttttcccactcgtctgctagcctggttgccgcgcggctcgctcccatgcaaaaaaactgctgcgggacccacttgtcatcttttctactcctccctcctcgctcattctggccacgatcgtgggctggcaaggcatctggcagcgcataacctctcctctctacgctcattccattccaccctgcatgtctcttctcctatcgttgtctccacgttggtcgcccagcacgccgcctccccacaacttgccagccacgccatgccctcgctgcaccttgcctcgccacggtcggaactgtgcctcctcgtcgtgcgcagggcaacacgcgccctcccctcgatgtctgggctgttgcgctatcgtcgccatggagtatcgctgctgttcatcgacgtccacacctctctgctggcgttcttcttcttccggtgagcatgccctctctgtattctcttttcttttcct

SEQ ID NO: 149096 - DNA, 631 bp, Zea Mays
agtcacagcccaaccaaacagaccctaagggtatcatatcatacatagagaagtcttgataagcctgataaagcaggaaaagttggaaacgtagtacaatcaattaagtattcgtatctgatatatttgatgaagataggcttggtgcactggttatatctctcactaagtcaccagactagggcttcccttttctttatatgatatatttgatgttgtgactttagatttcatacatcaactgcggcccttggtgttcacggttactcaacaagtttctatcatcttaaaacaaaatgaattcgatgcttgtattgtgtttgctgttataaggcgagtttttacctgtagacagagtggtggagcttctttaagaccaaggagggccatggcccccactagcccttaaacttgtttaagcaatagctcattttactacttaattgttgtgcgcaatgctaatctgcactctcattgcccccctctcaactcctttgggaactccgccattgcttgtagagattattgttttgattgaaaccatgtcacgagaaattccctgagtccagttgtaaatgtaatatttgagatggtagattgttgaatgacatgattggctggttagacctgg

SEQ ID NO: 149097 - DNA, 397 bp, Zea Mays
ccgacaggtgcacaaataacatagcagaatacgaagccattatcctaggccttcgcgagctgaaagcactcggcgtaaccacctgcataatcaagacagactccaaagtcgttgttggccagatcgaaaaagactattcagcaaaacaccctacacttctgcagtatcttatggtcgttcgcagtcttgagaaataattcaacggtttcaccttgcagcatgtggaccgcgctagaaatgaagaagccgacacgttagccaaagcagcagcaagaggcgaagccctaccctccgacgtgttctaccacgtcattggcacaccagccgtccgcaacccagagggtctgcaaataaccaccaacgccgagggccatcgcattgtcaacttcatcatggc

SEQ ID NO: 149098 - DNA, 347 bp, Zea Mays
ccgatttttcagtcgcccaggattcctctcccacgcgcgcgcggctaccctcccttcttctctctccctcagctcacggcgctcctcctgccccctcccatggccgagcgcccagctgtcccttctctctctccctcctctaccggcgcccaagctccaagtccgtcaatctgcgtcatgccggctttcaggtgcccctcgtctcctctcggccacactcgacttcctccactccgaccatggctggctgtcgtcgctccttcatggccgcgtcctgcccggtgttcctggcaccagccgccgtgcgcccagcccggatctcgccctggtcctactcgtccgtctcc

SEQ ID NO: 149099 - DNA, 560 bp, Zea Mays
ttccaaggtgctttggaggttctggttattcagtgttcgatgaaacatctgctgagaaggtggtctgggatgaagaagtgttacttggtttcgattcacttgatttttggcagcgtctagctcatggagtggggaaccagatgcccaacgattgcaagcaggatgttgtgcccgatgccccatggttttttgttggaatgtcacagcaagtaagtacatactcaatgtccagtgaaatgggtcttacagtggcatgggatggggagatgcaagctgaaactcacacgcatgaaggattactgcagcagcttgctcaaggtgaagaagccttaaaagaatcagctaagaaggagggtgacattgaagatgaggccagcaggcctgacccaccgagtgaggcaactgcagtggttatgaatggaggaaacatggatgagtttattcctgctagtgtggtcagtgtgcttgaggatgaccctaagaaggagaaggatgctgaaaatgttgatgctactagtgctggcggtatcctttctcaagaattggctccagaatcaatc

SEQ ID NO: 149100 - DNA, 392 bp, Zea Mays
gcggcgcgctcgtcggagagcagccaatgccgcacccaagagccctacaacttaatttaatcggcacaacacaacatagatacgcatggggatttcttgaggggactcacaccgtgaaggatggcgccgagaccccgggtcacgcagcatggcggcaacgcggcggatccgttgtcccgatgagaaattccactgcttcgatcagtcgaccgcgcccgcgaatgccacaccaacatccacaagccctggcggtcccccctgggcctcgcccagaggtcttggcgacggcgaggcacgagttcggtcgcgggcggcttccttttcctccaccgtcgaacgcacacgagcttccttcatcacacaaacaggcaatggcgcccgcgattctttcc

SEQ ID NO: 149101 - DNA, 524 bp, Zea Mays
tgaacgacaagtccactttgaggtacctttggatcctagtgacgcagaaataagtgttatgcttgatttgctggctgaggactcttctgacgctgctactgctgggacgttggtggtggcacctcccccagaaactgatacagccttggatattcagaagcatgccagtgctcgcccaagacgcccttcccgagccaatcagcttgatcctcctactgacgagcagaaaaagaaaaagagacgtctccggcgagtatctagtttggatcgggatgttggtccttcggttcctgctgctgaagaagttcacgtgcctgagcttactgtcgctgaccccaatgggtgtgatccgtctgttgctgatcccaatgggtgtgctccttctgctgctgaccccaatgggtgtgttgtctgtgttgccgatgaaaacgacggggaggaagaagatgaggtccctttgactcggaagaacagtcagcaatatgccgccagtggtgaaagtagtggagttccttctcctgctt

SEQ ID NO: 149102 - DNA, 698 bp, Zea Mays
cacctggaagcagaaggggtccaaagatgcacgtcttgtacacccggagccaaattgaactcatttaggatgacctagagctgtagaaattccatctacgtttgagcattactgcacctcttatatgtctgacaccaacaaccattgttcatagtgtcctgtactgtttgtatctgctgaaccttactggggatgagcttgataagagagggtgccaagaccgacaaggattgcccatggagccacctgccataccaaaacgtgctgctagcaccatctcccaccgcagttacaagcgaagcagtgaacatagcaagaccagaacatactgaaaagaaagaccaaaagcaacatgaccaaaactaccacactattgcctgtgcccctcctaaaggtctcccaataagcttcaggaggccctttgctctagctgagtaccaaaggatgcactcataagttacagcttgcaacaccgttgtaaggcttggagtagagccgttaaaaacacagttgtcctgtcccaagccaccaatattgccagtgaattgaaccccttctgtagtccattgttacctctttaactgcctggtaggctggtaccactagcttgagaatctatgggttgatggttgggctgcaatggagacaaaagcaattttctgcaacctgcaaaatggtgaactagattttccaggcga

SEQ ID NO: 149103 - DNA, 431 bp, Zea Mays
ccgtgattcgacctcctgattgcatgtctctttcctccatcattgttggcaagggatccattctccctatcacatatgtcgatcatacagttcttcctagaccgttttatattaataatattcttgttcctcctaataatattcagaatgtcctttctgtttgccagattaccactgacaacaattattccattgaatttaacccgcttggcctctcttcgaagggtctaactccaggaacttgatcatcatgtgcaatagctcgaggcccctctactccctaggctgtccactatcaccgcctttgtcgtggtttctcgtgctgcaccttccatctagcatcgccgcctcggtcatactggctctgagaccctctcatcccttgctaggtcatccactattctttgcaataaaagcatcggtgcttcttt

SEQ ID NO: 149104 - DNA, 446 bp, Zea Mays
ttccctgtgcgtgtatgcggttgtgattgaggaatggcgctctggggttggaggttgtcctcgccggagtcttctccgccgcggaggggaactcgtcgtcatcgctcagccgggtagaggaggaagacttggattcgcgccgtcggatgtgttttggatggccgtgattagatgtagggtcggagtagcgtgagccgtcggatcgggttgggcgctgagatcggtggcggtgggctcgcctgggatggaaataccgagagccgtccgattccgatctagcgcggtaaaatagatcaggtcgttttaaatcttgatcgttcatcacagaatcagtggcccgcgcagttcacccgatcgtcgcattccagatctaatccgtaccaccagtttttgatccaacggccgatagcaaacaataccccttcggccttaccgttatacaaaag

SEQ ID NO: 149105 - DNA, 530 bp, Zea Mays
cttgcctctaatttcgtgcttttggggtagcctgttagacatatcccaaatgtacatgtataatatgaacccacatcaaagttgttgacaatacctcccaaacaccgcatcgtttcaccaactgtcattagagaaggattaagtggttccttgatcaattgattgtccaacccatattgacgggcattgcgtcaacatcaaccccacattattgttcattgactttaataccatctaaggacctcctatatccattctccactaaaacctcaggcaatgtcacatttgactattgaactaccattttgtagcatggcaaatagccctcattgcgcaagggcatcaacacatagtgtgaccttctcttcccactatcaaacctcctcgtcaatgtgaaatcttgccatcaaatatttacattacccacaaacaaaacccaatgaagctaggtgggatatcaaacattttaagttcatcttctatattgtcaaacacccaatcttctacctacaataactagtcaaactaac

SEQ ID NO: 149106 - DNA, 795 bp, Zea Mays
aaagaaataatatgtttcatacttagaactcttagtcgatagtagaaattgttttggcttatatagagaggtgatgacatgccaaagtagtcatcgcttcctctatatcttgagtcgggtcaatacgcgttatgtgttcatgaattgggaagtaagcgcatgatggtttcgagttagagattagtggtttacggttcgtatgatttggtcgatgtgtgaatatacatgtgaatatgtatgtttataaaaatgttgtggtgtatgttgtgccttagatagtgataataataggcaagctgatgtgtatgttatttagcgggctatgccgttgctctagttagccgaagtgttagatgggttggttaagctcgtaatcacgatgatttgcttgttatgtcctaaatgcacatggttacggtcgcgggtaaaaattagtagtgttcatgtgatgcccaagttaaaatgcaaattactatgtgaagagtgcatcgatatatatgtatgccgggtaagattattgtggtagatgtgttactaattgtgtatggtaattctagcgcacaaaataatttgtataaaattagtaagtctacttgttggtcctaaattgattgttttaaaatggtacagtgttagaatggttcaagtctctagaacgcggcaatttttgaaataaataggagctgaattttattagttgctgtgttgggctgcatgcactgttttcgtcgtgctgtttgtttgatgaactaaagtatgttttctgtagaaaagtcatatagaagagttgtagat

SEQ ID NO: 149107 - DNA, 465 bp, Zea Mays
cagcggtgggactaggaaagcaaggcaccgcaggagcctcaactacggagtccgagcagcaggggctggcggtgaggacacggcgcgcccgcgcacggaatcgatgggaacggcgtggcggggagcgcacaaatgttctgcgagtcaggcggttgcgtccacacacacgcgcgcagggagacctatctggaatcgtcgcggtgctagggtcactaatccagctgggggcaggctcgccgaccgtggggatgaagcaaggttgaccggtcgtgtcaccgaaaaggggaccgaggtggctatgcggatgggagtcgagacgcaggggctcttctagggaagggtgtggggtcaacgctagcgccatggtggacaaggccgcgcctgccgaacagggatagagaagaacaagaggccatggtcaggggtacacgccggggatcctcaccttgaagctcgacggagatg

SEQ ID NO: 149108 - DNA, 611 bp, Zea Mays
catgggtggcgaccctagctcaggtctccagattatcgtttggaatgggacacagccatactggagaagagccgcatggggtggtgaactggtgcacggcatattccaaaacaacacaagcttcatgatgtaccagacagttgtcgatacaggagacgggtattacatgcaattgactgtgcctgatggctcacctagcatacgcttaactttggattacacaggcatgtccactttccgaagatggaacaacaacacgtcttcgtggaaaatctttagccaattcccctatccatcatgtgacaggtatgcctcttgtggcccatttggctactgcgatgacacagtacctgttcctgcatgcaagtgccttgatggttttgagcccaatggtcttgattcttccaaaggatgtcggagaaaggatgagctgaaatgtggtgacggagatagtttcttcaccttgcccagcatgaagactcctgacaagttcttatacatcaagaacagaagccttgaccaatgcgctgcagagtgcagggacaactgctcatgcacagcgtatgcttatgctaacctgcaaaatgttgacaccacgattgacacgacaa

SEQ ID NO: 149109 - DNA, 428 bp, Zea Mays
agaccacacagattgctgtcatgattccgcaaacattaggagggggggccccgatcgctgctgcctccactccactcgccgctccaaccctacaaagatttcggcctctttgccgtgcgcttccctatgattacacacatgactggacgatctgatctcgcccttttcctctcgggggtcgtgctcgcttcgtgccaaaacgtcgccttgtcctgcgcgtctagtttgactgtttgagtggctcatcagtgctgcacaggcacagcacacagcacagcgccacgccgccactcccacggtttcagcaggtatggacaagccgcagtcaggctcaggcaccgcggccagttatcttcgaaaaaactccgaggggacggggtgatccacgcacgcacgaagccatgaaaatgtgttctagttaggacgta

SEQ ID NO: 149110 - DNA, 1196 bp, Zea Mays
cagaggtcgaccaggaccgattaggtcgactaatcgtcgccctaatcgcgattagtcgcctggtcgcccctctcactcgaccagctggtcgcccgacttgtaaacattgtgtagaagcatgtttggatggtgggttagactactaaatcattcagattggacctttacatatggaaaatttaaaaattatctcctgagccctgactaaaaaaatcgacaattatcgggcacatctggttcatgaacacatttcctgcatgataacatcgcagttgtgaagtccgccagcactaggtcacttgctcacccgtaccagtaccatcatctgccaccattgccaccttctagcacattgatttgactcgcatcttcagcagtgtcttcctctttaacgtgacatgccttgattcatgccgtcgattctctcacatgtttcattcatagggcagaactagagcctctttcatttgtcattttgttaacagtgtagattctctcacatgttttgccaccttggccatgaatgaaatagctacgaaggatttccttgttgctgttgtactatatgcaatgctagatttgtgacgtgaacttatatgcgattaatgtcattccaaccttggccatggttccgttcaaattcaagcatggctttgctttgttgcaacttgcaagagttacttcccataattagtgaatgactagatggtctcttttgatgtttcttgttcctttaacttttgtacttaagttgtcttctgctattagtattaaccagtaggggcacaaacccttcctgtttcttcaaaaaaaaaacttatatgctattggcatgcacattgtttctagaagatgttttataaacaaacatgtgaaagctatttgagcttctatctttatgtctctagctgttctatttgctaattatttgaccatattaactgaagtaagaggcagttatccctgctttagtattggcttgcttcccattttaaatttctaaatagcttattttgctaagttgttgattggctagcactttcctagaatcttcttattcattgaagattcatagcatctctcaggtgaactttataactccaagatagcttagtacctcatactggtcatgaatatcaagcactagccatagtgatacatcaattatgggttctgacttgaccattggttctgcc

SEQ ID NO: 149111 - DNA, 444 bp, Zea Mays
aaaacatgcgtcgaaaaaagaccgcgacgacggtcttcgacattcgaccaatacaaagtcaccgcgaggctcagcgctagccaccctcgcatgcgacaactccgtgcagaagtcgcctaagggtgcagccggactagcacaacaagtgcgaaaaatcgaagtctaccgcgaagactatccgcgcagaagtcgcctaagggtgcagccggactaacacaacaagtgcgaaaaaccgaagtctaccgcggagactacccatgcagaagtcgcctacgggtgcagccagtctagcacaacaagtgcgaaaaatcgaagtcctccgcgaagactatccgtgcaacagttgcccaaaggcgcagccggacgaagcataacaaaagcgaaaacgactacaccaaactgcccgcgcaaacaccgactacacgcgcaccagtccagcataac

SEQ ID NO: 149112 - DNA, 1439 bp, Zea Mays
attagcttgtatagaactttcaccactatgggaagtgcactaaaaaaatatgtagttctaacctttttgattccgtgcatgttgtttctattatgagcaggaagaccttctctacccaaggacgttcgtgcaaaacgtcatttggacttgtgtgaataaaatcgtggaaccattgctaaatctttggccggctaagatgttaagagatacagcactgaagaacatcatgaatcatatccattatgaagacgaaagtactaggtacctttgtgtatgcccagtaaacaaggtaatgcatgcaagaattttgtttgatttctttagatttccatcaaaattggtcaagttccaattcttcgggttaatggatgaggaagttctgtttccctttcccatttgactccaaaacttgtatttattttgagtcatgacttaggtcattcctgccacaacgaacttctatttatttggtgccagaccagagctaattccaatgcgccacaacgaactatttatgtcatgaaataattataactagcatacttttttctgtttataggcactaaatatgatttgttgttgggttgagaatccaaattcagatgcattcaagcggcaccttccaaggatctatgattatatatggcttgctgaagatggcatgaagttaaaggtatcaccccacaattcctatgtattggttgcattttggttccttagtcatagttaagaagaatggattagattaatcacgtcctatcttcatccttcaactttaagcagacaatttatttgtccaatatccattcaaaaaactattgtgatagtgaatttaagaaaataaaaaggtatatatattgctttctctatctaaatgtaactttgcccactcttcacatattgtaagcacacaacacactattaactaaggtggtgatattgtaatgctacaattaatacaccaatagcataagaagtggtctcgatccagccaggctatcctgccttgttgcactggacactagccagcaaactgctctaataattatccaaaaatgatgtggcaaatattaaatgttgaaatggcaattcgatcaggtgactgcgaaaaatctaattctccggtttatcgtaggtgtatgacggcacgcaagcatgggatacagcttttattgtcaaagcatattgctcgactgacctggttcatgagttttctccaacactcaggaaggctcatgagttcataaaaagtttgcaggtaatttaattgtattcttatgttcttaattttttttacaatatttgcatagaaagtattgacatgcatgattttagatccctgaaaaccaacccgaccatgaaaattattaccgccatagatcaaagggttcatgggctcattcaacattagacaatggatggtctgtatctgattctac

SEQ ID NO: 149113 - DNA, 1250 bp, Zea Mays
gcttcctctccctcgttcacgagcacaaacagaacgagctgggtcatcttctccaggactcgcgtctgttgcccagagccgtcatgcgcacagatattttctcgtccagaatacgaccccttcctcttcgatcgggacccatggtccagcctctcccatgcgcatagcttatgaatcatctcccacgcgatcgtattccattgcaaccacctccgtaaacattacatgctcaagctcttcgttcctagtccgttgagatcccttccgggattttcgtggtcgctgcaacaaaccccgagtcgggctctgaacaacctctgcgagatctttggggccgacgtggccaactcgccagcgcctctgggctataaaagcgagcccccgtgacctcctcatccctcgaatcgagttctgccttggattagcgtcaccatgtctacaggagaagaagagtgctaccgcagggaaagagaatctggtccgccgccatagccatcccgcactcccgtcgttattaggtgcctggggcttggtccgagagcttcggaccacactatcgcttgggtatctggcgaatcggagctctgtatcgtcgccgggtcgcgcggattgctcatcagagtactccttcgccttggatccgcagttcgccgtgacccgtggtaccgggcatccttatacctagtaagaactccctcatccgaatcaatttgctctgctcatggcgtcgatcgtgtgaattgtcgaattgggtcgctgctgcgcgtactccagtttgccggtggtgaccaccgccgctcggcagctgggagctgctgcggtctgggtaggagggcggcggggtcgttcagaccgcccgatcggaatggacgtctcggattaatcggtcacatacaccgtcgcatagatcaatcggaggccttagatggcaatcgtgcggctagaaccggatcgggtcgtaggagtacgtggaccgtggatctctgatccagcggtgcttataacccatcagttaaataaattactcaatctaatgtgaatgcttggtcgtcaatccaacggcctagattgaaccataccccttcggccgatatcaattgcgaaagagaccctttagacttcataaatcaacccgccgtccatataaggttcgtctgagtctcgggtttcttgcgccgaggcccctgcactttataataacaatgcgcgcagtctagagacataggaaattgaataaattaatacagaaa

SEQ ID NO: 149114 - DNA, 919 bp, Zea Mays
atcagctcgaacccagttggttaggtctcaatcggctagatcttagtcagcacgggctcagttgggcaaatcttagtcgggcacgattgttatagtaaatcagaattttctaaaggtagattgtgaagacctttgagttgattgatactcaaatcaattcaaagcttgggggctatggtgcacccaatggatacaaggacaaaagaaaacgctgaactcaaaagcaaattatgaagacctttgaattcattgatacttaaatcaattcaaagctccagagctacacccattgggtgcaccaaacgctaaactcaaaagcaaattatgaagacctttgagttgattgatactcaaatcaattcaaagctcgggggctacacccattaggtgcaccgatggatacaaggacaaaagcaagcactaaactcaaaaccgaattatgaagacctttgagttgattgatactcaaattaattcaaagctcgaggatgggccagcgggttataattaggttgggcaaaattgacccaagaagagaaaacgagcgtctgagttatgcgctacagaagcactgatatctcgggtcatgcagttgcgcgcacctgaagagctaagtgttcggtgatggctcagctgagaaggtgatagaactccagatatgtagggctacaagacgcaataaagaaggagataagtagggtagatagatagtgatcacaacttgtaaggggataactctccgtcgtgtatataaggttgagggggacccctaaaaaatcatctcatctcaccccatatcacttaacacccaccctcatcgacaaaagttgagcacccacaaagctcacttgtaatcttcatactccaaagaaaacccaatacacagccacaataggaagtagagagttatgccttctaa

SEQ ID NO: 149115 - DNA, 579 bp, Zea Mays
gcttcgtctagcgaactccctggcccaatgaatgagaacatgccacacgccgcggcggagctgggcgcgcagcacctggtggggtactggaagaagtcgtctctgttccattggtggcaggggcgggggtccttgcggtggttcaccatggaattgctttaggagacccacatggaatacgtcgtgtagacgagcgccctcaggtagctgtaggcagtaggccaccgtcccgaccctttctagtacctgaaaagggctagcataccgaggacccaacttgatgttggggcgatgcaccagggtcgcaacctgtcggtgaggaaggcgcaaccagacccaatcacccactgcaaactccttgtcgcgatggtgactgtcatagtggcgtttggcgtaggcttgtgcttggagaagccggtcgcggacatcccccagaaagacgtcacgttcgtggaggagatcatccactatctgcgtgcgctccgttccgacagtgaagggcgcgatggctggtggtttgcgaccgtacaccacctagaacggtgtggtgcgcaatgccgtattgaatgctgtgttgta

SEQ ID NO: 149116 - DNA, 439 bp, Zea Mays
ggagcgtcatcacctggaaggctggaagtaagtgtcatctcttcgttcttgcggtttggtcgcggccacgatgctgtgtcctggtccagggagctcccgagaagcggcgatgcattgtcagatcagatggctcgcttgttgccgtgttgcctgcatttgggcttggcaaagcaagttcatgagaaaattggaacgggttccttctcaacaggtgaaaatgcactgttgaattcgtactgtacttgaggtgctctatgtgtggcagagaagctgtcgatgagtttagagatgcgatgcacaaataaactcatgcttcctgttcacctacaatggcattgaagtaaaaggggcagaattcacttggtttgcttggaaggagcaaaatggtcaatttcctgccaaaataacaccccactaacagcacatggacggaaatggt

SEQ ID NO: 149117 - DNA, 1788 bp, Zea Mays
ccccactggctggctgctgattttgatcatagaaatgagggggtcctcaagctgctgctggttgacaatgctgtgcacttgttgcttttgatttgggggcagaggctgttgatttctgggccatggtttggagtttgttgagtgtgagggctcccttggcttacacagcgcctcaatcttacgatagtgcgggggctctcttgtcttcgaagttggaccttagcatacttttcgaagagttggtacaactcttggagggacgtttggggtgtcacaggtgcaatgattgtatacgtggcctatgcgcggcgctgatggcataatggatagcgatttcgtcttcgatcgacgacaactgagatttgagtgatagaaatttgttatagtagtcacgaagattccttctctggttgctggcataaggatagctccatgagggcatcggtctatggtctgtatccctgaaagttgagtaggaatttctctcgaagggctgcccatgagtcgattgataacgatggcagcctgatgtaccatgtcagagtaggccttcgaggcgattatgaattactctgtcattgcattgtcgtctccttcggacgaggactactgccacctattagcccatgatgaattgcaaagggttagctttactgttgtatttgggccaatttcctgctctataattgcggggccagggtgtcgcctgtagcctggctgacagagggtacctttcgtcggtgaagttgaaggcctggaaggtgtcttggtgtggagtctgtctggtttcttcgaagttgtcctgtccttatctatggtgtgaaaggtgagatggtagttgctgagtctgaagctctggaatttctcgttcgagggccctcgggcgctcctttttctgctggataaggtattggaccttggcctggacttcgttgtgttgttttttggctatgaaagtgtccctttgcttctggaggttgctgttgcgcatgcgaaggcttgtgagtagttgttcctctgtattgatgttgaggtctacgtcgtcttgtaggtcttcgtcgtaatctgaggtgggtatccctagcgagtggagatggtgacatgttgttggtgcgaagcctgggggaattggtgacatgttcctcgtcaagtatggccatattttggccttgtagggatggctatgtgggttgagtggcgcgtcatttggggtcttggagctggaggtgtgggcgcttggcacaggggatgacaaccgtttttgtttggggggttggtggttttcaccttctggttcggcggtggcttggggaatgttgttagtggatggctataggatgtcgtcgacaaagaccaccttacctttttggtgctagcgacgagggccgccatcgttgcctatccttgggtgaggagttggcccggatgttatttttcttgggaggcattgtgggattggccttcgtgacacaaacggttggcgccaaatattgggtcctgacaagtgggccccaacactcgggagcggatgaatgaaacaatgaacgacaaaacattaggtaggtgaactgtagcttcttgttgtgtgtgtcccgtccagctacaggacgggagtatttttagggcaaccgagggttggtggcccaaaatacattcatatccccggttacctactacatccttggaatattccgcgtaacggggtaattacagcgaggtgatgtccggtgggcaggcacacctaaatgtctacccactgattgcactaaccggtggggactacttctc

SEQ ID NO: 149118 - DNA, 447 bp, Zea Mays
ccgccacccggccggagatttgctctccgacatttggcgcgccaggtagggggctaggcattaggtttttgcttgtttccttgcccaagcatgatggtgcaaatcattgagcaccgcgccgagacttcggtacatttcgcggtggagggagaagctgcttcctccacaccgcaggttcccaaccgcccagtgccaggcactgctgcagtgcacgtcgcacggcagcacacggctgcgcaaacgtcccggactccatcgagggcttctccgggggcattatcggcagccatggagttgttgcgacaccctccaaactcgacggcctcaccgggggccatgaagcaatggcgggacgacgtcgaccgactactcggtatggcacattctacctcgaccagttcgaggacgcggtcatcccggcgccaacacgaggcgtcagcatctgtg

SEQ ID NO: 149119 - DNA, 431 bp, Zea Mays
ggtttattgaggagagaaggcggtctctaacaagtgaaatggtggagattctgacttgcttaaaggattggcagctaggagagagtcaggagcagcacaacattgcaaacaacaacgtggaagaacactacaagaatatgtacttgggtgaagaacacgaagctgacgttggtcgtagttagatgtttcttgtgatgtaattttacttttgttatgtacttggacaatgaactttgaacttatgaactgcatctagagttggctgcactctttttcccttctgaccaaagggttttttaatgagtcagccattgcacagctctaataatattaagtttgttttggtcaaaatttgtttgtcttctccttggttggtttgctgatcatatttgattgtatgtttccaattttaggcttttgtgtatttcggg

SEQ ID NO: 149120 - DNA, 1046 bp, Zea Mays
atcaaggtaaccaaattaccaaacaaaacaaatatgaatactagaactggacagtggagagtggacaattcagatttcagaacatcattgaacattcagatttcagaacatcatagaaattatgaatactagaattgtcaggcactcagatcacattttagaattaagaattcagatttcaaaacatgaactgaacatcactcactactcactacataacatatgatgtagagttgcagacttactagtatataaatgccaagtaggcaagtatagaactacagacttactattgacctaaagaagtagagcctcatccaattgaaaagcagcatcactagcagccctccacccgactcagattcttcttcctcatccacttctccttgagtttgtactggttgttcagctagatgatcactaccatcttcatcatcaggataactaccatcttcttctccaacatcttgagcattccttggacgcttcctagttcaaacataggtccttggatgaggctgagaagaagaagaggccccccctaaccagaccaacagtagccctaggtacattttggccccagagaccctatgttgcacccaatgcttcatcaacggcagtccaaagattaccactatcagattcctcatcaacccattcattttcccattgaaactcttcaagcaccagtgggttgcttttcttgcgtttggaactgagctctcttatttttgcaaaccgattttctattttctggttgtagctcacatacaccaacttattcaatctttggtgctctaatatgtttctttttgtatggacctgcacatgcacatacatgaaatcagcaaccattagaaacaatacaccttatatagggcttatcttattgctgcaactccacaagcatagataatacttacttgggcaaagtcactccaatttcgttcacatctagatgttgaacaacataggcattatagttcatcgctgacaatcatctttgctaagcattatagttcatatgctaggccaccataagctcc

SEQ ID NO: 149121 - DNA, 678 bp, Zea Mays
ctggagcatacaacctgctgcggatccgcctatcaacgtggaccaggccctcttcgccaccctgttcggtaaggtattccccatattcttcgccatcctctcgaatttgcgtagagccttgcggggttgttcaagggcattgagatgtcgtatccccatgttgatgccatggcgccgccgcatcggtgctattgtcaccgcgacggggcgttgtgaggagggcgacgatgtgagggccgttgatcaggccatatacgggtaagattagaagaatgggtaagggagatttcgaccgcagattgatgatcttgcggctaggattaaatgggcgataccggttcagtggggtggatttgcaccgttcgatctggatcgagcacaccgaaataaatccgagtgttttaaatcccaagcgttggtcattgatccgacgacacacactgcataccatttcagatgtgaggacttctaatctgaaccttggattcgcgatctgacggcctagaagtgagcataccccttcgaccagcgtgttttacaaataaggccccgtagaaccctataaacaacccgcagtccacctctgagttgtctgagtctgggaaaacttctgaatttgccctcggggttctctgcaattagtgcttggtctagagaacaatgaaaatggataattaa

SEQ ID NO: 149122 - DNA, 308 bp, Zea Mays
caccgtttctctctcttcatggccgcccgacgccagcgtgtaatgatccagctgcgttgagcccaaaacctcacaccaaaatcctctacccgatgcctaagacacaacaaatttgatggaggcatactcaccggagatcccagggcgcagcgatactcgtccacaccaatgagcagatccatggggaacgcttccccaagcaaggagttgtgatggctacaagggtctccacacctggtttcgccactactatctgctacatgagcaagcgatgctccccaaccaccacccagagcccgagcgatatc

SEQ ID NO: 149123 - DNA, 343 bp, Zea Mays
gtatgcctttatctgggatgtattgccttgctgggaaagcaggactcaaaagttgagagttagttcgtgcagtgggtattatagagtatagactcatggtgtgctcagatgaggtggattgctttgaaaatggctctaattaaaactgaaactgaatcataagaatttgaatcctagaccgtccctgttctaagtggctgttacagtagtaattggcatgttaaactgtttatggtacataaaagttctcctgtggaccgaagcatttaataaactgctaagcactgctaggattcctttggttcaggtagcacagtagcagtagcgttgccatagatcatgc

SEQ ID NO: 149124 - DNA, 736 bp, Zea Mays
atggactacatttttccatataccaaagagtgccaccatgaaatggcaatggcattttgatatgatgcgctcatgggtgcttaacaaggataatcttttgtagagatggtcatatcctacctgattataggcaataccaactattgcatcaattagcaaacaaaaaacttgtgaactcaggtcgttgatcccagcacgctctggtgttttggttaagtttccgccttcaagggggttgagttggtgtcgagtttagcttctctagttcggccagtgtgctcttttctccattttaactaaatgacatgcatctctcctgtttgaaaacaaaacagctgcaattgcttgagttcgctttgttgtttttttgtggcatgcaaataaaattgtcttgtcaaatgacttttgcaattccaggagtggcatatgcccctggaggtgttatatgatcaaataattgatgatgtatgtgtggcaaggtgcatgtctaatcgctagattttagcaatagggcaattcttcagaaggttgttcaataatgtgatacctggcatcttttagtggtaaggagaattggacatgttttttttttttttttttgtaaattgttaatatatgttggatcgttgacccttgaggccttaacatctcttgctgacatggcttgtcatgttgcctgaaacaaatgacttcacttttcatgtgagcggttctaattgatggtttgtcctgctct

SEQ ID NO: 149125 - DNA, 578 bp, Zea Mays
tagctaagatatcataatagactcatgctacgaccttatctctactaactattaagaaggtaatgtagaccaaaacgtgcccctactcatcatacacctactctctcactcacactgcatgcaagcatgcaacctactctcccactcacactacatgcaagcatgcaactatgcaagctacggttgtccccctcatccactcatgctgcatgcaagcatgcaactagcctccgaagctaggcctcgtggctcccttccctcacgctgcatgggttcttgtcgaggcaaagttttgcatgtgttcttaattcaaatgaaaatttgaagaagctaagtgtagctcggttggtcgacagtatgcatgtacgcccacaaccgatccctcaagtccaagtcattgtcgaggcaaatttttgtatgtgttcttaatttaaaacccttctatgttggtcatttttttaataaatatatctcgtttcttaggcatacttctctttgtgcgcaatatatagaaaatggtgactaactatcaaccaccgtcaaatttactcaatcatttccacaacacttttacaaca

SEQ ID NO: 149126 - DNA, 472 bp, Zea Mays
aattttcgtgaagtggtaggcgtcgtcgtatggggatggagcatggccgtcttcgagtagaccggattggtaagcgagaattgttatccacgcctattggggcgagcataggtgaaggtgatttgcgaaatcttttcgagggtgaggaattgaggataatgttgttcaattacagggagatgggtatcatcccgaaggttgagccgatgtaatatatgatgccctcgccgagtgtatgtaactgtaatttgtatgatgtggcctgttggttgtattcgtatgcttgtgctgatccggctgcacccgtgggtcacttttgcgcggagtgtcttcttaatgagagacttcgattaacacacttgttgcactattccggctgcacccttaggcgacttttgcgcggagtgtcttttaagtaaaagacttcgattcacgcacttgttgtgctattccggctacacccttaggcgac

SEQ ID NO: 149127 - DNA, 453 bp, Zea Mays
gtctgttcccgtcgtccccgggcccgtttgtgtaccgacgccgtccagatcgatggcaccagctgaggtggtaccaaggaggaggcaccgggcatcgtctgccttattctatgcttcaagccgccgctcctcgaccacggcatcgagactgagctcatcgtctgccgagtccatggacatggccaccgcctcggtaggcttctctccggctcctcacggcgcgcgacgcacacacacacgacgcacacctcaacaaatcgaggtttagggttagggttacagtgaccaagcagagcgagaaaggaagaggagaggactgagagaccgagatttagggttacctgcaacaccggagcaccggatccaccaaccagagggcagacgacagaggcataggagcgagcttggcgcagatcgaggtttagggatagggttacagtgactaggcgaagc

SEQ ID NO: 149128 - DNA, 380 bp, Zea Mays
ggcgtgtggagactgcaggaagaggacgatgaaagatgaccaaaatgatttggccgtacgtggactcctaattgacatggacgccagcagacaaagtgcctagtcgtctcaactctagtcccggtttatcgatatacgacaggctatgatctagtctgaatcgagactgactaaagcgttaaaggtctctcctcctctttattatgattcgatcgtatggcttcaatttaacatcttatagattgttttgtaagtagctttctatggattatttacatgtggcatatataatttttggatgaatttttttttaactaaaccgtgaatgtcacatcggtaacgacacgaccagtaggatgtgatagttcactactataccc

SEQ ID NO: 149129 - DNA, 794 bp, Zea Mays
ccaggatgcttgaccctgtctacctctcgacaaaccacattaagagggtggtaatctatacacaaccttagactatcatccttctttttcagaaataaggctggacatccctaaggcgaagtacttggacgaatgaatcccttgtccagcaattcttacaactatttcttcaattcgactaattcctctggtggcatccggtatggcctttttgatatgggtgctgttcctagctgcaattctatgccaaattctatatcttggtcgggaggcatttcagtaattcatcaggaaatacgtcgagatactcactagccacgagaatcctttccaagggtgattcaatcatggaaatggcacaagaacgtgtgtcaccttggctgggaaggtataagacaagctctccgcaggtgggggagtgtatttcaagggctcgggctgcgacatctagcaaaacctggtgctgtgtcatccaagtagttcccaagatgatgtacacattttctagcccaagaataaatagatcagttttgaatattttggttcccatctttataggtgcgtgttgaacaatttggttagatgcaattttgccccctggcgttgcgatcatgattgccccttttgtgtggaaaaatggtagttgtcacttgacactaaaccttggactgatgaagtaatgtgatgtgccagaatcaaataaaacaagagcaggatgattaaaaatggtaaaggtaccaatcatgactggtgctccttcgggaagttcagctaatgtggtgaagttcaatcta

SEQ ID NO: 149130 - DNA, 778 bp, Zea Mays
gcggccctgctccccacgtcccccacgcgcgcggcgcgtctgcgcccagcctcgcacctggccgttgcacgctggatcccaccggtcagctccatcctccctacgtaactgcagcgcccacatcgctctctcccctcggcgaactgctctgcccgcgctgatcgctcttaagaagttagccgcgagacctacagcacaatccccttctccactcgcgcttgtacagccacagggtgccatgcatctccctcgcctctgtgccgccgtagttcgtcgcaccctcgttgttgtcgccgggtagtcgccgcgcacagagcctcgccagtaccctcgatcatgacgtcctgtcgccaaggtacttgctatgcttccctctctctcttgtctctcttctttggcgtagttggccacgaaggcctcatgcgcgtgtcccccgtgcgtcttccccctcgactctccctgcacgagttgcagcgttgctatcggtgaagcacgcagtgccagccagtctatccctgccaccatctgtccccacggccttgggctggtgtcccagcccggcgcgcgtgattccttcccctggccgaatcagtagccggtgaaacccctccgttgtcgcggcagcagcaccgcccctacgttgcagccccatcgtgccccttcttggcctcgtgctcggccccggcaagcggccagactgcctcgccaccagccgagctcacgcggtcacgctccctgtagtccccatgtcacgtccttccccgacccgaagcagaac

SEQ ID NO: 149131 - DNA, 1200 bp, Zea Mays
ggtaggtttagatgggatttgcttttgttaattgttcattagcgttggatcctagctgatttatttctcatcggggagagagacatggtagatgctgtggattatttgattaattccatcatcaatattggaattttgctgacaagagcacatgccacacgtccatacaaacacaaccaaaaccacaaatgcaatactactgtaggatgagctcgatatgcaaacatgttaagatcgagcaacccaaccacaattgcaattaacgccattcatatatatgattctagcttcgattttttccccgtaacttataaacgcggatgagaatgataatatgtgctaccacaatacaacacgacctcaaattactactagcatatctataagcgtacaagccatggcacaggacagtgtgtatagtactatgagcaattatgatccttgatagcactagcggatattgtacagggcaggctatacgtggtgcgttagggctaataatagctagatttggtttgtattatgttccgtatggtgttgggtgctcacttattactcatgtttcttctaatggtacggtggtggcgtagcgagcgactatagatagcctatcttatactttgcacagaagcgagagggctgttcgctgtggccggattaaaatttaaaatcgttcagactactgcagctcaatctatagagataaggtggaataaaaccgtagcgaacagccttatgaacattcatcggttttaagaattacacaatgcaatctgcactccatgtctccatcctagtcgggaagaaaattaaatacaaacaagagggcattataagagcgtgacgtccactcccacgggaacgcactgcaacggaagcttccaaaaccttcgctgcagaacgcacaccgtcttgtccccctgactgttggaccacgctgctgctgctatatatacaatctgcgtgcgatgggcgcatgcattgcattgctggacatctttgcgggcggctgggcctgctgtccactgtcctggatgggcgggcgcatgcatgcatgcaaggtcaggtccttgggtgatttccccttaccctgtgagttgtgaatgtgattctcggcggtgtggtgttcctgtactgtactgtagtgccatcgtacttgcttagcagtagcatggcaaaccacagtattttcatatagga

SEQ ID NO: 149132 - DNA, 359 bp, Zea Mays
gcgacgcggcgtactgcctctgtagttcgcatttcgagcgggcatttcgagcacagcctcccgtgccgcgcccattcaggagggttctgtgctttctgtcaatgaactgcagttacagtagtgttcatcttcaatagggtttctgttcgatttccttcatccgtgtcttttctggaatcgccgtcttgtctccgtgcaattctttaaggtcccatgcccgtacccgaatcaccgtgcggcgatttcttggtgccgtatgagtaaatgccaggtttctgcacatgaacaacatccgcgaaaaaagtcgcatcctttcactgcattcagggcctgagggtcagggggtgctggtctcactc

SEQ ID NO: 149133 - DNA, 487 bp, Zea Mays
agccacttagattcatggcacagtccctttcccaccccacgtgacgcatgcccacatggtccacctatcggcccaactcagaccccgccgcagaggtgcattcgtgaaaagtcataaccccagtgtcctctatcctgtgttgccgccatgtgggcctgtctgtccagcgtcgtcctcatcccttctctgatacaacaaactcccaacaaactcgtgtccatgccgtccttatctcctctaccatgaatctctgatgtagatataaacggccccaggcatcgcatacccccccccccacacacctccttcattcgtcgctaggcagcctcgccagccctggacgcggcagtcctcactaggaagctagtttccgccaccggtgccaccgtcgcagggaggaagagcggagaacgccgctgcgcgtgttgcattgtcaaaagggatctcggcaacaagcctaggagtgtcgcccgagctctccgcgtgc

SEQ ID NO: 149134 - DNA, 413 bp, Zea Mays
tgagttacgggtgttgaggaatgagactgatgtttcactgtgacaacattgcggcgatcaatattacaagcaatactgttcaattttatcacacaaagcatgtggagcttgataggttcttcattaaggagaagctagtagggtcttaaggctagagtacattaagtctcgtagccagctagctgactgcttcacaaaagatctaggtcctaaagagaagtcaagttgtaacaagatggacatgagaaatatttttggcctatcttgagagggagtgttggtataaatacaagagttctaaatgaccattatgtggaagtgaggaaataaagagtgtgtgtgtgctgggggatgcaacacaccaaaaaaacccaaacctcaataaatttgtagccgcaaacttcaagttcgtc

SEQ ID NO: 149135 - DNA, 1122 bp, Zea Mays
gctaatcattaatcagttagcaaagcacaaatcaaaccctattgctgattgttctgaagagaactgggaaaaataagtatttttttaactgagtgtaagtcaggaaactcaggataggcgctaggcagtactttgcaggtttatctaaaggtagggcttttatggtttaaaaagctatcaacatcactttgcatttttgcaaaggagctgactagctgcagttctgagctgcacttttcaaagtgctttatttatctaaaggtatcaaaatacgctaactggaattttgctgtagtgagaagtactgctactttgcaaagttcatgtcagattggaataaagaataggtagatatagtctccatatcaatttagccatgcaaagttgcaaactatttttttcagtgactgacttgcaaattgtcatgcatattttgtgtgcctggacaaaatgaagccacaatagcattgtttcattggtccaatgtctgcttggttattctacttgacacccagcctaactctgctccttaggcttgctgatgatgaaagaagaaagtgggaaattggtggggccaaggggttatctcaccttgttgccccgctgccagattcttgatggctgctgtgagagtaaccttctcggggtggttattttccttatggattttttcttgtatgcttgttactggcccccgtaatggggttcttttgtatgctgggcatttctaaggccctttcatccttttcttcttaatatataaagatgtgcagttctccttcactttcgagaaaaaaaaatctgtgctcccactcattcatgtctgctagaaaaaaagattctaatttattgtgttcagaaatagtggccacagatgttctggaggaagtagattgctttgtcaagtttattaaacagttcggactcccccgtacgtaccatgtattggcgttaaatttaagtgctttgtactatttactaagctgtttcaggtcccaatctatggcatgctattcagtacattgcatgtatttacattttcttccaaaagtatgctttctctttcttgaatatgatattcaatataataataacagtaattcttatagagtactcattctt

SEQ ID NO: 149136 - DNA, 300 bp, Zea Mays
gttaaggaaatttggtctgcattctttggctcctcaaccggatgttggctcatatctgggctggtcgaaatcggcagggaatattgctaatggactcaccaaaaatgtacttgattcccttatcattctaggagcctggatcttgtggaaacatagaaacaaatgcgtctttgatggctgcagccctagtgttaccgtgagtcttagagctgtggatgaggaaagggcaaaatgggagattgctggtgccaaggggctttcccatttagcagcaccattagctgagaattaagaagggtc

SEQ ID NO: 149137 - DNA, 572 bp, Zea Mays
ggtggttgtaggaggaggaggatgcctgccgatgggaggtcaagtatgctggcatgcatgcttagttgacgaagactgctatattatctcagatagtgagtgagctagtacgacgagactggtgcttgttattgttggtgtgtttaacttgtccgctttaatttattttcagatcatcagtaggctttggtagtttgttggggggtctatctatcagtaggaccttggtgttgtacgtttagcactattatatttctctttgatgggagaggctgcctgattgttgtgagcttaaacactgctttgtgtgtgtttgtcattcagtggctaacatacatgcaggcgagagctctagctattgcagtcatcgatgtcaaatgaatgtgtgtgagcagtgctatgatcacgaacgaagcacgcatttttatagtcagcattaaggggaacttgattatatttgttattccaatcaacaatctatcctagcagccagccacaagcgtatcagctagcaatgccagtgtatgatcgagaaaagagttaaaagctcagacttgcgttgatcgatctcg

SEQ ID NO: 149138 - DNA, 282 bp, Zea Mays
acagttatggccctgtttggcaagcctgctacttagggtttgattgtatgtgtatgaactctgtcacacacttcctacaagcacaaacaaccacacccgagaacacaagcggaaatacaaatacatatgcagtatgaataagcacgaggcaaaccaatcaggagacgcaaggatttgtttgactagagaacgggccaccacaactccacaaggcgccctacgtctccattgtggaagtcagtgagggacccatcaaggtctactcttggtcagacttgaaat

SEQ ID NO: 149139 - DNA, 602 bp, Zea Mays
ctggatcaacgccctcgcccgacgatgcagtctgcagatcttgcttggtctccgttttcacctgggtgggtctcaaacgccagctaaggttccggtgtcttccccaaggaggtgagttttgacgttgtggcttagggatttggcgatcccatttcgcgttcttccctttcggatccatctcagtcgagtctttagggatttggattccaatccctaccctcggtcacggatccggagaagggggaggacgaatgggaaccgaaatccaaccaccacagaagctagatttcacagcggaaggcaatcgccaaagggatgagagaaaggcagcgaggtgaggaagagggcgacccccaattaggtcattgggaaaccctagttttccagactgcactaccgcacgggggagataggaagaatgcagagaaggggaggggatacggaaatgacgcccggcctgggccgcacccctccgacacgcctcgctgattcctgatcggagtcacaactccagaagtccatccacgtcaaataccatcgcggggagcggcccaatcctgtagcaccttcctgggcttggagcttttcggttttagagatga

SEQ ID NO: 149140 - DNA, 466 bp, Zea Mays
cgcgggcacgcgcgaccgggagagggaggcgcgagcgcgcgcgagcgcagtcctggcgcgcgcggcaggggacggcggcggcggcggctgcggctggaggggagggagaaacctagctggataccatgttggagagagaatcacttactgggccaaccctagagggtggctatacaatattcatacatgggcctcatgggcctaatccatatacactaacaataacaaaacattttaactatggaagcaagcaaagcgttgttttggcagtaaaaatatttgatcaacatgagacaactaagtttctagatgcagttaagggtgaatttgagttattacagattgtactaacaacgaatggtgcattattgtttgatgttatcagatgatgatgcccaacttttgtaaggttccacttcttgtctttgtagcctaatgaaaaccatctttgtttatctgcacctag

SEQ ID NO: 149141 - DNA, 538 bp, Zea Mays
tttctttctccctcctttgttctttgcacatttgattcattcttgatagctactgatgtacggttgaccagatttaacagtgggtgtcgaaattttgccttcagcagaggcaacacagtcaccaccctgcaaacctcactatcagtcagtcgcattcccctgcatgttttttctaatcaattctcaacttcccgttctttgcacaagaaaaatgatagcccagaaacatcaacctcctaatcacgcatcgccttttcggcgacaaaagcaagagcatattttgtgaaaacgaaaggagaagctagcactgcgaattggtggacaaacagaccaaacgaccgggttggaatggacggacagcgatggcagcttgtccgcagcttggctctgggcaaatattgcctcgcatgcctaaagaatatgtattatgagtatgaatttacgactgactcagccttaaactccaagcgacaagctctgcaaaggggcaattgtatactgcgctgttcgcttcctgcccaagccagcccagactgat

SEQ ID NO: 149142 - DNA, 320 bp, Zea Mays
aacagctacgaattcatctgactccagattagtcaccacgtcaaatctttctcaaatattttgtcgaacttattttggttcgaccctttaaaaatatctctcaattcaaaatatcgaagccgaaatccattaaatttggtctgttgcttctcgcctcgatctaaatcataaccctggaactccgattagattttcgcgactcctgtcgcggcaattcagactgacgtgtgttagatttaaaattcaagagtaaaactgagtcaaacacgaattgtttaaaataatgcagtataaattttaatcaagatgaatcatagcta

SEQ ID NO: 149143 - DNA, 329 bp, Zea Mays
ataaaatccaagaatcaaggttgcaatggatttcctcgggtaacatgctggctgtggattataaaatctggtgaaaaccaaacgcggccttagattgagcacaggttgtcaatcaggatcaggtttgctgaaatccggcttacataatttgtccttctgtaaatatgtccgtgcctagatcatttccccctctgtctgtcggcagatggcagtggcatgctgatggaaaatgcagtgccttcatgggtgtggtccaaatctgtatcgctttatttgcaaaatctgctatctgcatccagctgatgaaacgcacatgcagacacaaagta

SEQ ID NO: 149144 - DNA, 387 bp, Zea Mays
ccgccatttttagccgccgccatcaccacaatcttccactgcctccgcaacatcaccagccaccatgaccaaacctaccctcgccgacgtgcttgcatcgctgaaatccctcacctcggagctccaatacatgaaggcagaggtgatcgccttgaaggaaaaatccgactcaacgtcggataacggcggcagacgacggtcggatggaatgcgtgatccggacccgccgccgcaacacaaaaagtgggattttccccgctttgacggcacgacagatccaatgctcttcctcaacaagtgcgaggcctactttcgccagcatcgcactatggcggaggaacgcgtgggacgagcttcgtaccatatggacgacatcgcgcagctgtg

SEQ ID NO: 149145 - DNA, 679 bp, Zea Mays
cttttggtggccaaaaaagatgctgccggcctgctgcgcttgcgagcgagagttcagttcggtaggccagtcaaaaagtggtagtcgtactagagcagtagtagtagactggtagtgctgctgctgaatgctgatgcaaaattcggcagcggtgaattggtgcctggggtcggtcaggtcaggtggcagatttcagccatggtttgttggaaaggaaggaaatcaatcatcctcttggttcacgtgatctcacaccctctgcggaccagtcagtttatcacgagtggtatgtgcagtcagctcactggatggatcatgtgaaatccgtgacagcttccgcagatctggaaactcgaacggaacggaacggaacgggaaggcgtaactaggggctgctgtagcagcctcttggtaacagtgctactacagctcaggtgtccgtcccttcctcgctgcttcagtgacagctagtacgttttagtaagacagcgaaccaaactgtggcaaactttattactgtcattgcttgccctcgtcaacgttaagcatcgcccttacgtttagtaccacgtgctctctcagatttccgaaacacagccatcgaagtttatggtagtaccaaacataaacaactttgctctcgcgcaagtcaagtctagatatggaccatcgtcctcag

SEQ ID NO: 149146 - DNA, 690 bp, Zea Mays
gaaaaagctatgtggcaatgggatccagaatgtttattgcaagattctaatgttcaggcgatgggcttgctggaattatcattgagctctttccagtttctaatactggacggtgatggcttgcaagatatttcgtcggagcaactaattgactctggatcatacttggtgggtgctgatttcaagccatcggcatgttgaacattagtgaccagaaaattgtgaagatggagcgagttgtggcacggctgaagcatggtgggtcttctctatttggaaaccaaggtttggggttgacaggctatggggtgttgcctctgacacctcaggtatgttctgaaatgccagcaacatagatagaacacaaggtgctagggcctccagtggttgcacaaggtactgcagctccaatgcctactgaaatgtctcttgttgatgtcaggtgggatgccgaattgtttcctgatctcggttcgcatgatggattgttctggcaactagcacaaggcaatgagttcatgagtagtcatgagaatatgagggacaattttttcctccatgtttgttaggtggcttcagttctggacatgacaacttaatgctgttgtcaaaagaacctgccatgcattctgttcaccacatgctcaatgaaatgcatcttttggatgttgtttgggatgagggtttgct

SEQ ID NO: 149147 - DNA, 650 bp, Zea Mays
gccagatattactcagatactaaaaaaatatgttgccatccaaaacacatcagaacaaacaagtcctgctaaattgttaaacgaccaatcacaacggcaagatacagcaccgaagaataaaataccggtacacacaacatcaggacatcatggtgtcatgatcacaaacacttcaatagttcaattgctgatttgctgaactggaacaggactcggccagacagatataagcatgaggattggcaagaacttgatcacggaacagttactggacatatatcatcacaagacaggatgtcaaaaagctatgctttcctaagaacatggaagccaagtataataggcatgctcagcaataattcctcagaaccacaaaaaatgttcagcattatacaacggagcagttcaactccctaagcaaagatatatgctaagactgtgcaagctggaaattagaaatatgaacaagtctccaatgcgtggttggattcgatgggccaactacatgtcagaaatatgggtggatatatagtcagttgtattacaaattcagttgaattcgatcagtccaggttcaatccaaggactcccttacacattgttttaagtattcagagattcagagcatgaggaactaaaacttggcggcg

SEQ ID NO: 149148 - DNA, 300 bp, Zea Mays
cttgcaacctgcggtgggagggtggtctcttcatgctcttccgtgaccagtcattgttccgtataacccatatttgtgggttctgatggcacagcagtttgttgcttatgtaccttagtgctagcaaatgaacccaaaatctaacgccaaatctacaactgtactactgcattcacgggctaccaattggtggtgtttgttgcgtggtgcgatcaacagtgctagagatgttgaatcgtctttctccaggaatagctatctcgcaacatattatacccgctgttttgtgtctgttaccct

SEQ ID NO: 149149 - DNA, 420 bp, Zea Mays
ttaagagttatttcctgggcgaagatatttttacaccactgggtagtgggaggggtgtttacgaagatccaaccatttctgcacctccaaatgcaccacatcattgtgataattgtctccatggaccaaggttgtgtaaatttccttctcataccccgaactgcaaggtgagggttaattgagcgtgttggcgtgatcctaacaatttctcagcatcttttggcaaagctacatcttagaaaaagatgattccatgtttcttccttctgtcgtatgcaattttcacatgtgtatgagtccaagtctatctctcttcttttgagcacatgtttagtgttcaatctgtcgtgcaggagtagccaaaagaatagtttttgtttaggctgacattttgttttccagaccagggcaaaggtatct

SEQ ID NO: 149150 - DNA, 532 bp, Zea Mays
gctcctcaagctcccaagtagtctcacgcttagactgattagtccacaagaccttaacatacttaattgttctccttctcatgacatgctccgaggactccaatatacgcatcgggcaacactccagagtaagatcttgctgcacagcgatcggttcgaacttgatttgatggtccagatcccgcagatacttcctcaacatagagacatgaaataccgggtgtacccctatcatggattccggcaattgcaagcgataagccaagctgccaacctaggcagagatagagaatggtccaatgtacctcgggctaagctttcctgagacaccgaaccgaacgactcctctagtaggtgataccttgagaaggacttgatcacccactgcaaattccaagtcctgcctcctcacatcagcataactcttctgacggctctgagcggctagaatattctgacgaatctcccgaactttctcagatgtatgctgaatctagttaggaccgaccaaggatttctctcccaaactctc

SEQ ID NO: 149151 - DNA, 680 bp, Zea Mays
ttacgcttggagcagtattagttattacagaaacagtgagatggttcaaagatttgaagtgccagtgatgcaatagggatcgtccaccggaagcactagatttccggtcaaagatgaggagcaatggcgccaggtactcggtccctgtgccagtacgcgcagcagcaacaggacgagcgagccatttgggttgtgccaccaccacgcggcccacaggcatgcagtgcagctgcagcacatggaagaatcggacgaacggccgccaaccaaccaagaccaagagatgcatgcgtagccccatgaatgatgttgccagaggaaaagagagtcccaaccaacacccacatcctcgttgtccatgggccggcagcggccaggccaggtagggcttttgccctgccgtggaaaccaccaggtagggcttcgcgtcctctacctcccactcccagcccttatcagtggcctaatggatgatggaattcccacatgaccatgaacagaaggatctggtcagcattgtagcttttgctgcccaccacagcaaccagcaatgcatgcaggaggaaaacatgagagaaactgatgagtctcgctgggccctcaatgccatgcgggcacgtatagatgatgagtacggtcggtgtgccttcgcccccaaatgattgatttgctgttaggag

SEQ ID NO: 149152 - DNA, 444 bp, Zea Mays
tagtaggctctctatgtgatgctagatgtctaggtagactttcgtgaattgtggtgctcggaccgttgagatgaaggttaagtcggtcgatgccgattaagtagttaaaatgattagtggaataatcttggggttaaaactagaaactagtgttctcgcaccagtttgggatgttgtagcccaattgcgcatggttatgatcacgggtaaaaatcagtaatgctcatggggtgtctaagccaaaatgcaaactattgggtgaaaagcgcttcgatattgattgtcatagagaatgcgttgttaattgagtatggtacttttagtgcttgaaatgacacggataaaaattagtaagtctacttgttagttctcacttggttattttaactctaacaattgtcaaagggttggaataattcaagtatctagaacgcggtaattctt

SEQ ID NO: 149153 - DNA, 552 bp, Zea Mays
aagcccggtgcttatcgatttcatcagcctcgttcgtgcttttggtgacgatggatgctcatcccaaggagcggagaagggcgtaggcgtgtagctgctcaagctcttcccagtcatatgttgtgggctgtggcgaactggcgatgttgttggggcgatgaggcagactggcatgcatcgggtcgagcttagcgcgcggggggcggtcggctcctagctcaggtcatttcgctcctcgctcttccctccccctggtcttctcgttctcgttcttcaagcatggacctctctctcctgggctttcggccggggctgaccttcgaggattccctcagggttaacctggcatcttcagtttgccctgctcgctccagtcttcggtcgtccttctggctggtggtctcttttggcagatgcatcttccagttgaattcggattcggttggtcaccttcttcaggttgcccttggtgggttcgcttcgggctttgaggtgcttcagctggctgaccgggttttttggttttcggtttcgtcgatggctgtgggtttc

SEQ ID NO: 149154 - DNA, 489 bp, Zea Mays
atttcagcgaagtaactacaaacgatctcatcgctaaggaacgaagagtttcctctagcgttgacatgggtttaatctcatatataaacatgatattatttgtcaggtacgatttgtgtttagtttatttagcggttgttttagaaattcattttaatatatatatgttgggcacccaggaatagggtgctcgaaggaggcccaagaaactccttaaaacggcccactagccgaccaaatgatcccttgtcaagaaaacccacgaggcagagcgaacaaccaactctccgtcgagcaaccctacgaggtggaacagaccaccaactctctaccgagcaaccctgcaaggtggaacagacgaccaactctatgtcgagcaaccctgtgaggcgaaatagacgatcaactccctgtcgagcaaccatgcgaggcggaacagacgattaactccctgtcgagcaaccctgcaaggcagaacagacttccaac

SEQ ID NO: 149155 - DNA, 690 bp, Zea Mays
gagggagaactcactcggacaccctcgggggctgggtcatagcttgcgctacccgtccgagctggatcatctccggcaacaccctcgggggctaggtcgcagcttgcgctacccatccgagccgaatcatccccggtaacacccccgggggctgggtaagcgccaacaccattcttgagggccgagttctctgcagcagccacctctaaggctgaaggtccctcagtcacttccatgggagtagggcaatccaaaccagcttcctgaccctcaagaccgcgctccaaggtcgatgaggcgcgggacgctgcccgagatgaccccaacccggcgtcgagcacatcaacacaagcatccatcgtgccaccatctaccggttctgataatagatcttctggaaccatgtcttcaagagtctgatcaaagttcgccagagataattcttgcagaccaatgagggcagacaaggcaggagaaggaacaccactactttccccactagctacgtaacgccggctgttcttccgatttagagggatttcgtcctcttcttcatcatcctcatcaacaacacggacagcacacccattggggtcagcgtcagacgggtcacacccattgggatcagcttcagtaaattcaggcacgggcacttcctcagcagcaggagcagaaggaccagcatcccga

SEQ ID NO: 149156 - DNA, 578 bp, Zea Mays
cttgattgttttctccacttcgtcacttcgcgagtcttgccttaactttatcatttgcaatgctctccgttatcatcatctttacccttgacacctctatatcttacattgatgtctatcttatacctatcatttaaaatctcttgtcctccatctcaatctgagcgttgtactttacttattttcccttggttgtatcctcttctttgcctcttgcgagtttttaactccatcctttgttgtgcttccgtttgttgttgcatttacctttctcatctctcgatttgaccttggtgattacactatgtctattatctagaatatccaatctcttatcccaatttgagagcggtgttttacttatctcacccttgacaacatcctcttctttacggcgtgcaagccttgacttaactccattccttgttgtacttgtaccacttgctcttctatgccttcatcttttctcttacacccttgtttgttgtcacatttgacccttgcgatattgaggccttctacctaaatgtttactttgaactcattctttaaaagtctcccctttctttcaacctagt

SEQ ID NO: 149157 - DNA, 290 bp, Zea Mays
ccacagggtccaatgatttcttacttgattgcacatgtttacaaataaagagaccagcgagcttgcagatccagacaaattagagaggtaaccagcaagaggggtcccaatcataccagtaataccattgcaaacaccatcaagacctctcaagttaatctgtggcaggcagaaacgcccccgaaaattcaattagaaacttatagaatccgtgcaccaaatagtcgtaacattgatggagaatattaaaacataatctgtagcttacatcgaaaaacatggtgttcctg

SEQ ID NO: 149158 - DNA, 722 bp, Zea Mays
catcaaaagtcttttaactcaatccttttaaataaaatttccaaatacctaaaagaatatatccattaattaaataattgaggacctttctattctactttttgagtttcaaattaaattttcggtttcaaaagtttaaatctaagttttgaactacctatgatgtttttagaaagggtcactttcaatgtataacgcttcatcagatgacattttaatttgatttcttttagaaaaaaatttactaaacaaaaaatcaggattttgggtgttacacctctcccaccaccagccgagctcaccatctccctacattttcctgttgtcacagaggctgtcgagatctcctcgtcacagcctactcccatgctatggtgatggagaaggatgtcgccgcaacactgatctcaccacggtcaggatggagaacgaccgttgtgctgtacgaaccttgtatatttctatggatgtcgaaatatgtgtttggcatatttgcttatcaactgagtcgaaatatatgttatgttgattcagttttgggttgattcacttttattcagttgatttagagattgattctgtttgattcagtttgggcacatattcagtttcagtttcagttgtgaaatttagtttcaggttcatagtttggacacacagttcatgttcacactttaggttcagtttcaggttcataggtttagttaggggtgaaaatgagt

SEQ ID NO: 149159 - DNA, 489 bp, Zea Mays
agaaaattttgcatgttgcatggccgtctattcttatgcacggagcgaaaaaggatgaaggaaaacggatcgaacccagctctacggcctgcggtgcacccaaagaagaggagaacgaagggggctagagcagtagagctcgaccttgaatcagcggatgtgcggcttcgcgtgtcgtcgtcgatccacatccacagcgcgaaggcgaccaggaaccacgcgggcgagacgggcggcgcggcgagaatctcggcgaagaggaggtagacggcggccgagatcatcacggcgacagctacgacacgcgacggagacgggaggacggcgacccggtcgcggtccggcaccgttcctgccttccatcgcagatgagatcgctatcttctcttctttccttgtctcgaaggggactggtgtgtgcgtgctgcaagcctcaggctctaaactgcagtcaccggctcacggcagcgacgagcccttacataaaat

SEQ ID NO: 149160 - DNA, 906 bp, Zea Mays
gccggctaggagcacctagcctggaggaggctaggtcgccacctgcaatggcaaggacaagaggaggcaagcgatcagggagcgcaacaaggttggtggaggaaatcctagcagactaaggaccaacaaaaagggaggagaaaagaacggatgagagccaacaaagagaaaggaggggcaccaaccatggtggcgatagcctagcggctagccaacaactaggaggggtagagggagaaaaaaattggttggatagcatgttagaaagtgaaaaccctaatccattgattataagctaaatattacatacactcggcactagttacatacacggactgggctctaggctcataacacttagacatatacaaacaatctaacaagcatgaccataaacaatcaaatgctcaagaaactaaactaagaaatcaaccagcaatgaagtaatattttccaatgtagtgtgcatctcaaggctgctgagtgatcactgtagtagatcggaaaatggatagcagcatccagaattttgatcacaattcattagattacatgcattttctgctggtataaacagattgttaacatgattcaaccaaactgaaacacgaaccataaccaaattctcaattgaatatacagctccgttttgaggcggtaggcaagcaaaatacgaacacacgttgccagttcttaactatatgttgtcttgatcagaacatgctctagcctccaatttaggctgagttacagagctcatctgcactgaccctgatggcaacaagtgttatctaacgatatttggaaaaagagaagaatagcttctggatgtttgttaatgaacaggttgaagctgaaatttggcttgagaaagagcaccacgacataccaatgaatagcaagaat

SEQ ID NO: 149161 - DNA, 373 bp, Zea Mays
aggtatgagacaaacatcaatgtaggatatagaggtgtcaagggtgcatatgataataattaaaagcataacaaaggatatagttaaggcaacactcgtgaaacgacaaagtggagaaaacaatcaagggtaagataggtaaggttccaacataagagttgaagtaaagattcattaccgagtggagttacaaggagacaacgagatcaccaaggatatgcaaagtagaatgaccgctcatggatcattaagaaacaagggtggtcaagggcatgttaactgaaatgtctcaaacagatattgggatataaaggtaagcatatataaaaataagagtatgcaagattccaatggtacgagcataccaagacca

SEQ ID NO: 149162 - DNA, 362 bp, Zea Mays
ctctgcgaacacatgaccttttagtactgactggagtcaccgggaaatcattttcttaactagttaggtgcccgtgcgtcgctatggtacacacggaagttttacgcatttgatctttcaaggaagttgtcattcatactggttgaataacatggacaaaatatgaggtacccaggaccttcatatacattattgagcgaaatttagcatcattcatcagcataccactagataaactatcttttgtttcttctcaatgacacctaggattggtgaatcctccatgacttcgaatggagcagatccctcaacaccactaggttcctactctttcacaattcctgacagtgacgcatcagaat

SEQ ID NO: 149163 - DNA, 668 bp, Zea Mays
gtcagatgaacattgagatcagttttgagtaggatttagtgactatttgattggggatgcaataccaaaattaaagttggattattggataacaagtttgctatagacagatgatcaagtcgctacataaaaatttgagaaaatcatccctcaaattgctctatcagatgctctgatggagatcgccatggtacagtacctgcaaaagatcgttggtgcactgaacctcgccgccggtgactcccacgctcggattcgcgtcagtgctgcgattcgtgcccagtggcgcgcagatatcttcgcagggtgaaagatctttggcaagagatgaagatgggacactgtggtcgctctgtcaccgtgcccacttgcgccgcgacgtggccgcgcgaacatcaccgtcgtgccgccgttcctcgcggtcatgccacaccgtcagccattttaccatgtcgcaatagaccatagttgatagccagtctatcacctaagtcattacctcagtgaaagccacgacagcttgcgctagtgaactccctccctcctcggccgccagcgcatcttctcaaaattgggtgccaccactgataaccactataaattgagcgttcggctagctctgttaggttgttacgtgtccagtacaccagccctcgcctccgattagc

SEQ ID NO: 149164 - DNA, 532 bp, Zea Mays
ataccgaacagcaacaggaagaaggacgaagcgccgagaggaagcagctacaaggcgtgaggaagcagcaatccggatgccctgtcaagaaatcgaaagggggttagaaaccctaggtcgtgaaatagaacaaaaaacaaagctccaaacctacaaagcacgaatccaccacgaatctgaaaagagaagaagaaatagggggaggatgggaggaactcggcaccaatcaccggcggcgatagcagagcagtgcggtggagaaaggggagggaggtgaagcagcgttatataacagcggtcacgacgggaaagagggaggtaaccacagcgttcgcaccatctcctgccatctcccacgctcacgcgcgcgctcgcccccgcgctgcacgccgccagcctacatccggagaaacgcccgattcgaccgcatcgggggagctaggttcgagggtagggtttgcatcttgggggcctggccgggaaggaggagaaggcaaccgaacaagcccacttgcatctcgggggcctggcc

SEQ ID NO: 149165 - DNA, 283 bp, Zea Mays
aaggcctttggcatgaatgtgtgctacactcaggatttgttcaattttctttttaccccttcatgcattctaagtcaatgtcgatacttctttcattttagggagacaacttaagcagtagcagacaacaaaaattgatagtgggttggtttcacacggaccctgttgaaagctagaaaaatgtaagggaaagcaaaaaatgtgaatgggtacatcatattctcagtgaataggatcaaacagaaagaccttgatatcaatttttagttgctggagtcagggg

SEQ ID NO: 149166 - DNA, 552 bp, Zea Mays
gttctcacttgggcgaggtgctggtgcagtttcacagtgttttggagcgagataatcttgttttgcttggtccccaacagtacctagatgctactttcactgctcttcgtcataatgatgcttggaaccaccgggctctttttttcaatcgtgaatgttggctgatgttactgggcttccctttggactaccgctcttcagagtacctgcaagcagctattggttcttttggcaggttgattctgtgggaggaggatcgccataatgtcaccaggacgttgcttcgtgtccgtgtcacttctcttgaagaagtccctcagttcattgttttttctgaagcagatggtttcattggggattcctggacagttcagtgtgaaatcatccaacaaaacatgcttggtgggcaagctcaagatgaggacccagtttcggaagctccggaggatggtcaacaacttcctcttgttttttttggtttgggtcaacctctgctaccagctggcctcgacctcaacttcccgccagttcctttgggaggtgaagtgccgg

SEQ ID NO: 149167 - DNA, 543 bp, Zea Mays
tagtggtcaccccgagttaagtaagtgtgagcatgttgcaccgtcttaagtcatcgccgacttaagccgattgctccgttagtagggtatagtggtcaccctgatttgagcaagaacgcaaaacgaagaattctcgaagcctctttattgatgatgtgtttcccggtttacagaatacattgtcgccccaatagcttttgaaatgtagctaaggataaaacttcctgagatgttctatgttccatgagttcccgacttctgtgccatccatctgtgtgagtcgatatgatctaggccgagtgacttcagctactatgaatggtccttcccatagaggtgacaatttgtgccgccctcccccgttagaattcggcggaggatgagatctcccactgcgaaggatcgatgccgtatggccttatcgtgatagcgcctcagagtttgctgatactgtgctgattgaatcaccgtgtttagtcgttcttctacgagtacatcaacatcctccagcctagtagcctcagcttctactatgtttttaaa

SEQ ID NO: 149168 - DNA, 843 bp, Zea Mays
taactccccattccttctcaagatggtataatctaatcaaatagagggccctcaacaaacaaggaaactagaggagaaaacacaacttataccatctaggcgagggagtagggcgctgcacaaggtcagggcatacgacagctcctccttgggcggcggtggtggctccttgggcagcggctctgtcttggggcaacgacgggagctgcagacgtgttcgccgctggggactgcagtcgtgtgcgccggtggcctggtccttgtgcgctggcagctcctagttcttgttcaccgacagctgtgcgggactggagggcggctgaccggctgtgcgcctgtgagaagacgaccaagcagacttgccgagcaagtctgcgaggcggggcgaacgaccaagtcccccgccaagcaagcctgcgagactgagtggacgaccaagtcccctgccgagcaagtttgcgaggcagggcggacgaccaggcattcaccaagtgagcccaaccactaggccagcgctgcaagcatacgtcaaccacggcaggaccgagggattcaactccttaagagaaagccttcgcacgaccacaataggtcacacaaaggcttgggggatgctgtcaggtacccgggaatgtggtacccaaaacaagcccataaacccttttctagccaacgcgccaaagtcccccgccgagcaagcctacgaggcggagcagacgaccaagtcccccaccgagcaagtttgcgaggcggagcggacgaccaagtcccctgccgagcaagtttgcgaggcaggcaggcgaccaaatcccccgtcgagcaagtctgcgagacggagcagac

SEQ ID NO: 149169 - DNA, 522 bp, Zea Mays
cggcgaaggacgagtgttgggccttaatcgagaaactaaagaagccaagtgactagccgtagtgactgacacttgagaaacacaccggcgcgaggacgtagcagagcagatcgtgtcgccgtcgcggtcgaggactagagggacacgtgtccaggacgtggggtgacgcgtttggagtactctactcacggtggtttcggtggttgagcctcagaaccatcagtgctacagaggtcggtttcgtcgagtttgagcctcaaaaccatcagtgctacataggtcggttccgccgagtttgagcctcaaaacttggcgtgcgattccgacaggaatcggtggcggcacgtgacatcatcgcgaagggtgcgtcgagatgaagcaacttcatgaataacacatattcgttagataaaaaccaagagttggtctatttttcccacgacactatggaagggtggataggctctttatatctagggacaatttagtctagtgaaataaccccttataaataggtgggag

SEQ ID NO: 149170 - DNA, 368 bp, Zea Mays
tggatggctaaggaggataggaggcataccgcttttgtgacagtagatggactatactgttatgttgtaatgccctacggtctgagaaacgccttgccaacatttgttcgggcgatgagtaagaccttcagggacctgattcgagacaaggtggagatctacgtcgatgacatcgtggtcaagactagggaggggtcgactatagtggaagacctgaccctggttttcggcaagctatgggcaacttgcaccaagctaaacccggagaaatgcatcttcggtgtctccgcagggaagttgctggggttcctggtttcataccggggcattgaagctaacccggagaaaatcaaggctattgaggtaat

SEQ ID NO: 149171 - DNA, 530 bp, Zea Mays
aatgcgttcccgacgactagtgggctcttagttcaattgggcgggtcgacgagcatcacaggcacatgagcacacttaaacgagggagcagaaggtttgcactgacctgaatcgagctggccgcggtgaggtgcgttttacggtgttcttgagcggatttgggggaaatccaaaattggagcttacgggtgcaagattggaggcaatactgggtggtgtggtgcgtgatgatcttgcggagctgacggcgggctcaatttataggcctagtgagcggtggtcgcgaatttgaagaaggacacgcggcggtcggaggaaggggagttcactggcgcagtggattcgtgtcccacgccgtggcaattactccggtgatcaacggagagtgagagtaggttacggcgatgtggtggaaaggtagagacacgcggcggatggtggtgatggcttaacggcggtgaggaccttatccaaggaatcggtgagcaaggggaggggcacgacgactagccggagtggcgtccagctca

SEQ ID NO: 149172 - DNA, 431 bp, Zea Mays
tatggcactgatatactcgtaattattgtacattttttatatcatggtctggatctttcttaggactctatactgcataatgttgatgaacagactgtttgtattctaaatgggtgtcgagttactcatcaaattctaagattggttccaaacattctggtttgtattcttactataccaagtttattcaattgtgtgttcatagaatgctcacattctttctgaaatgtcatcacagacaacaccacttccaatctgtttgcccctactaatcactgtgaagtgtcaaattgcacaagactattttctttcagatgaagagcatatccaatagcgtcattctttcctttcagatgaagcatttggcttgttttatacgccaaagtcaatcctgttatttatttacctgttgagttatcttggtacctcat

SEQ ID NO: 149173 - DNA, 610 bp, Zea Mays
ccggggtgtgggcaacaacctcgtcgcctgttcgtaacaactccctctgcgctcctccgaagtccgtggacgcgaaggatcctccgcagatggcgctcggtagttgaaatcagcccggagtagacttgccctcacccccagctgcggcaataagaacaacggaacctccccatacctcgtgcccaaacgcagagaacgctattgaccatctgactgcgcctcaggaatatcatgagtgttgtctgggtgcggcaagagttttagaagcctccgcgtgcggaatcggtgattgaagtgcaacgaaatcctcaccggagtgttccccgtcgagttctttcgccagttgccgtggtcgcttcgcctgggtcgtcaccactggttagtactcgtccaatctgcatcgtggtcttccccgcatagggtagcgcttaatatttcggagaatgggattggagaagggaagtttgggtgcaccagcaatggtgttgtggcggcgtttcgtcgtcgggctgggggatgacggtgagcgggggaggaaatcttgacgcggcgcgtgaaccgttagatcacgcttgggcggtggatggatttcgttgagtctgcgtcgtag

SEQ ID NO: 149174 - DNA, 992 bp, Zea Mays
cgtcgccagaaacgcttcgccgtcgattcgcatggatccataaaaggcttggctctcccatccgtcgtcgccccatcgcgttgtccctagagaggaagcaaggcacatgaccgccgtctccgggtgggacgacgagtctgtcctcctcgatgtgatggtcgctgaggccaccctcgcctgtgagtcccatcgcaagaggcaggcctccacctgctccaacgatgacggcaccggatccaacaccaaatacggagatacagttgacaggtgcgtatgttagctgttgtggcatgctggtctgattttaggccaccgtctgcgcctggtttcaactttcaagtcatagatcggtgcttattctgacgcctctcctacagcagggctcctctcttccacgatgcgaaggtgacttgtaggtcctcttctctcccttagattgcactcaaaactagactctaattcctatgtaccggaaatagtataatttcaaatttcataattactgaagtttttttatcacactttaatatttgtcaacaggtgtacttagcaatggtgcaaatcatgcccatccacgagatcttggcctcatcgccgattgagaagatgacgttgcaaatatttcagacttgtagagccctcgagcacctccatctcttgttcagttgcttatattagtcatatgttccctatgtttaaatttgatagtagattgaggcaacatataaacttcaggtcaaaataagaagagataaaggaagaacaatcaaatgagaaaccttttcagtcagtatagaatgacatcttttttctttcagttcaggttcagcgacacatgcatgtaagaatacattgcagactaatctttgttgtggcctgagtgtgaattattttatttttgaaaaaaaacagaccaccaaggagccaccttcctccaatggtgtggtgcaaaaacaacaacatggtctacacagtagtgcctctaacgcaag

SEQ ID NO: 149175 - DNA, 286 bp, Zea Mays
gggccatcttgagtcgtctgatctgtatcggaccgcccggattaaatcatccattacatgaatcggtatgtgatagagaccatcagatcgagcaacaacgaccacgatttaatgaagctagatccaatcagaaccgctcgattagatccaacggtccagggtttaaagcaccatgatctaatcatgtccgcacggtgtggatccaacggtccagatcacattaaccgaggggaacgcgtgtacacatcacaaccgcacaactcaagatctacgactcaaccacagt

SEQ ID NO: 149176 - DNA, 284 bp, Zea Mays
ggcgattaaatagtgctcttggaaggcctatttgaattttagagataagaatataacgccaaaaattatgaaaatttttggagagacttttttataaggatattggcacttgttaaaagtttggggttgtttggaagccatttgctcagaaaaccttgtaaggtgcaaaatagaataagaaaagtccttggtttaaggatggattagtattttgggagtagaggcaagttcactaagagaagtttggtttgtggatgaagaaacaagattacctagtgaactct

SEQ ID NO: 149177 - DNA, 350 bp, Zea Mays
agttcaccaagctgatcgcccacacatggccacttcaacgctgggggctggatattgtcggaccactacctacggctcaagggaacctcaaattcgccttcgtcgccgtcgagtacttcgccaagtggatcgaggccagggcagtatccacaataacgtcgaagaccgcccaaaagttcttctggcaaaacattgtttgccgatttggagtcccgtctgagctcacagtcgacaacgacaaacagttcgacagccaggacttcagggatttctgcctctccatcggcatcaagcctgccttcgcctcggtataccacccgcaatccaacggcgtcgtcgagcgcgccaac

SEQ ID NO: 149178 - DNA, 368 bp, Zea Mays
atcgcctagcttagtacctaccggtgttgttacactgatttgccgtaccaaatcagtcgagactctgctagatcttctgttacactgatttgaaccctacgaacatgactgggtacgtcaccttctgcaagcataatttaatatgcccggggttttctattcagttttttaaatcagcctgtcattgatatttcgtcggcgcatcgcggcatcggtggtaagctggaggcttgcgaccgcagcttcggtgtggagtgctcgaggtcaatgcacagctttcttcaagtgttgggccgagcatcataatgcatacactatagcttagtgttgagctcatgaaagaaaagtattcatcattgctgtgtggg

SEQ ID NO: 149179 - DNA, 328 bp, Zea Mays
gtgcacgacttcgtctcctttcctgacttcgaagtcagggaaaaggaccctgatgagatggtgttgtgtcgtgcaagggtgatgagcggtggtagagatttagtcgaagagtacattgcatatcagttgtggcctctaagcgtgggttggacggttggtgaagtagtgcgacaaaggatgccgttgaagagcgcttttttgggaaagatgttatggttgtaagccccgccttcgctgttgaacttggtggttgtgacgggccagcctttgtgagcgaggtcgaggcggaggctgtgaatatttttggaaagtattctgcgaagactca

SEQ ID NO: 149180 - DNA, 857 bp, Zea Mays
tggatagcgagctggcaaggctgagtacccacgcggcgtgggcctagctaggtggtgttcgaccgacgacaagtacaagcacagtgagaagggccttatgctccaggtttgggatgcgcgaagaagacatcacggtggtgcagcattacccagaggatttcttcatcaccttcgagcaccagcaccaccgtgacgcggtggtggcgtgacacgaattcacctacggcaacattgacattcgagttaggccatggcagctccctgttcatggtgaccgcatcaactttgactaccatgtttgtctctgcctcgaaggcattcttttgcatgcgtggaacgagggcatcgccaagcgggcggtggctatgagctgcgtgctagactacgtcgagtctcaatcactacaaaaggaggacacaaggacgctcaacctctgggcgtgggcgtggaacccttcagacatcccaaaggtaacttggctaaccattgttggcaggaacatcactgtccacaacatgccatcggcgggacaaagtggcttaaccttcagggtcatcgtccaccttgaccttgtggagggttttccgggcaacgaggatcaaggaagtacgcgtgcgttcgactggaggcttggagttgttgatggcgagagtgctccacgcgacatgcacgaccctccacctcgatgtaacgatcatcaccgagacgacgatgacaacgaccgccgtagacgtcgcctacaacgtgaggtcagttggagcatgcgtcttttccgaagcatctcgcgtgctccaaagggctgtgagcgagagcgctcggggtcgcgtcgtgaccatcgacacaacacttccaggagg

SEQ ID NO: 149181 - DNA, 555 bp, Zea Mays
cacggcgagcgaggtcaggtatgccaagagcgggatggtgtcatggtgataacgagtgggacgaggacgttgagaaggggccatggtcaggtgacgttaggcaggaaggaggtggcagtgtcaagaatggagcatctgggcagattggctctggcaggccggggcgtcagaagaaatgggacatgatggataggtgcgatgactagaccaaagaagatggaagttgagagaactgctcagggcaattttagcctatccaaaccttagttttttatatactttacagcaggtgaacattaggtataagaggttataagaatttgaatgggtccttctatggctccgacagcgtcggaaagaatgagactagatgaatagatgtgaggattagaccaaataaaaggacgagagttgataggactaattcgacgaggagatccataacaggactgttttagtctatctaaatcttcatttttaaatatacttaacagtaaataaacatggtatataaaaggtcataaaaattgaggggggccatggcccactttgccc

SEQ ID NO: 149182 - DNA, 541 bp, Zea Mays
gcagctcctagtggcggcggcgacagcaatgcctctccaccctaggcagcatgccttccacacgacatgggcagacgcaatgaccgaggctactactccactctttcaaatacggtcatgtatctcttttccatggatgtgcaacgcatacaaactcatatgctctccctgattcactattccagtcaagaaaacaatcggtctgttcaatttcggggggcgttggtcctcatcaccttccttttccatcatgtggtggtgtcattcattgatctggtgccctgtattgctgtagattaagagggtgacagtgtatttgcgtgtggcgtctgctagtgatgtttggaggtcgtgcatatactagcgtggagttgtttcttgtgatatttctactactcgcgcaaactgacaaactagtgatcgtgtgtgtgcttgtgtggtactgcacgatttttctggttggcatagatcgtggcctgattcttgggatcttcgatgcataatattccgttgttcctctttggattgttgtcgtggacgt

SEQ ID NO: 149183 - DNA, 493 bp, Zea Mays
ctggctatggcgagcttggggggatgaggaacatccgtggctacgccaggacactccctgtgatcgcacagacagatcgttcttttgcacctccacccaggtctcgttgcgcgatggtagaaaagcgaagttgtggcacgacagctggcttgatgggatggccccgaggaaccttgcgccacacctaacatgtcgccaggaaaaataaatcagctgctagtgaactactcagagacagatggataagctcggtgaggaacaaaattacaactacagagattgtggagttcgtctcgctctggactagaatccaggatgtgcacctactgccaggagttcccgacacaattacttggaagtggaccccagatggcgtttttgttagattctatggtgcctacagagggcaccttttgggatccttcagacaccttaaggttgacctcatttggagagcccgcacggaactcaaatacaagatcttcgcatggat

SEQ ID NO: 149184 - DNA, 537 bp, Zea Mays
ctgatttgttattccataatgctgaaaataacagtcatattgccaaggtcttcccagcagcaagtgacacacagacatgggtgcaacattgcaatccactatgtcaacatactctccaatcttgaatgaaactttcaccttataaccaatcttgatatctcctgattcattcaaccattggacatgatatgaatgagggtgtcgccgcaacttcagaccaagcttttcaaccttctcacgacctacaagattatgatagcttcctccatcaataatcacctttagtactttgtcttgcacttttgctctcgtttgaaaaagattatgtcgctgtccaatttcagcttctttcatttgaacactcaatatttgtgtaaccacaagagcggtaccatgctcaaattcacatcccatatgttcttcaaagttatcaatgtcatctacatttcctgcttcagcttcctcttcactagctgatgtatattctccatcattagtgacaaggatcacacgattatttggacactccttaatgac

SEQ ID NO: 149185 - DNA, 1374 bp, Zea Mays
gggctaactcgcaattctctccagactcatattcaccccgcgcagatggcgggttgattttactgaaacccgaggtctcatatgcacttttgctcggcgaaggggtatcctgaaacctgagccactcggattagatccaacggctcggatcagaccccgaatcggtacgggattgtggtccacaggatcgagatctgatggctataatttaataaaacgcgatctgcttcgagccgtaggatatcagatctacggtcacaggttcaacgccctagacggtatgctagaactaatctggaccgcccaaccgtggatccacggttccgcgtctattcttcatccctcagcctgaacacggcggcgcaccagtgaacgacggcggagctatcgccggagtgcggcgatccatggctctggtgcactactccccgattcgcaacactctacacaaatatcaggccaaagctaaccgcagggaagaggtcttaccagaagcgaaggtggggacgaggtcggacatggtgtggtgcggaacgctggcatcgaagtcccacggcggcggcgggcctcacaaattccctctctgcacgcggtggtgttgatggctttgcaaagggtaggcaggagggggaaaaagcaagcccgaccagcgcttaaatccccggcggagctcggttccgaaactactgcctaccgaacccgcgattcgcgcgggcagttgagctccgaccggtacgacgttccgtgaacacgacaccgcgcggggttgaacggattgagcacgcagtccatttaccagtgacagtaccggaggcaagactcaggccagcgtggatttcggatcgaggggcgttcccttgaccagatcgcggcggctttcggaatgggagactggctaagcggagcggaggcggatgacgggggggaacgatagagctgccccagcagccaaagcttaaccaacccccgaagacgcggatccggccggtagtctcggcaccatcacacgcggagtcagcgcgacccagcagtccacgccagcgcgagggagacgaaagccggcctgaccgatggggtccacacgcgggtgagaaggagtgggcggggcgcgcaggagataactgaccggcgggtcccacactgcatagggacgagcggataatgtgaagtgggccgaaaaggttcctccaggcccaaaccgaattctctcttttttatttttcttttctattttgttctctatttattttgaattccaaattcaaaacctcaatttaaatccaactttgtggcacgtttgtactcagtctaattgttccacttggttataccaaaatgtaatgaagttatatgtttataaatttattttgtgtt

SEQ ID NO: 149186 - DNA, 461 bp, Zea Mays
ctggatcatcgctagtttattttctggtaaattgattccattgaagaaagatcgctgtgcttcatttcgccgaatcaagatgccattgttccaacaaaagcaacatgtattttacatgagtcaagagatatgatctctgctgcatcacatagctacaataccatgggaatctcaaatacttctcactgaaacatgactgctatgcattcactctgatgaacctcttttaaaagaagagtttgtcacagcatttttttgtcactcagaaatccctctgttcagcaccaaggtcgtattcttttgtcacttcacaattgaaggggaagctaggaaatagagcattcttcaatcatggatttacggcgccctatcaggctacagctgagaaagggttagttactgctcgaggtgagcaaagtattcatcttccagctacatcattctggaaacttggtttctca

SEQ ID NO: 149187 - DNA, 526 bp, Zea Mays
gtcgcttgccagaacgccaagcacagccccagcactagacgtgcacacaggagcttgcgctcagctctgctcgccgatccaccataccaaaagcgctctccttcgtctccaaccccaccctccctcacaccctcaccagtcacctccacaaacgagagaataaaggtgaaaggacccctcggattcacaacggtaaagcctgcggcaccctgctccttacagcccactcaccactctcgctccaactccgagtttgagtgcagcagaaggcagagcaggaaaggaatttcggaagggacgggtacagcccgcagcgccaccacaagggagcacctggaccaggagcctccaagcgcaagcaaccaagcgcagcgcagagcacaacccgacgcccagcacaaccagcagccagggcagcataaagcaatgcagccgggaggcgcggcttccagtaccgccaccggtggacggaggcgcgtgtcggtgcagtccaccaggagcgccggcgccacaccggcgtcgtcgg

SEQ ID NO: 149188 - DNA, 434 bp, Zea Mays
cgaagctttgaggcaggtgaaacatcgaaatctgatcgatatcattacctgctgctctagtgttgacactagaggcaatgacttccaggcattagtgttcgagttcatgcccaactacagcctggatagatggctgcaccagcaaacggatgagcagctgcacaaattaaatttaatccaactcttgaatattgcagttgatgttgctgatgcaatagattatcttcacaataatagtcggccatcagtcatccattgtgatttgaagcctaacaacatcctccttgatagtgactggactgcttatgttgctgactttggactttcaaaactgattggtgaatccatgaacatatctggatcatatagtggaagctccatagggataagaggaactgttggatacgttgctccaggtaattgcaatgtccact

SEQ ID NO: 149189 - DNA, 367 bp, Zea Mays
gaacgcatgtgattcataactagagattttccagtctgatctgttgtgtaaatagaacgatttgcatcttggatgtgtatacaatcagatatggtaaacagtattgttcaaaaggagttatttatcgccgcttgtacttttgtgacctgctgttgctagtttcagtgatattggtctttccacttcaatatgccatttgtggatttggttcttcaaccgaatgctttctgttcactgctttgttataatctgtttaaattaattatcttcatgagtccaaaggtgtacccttttttgctttaagcattctgtcaagttttgacagggattacattcattttcagaacccgtgatttctttatcattt

SEQ ID NO: 149190 - DNA, 376 bp, Zea Mays
aagataagaaatatgcaaatgtaccaaaggaaagagacatgatttaaaaagatatgtcaattaagcttaatcaattctttacaatatagattgctccccctaaatatgtgcatagagaggaaaacaagtttttggtctaaaatgccaagtgtacataattaggttaatgagaccatgtctatatcataaagagtgtaaagtgcattgtgtcatagtaaaagtgtgatgctcatgacattttatgcacttatgaaagcatgttataaatatcccaagcatttacccttaaggatttcaaggagacttaaggaccatccacctttggaacaaaaggtagcttatcctcgttacaaggttaagctttaagctccttgac

SEQ ID NO: 149191 - DNA, 471 bp, Zea Mays
ggcgtcttaattatctgtcaaaatttgagtttcccttccaagctagaaagggcccaaggttccacgcaactcttatctacctattgggacgggtgtgagggttgatgttagagtcgctgagcctagtagctaccttggaagtggcgaccatttttccctacctttgtgttgggctcgggcccctgcagcaagaatgcggcccgttctgggttaggcatagggtgcctgccataaggtgtatgttgctctccatcggccatcaacatataggcacagtataactttagcaagaagtatagttctaaactttatcaagaggaaacaaacagagccttattttagctcctaggatccaaacataccctatatattgctcaacacaaggttatttcccagctagataggctttagcctaggaacaaaactaatcattcccttccttcaataattaagaaaatgataaataattta

SEQ ID NO: 149192 - DNA, 292 bp, Zea Mays
gaccgggagcaaggttctcagccatctttagggagtgggagatcttctgaaaacatatttgggtcacagcaggacaggggcgtcaaaacccaagaaggtttgatcaaggagattaggtgcttccgttgttcccagtctggccaccatcaagtggacttccctaatgattctctctgctacaagtgtaaagaagctggacatatggcagcagaatgtcataatcacaagaagcttcgcctgtttggctttggtataccggagcagggtttctttggtctagacatccccgaac

SEQ ID NO: 149193 - DNA, 492 bp, Zea Mays
acttaatgctggtacaaagagtaaggccatgctcctaaatctcttaagcctaaattgctgacttatgtaaactcggctacacccaacaaacttgacctacataacaggttacataacctatccaacccatctagaagcaaacaaccaaaccagatttggactaatcgcatttaactcataaccacctactcaactaactgctctacctacatgtcgcctacaaattcgtctcaaccacatgttcctcactcggatggagacacaagataatcaacctcatcaagaatggataagcacccagtcaagtcttcaaggaccaggctggatcgccagatgaatcaagatcccctatctatgttggagtctttccttaccgtactctttcttacccaaacccctttatgctttaaagacatcttttaccatacacaataaagtggacatacatacccatgcttccctaatcatcttctaatttgtgttataaaactt

SEQ ID NO: 149194 - DNA, 294 bp, Zea Mays
aagagaccaagcccctagaataaccacatagttcagtacttgtttgatgagaccagagactacctcatttaaatgctgccaccaatcaccaaaggaaacaactctaggttcagggtagagagactggaggccaaacttctgaagaagctggaaccagaactgtcgggagaagacacaggaagcaagcaggtgatcaatggtctcaagttcctggtcacaaaggaggcatctaggatgatgttgcagccctctccgatcaagccggtcggccgtccaacatctatcctgagcaac

SEQ ID NO: 149195 - DNA, 284 bp, Zea Mays
tgttgaaaagacttggtgcaatgttttttggtgcttgaccatggatccaactagatttccagaatacagcagttttcccattacccaccttcacacaagtggaagcgttgaaaagatcttcatctgattcatcacatggcagctgcaaattcacccatgctttgtctttggccttccatcgaaaccacaaccatcttagtcttaaagccctcgcaaaacgattcaggtctagaatgcccaatccccctttgcactttggtaaacaagtagtagaccagttgatc

SEQ ID NO: 149196 - DNA, 682 bp, Zea Mays
tagacacaagcgcgagtgctggactaactggagagtcgtgtgtgcctatctctcctctactcgtataaatcattttttttgaccgtcgtaagtttattcctctccctcactttcgcataacaatcaagaacctagataaaataaaataaattttatctctttcttacatgtttaaccaaccatacaacaaccaaagtgcattattctcgtcgtattattcccaactttccatctctttatctatatgtattattcccaacttttcatctctttatccgtctctgtctccctcatctagattttttcgcaccaccatatagaggacattctattgggcgagttgccatagaggacatcaaatatgccatcctgctgcctttcgactcgccatgcgtcgtctatgtaattattgtgcttttaattgaattttggaggggtagagttgaaaaccacaacccaaaatcctacaaccaaaacccgtaccatatcattttcgtaaagacaatatcatttttaaaaattacacatttaaaatttgaatttcaaatctctattatattatagccgtcaataagtagattaatcatggaacagctatttgaagccttttatttttccttgtggacaatctagcttggactgtggggtccgtatgttcccaccatggcacgcgaccttcatg

SEQ ID NO: 149197 - DNA, 389 bp, Zea Mays
aacttatgtgtgatgtgatctaggtctctaagtttaccttgggtgcaagcattggtcccaacaggctctgacccacatgcgcctgagatgacaagctgactgggttttgatatggacccgacaccaagtgtcaccgtcactcttctctttctcaaagcctcttccttcccaaatctggtaaaggtgcccaccacaggggtccacacatgtggccaaggccaagagtggaggtgctaatttggtgcccaagggacgatttagtggccgaggcctatcgaggcaacggtggacaaggcagcacggaagcggcagaagaagacacaagagagagggcccgctatgcacgggggcctaccatcgccagtacgctgctcagcaagatcgggagc

SEQ ID NO: 149198 - DNA, 296 bp, Zea Mays
aaaccatcatcagaagaacataacttcagattaagggggtatttggttcccacctcctaaaataggtctttccaatagaatttctaggtactaaagtttaggaggttgactgaaggaaccaaacaccccctaaacaattggttgcttttcatcttgaagtaattcattgagtggttccattcatgcagataggtactactgggacccatatgactatggatgatttagcacagaatgttccttgcaataagtactggcgtcgatatctagctagctgtgtataatctttgcaccgg

SEQ ID NO: 149199 - DNA, 393 bp, Zea Mays
ttgacgagtgatctgcagcgtcagttgagccatcagagctgaacaaactacagaaagggccatgtagagtcgttgtgaggggaagagcagcagcataaagcataggtacatcatttccaacactatctcccccacccgatgaagcaccagacccaccaacactccatccatttctttgtttcttctttgcatgacctgggtttttgtcatcttggtcatctccaatatccccgccacctttgccaacccagcgtgggacatctgtgaacaccacagggtctgcaggggtgaatttctcatcttccaaaacaaaagtgatctcatatcctttagtgccaaagacaatgtcagtggtaaggggaagaggatctctgttcatcattccaacaagca

SEQ ID NO: 149200 - DNA, 655 bp, Zea Mays
aaaatatccgtgcgtcgaaccaatacgcaacgcctgcctttgaatcgcagatcaatgacccgaatcgatcgtgaactaatgtaattctagccatctgatacagatcccacgacgactactcgtcttcaacctcaccacacgccaccaacagcacgcatactggactctcactttatctaccgcatgctaatcccggcgtgacggccaaacacattggtgtcctacccagctacgatactgcgcagcacaccaggccattaggccatgctcgaacgcaaccaatgaagcagaggaaactatcacggcggaggagatgctcaccagcaacgtcgaggacacagcagcagcagcacggcaacggtcgatggattcaaaagacccacgtcgagaccttgatgttccaccatgctgttcggcgagcccctcacctgcgcaccagcaaggtctggcgtcgctacccgcccgcagcctcactttctcaactacggtggctcgcggcggaggcactctacacggcttctactggcttaacaaacgagatcgaggcctggggacacggttgattttatacgggtagggcatggagctagaccgatggaattcgccggacgccgaagatcgcgacgaggtagttacacctgaaaccgtctacccg

SEQ ID NO: 149201 - DNA, 756 bp, Zea Mays
ctctcctatatatgtatgtcaccgtgagggactgttcctcatccaacaaatcaacacgcaatgcacacatagtcgcacacccaagtttgatctgtcagcgattctttcaagtgctctatacttttacatagtaatcagagccatggagggttcatcgtcatctacctcccaaattctctcattggcctacccgtctccaagaaactgacgaagtccaactatgcgctacggcatgtgcaggttagggtcgctatccacaacacaaaggtgaccagttttctaaacggtgacagtggcaccatgctgccagccaaaatctcctagaaggatgacatcaaaaaaacagatcaagatggacaatccagagcatgaagatcgggaagtcagagatcaacaagtcctaagctatctcctttcatcgttccaaaagacatgctaattcaagtttctttggtcaaaaccacaactgaagcctagacataaatcaaaggcgtctttgcctcgcaaaaaagagcaagaaccgtatactattggccctagcaaataccaaagagggcaatctatatgtttctgaatacttcggaaagatgaaatccatggatgatgagatggcagtatttggccgagctttagaagatgaagaattggagtacattcacagatacctcgatgacactacatcccactagtttctaatatctgcgccaaggagtcgatcacagtcagcaagttgttcaatcagcttctgaatttcga

SEQ ID NO: 149202 - DNA, 301 bp, Zea Mays
tggagccgttgatccaagacagaacaacggcgttcatgcgagtccagtcgggcgagtggtggacaacatcggaaagcacgtggcaatccagagagaatttggtgagggttaggaggaaggactcacgccaccgagagtagaaggtagagttgacgtcgaggaggagtgggacgagggcccggatgttctgcacggcgacggcttgagcgtgcagattgagaagagcagccgcttcgtgttggagaagagcggcagaaagctgggcgacggagtcagcaccagtgccgtcggaggtgatgac

SEQ ID NO: 149203 - DNA, 762 bp, Zea Mays
aaacaaacagggccttagtgtatgcattttacaaacgatgtgatgtggatgtgatgctagtcaataaaagttagatatgagtaaatagaaaactagagctatggaaagaaactctagagtctaaacattttagatttagtagaactaaaatcagatacatgagacattacttcgatattactacacaagaggaaggttatgctactttggaagatcaagtagtgcaaaaaaaataccttttggtaatttaggatcaatgctaccaatgtggaagaataaaaccctaaccctaattaaggtaggcttatgcatataaatagtaacagtagatgggttgagccaaggctcattacatgagtaacacataataatctaacaccctcgagagtcacaactatccagtatgtatgtagatgaaactagtcctacatagagcgagatatgatcaagttgatgagggtaacacttcgctcacttgtacttggctatgtgtcgtgtggcataggttatgctagatatgtttaagtttttgagagttggtatatcttgctagaggccaatgctaattgttgattagaaatgctttttaggtaacggttgttggttgcatgaatctacagggttacacacttaagggattagaacataatgatacttgcatagttaactctagtgcaagtgggagactgttggatatataccctagagataaccgattggacccgttattaaactcagattggatatgatgcacacgatttt

SEQ ID NO: 149204 - DNA, 326 bp, Zea Mays
tccatatcaatagctcaaggaacagtttcaggatcaacacaagaacacatgacatttacagaattgccatgattttccttagatttttttatgtatgatcacattgtataactgagaatatttacaggtgcatctaaagcatttacagctccacgacctccttataaacaagatttgcatactgaacattgttcttctatttaagtgagatgcagttatctatatatctagttaagttgggtccaaagacccaagactatttactaaacaatacatgaaacataatgaaaagagaccgataacatctattcaatgctcatctgctt

SEQ ID NO: 149205 - DNA, 497 bp, Zea Mays
atttcacccatctttatactaatgaaatgctaacgataatcatgccgtgcaaccgagcaccaacacttaggctgtgacgagcagatagtgcgtatggacaaatacaccgatacaaatatttggatcactattgggagctcagatattgtccgttgccaatatatacaagaagctaattgggatttgggagccaccaccaagttcatgatgccttcaagtggatttggaagtcctcctgccaacacaggcacgaagtctcttctggttgctcagcaaagatagacccatcgcaagaaatattcgaagaaacatggttcttgactcttttgattgtgttctctgccagcaaacaatagcagaaactgctgagcacctgtttcttagatgtccctttgccacctcttgttggagcttcattatatctacacattccaagccagggtagtttccctgaagttgctgaagatttgaaggctcaactacaccaaggcttctcc

SEQ ID NO: 149206 - DNA, 590 bp, Zea Mays
tgggcacataccatccgagcctttgggtcggaccgtccgttacttttggtgttcaacagacggttcaagatgctctgagtctgaggcgttcttcaagcatcaccccctcctgcctactactattttagcctatataaatatatgggatgatgtgatgtggttatcactatacccaccatcacaaaaatcctactgaggttaaccaaataccaccatcatacatccattcccctaccttgcgacccccttattataccctcctctcgaaacatgacacaacacaatgatgatggtggtggtggtgtgtgtaggaagatgactctcaatgatacagctcgataaaaaaagaaaacatataaaaaattaaactaatttgcaaacggataactactctactctactataggcgtcagcatcgagctttataaggctgcctctagcggtcttacttatcccacatcctatgcaatacaaaatagtgtttttggatcaccatatatatgatctagtggctacaacctaaacaacctagaggatatgaagattcctctgattttttcttgctctacggcttgtttgctgtagtttgc

SEQ ID NO: 149207 - DNA, 362 bp, Zea Mays
ttacctctgctgctgtgcattaggaagtaagttcatgtttacttctaagttagtacaggaaacattttactgcaatatacactaaaacctccttgataatttgtataaaaactttcaaatgtttgcacagctgattatcaaaattctgctgtccctttctactagtgctagtaaagtagtgatgttcagaaggaaaaataaggatttgcattgctaaaaatctagtaaggcaatagcaacatgttagttactagggtagtgcttactaattttctgatccgtgacatgtcatagagtttgtccaggttttgagaaatattgagatgctgacagcttgaaagcaaagatttaggattatttca

SEQ ID NO: 149208 - DNA, 336 bp, Zea Mays
caccagcggtgtcttctggtgcaggcgcattgtggcggtcctaaataggccacgtatgaagcccgagaacacggcaggatcccaactacctcccgtggcattacaacggattcacgaggagtacggcgcggacatccaacggacttctgtgcgccatgggaagaagaaagatggctcacaaagcggacccacatgtaagcgccacaaacgaaaaagaaaagggaagagcgtagagtgggctggcgcgggtgagaaggtgagttgggctgagagaagaggagtaagtgggccgagaagggaggtgattcggcccaggtgaggtcaggtgagttttct

SEQ ID NO: 149209 - DNA, 666 bp, Zea Mays
ggacaacatttggtactaaagtgatgtgaacacaacatttgcctagccctccaaacagagaagcagcgcatctagtatctgtgtccaccaattaatctgcctaagatatttgctacaatgtgagcaaatttggtgatgtttggttaagaccttgttaaggagaaatggtaataggatctcctaccggcggtaatggttactagttataattagattggatagtagtacatagtattaattgaaagagctcaactaaacaaaagtatgtattgttatctgttaccatgtaatccatttaggcgagccaaacaccacctaaatctctaccaacaaatccatttcatgatagccaatcattgctacaggcaaattcaaatggattcactttccaacagtagcaagctcaacagtgtagtgtgtggccagcagagcatgtggtccgtgacgggaagagacaatgcgccgtagcgtcgactcacgagcctgttcagtccagtagtcctagtcctaggctacgcaaactttcccgtgctccggtcggccccacaaacgaaaagccgtgccgcgtgtgcattgagtccaccactccaccgagaagaaactgctccggtccaaatccacacgccgccgtctcaactctgtcgtgcactccatcgcacattcacg

SEQ ID NO: 149210 - DNA, 608 bp, Zea Mays
tgataaagtcgtacaacatcaatcctttacagtgggagacttagttcttcgccgaattctaacgggggaggacatcacaagttgtcaccactatgggaagatccattcattgtatcagaggtcactcggccgggatcataccggcttactcaaatggatggcacggaagtggggaactcatggaacatagagcatcttagaaagttttacccttagcaaggcctcaaaagctctcgaagcaacattgtactctgtaatcggggacttcatcatcaataaagttgtcgttttcaaaggcattctgactcttgactatcggctgacttcgattcaattgaacttgaaatcaatatgccaactcggcttagggtgaccactataccctactaacggagcaatcggcttaagtcggcaacaacttaagacggtgcgacatgctcacgctaactcagcttagggtgaccactataccctactaacggagcaatcggcttaagtcggcgacgacttaagacagtgcgacatgctcacgctaactcggcttagggtgaccactataccctactaacggagcaatcggcttaagtcggcgatgacttaagatggtg

SEQ ID NO: 149211 - DNA, 673 bp, Zea Mays
agtgagctcagttgacacaaaagatcaaatctcaaatgatctagtctcctatgccacttccaaatcaaagaggaagatcatgccaaaaggcatcgagaggggccaatcgaatgggaaaaattagctcggaaaactaatccaaatggagaaatctagaaaacaagatctcccttaacatccaaaacatgagaaagacccctcttaaagcgcacttcatagtcatcctcaaggagttgtgacacagaaagtagattgaaatgcaaatttgaaaacaaggcaacatccttgaggacaaaaatctcgttcacttgaacggagccacgagagacaaccttacctctcgacttatccccgaatgtgatgtattctttatcaatcatagggtcgatgctagagaggtggtggcgacgaccgctcaggtagactagcgtcagcccctcatcgaccggctgactgacgggaccctaccagaagacacgaccgcggccaggcggctctcccggaaagcaaaatccttcgtggttatcaatggggcgctctacaagaagggcgcctctggtgtcaagcagaagtgtatcacgctcgaggaaggacggcagctgctcgtcgaggtacatggaggaacgtgcggacaccacgcggcaccgtgatccctggttggcaaggcattcag

SEQ ID NO: 149212 - DNA, 620 bp, Zea Mays
gccggccgcgccctccccacgctctggaacgcggccaccaattttctccaggtctctgccatgcatcagctagctttccgttttcttttgtttactagtgatactactagctaattaacttactcgatcgatcatgtgattgatgccattgcagggtctcattggacggtttggttcctcaaacaagaggaacatcaccatacttaagaatgtcaatggtatcctcaagccatccaggtagtacatgccattcattacttttcttgcatccaacccaactatatactgctcttagtcttacgtacgtcatccatcctcagcgaaaaaaagtgattaccatattttcttaatatacattattattgcttatcctattatttttttaggatgacgcttcttcttgggcctccatcctcagggaagagcacactcatgcgagcactcgctggcaagcttgacaaaaatctcaaggttgttccaccattatattctgtcagtttggcttgtgtgtacgatcgacatgcatgctaaatccttccttctgccgcaaaaaaaaaaaaaaaaaaacccaggtctctggcaacatcacatattgtggccatccaatttcagagttctat

SEQ ID NO: 149213 - DNA, 1194 bp, Zea Mays
agctcacgcaggcttagcctgtcaatgcaactattgaagagatcacagagggaccgactgacagcacctttgtttttttcagacgcattgcgaatgaggttgaaatcaccaaggatcaaccaaggcccatcaatgtgcgagtggatctcctgaaggatttgtaggaagtccggagcgtcacggtgatcggagggagcatagacattggtaatgtgtatgacaacattgacagccaggagagtaaagcaacaagtaagagcatggcgcctaataatgtaagaatttagctgtagactattttcgttccaggccgtgaggatgccgccacgggtgccggcagccgggatgtgcagaaaattggaagcaagagacgaagggaggaaagaggcagccttgaacacagtaacgtcgctgagttttgtttcctggagacaggcaatagctggggaggaggagacaatggcatcacgaacaagaacacatttatccgagtcgccaagaccacgaacattccacgacattacaacaaggttcttaccacaactagccatgaccacacaaacataacaccaagggacaaggattagcaagccacccagaagagtctagcctaagcagcagaagacagaaaacaggctcacagagccgaccaacaacagagagacgaacaacacaacaggacgagcagatagcggcgacagacacaaacgcacggacgccgacctccaaagtgcgcttggaacaaaggctgaagatcttcatcccatggccggcggcaccactcccacggcgtcagccgcagagcaacccaggccagcagcgcgcaccagcttgcgcagggcagcgactgagattggggccttggtcttgttgagcagtcccatcttctgaacttctttcttgacagcagcagaacatggctggagggaattctgaatttcctttcgctgaacagccttgtcagtcatgttgacgaagttggatgaggccttctgagcgagccgggtgctatgacgttccggctgcacaaccttctcagcacgggcgcgacgcctagcaccagcacgaggggtcccggtggaggcgacaggcaacagcggcggtggcgcacaagggggagcaggagcactggggcgagcaggcaagttgggcgcgcgggagcgagcaggcgagttgggcgcagtgaagaactgc

SEQ ID NO: 149214 - DNA, 379 bp, Zea Mays
gagcctcatgcatgctcctgacccatagagccataatcatcctgagaagccaaaaaccaccaccattgcgttgccacgcaccgcacgggtgagattcgccgtcgccgtggaactcaaaagccaattgcgtcggtggggaggcttcttccgggtgaggcgaaggttcccttggcgctattgggggaaagcactcgcgcttttgccttgaatttctcaccggagctggaattcctgccgcgtccgcgcctcgccgtgtgctgcctgtgtgcgaccttgtcctcggtgagttcggtgtgcatgtagattcctttcatttgcgcaccgcgtagctcgtcctagattagaggtttgtggtctagagggttgggttggccatcgt

SEQ ID NO: 149215 - DNA, 316 bp, Zea Mays
caactttctgggatggccctatcctggtgggataccttcagcgctgctgtcagagatgctacctaggcagaatttgaagccgccttctgagaacatcacgtgccccaagggatcgttcagctcaaggaagatgaatttcgagaattaactcaaggtggaagatctgtcagtgagtatgtgcacaaattcacagaattggctcgctatgcgcctgacgatgttagcacagaagccaagaagatggctcatttcttgaaagggataagactagaactcaagactatccttgccagccaagatttcctcagcttctcgc

SEQ ID NO: 149216 - DNA, 295 bp, Zea Mays
gtcaactttgcgagtgaataaagtatagtctacttttcctatttcaaaaccatttttaagcaaaaaaattttaaggcaatcataccaagctctaggggcttgtttaagcccgtagagtgccttgtgaagtaggtaaacatggtttggcttctttggatattcaaagcccggtggttgctctacataaaccctctcttgtagtggtccatttagaaatgcgctcttgacatctatttgatatagcttgaaattatggttagtaccataggcaattaatattctaattgactttaac

SEQ ID NO: 149217 - DNA, 924 bp, Zea Mays
gtcatcgcgagaggcagcacagactaccctcgcgtgtgacactccgcgcaaaagtcacctaagggtgcagccagaatagcacaacaagtgcattaatcaaagtcttttatttaaaagacactccgtgcaaaagttgcctaagggtgcagccagaatagaacaacaaatgcggtaatcgaagtcttttatttaaaagacactccgtgcaaaagtcacctaagggtgcagccggaatagcacaacaagtgcgttaatcgaagtcttttatttaaaagacactccgtgcaaaagtcacctaagggtgcagccagaataacacaacaagtgcgtcaatcgaagtcttttatttaaaagacactccgtgcaaaagtcacctaagggtgcagtcggaatagcacaagcacgataatccaagtcttttattcaaaagacactccacgcaaaagtcgcctaagggtgcagccggaatagcgttaatcgaggtctctctttaaaaagatactccgcacaaagtcgcccacgggcgcagccggaccaacacaggcgtacgaatacggccaacaggccacatcaccatacaaattacaattacatacacacggcgagggcatcacacattacatcggctcgaccttagggataatacccatctccctgtaattaaacatcattatcctcagctcctctccctcaaaaagcttccgcagatccccctcgcctatgcccgccccaaccggcgaagacaacaattctcgttttccaacccggtctactcggagacggccacgctccatccccatacgacggcgcctgccacttcgcgaaaattcacccacactatgttttcccaccacccttcgccgcctacacccagtactcgcaccaggaacatccccagcaccctccacacatggtgaagtctcc

SEQ ID NO: 149218 - DNA, 829 bp, Zea Mays
gctggttatggtctcatttgtaaacctttgacaaatctgttgaaaaaggatcacatatttgtgtggacctctgatacccaacaagcttttgataccttgaaggcagctttagtacaagctccggtgttagctatacctgatttcaccaaacagtttgtcattgagacggatgccagtggagtgggcataggagccgtattgcaacaggagggacatccaattgctttcattagtaaggctttgggtccaaagaatttaggcctatcgacatacgagaaggaatgtttggccattttgtttgccgtggagcattggagagcatatttacagcatgatgaatttgtcatcagaacggaccagcagagtctgactcatatggacgaccaaagattaactacaccttggcaacaaaaggccctgaccaagctaatggggttgaatttcaaacttatttacaagaaaggggttgagaatcaggtggccgatgccctatccaggagaccaaatctgaaatgtgatgacacaactgttcagttaaatgtgcttgccagctctgcaattgtgccaagttggttgatagatgttacaaggggttatgagacaaatgaacagaccaagaaattgttgactgcgctgtctactgggcactctgtggaacatttcaccctggtggctggcatcatcaaacacaaagacagagtgtggttgggacacgatccggaactacagtctaaggtgatcgcagcccttcacgacagtgctattggaggtcattccggttttcctgttacctataggcgcattaaatctgttttcagttggcctggca

SEQ ID NO: 149219 - DNA, 344 bp, Zea Mays
aacacacaagagtgtttatgatctataaaaggtaagctcattaactttggtgtccatgtgtccatcttgtgctatggtagtaaaaacaatccatatatacgaaatgcttgtgcgtgagtgtatggatgcatttacctagcagtttaaggctgcgcaacatccttaattgccagtggttctaatctttcaaaaattcttgcatttgttgtgtaggatgtggaagagaaatggccaccggaacatggcacacttttggacaacatgatcacttttgttggagattcttattttggaaagcatgaattgattttcaagtgcttttgttgatgacatgtgcttgaaaa

SEQ ID NO: 149220 - DNA, 1068 bp, Zea Mays
ataagttcttacggtaccacatgagcacccagaattttaaagctgacaaagcacacaactatcagctataaaggaccaaaccctgaccaaaccaaactactagtagcaacacaaatagaaacacagagctgaccaacatcaaagttcacacatatcacaccagcgcagcaagcagcattccatcccatagtttttcctgaagctaggcgcaaccagggaaaggaagtagaacgaccgcacagttgttgaaccaaaataaccagataacaaaacatgtttcatttcaacggattcgtctgtcaactggcctccaaccacgagtcttgttgtagatctcacacgccatctttttgattttgagacttccgagctccaccaattttcttgccttctttttttgacgaatagcccaagtattaagccaaaaacaacaagagaaaatcacattagtcggatcatcaattcggttagtcccaaagcaacaattattgcgacatctccagatcgcccaaatgacagcaccatagccaaacagaaccagatttttttcagtcttattaaaactgttaatccaagtaccaaacaaatcatccacattatcaggaatagaatttagaccaagagcagagtagacaattctccacgtaaatctggctaccggacattgaaaaaacaaatggtctatggattctgaaaatccacaaaagatacattccagattacccttccaatttttcttgaacaaattatctttagttaaaatcttcttgtgcataacaagccacataaaaactttgatcttatgtggaagtctagtattccacaagaaactaggagccaaaggaatctgagagcacttgatttctttgtaaaaagaattaacagaataacctttgctacccaaaagccaaacagatttatcttcttcctcagaaataatagtattattacattgtgtaataagattgttatactcaacttccaaggcaccataaatcctccttctgaaattcacatctctaaaatcagaagaaaaagcttttttcactgtgatatctttatcataag

SEQ ID NO: 149221 - DNA, 474 bp, Zea Mays
ggaaaactgaagatccctattgtgttgagaatttggaggccttctcaactagtgcttaggccatcggtttagcccatagcaggagcggtcataccttccttggttttgcttcaatatagcatctatccttaagatagctcttgtctggttgatccgagatatgattgcattagttatgtgagtatatattaggtgctgttacatattttcatccctaaatctcctcaactagcttctcagaggaaagattatggaggaaactaaatattcacaaagaattcctttaggtagttgatattgtttgctggtcagtgttatcaactcatccaactaatcacaattaatctgggaactaatcgttccttgacctcaatgaggctctgctacttgatttggttgaatggttgaccgaaaatcttgtcgtccaattagtcattgtctaatcatgattagttggtgtaacactctgtctac

SEQ ID NO: 149222 - DNA, 523 bp, Zea Mays
gttttggtgattaaatgacaaaacaaacagagattctaacaagttttctcctagtatgtatacagttattctacagacaggagaagcacagagcatatatgtacgcaaatgaaaaagcacagcggattaaaattctacattatatagcgtgcttcaagtgctagggaacaacggcaatttgtttttacaattcttgagtcataggaatcgttgttcaattaagagggatccgcaatagttgagtaagtaaatgcgatgagctcagtccaaaccttttcgaatcctctaagataacattttactagatcatgaatgctcttggaaaaaccacttttacttcccactaagatttccccagggttctcttcagttttctaaaaatctgttagccagtttgaaaaaaccggttcaaccggactcaaaaccggctcaaccggtttctgcactgttcactttgccactttctgacctgccagtctgccagtcagtcctgtcagaaaaagtcgtgtacagactgttggaa

SEQ ID NO: 149223 - DNA, 735 bp, Zea Mays
ttgctgctaactgctctgagcgccgccgccctcctctgcttgctgctgctctgagcgtcgccgccctcctctgcttgctgctgctctgagcgccgccctcctctgcttgctgctgctctgagcgccgccctcctctgcttgctgctgctgtgagcgccgccgccctcctctgcttgctggacgccctcctctgcttgctggactggagatggactgctgagtgctgactgctgtgctgagcgccgccgccctcatcttcttgttggagctggactgctgactactgagcgccctccctcctgctctgttgttcttttgctggaacagagatgagcacttctggtaatccctccctcctctagtcttttgttcttttgctggaaacagagatgagcacttcttgagttgctctttgcttgctgcagatgaggatgggagccaacgtaataatgtagaagttctctttccaggatctaggttgtcccagcctcaaggtgatggcacagccacagatcatgctgccacacgtgaatcagttgcatcagcttcgtctgatgtcgcagcagctgctggttctaccataaaagataaagctattgctgcactacccgcagtattagctgagatggctaaggatactaagagaaaggctcgatcttcagacccagggtggaattatggattttggccaaataaagctattgctgcactcctactatcttgcatttgtttgtt

SEQ ID NO: 149224 - DNA, 458 bp, Zea Mays
cacgcggcggccgcctcctccaccacgccgatggcgacccctcactcacccagacccagctgaacaactccctccaccaagcacacgcaagcaggagaaggagcaggagcaggagcaggagccgagggcggcgacagagaatagaggtagaggaaggcgatcgacgaggagctcggtctcacctgctagcggcggcgaccatggaccggatgctgctcgaccagctggccggcgaggccctgcgggaggtgctgcacgcggtgcagggcaccctgttctgccgctccaccgccgagcgcctgcgccggagcgtcgagccgctgctgccgctcgtccagggcctcggcccgcacagcacccagcgctccgcgggggagctcggcgagctcgcggcgcgggtcagggaggcgctcgacctggcgcgccgcgccgccgcgtccccgcgctggaacgtctac

SEQ ID NO: 149225 - DNA, 504 bp, Zea Mays
cgggacagtgagcttgttcgacgttgaatattacggccaccacatttgcaagaaggatgtcgtcaaccatccgtgtgttgttgacacagcacactattacagtgtgccgattgccaatcagaaccaaagcagtagcagcccaacgtttgttcacaatgatgtctatggaatccaggatgaaagctttgaaaacctgttcatggtgccgagcataccagagtatctgacagatttcacagacattgaaatggcgggggcacttgaggttacctccgagatgatctctgaaaatatatgggcgtacgagatgatctctgaaaatatatgtagacagccattgattgcaccgtgaggtgtgacaagaaagagacacgagtatgttatgtgtgtactgtagagagtataatatgtgagacaagaaaagaaaatggacgtgcagagagacagaaattatgtctcaaaagttgtaaatgctgtcccgcatggtagaatgttggtgtgcca

SEQ ID NO: 149226 - DNA, 380 bp, Zea Mays
cgcggctagcggcaccagacgcaggagctgggctgggcatggctgcgcgccatggctgggagggctgccagcaaaggctgttgcagggccgagggggcttcctggccacgccatcgtgagagcaggggctgacctgcccactaggatgcagtaggggatgggcacgagcagcacaaggagtgaccaggcttggggcgaacgacggttgtagaggctgcgacataccactagaagcgaggaagatagagaagggagagaactcaccagaaatggaggagatggccagagaaaggaaccactggcgacgatgaaggtgtaggttgccgtggcaccgcgcgagcacgcatgaaaaggatggctgcacgagggggaggagttgt

SEQ ID NO: 149227 - DNA, 710 bp, Zea Mays
accaagtagcttcatcttcactatgatgactccatttcactttgcacattttgatcactttattcctcgtgacacgagtcaaagtatcaaggatcttgataggatactcagtttaagtcatatcatcctaaacactaagatcctccataggcaattgctcttctggtatccttagggacttcttcaactaggatacatggaagacatcatgtacatccgcaagatggtcgggtagttctagttgataggcaacttcccccactcgctttaggatcttgaagggtccaataaagcgaggggacaacttccctttaactttaaacttcctcataccccggatcggtgacacctttagatacacgtgatcaccctccataaattccaattgtcttctccgggtatctgcataacttttttgccttgactgcacagttctcaagttctcccgtatcaatcgtacttgttcttcttcctcatgtataatttctggcccaaagaactgcctttcaccagtttgatcccaatacagaggagtcctgcattttctgccatataaagcctcaaacggggacatcttcaaactgacctggtaactgttattgtaagagaactccacatagggtaaactcttatcccaactgccaccatgtttaagagcacaagctcttaacatatcttctagtacttggttggttctctcgggctgcccg

SEQ ID NO: 149228 - DNA, 383 bp, Zea Mays
atgtgtataaacccaactaaaaactccatagagaaaagattgatgttaatattcaacatatagccgagaaaataatacattgcccactaatagctaaatgcacaatatataaatggatgcaatccatagattaataagatgatatccacataaacagattgtccatgcacaaacatagaaattacatatctaggtaccacaaccagatcatattgcattctagacacaactagcagcacaaaagatatgtaaataaaagattacttggtttatgtctaattttctgagtttatgttcatactaatgaagtatcaatactaatttgaatactgtagcagcatgcaacattttttctataaaagcataagtcatttgttcccaaa

SEQ ID NO: 149229 - DNA, 343 bp, Zea Mays
ttgtaaacgaggtatcatcacttcagagcattaggggaaagtccccgatggagagagtattgcgtgctagttgccatcaaatgcgaaagctccaccctcggcaccatgagtaacttggtgtgcccagtcccacaagccatcatctcatcccccaacactctgcagtctgcacgggtttctgtagatggccaagtcattgtagtgttcttggagcgagagtgcgtgccctgatgctgcgatgagaagctcgctgagccatatcttgcagtgtcaacgttgtgttcctcttgaggacgctggggaaagaatgtaggtttagcctaattacttaactgctcttggg

SEQ ID NO: 149230 - DNA, 471 bp, Zea Mays
aaaaattgaaccgattggatttgcatgctcacagggatcgcggagattcatgttccccgtgtttggaggagatatgtgtgccagccctgtttccttttctgttaagacttaagactgctaccactaccagtgtgctgtaagcgttcgtactgttctgtgtgcgtgcgtgtacgcttttagatttcttttggccttggctgctcagcttgatttacgaattgggacgccgcagatagatagaaatagacattgttggttctatagttgtaattgagctactaggttgttggaataggcagcttcgtgtggtgtggtttcatttagcatgcctatcatactactattggcatatttcagacttttcagtacctagtgaatgattgtagcaagaaatatggacgacgaaaaaagagcgctttccatctgaaacaatataccatttctcgtcttgtttagtgcatatgaacctca

SEQ ID NO: 149231 - DNA, 423 bp, Zea Mays
gggtgactgcaaagcctgtaatgagacggttacttgaacttcacgctggtattcaatctgaatggtgagactatcttcctaagttcacttctatggtcaatgttggctaagtcctggttataggttgtagagtaactcatgccttagtatttcttgtaaccattcctcaaatgtgtgctggcatccagattttgcttgcagctgcaaattcaggggcatcttcaaagatggtaagggaacaatctgacatctctgggatggtgactatagttgtgtcctttgtgatctccactgtgaagaaacaacttatcacctattcaattgtcctttgctggaaccatatgggtattcattgggaccattcattggacttctctatgatcatatccgcaatggagcatttcggaaataagttctttatgc

SEQ ID NO: 149232 - DNA, 441 bp, Zea Mays
tgtcctgcaactgggagtcaatcgcagccacctttgagtcccctgcttgataggagaccattggaggagggtcccgtccgtagacaactttgaatggagaacatttcaatgccgattgatatgatgaattatagcaagattctgcccatggtaaccacttcagccatgatttaggacggtccccagctagacatcgcagatacatggtgattattctgttaacaacttctgactgaccatcggtttgtgggtggaatgctgagctcatttgtaacttcactccagccatggtaaacagttcagtccagaactggctagtgaaaactgtgtcccgatcactgactatcgagcatggcagaccatgaagtttgacaatttcgtcaaagaaggcctttgccactgatgctgctgaatatggatggcctaaagtaataaaatgac

SEQ ID NO: 149233 - DNA, 321 bp, Zea Mays
gccacttagtgatatatataaatatatgatgccacacaacacaatcaaataaaatatagagccaaacaaaatttttttaggaaggctgtgcataatatgacttcagggccttaaacaactcaccacaatccacgcgagtacaagctctagcgtatctggggtcaacgcgtgcgcggccatcaggaccacgacaacacaacaagccttcgtaataaatgtaacatgcacaattatggctcggtaatcggggtacacgataattccacacaacgtgcgcatcagacgcaattgtggctcaatgatcacggcagacatacagtg

SEQ ID NO: 149234 - DNA, 586 bp, Zea Mays
gagagagatggggtcatacccacagatgttccacaagtgtcccgctccatctggtcgaggagatgtgggaactagcaatcgaaggtgaggaagtggtggaagaaaccgaaggtaacaccgtagaaccagcaggtgagaatgttttggccatatctttggatgcagtaagcggtggtgaaggtaacaaaacaatctatttatgggcatcgatccattgtcagcaagtgctcgtgcttgttgattcaggcagctctgcgagcttccttggaagtcacctgttaggagttatgccaggaatccaacttttgacaagaccagtgaaagtagcggatggaagaacactgtggagtcgatatgaggtcccagattgcagttggttatgtgaaggcttaactttttctagcaattttaaaatactacctctagggggttacgatatgatcctaggtatggattggctagaatgtcatagccctatggatgttcattgggcacaaaaatggttggagtttgagtatgaccaaagaaaggttcggttgcagggagtgctgcccaacacacaaacctgcaacaacatcacttgttt

SEQ ID NO: 149235 - DNA, 714 bp, Zea Mays
cgtcttggtcgaagttcgttagagcatcacagttaaacttataaatggtcttgttcagaaatcttctctgttttttctttttagagaactagacttgttttcccttctacatagttgattgatacacatactgaaaaaagggagactcagtgtcaggagacatgtattccattacctgaatttccatcatgtgtgattgtgtgctgctaatccaataccaagctatgggctaatgttttcttataagttactgcctaaaaaactgaaactgttctcaaaggtttcaatggtttgaatttactgcacccttctaatcgttgtgaagtgttgaattgcacagtactattttgtattacgagtcatgaccatagcaggcccactacttaaattgtgatgttccatacagtgtgcttaattcatacagcaagcccactacttaattcatacaatgtacattcgatctcatcacttttgggctgacactttccatgtagaactatgtgagaagatatgagtacctggtgcttatgatgctccataaatttgaactacaattcaaattgtttatgagacatctatatttatctggttctcagttgtaatgttaatactcaggttgatatcgatatcacttatttcaaacattacctactcgtaggcttggttaattaaaccttgttgtgtataaccgatagtcattattttccccttaag

SEQ ID NO: 149236 - DNA, 996 bp, Zea Mays
gcccctccttgcatctcatcctggatccgccactgtctgccaaggtcaaatgagacgatggtatccatacttgcagatgctcatatgctcagtccattaccacctcaattgctactgcgctcattggttgatcatatggctccgactgtttcaagtgaattattcagttggattacccaggagtatacagaagcacacaaccttgagaaatcattcagttgcactttatgattatgcaaggtgtgagcatttgattccttcagtttcatgctatcaggtacttcttcattttctgatcagaaacaaaaaaggacgaattgatttgaagagtatatgtggacatacttaaagttggatttggttcttgcaccaaaggaggtattatttattctgttgccatatctttaatcaagaaagatagttttctgcaagctcttggtattcttcggcaactaaagagtttggatcttaaattaagcaagggagccttgtcaactatagaagaagaatttaacaaggaaagcaaattggggatatgatgaatttgttggaaagagtggagatgttcccctgagttgcgtcttcgcaacaaaatctttgtgtctgtgtgtacaaatcttggcactgatcaggcatggttgttattccaaatattggaggccttagggtttgctccagatgcttcgactcttgaaattttcatatttcatagctgtagagaaacgaaactgaaatctgcacatgtatatttatcagagtgcttttctaggcatattaaacctggagtttattcttataatgctattttaggtggcgttcagggagggactgtacagaaatgcaaagtatgtcttcgaagacatagttgaaagagaagtaacacccaatctttcaacatattaaataattcttgcaagatattgcaggtataggcagtttgatgatattgagcaagtttttaaggatatgaaaactaatggtgtaaatgatcttccc

SEQ ID NO: 149237 - DNA, 1050 bp, Zea Mays
atttttttgtttgaaaaactaggatgttttcatgtaatgacatagataatactgtcattcttgtggtggatatacataatgaaaaaacatatgcataatatgtagtatggtctatttttttcatatgctactcactaattttgagacacacagttgtggaggcctgcggggccggtgactgactgaccgaggtcgaggccgccacgccggaggtgcaccttgcctggcacacacccatggagaccgacaaggctggcgaccgaggccgaggccgccgcgccggaggtacgcctggcccggcaaacacccgcggaggactccacgacgaagctggcaaacgacgcgacgagatcgttgaacgcctccttgagtagctcgaccttctcgggcgggaggtcggcaatcgactctgcgccgtccagaaggccctccacctacggcaggtccagcacgacaacgcggaggcacgcgggtagctccggcgagatggcactcaacctgagaacgttcctcagcgtggacacgaaggtgatggcgtagctatggaccattgcagctctctcagatatgcgccctccaccgcccccgacccacatctagctttgcccccaccatcgccttggctgtagggagctcatcctcttcctgctcgtgtccaactcctccaccgaccgcgacgcacggttcgatcggatctggcggggtggtggtggcctggtggattggatgcgtcgtggctttcatggtgggggaatcatatgagggctggcgcaggcgagaggttgcgagcgaggcagatggacctaggcgaagcgctagagtcggcggcggttgttgcgggctgggtgacggctgcagaatgtggtggcgtgggggagtggagagaggagcatttgcgatcgggtgtcgacatatgcaagcgacggaatcgcagaaggagaagccggggcgcgatgactttggtgctggggctggtaggagggatcgaggcacgatgacatcacgattagagctagcgggcgggatccaacggctgagatcgcagaacgg

SEQ ID NO: 149238 - DNA, 510 bp, Zea Mays
aaatacaaatactttataattcaagttttcttcattgcatttatacaactgcagtcaaaacatgtatgcttctgagttaacactgaactctcttatgaagcagcaattggaggatattttttgataataatttgtaaaatgggatactgttggagccgttttttatcaattgagacctatattttcaagataggacactgagttagggcactgttggagatgctttacttgatagctggttagacttctacttgacatttctacctgacaggctgttgtactcacaagccaaattcccgaaaatactggatagttcctttactgtaaaagtgggtttcccctagctgtcgaagttagaaatgtcatcttctctaatgaagaagcacaaggaatattggaaattcatttctcaaattgcttctttactgcaatgtctagaatctagatggtttcatgctatagtgttgttcatattatatggtgataatgtacatatagaacttatgatgg

SEQ ID NO: 149239 - DNA, 434 bp, Zea Mays
atacacatagagacaagattgacatggttatctctgtctaaaatgtactgcagccattccatagagtgctgagtaccgcgagcagcaaaggcagaagcgtctctggagtgttggaggtagacttcatcaagcccacccatgacaaacaggactttgagaagtcgcagctgtttcagcggctgatgaaccgcctcaaggagatgactaacgagtactggtaagttccaggttcttgatgatattatctatctaattcctcccgatttcccgaacctagcaccgatgcttacttcgcctcaaatgtcaccacgcaaatgtctcggtccttccacagggatctttacagtaacaagatcggatacgtgaaagtgccacgcgtgagagcagctcccactcctgctcctccagtgatgctggcaatagagaatggcccc

SEQ ID NO: 149240 - DNA, 320 bp, Zea Mays
atgcagacagacaatctgtgccatgtacaactctgccaacttggctcctgaatacgtggtcttcactggaataaagtgggctactttagttagtctgtccacaatcacccatatagaatcatatccggcagacgtgcggggtaatccaacaatgaagtccatgccaatctcttctcacttccactcgggtatcttaagtgggtgcagtagtccaacttgtctttggtgttcagccttaactctttagcacacatctcacatcgtcacatgtgcagccacatctctctttagaccataccaccaatacttctgctttaaat

SEQ ID NO: 149241 - DNA, 283 bp, Zea Mays
caggtgccttgagcagaaaagcccagtgcaattgtatgagcatggatgcaagagtcaccaccctgtgcgatgagttgtgcaagctgaacctggaagttgtttcttcgggtgacttaagttatatctcggtggaacccacattgcaagagcaaatagtaagggcacagattgaggataagggtgtccaaatgattaaggaaatggtcaagcaaagggcagagaaatacaagtgtttccgacaggacagcaagggaattctatggtttggagatagagtggttgt

SEQ ID NO: 149242 - DNA, 709 bp, Zea Mays
gtgatgagatgatgacatgctttcatagtcatcatgtcatctgttggtgacctaactgaaggtcgtagagaaaggtcgattgcctgtgtgttattattgtcaccttgtggttctgtatgaattgcaatgtgaagtagtaggctccgtatgtgatgctagatgtctaggtagacgttcgagaattgtggtgctcggaccgtcgtgatgaaggttaagtcggttgatgccgcttaagtagttaaaatgattaatagaataagcatggggttaaaactagaaactagtgttctcgcacccgtttgggatgttgtagcccaatttcgcctggttatggtcgcgggtaaaaatttgtagtgctcatgtggtgtctaagttaaaatgcgaactagtgggtgaaaagcgattcgatataagtatatgccggatttgatgattgtggtgaatgcgtttgttaactgaatgtggtaattttagtgcactaaatgatttggataaaatttgtaagtctacttgtagtcctcgtttaattaattcaactctatcaattgtcaaagcgttagaacaattcgagcatctagaacgccgcaattcttgaattatatagaagctaaaatgtattgattgctgttttgggctgcacgcactgttttcggtgtgctgtatgtttgatgaactaaattgtgttttctgtagatatgtgctatagaaa

SEQ ID NO: 149243 - DNA, 791 bp, Zea Mays
gattaatgcttcattaataataaagaaacacgccatgcacaagaggaaccggaacgcagacgtggtttgtgacgacaagacccctcgtaaatcctccccgtgccgtcttggcaccggcacccccggacggaattgacattccacccaacagggatcgagatcgccatggaaattgtttctaggacgaaagccatgtaggctcatggttaccggtatctttgcacgctgctgatggcgaaatgcaaccaccactatagaggaggctcctggttgttgttcttgactgcttggatcgagtagaataataaagacagcaggggatgattccttccccctgccgctgcatgctcgtttcttctctagtgtttgttcccttgtttcttttcccagtactgctcctttgttcgcttcctatccttcctcctcctccccgcctcccgagtcccgtccctctgcggatttagctcccacccagtggctcagctcaactcggaccactgagctctgaccactaactcaaccactccagatcacggcgggcactggtgcagcaatagcaaccgggtccaagtccaagaaatgagctcgcggggtcccgacccggcgccgcccggggaggagcaggagacggcggaggagctgctggagcgcgtccggggcatggtgccggcggcggcggccgcagcgcgggcggcgggcgggttcccgggccggtggaaggcgatcgccgcgaagctggacgcgctgccggcgtgcctgtccgacctgtccagccacccttgcttcgccag

SEQ ID NO: 149244 - DNA, 656 bp, Zea Mays
caaaatcaaattgattttgggccaatatagcaaatgacttaaatgtttcaaatacatttgatttatctcgaagaaaatagacccaagtaaatctagaataatcatccacaattacgagacaataggaattaccaccaatactcatgaaggatgttggtccaataagatccatgtgaagtaattccaatggtctatgagtagacatttgactcttgtagggatgagtatttgccactcgcttcccgacttgacatgaactacacaatttgttcttttcaaatttcacatccttcaaccctcgaactaaatcatgcttggataattgattcaattgtctcataccaacttgaccaagtcttctatgccatagccaacatagtgaagccttagagaatagacaagttgtaagttttgcctcattagatgaaaaatcaacaagataaagattttcatgcctaaaacctttgaatattagattgctaccatcaacacttgagatgaggacatcattaatggtaaagttgcaactaaaacctaaatcacatagttgagctacggatagcaaattaaagttaagagattcaactaagagtacatttgaaatggaatgatcatttgaaatagcaattttacccaaacctttaacatttcctttg

SEQ ID NO: 149245 - DNA, 451 bp, Zea Mays
gagaccctcttccacccacgttagtagaccaggaggcgccaccggtacgacggcgatgaacgccggtgagccctcctgactcacgcactcgccctaatcccataatcgaacgcggatacactatgtgtacaccaatgcgaattacatggagaagtccttaccgtgcgccacacaagcaggagcactgaccacggcggagggcggaattgcggtggttcctctacttcggcgagaaattgctgcgcaactgcccaagttctggggggtaaggtcatgacaccattgggacacctctatgaccctcctaagccatctatcgaggatagagcgactctggacgcaagccgtcgacggcgctcctccgcttttctctcttcttgccgctcctgagctccgactgcgtcactcctctcccgatctctctctcacgctcggtcgcgggtagcatgcg

SEQ ID NO: 149246 - DNA, 446 bp, Zea Mays
tgggtcaccacggacagtcacttcagccgtccccgacgtagacgagcctacttcgaaggacctcatcgatggagaccgcgtcttcgccctacaggccctaaacaaataccaagctcaaacgaaatcatggcgcgaccacacagtcatcccgagggaattcagcaaaggagacctcgtactagtccggacagctcggacagagtcccggggcaagctagagccaaagtgggaggaccctttcatcgtcaagacgaaggcgtcccccagcgcgtacaggctaacaacgccattcggcgaggacttagagcattcttggaacattgacaatctccgcaaattttttgtttgactcctcagggccagctcgcccttgtaattcgcaaaacagctttattccggcccgcactcttttcctcccggggggtgaggtttttaatgaggcggag

SEQ ID NO: 149247 - DNA, 1028 bp, Zea Mays
cgagccgagctgaccatgaaccaagcgaaccacgaacattttgtccagccctaagtgatatcgtcctatcgtactatccatttttaatcgagagaattgcctaatgtttccatcaaccgatgcaacgaaaatgcacgagttttgcattagctcagaagcagaaacaaaggaaactacctggaagaaccaggtgcgccctagcctttactactccgggcctgcacgggaattaattaagaaacacgaccaaaaagtatggctgccagcccgattattcttcatttgtttgcgtagacaagtgattccatcggggccacgcgcccttgtgatatggagtgtccagtaatgttttcttctttctcacgttattatgtagccagctatataaatcttcaatcggtagtgttttgttggcgaggtgtttccgactcaggaaaattacataaaaaaattaaaaacaaagtgtaaacagttttctacattaaagtcggggaagacggggccggagaaggcgccgccgccagtagccgtcacatggaatccttgttctttttaaaaagcgccggacataacgacgcaaccttaaaaaaaaacgcatcgtgtgacacacaccacgccgtgtgccttttttgcatgccgtacggccgtgacactctatcttttggatgtgtcccttgtgcgccacctggtgtgtgtatatataatattatgacgtgcgtatgccggcccccatatcgtactcgatcaattggttgatcttctctactgtgtagattatagatacaagttttggtctttggaaaaaggttgtagcagttgggctgtacaggtgtacgtactcttattttagggatgttgctaaaacaactgaattagatgatgacaaatctaatatttgtatcatagatgtatatagaatttagtcttaatcattatagtcatattattaagcatattatttgaacacaagagtaattttttgtacaatttttttagcattattttctcgctacaatggaaaaagcaaa

SEQ ID NO: 149248 - DNA, 394 bp, Zea Mays
ccgccgatagcatgaattagtccccagccaggtcatctggggcttgtgccgatcccgaagaagctgttcgcgggcgcaatcggtcggtggtgaccggtgaccgtgtgaatctctcgccgaagttagtgatccgtcgtgcgtcgcgggcgacttcattaggctcccctcctcggtgagtaagcaccacatcgtgtttgcccgttctttacgattgtgtagcacccaacagcatagagtttagggcgctaaatcaccatgcccagaagtccggtgatggcgcgccgccgtgctgagtcccggaccaccgtagtcttgtgtggtgagaggaggagacgatgtcgcggccgtcgatccggtcaagggcagctctgattagacgaccacgtatccattc

SEQ ID NO: 149249 - DNA, 640 bp, Zea Mays
atcggcgtggcgtggcgaactgcgggtttctttggccgtacgtctcgggtggatcctggcgccggcagatccgaatggtacgtgctgatccctcctctccttggctgctctgttcttggtttccgttctctggctgcgagatgtagaatttgctttgcttcgctccgctgaagctgaacggggtcgctcggtcatctaatcgcatttgtatcgaattggattgaattgaattgaatcacacggattaaactccgttaatctcaattagccatgtctccagtagccagcacagcagtatgaacctacctacagtacctacctatccatccattccattggcgtagcggacaaagaaaggaacaaacaaatcagcgaaagatgcacgtgtggcccacgttggtagggcaagattggagtgccaagtgtgctttccaccgtggacctgattttggagtaggccgtgtctcatccttcaagacttcgcataataaatcttgtctgctctataacatgagccgattaattagctgcagcactgaaaagaaaccatcttgtttgaatccagtaaacaacacagtcatctgatcgtcataaaatgatataatctgtctataccgcacccaagtgtttcagtctttca

SEQ ID NO: 149250 - DNA, 315 bp, Zea Mays
aattatttaaaagtatttaagctggtattaatcaagttaattaacatttatatttataaaagcccgagttaaaaactacaacctagttttaattaaaaggtggtatttgaataactatagaatactcaaaatatagataattaattaatcaattaaacatgcgacatgactagataacattactacaacaaaatcgacgatatggcgcgttctcattggctgtgaaatcgaccacatggatgaccacaaataccgcgggtgcagaagatccgtagaggaatgtgtggaggcggttttgcatttggtggaatcgtg

SEQ ID NO: 149251 - DNA, 378 bp, Zea Mays
ggaggatttcacacacattgccttccactatttacaatcttgctaactaatttgtctggtgatgacttgtttaaatacctttcacctgctgccagcttcatccaatgacatgcactcggcattctgactcgtgtagctatcatgtaattatttgttacaataagattaataatatgtgaatatatagttcatatgacgcaggttgtaacactggataaactctggttacagaagaagtctagcatgtacatacaacataaactctggaatctggatacataacagctgtggtttcagactgcgcgtttaaaaaatgtttggttcactgaaaaaggagagcatcagacaatgggaaaagaaagcacaacactgttctgg

SEQ ID NO: 149252 - DNA, 577 bp, Zea Mays
tgaagagtttatacgaaccagtttgactttgttctttgggaaacattaaaccattagggtttcagtcttgttagctagaggattactagtacaatttgaagcttaaatgattcatcgcatagtgctgcatctttgtgaatcttgtacctcgatcagggtactcgtaaactcatacttgagtatgatttcgaagtccagtagtcctgctaggctcgattcctgtaattatctcgttaggaagttccagcaaccatgacttgttttctgtcaggagtttaagtaaacgatgagcatgattcagtttctgcagaaaggctatgttaccagtggcattttattatctaggtatttatttgcccggttttgctggaggctatggttctgcagaaaggctatgggtttgctgaagggcctgccttgaatttcgtatttattttctgcttcaactcctcagcacgtttaactacttgcattcagcattgcgttgcatggcttggtgacattggtcacttttctattgtcttgctcgtgctatatccatacacgtttaaaaacatagtctcattccttacatctc

SEQ ID NO: 149253 - DNA, 327 bp, Zea Mays
taaaaactcctagacacagagaatagtacagggtagactgcaggttgaatctctaaacttataaggggttttctacaaagtggaaaagcgaaggggtatgctcagatgagggtcgttcagatcaaatccgagggccacgattagatcccgcactttacgaatcggtacgaaactatgcccatccgatcctgatctaacggtaagcctttaatgaatcctaaagttgttttccaccgtaggatcacacatccatgaccaccatttggccggtcaacgcgacacaaggcaactaatcccagccgttgaagactggatcgacggtccctg

SEQ ID NO: 149254 - DNA, 428 bp, Zea Mays
tgacagtgttggctaggattgctctaatcacacaagccagttaacaagtagtggcaggagtgttgattcactggaagtaagctaaacctaaagttgcattaaaatgatcacattaaacttattcacataaccaacaaagccattaaaccccaataaactggcagtttctttgcacaccaattaaactggcagttttcttgcacacctctggatgactcaggctttatctatgtttttcataatcataactactggatgtctaggaatgctttccttggagtaaatgtaaaaaacaaattgctagtacttcaaatacacaactaaaccactgtgatgcatcaatgctactttgtggtagaattattctgaattccaatgtttatacttctaaatgggcttgattggatagctgcacatgtacggacagg

SEQ ID NO: 149255 - DNA, 517 bp, Zea Mays
gggcaatattgtcttctgcatttagtattttggatgacaccttctctcgacatcgtctccttatgttcgttatgacgaagctagcttcttcgtccttctcttcagtctgcttcgaaggtgttccgatgccgaagctcctacaacgcttaataacatatcgacaaccaatggttaaatgtgtttttgatgaccttcgaaagaagaaggcccccaacagcacgcgtgatgaatgagctagcaagagcaaggcgagacctcaagacttgttcagcaagactataaaggaaaaggatgacaatgaccttagtcaactttgtagctcatatgtataggataggtttgagggcatgattgtattttttatgaggttgtacctaacgactataaatagggcatgttaccatgcatacacaagttttttggctgaggagaactaactcgctcagcctacgaagttatatcatgttcttcctttgtattgttattcgccgagtcaaaggtagaactgtaatcattt

SEQ ID NO: 149256 - DNA, 291 bp, Zea Mays
cacgttctctccgttttgcaccaataaacgatctatgcgtcgctcgggggcgtattggcttgggcgtcggcgagccctccgccgggtggggccttgcgccgcctctctgcttggtcaaagggtagaaggcgtgctcgtgggcatcggatccttgcttgacggctaagattgttgtgtgttccggttcggatagatgccatctaggtcgccggattctgattgggcgtctcgaaccaagtcgcgattatttaattcggagccattgtttatagatctaacgatccacatcgc

SEQ ID NO: 149257 - DNA, 1682 bp, Zea Mays
gaccagcatgaaggtgacaaacgctaaaaaacagtcataatgtaattgtgtaacaaaataaacgaaagcctgaaaaggatactccttttgtccagagccacggaaagctgggtccaggtccttcatagaaactgacatcctcgattcgtaaagatgtgctgcctaattcttctttcaaaggagacctaaaaggatgttgtgaatcagaagcgcatggatagtacgcaaataaacaaacagataattccccatcctgagaaaactaaaatagccagttttgctgttgtgtggtactatcattacataaaaaaatctctctaagcatccagattagcttcaaatgatgttactgatatgaaagtaacaaaataggcacaccattcatcatatccgtaactgtaaccaacaaacaaaaaaagagcacagactgtacaagttctcgcagaatatcttctgctataagatctgctataacttgactctgcagaaaaatgtattagaccaacacatacggcgcctaactcagccagggtcctatactaataagtgtgcttacaatgcctatttcctcagtgccatcaaatttacacgatggaaacgtgtctggaaatcatggggctccgctctgctgcaagttctttatttggatggcaatcaagaataggttatggacttcaggtcatttagctaaaagagggctgccacatcccactgcttgtcccctttccgatgtctaataaaacaggtttggcaatgtgttcatcctccgaaatttgagtttggatgcccctaatcttcaacctgctgccactcgtttctacaagtggtggcatggcgtgaccagaagtgttccaaaggacagaaagaaagggcagaatacccttcatcatccttgtggcttgggggataggtaaacatagcaatgcttgtgtgtttgagggtgccaggtcttgtatttcagtagtgttagatgcagtggaaaatgagagtagtttattttttgtgcgttagctctccatgaactactcatgaggtcgttaaagctctatcgtaagtggtgtgtctgtaactagacagccacgggagttggtcactggcctctccttattctctttctcttattaatgaaataacaaacagctctcctgtgtcgtttgagaaaagaaaaacacatttatcaatcaaggaacgtgtgtcaatgtgcaataacatgcgaccgcaatggccctgtttcagtaacgaggttaagcaacagaatagacatactatggaataatatgttcctgacaagttataacagagaacacagaatccaaataagatacaggatatgtgttcccatatcaggaaatgcacagcaacgtaaatccatgagtggcacaaggctcgtgtgcaatgccggtctcgagtgagtagtgaccaaagggctaatctgctagatcgcgtgcagcgctggtccaagtgaccgcaggactaatctgctatagtccaacacatccatccattcccatggctcctatcccgtcagctcgaaatccagatgaactctgaaaagctaaagtagtgctgtaagcattgcagataagtaaatattgctcccaatcgacttcaggacaagctaactgggcgagcagctctacgccatcaagcagggacgggcccagtaaaggacatgggcgtcc

SEQ ID NO: 149258 - DNA, 391 bp, Zea Mays
taatggcttgtatgatgaggttgtgcgccttcgcacattcggctatgctcataaaggcgttgcgcacttggtctggtgtatgtgttatgtcggtccggcgcgcatgtagtcggtctttgcgcggacagtttggtgtagtcttttgaggaagacttcgatttttcgcacttgttgtgcttggtccggctgcacccttaggtgacttttgcacggatagtctttttgaggaagacttcgattttttcgcacttgttgtgctagtccggctgcacccttaggcgacttttgcacggatagtctttttgaggaagacctcgatttttcgcacttgttgtgctagtccggctgcacccttaggcgacttttgcacggatagtctttttgaggaaga

SEQ ID NO: 149259 - DNA, 481 bp, Zea Mays
ttcacgtcgaggaaccaatcgtagagcgagaagaagaggggcttgccgaagaggtcggtgacgggccctcagcgacgggcatggcccgaggttgccgccgctgaggaagttggtcaggaggttgctggcattattgagttggttcagctgctttggtttgggtggtcgttgctgctgcttatcgactggcacctgcaccaacgagcaattggtacagaccggtcgatcagccactcggcctagcagtgattattctattagatacaaacggtaactcgagcgaattcagccggaggcacccccatctacatgttgaagtcgacagctcgttgttcccgtggaccatggcggtgtagtgtagccgtgcaggcaacagatcgagcacctggcggtcggccatacgtggaccgcgccaccgcaaccaccggcgccgagagtgaatgaggaggtgggtgagtgcccgtatggacgcgtacctgaa

SEQ ID NO: 149260 - DNA, 763 bp, Zea Mays
caagttattccctcaatctctctctcatctatttaagtctcacgcaatacttccatgaagttgatccacatcggcccagtcaccatcttgttgttgtgcctgggcctggtcgaccgccgcggcccattgggtgcatcatctggtccagaatgctcccgctccttgctttgttcctccagtgcctcgcctgtgtcactgacattccccctggtaagctggttgtttgcccccaaacagacgcatatggaaattgttgtcgtagatcttgaatatcctcccacgtcgtgagttctggcgacatgtgagaccattggaccgggacctatgcacaagcttgcagccctttcatcactgtgcggtgttgcagaatcttgatcggcacactaaaatgaaattggttagtaggcaaagtcacagatgcagtgaaaccagtgcccaacgcatgcttaagctgtgacatatgaaaaactgggtgaatgcgtgaagaggaaggtaattgtagcttatacgctactgtgccaacacgctgcaacacttgaaatggtccgaaaaacttgaacgccagcttctgatgtgctcgaacagccacggatgactgaacgtacggttgaagcttgagaaatacccaatcacctactgcgaactcacgctccgaacgacctttgtccacctgacgcttcatccgtagtttggcacgctccaaatgctgcttcaccagctcagacatgagctgacgctccttcaaccaggaactcaattcaga

SEQ ID NO: 149261 - DNA, 1115 bp, Zea Mays
gttttttgggactcacggggtattatagaaggtttgtgaagaattatggagtgatagccaaacctttgactaagctgctgcagcacaaatcttttgtgtgggacacgacaactgatatggattttcaagcattgaagcaggctaaggtgaccacacctgttttagctttaccttagttcaaggaaccttttgaagtggaaactgatgcatgtgctactggaattggggcagttttgatgcaacatcataggcctattgcatatctcagtaaagccttaagttccaagaatcagttgctttccatttatgagaaagagtttttggctctattgttggcagtcactaaatggaggcagtatttgtagcatactgaatttattattagaactgatcataaggctctaagttttttggaggatcaagtactccattcagagtggcagaaaaatgctatgaccaacttatggggttgcagtttcgaatggtgtatagagaagggaaggagaatgttgctgctgatgcactttctcaggtaggccatgcgatggtgatgcatgctgtgacagaagtgcaacctgtttggctacatgatgtgttgaactcttatatcacttatatggaggctcaagacttattggctcagctggctgttcatagtcctagtgagtaggggttttctttgcaaaatggtctcattcgaaaggatggtttaatatggattgcaaataatttagccttaaggacaaagctcatttcagctctgcatgatggggctgtgggtagtcattcggacagtttagccacttatcatcgtgtcaggcgtttgttttggtggaagggcttgaaagctgatgtggtggagtatgtgaaacaatgtgacatttgtcaaagggctaaagctgaaaggatacattctcctggtttgctgcaacctatgcccattccatagggagcttggcaagatcttgcaatggattttatagaaggtcttccaaagtccgaagggtatgacacaattttggtggtggttgatcagtacactaagtatgcccatttttttcactaaagcatcctttttcagcttctatggttgccaaagtgtttttggataatgt

SEQ ID NO: 149262 - DNA, 545 bp, Zea Mays
tgggaatgggttgtgatgtttagcttttatgctagcacttgaacttaattaatgaacatgacaagatagattatgatacactattctaatgttttggatatgaattcgtggatgcttgggcagtaacccaagtacttcactgtatggagggttgggtggtttcccaagtgcttcgttgtaagggggcttgggcggtatctcgagtgctcctccataaggaccagtttattgagcgaccactcgagaaaataatacaaccatgaggatggtatgagacgcccttagctaattaataagaggaacctgaggtatcgtttgcatcgcatcgtgacatcaatgggtatgtgatgaggacatcacttctatacagtatgagatcgggcctcgtgccctaatagtatgagacccttttctcgcttggccaacgttggttgtagtgcattatttgtttggttcttgaagtcaccatccttggggaggagttctgtgtttaccaaccagagaaacccaatgggtgattgtaccattgggaaatcttggtaaag

SEQ ID NO: 149263 - DNA, 1586 bp, Zea Mays
aacaccccctaagcatcactaaaattaaatgcacattcttaaaatgaaacaacatttctttatcactgcctagcttagtaaaaatacccttctgtttttgtttagtatctgccacctgaaagtatccagatatatcatggagaacactgtcaaatttacaacagaccaggtaaacaaaaaacaagctaagaaaagtaaaagtctgaagactaatgtcagtgtaaaaagcacaactgaaattatggatggccaaccctttccaagatgctaaaaatttcattcaacttttgcatcctcttaaccacttctgaaagaggaggtaagggccttcagagccgcaagtctccatgcatgaatatcaactggatttgcatgactacgtcagcatccctttctttgacttctgcaggtggtagatctctgatgagcaacatgcttgtctatttggtgggagatctccaatgtgccaccggactggccgtggcagggctgcagggtagagattggggcacaatgagccagtgacttggggagagggagccagagaggggcagcactgagagattcagagggagtggcagcggggggcagcaagcactagaggctggttagggttcggctgggggcgcattggaggccatgtaggtgggctggggtgttgggtgcctgtgactggtgggttgctcagctggaggagctaaaggccctgtttgtttcggtttctggccatcggaatcggcttttggcagtcaaaaaagtttctttctcagtccgcttatgtgagaatcacttctgtgaaaatcgtccaaatcaacgtgaatgcagaatccgccaagttgtcgtgatgggaggaatctatcgcttcctaaactctaaaccatgcagtccccttcatcttcctccatatgtaagccccacaatatctagattctcgtgacagctagattatccagtatccagattctcagaaaagctcttcaaaaaagctgtcccaaacaggcccccgttaggaaacttctgctgagacctgagagtacaggaaccaacaaaatggtcagtaaaacagctctcccgattttatcctgtatgctggattttttttcctgtttctgtttttcccgagaatatgagatacagacagtttatgcagtacactgtgccgttcagtacgagatttttccttcctgttttcatccctacacgcacaggccgtggtcgtagttgttgctactactggtttgctgctctcctaatgctatctcccgctcacctctttacctaatttccattagcttgtgcattgatcggatggggctgtgaagatgcggagggccccatttatgtgattaagtaggtcatgtgtgcagaagatgtgtatgtgtaggaaaattcttttctactcctagtagtagctactcccgcgtgtatatctcaatacatgtttgaagtgtttctgatatgatgttaattttgtaccaattgataatatagtgtcaggatttttttctcaaacatgcagtagagttgagtatcattatgttgagaagaagaagacggggataagaaccccaaagaacaacactcgc

SEQ ID NO: 149264 - DNA, 460 bp, Zea Mays
ggacgatcaataagtcaaacgacgtgaaaacggcgtttgacagacaaatagagacataggatgattggaatttgaattgaggcgcgaaatgatgtgggattgagccgatacttcacgaataggtttatataggtcaatatgagtgaagtgtgtgcttggtttgaatttaggcgaagaaatagggatttgggcactcggctcggaaacgattgctcaaatcgggaaatgtggtaaaatttaagcctggaatctcggattggcgtgaaatttggcaagtgggttactggaagtgttgtgaaggtgcctgaaaaatttgggttcaattggagcaagtttggctggtttgggcatttcaccgagcacgtggtgtgcggggagttagggtttcggtgaaacggttatttgaggtgggaaaaccctcccgaaggagctaggaacctgcaaggatgtttaaggcaca

SEQ ID NO: 149265 - DNA, 513 bp, Zea Mays
tagtggaggcatcaaagtcggaggagcggtttgccagccaaacaaggcaatggatgtggggtaggccacgtttctggaactccacagtatatagcgctgcagaaatgtttgtgtaaacacgaggttttgatatggaaagtaataggttgtgggaagaacacctaaagggccacaaacgtcagcatacctgcaagtacagggccaaacgtctttccctccctgatatcagctacgaactcatcgactttcatgtggaagacacgaacaactacgtcggagcgatcgcatggttgttgtccagtttcaaaacgaatggcatccgctatttctttccacttagtgttgcacgtgaaggtcacaaataagtcaggagggccaaagactctacatattgccatagcatcttggtagttcatgacatgataccttctaccaccagtaaacgacgaaggaacgaccatcctgcttccaacagaatcagcactaaccaaacccttatcaatggcatcagac

SEQ ID NO: 149266 - DNA, 359 bp, Zea Mays
cttgcattgaaggtaagcggcacgtgggaacacttcgtttgaaggacgggcccggtgaaggctacatggtttacccttcggtagtggtctttcttctgtcgttttatttcgaacttggaactagaccctccagtaatcatatggattcctcctcggaagggttgatcggcgaagtcctcttgctttggtagaggtgggggaggtggtagtggttggtttggatgttgaattggtggaggcggtaacgctaggatttcttggtgttgaaggcgttgttgttgcggaaatatgttgtggttttgctgttgaggataaaagtgttcattttggaattgatgttggttgtattggtagggatg

SEQ ID NO: 149267 - DNA, 345 bp, Zea Mays
ccagtttgtaaatgctacgatgaagtagaagccttggagcagtgtttctggctacaggaggccctcgtatgggttgcatttcgttgcccacgggccttgacgccttgtctctagtactcggcagtgaccttcgcttaaagagaagtcaagtggggagtactcggcaggcagtggagttgcttttgtttcaggttttgctgctgttgcaagctcacagctttgcagaaccactgctcattggtcaagaaactggagaacctaaactgcagggtcgagaaagctccatgcgacaaaacaacaaatgcgtgccacagcccacattactgaaccgaaccacagctgcag

SEQ ID NO: 149268 - DNA, 580 bp, Zea Mays
gtggcatcggtgaggtctagctcgaccttcttggtggaggactcggtctgtagagttgttgccttattctgcgaggcacaagatccctagattttcctccttccccacgacttagcgcgagggccttcttctggttgtcacactcagcctacaccacctaggactcaggagactacatccttccttaccacaagtataagattgcttcaaattacttttgacagtaatcaccccctctagacctagcatattgaggaccaagtacatgtagtacgggatcaccatgaattctgcgagtcgtggtctctggatgatggcttgatgggtggcatcgatgtcagccaccttgaagtggaggaactcggtgccgaaggtgatgggaagagttatctgctcgagcgacatagtagacttgtcggggatgatgccatagaaatgcaccagactcggcctcaagaacttctccgatagacccatcttcttgaaggtattggtgaaatgtatgttgaggccattcccgccatcgaagaagtctcaatgcatcctttcattgtccttggaccagaggatagcatcctgg

SEQ ID NO: 149269 - DNA, 622 bp, Zea Mays
cgaagcctgatgactaagagccggtaagatttatatcctagagtgctgtgctataaaatgccaagggaaattttgactgaaaggctatccaatcattaatcaatgatagtattgatcaactaggggttacatatataggacagcaaccctagggcatatggtgtcgctaagttggccaagtacagcgggtgcaaggccgcaggcctcgccgtgccatacagggattctaatactggccacaattccctgattttaatcacaaccaagctgccagtagacatcttttttgttttgagcttgcccaaacatgctggctttttacccctagtggaagatatttggacaaaaccatattacgctaaatcagtttcagacaaaattccaaaagaaacttatagaggaatgaatttgcaggttctaagggcaggggttttaatttgcaggttgaaattaggaaacaaagagcaaaacttagattttatggtcttggaacttatagaggaaggtctgctatcacaggatcaattccatgataaatcagctaaactagctgactgttgaacatactggaaaaatgggaaactatattggctacagagatcccatgcaacatggtttctca

SEQ ID NO: 149270 - DNA, 314 bp, Zea Mays
gtgagagcctaagtccttgttctgtacctgtcattttggtcccaaaaaaagatggtagttggcgcatgtgtgtagattgtagagccattaacaacatcaccattaggtaccgtcatcctattcctcgattagatgatatgcttgatgagttaagtggttctaaatggttctctaaggttgatttgcgtagtggttaccaccaaattagaatgaaattgggcgatgaatggaaagctgctttcaaaactaaattcggcttgtatgagtggttagtaatgccttttgggctaactaatgcacctagtactttcatg

SEQ ID NO: 149271 - DNA, 338 bp, Zea Mays
cttgctcctcttctcaacaagatggtagagactaaccagagtgcttttgttagaggcagatccattcatgacaattatatgttggttcagcactcaattaagtccctacacaggaaaaaagtggccagcctttttctgaaactagatttaacaaaggcatttgattctgtttcctgggctttccttcttgaggtgttgacccaccttggctttggtattaagtggaggaatcttatctccaaccttctggccacttcatcaactcaaattttattaaatgggtttccaggggaacagatcagacatcgcagaggtttgaggcaaggggaccccctctc

SEQ ID NO: 149272 - DNA, 2378 bp, Zea Mays
cacggcacagatttattttcatcagttgtggaattaatggtactcaagacaaaagtatatttgcacttgagtattgtaagtccacaacagaaaaaatacaagctacaacaacatacaaccataaatgccagtggccgtagcctgagtgagaaaaaatctcaatcacatgaagtttctgaagaccatgttatatcattcagcattggaagaacctaaacctctagaagacgcatccgctgcaacccatgtcgagtgggcaaagtggacacgccccctccatccttgcagaagccattgcccatcctgggagatcaggaagtccttgtggtgatgcttcttgaccatatctctcactagctctacagtgctcatcttcagtgagagctgcctcaggccagcccgttggtttctcgtgtgccattgtctgtacctctcagggcgttccaccaggtccacgccttcgcagctgagggcattcagcgcagaacgtccaagcacgacctgctccagcaccattcgagatttactctcccttgggattgttgcatcgaatatgtcaaacagcgccatgtaatagaacaacatctctcgaaaacgtgacaggaaggatgaaccatacgaacaattgtacacgctctggatgaaaacatgtggtctcatcttgctgatgttacaaaggactatatccctggggcttaggtcatcaaaggatatgccctcgtccatcaaggtgctgaaactaaagagatcattcacgacaagcacttcatcggcttctaggttcaggtcctcgatgcaagcgtcctcccagtttgtcttgatagcgtggaacttgaacaagggcagaccaaactcatgggcagatctgccgagtcggcaccgtatttcctcaatgttctcagttgggtaggacttaggcttggggagacctatggctgtgatcttcacctctggcagggcaccttctctactcgccaacgagcggaacaagcttacccattggtatccgaactgcataccataatcaacgatgtgtagcttattcttacccaccatggcctgcatgatagtcatctcggagaaagaaagtgccaccttgttgaagcagcaggcttcaaagtaaaggttggaggccttggtgaactccacgacagaaggtcgctctgccattagcaactcccaaagcagactgcccgtgcccacgagccgtgcctccagtcccttggtgaaacattgggccaaccgttgtgtggcatcccccgtctctgatgcgtgctgaatgatctgcttcagcagctcccgtgccctcgagtgattgttcactgacacctcctgcgcacaagagatcatcaacctgcgtatgtccaccacattgttgtccctcgtctccttgctattcctgttttgctttacaactttattattgtctgtggtgacacggagcttgtccatgtccctgatgcattccttatagccaagcagcatcatttcatcaagcgtctcattggccaagttctcctgtggctcctcgatcaccgtcatagcagcttttctggttcttatctccatttgtagatgatcatccctgctatgtctcttcttgacgccgctgtgactgctgttttccctgaccgtctgattcaccagctcatcccttctgaagttgttgtctttgggcaggagcacgttggcctcttccatgcctttcaagaatgtccccgcagcatctgtgcccttggataaagccgaactgagcatgcttttatcaacattgacttcatgcaagaactcgttgcacccctccctgttgccagtgtcagtgccagaggaaggggaagagagaatctgagcaaagggctgctgcacctggagtagcgcagggtgatcactgaacttatcatcaaaatcattgtcctccatgagcacgtgtgagacgtaagagagcatcatctcattagggacatggtgctggccctcgctgctgtcattgggcttctcgagaaggtcagggaagacaggtggggatggtggtgactgctccatgagacccttgctgaagaattcctcaggtgtggtggccatggtgatcaaatgtagtgcagtcagtggttcagtagccaagatgaagagaggacttctaatttggtcaatggttccaacagttccaatgctgcatggatagcggagatgatggctagcgatttttccaatgttgcttggctaatggttccaaaatctagcatttgttttactttacctattgaaaataacaaagcaagaagataccattgtgcaacgcgaagctaaacaagagcaagaatatgctgttgtacaacgcgaagcatatttaaataaagctttacaggcaaatatatgtg

SEQ ID NO: 149273 - DNA, 2124 bp, Zea Mays
gtcccgtttctgttatacaaattgtttacccttttgaatgccttttatattatcttgtgttctttgtaggttttaatcaaacaaaacaaaaaagctctgtcagtttctagggaagaagacattcttgctgaggatgaaataagcaaatctgaaagaagagcaaaggaacgttatactcaaaatctggctgaggaaaacttgaaagcgatacgtgctttctcttctaagcttttggaagtactttgttctatattcttgatgtcttcgaatgatgctattggattattgcaggtatatcaagtaatttcctttgaaaagacttcttgaccatgttgctgtggttgagtcatcgagactcgagagatccattttcctatagctaaggacacgttaagcttttatatttttggtgacttatttgttttggcttctcgagttagtattcgaagagcatatttctctttgctagggttgttgattatagcttcatatcacactcccatcatatcctcaatgatgtcacttgaaattcgacagtgaaactcaatgatttctgtgtgctgattgatgaaactattcctgttggaaacaacttgtcatcaatacaattgttatgaccggcaaggtgtacaatagaaggcccaaggcccagtcggctataggagaaagccatggcgctgagccatagccgccgggttggtagggcgattagggttatctgagagtgaaaataggagaagatttagatagattaagtctaaggtggttgagtcagattagatgatgtattagggtgcctgtgctatataatgcacaggagatgattaataaagatcagaggagaattaatctaagaaaaggattatttccccctctcacctacaccagccagccgccgtgcccagcacggtgccaccagttcgccgccaccgatccaactggccgcgccccctctctcctcacccctagcacctcaggccaaggcgtggtcatcccaacaataaaggaagtttaacattttgtggattgaaattacagttctctttgtgtgggtctattaattgaattgatgattgcaattcagttatgtacttaattagttaattttcatattttccctctttattgtagcctgcgataagtgagatagcttccatatcagacaaaaacgttgttgggaaattcttccttgatgcaataagaaagttgttggatgctacaaaggctgttaatgcagagcctgtggatgatagttcaatggaaattgaagccgattccaacaaaaatagcatgaagaggtttgtatggtttatgatcttgaaatttcttagttatttgtagattttgattgaatttctgatgttgattttaagccttgacttgaataccagggctctacttttggattttgcagcttcattgatgcctggtttagctgcaaagtctatcaatgtgttgttcagttatgtgaaacctgcaattaaggtacatatctggtttaatgcaaattaagattatgtttttcatgtaaccatgaatctaagttcagtttaccacaatttttttgtttataggacagcgactctttgattcaaaagagagcgtacaaggtcctgtcaatgctgctcaaggtctgttaatatttttcagttctccatacaattgtgcacataatatgttccatttatttaatcaatgttaattgtttcaggatgctgaatttattgaaaagaatctggatgtcctgtcagaattgatgatttcgtcactaccatgccaatttccctcgaaacgttacagactcgaatgcctataccaccttattgtttacattttgaaggttgggaaaaagaggtggccgtatcttttttgttgttgttgacaaacatgtatttgtatccgggagagcagtaacaagaactgtacacttgtctatatctgcaggattcatctatggttagaaagagagaaattattagttcattcatcactgaaatacttcttgcattgaaggaggtaatctaaagtttacgtttggttctggaggatttttcaactattagtttataaccaggaatgcttatctcaaccaggtagctggcagaagttttagctgtgcaatat

SEQ ID NO: 149274 - DNA, 649 bp, Zea Mays
agataatgttggcgacataaactatgccctaattctataaacatatcttaccctaaattaataccttggactaactcgtccgtaaacaacaacctaacctacatcataggctgcctaatctagatatcccaaaagcaaagtaaaactctgtttaaactgaactacctcatgtaccccggctatcctaaccatatatccttagccatatgtccttaactcggatgacaactccaagaataaaggccaaagaagaccaaccaagtcaaaggaggataagcatcaactcaattattcaaagatcaagttggatcgccagaagaatcaaggtccagagtttaggatgaagtctttccttactatacccttgccacaacccctacttgccataatcgtacctcatctgacctaatagatggctagacatacaatatccatatgttccaaatcgtctactaattgttatgtaaaaacttgaacaaaactttgatttccaaaatccaatgagaaactaaaattctaaaccaaacctattatatcccttttcttacaaatctcggggacgagatttctgttaaggggggtaggatttgtaacacctcaaaatctcattttgagaattaggtaaaaaaatttccaaagatcttgaatt

SEQ ID NO: 149275 - DNA, 1503 bp, Zea Mays
ctttcgttggaccaagtgaatttccttcccaagagcaggagctcaattaactgcagatcattaataatcctctggaatctccccatcatggccctatcaagattgttgttatttttgtcttcagcccaataaattagattgaaatccccccaactgcccatggcccagcacaaacagatcggaccatgtggagctcttgcagaaactgcaactttttttcatcagattgtggtccataaactccagtaaaccaccagggaagattactatcatgtttgaattgaactgaaactgaaaattcattaccccccgggtgcccatggctgctagaaaggtgaactgatcaaacacatttccaaggacggagaagaccataaatctggatatagattccttcttcgtttcttgcaaacacactatgtcagggcgagtagactcaaccatcatacgcacaacatccctcctagctttcctattaagccctctgacattccaaatgagaatttttgacagattcatcgataacagaaatacaaccaaaacaatgcgaggctacagaaagccatcaagcacacatttcaaggcttaactccctaagcaaaggaacatccaagcattcttgcacattatctgggaccgaccatccaaacaaagctgctagggccttgatgtgtgagttggaaaggggcttgttaaacagctgtccaaattcctccagcaattcatcagtaacagccacctgtgaatttgtgacgttcaacttcatcatgagctccgcctggacctgtctgactgttgaatttaagccttcccttttctttgacaagcgactactgcgacatgggacaaaatctggcagaagctatttaattcttcttttttgaattggaggttgcggaagcaagcagtcaatgttcctggtgatattagccaccagcttcataacgggggtcgcctcctccaactgagaagaaacaacaacaggtcctagatccaaaactggtgtcgtcacctccatctgagatgaaaccgatgtaggtacctcttgcctgccctttttcaatcttgagtacaccttcaatctggagctctcaaggacctgagcatcaagtgaaatttcagcgggagagttcctgtccgcctccaacgacccaacaaaagattgagttgaggtcagccgggggaccaagtcgatcccgacattgaaactgttgcggggcgaaacggtcttggtcagcctctgcaacccaacaaccctctgtcgaggagagcccggcccaagcgatttcagcgacccagccaaccttgtccacatgggccccccatgcccatccatctgcaactgttgcacaactgcaacatcaacagcacaacccacaggaccaacgttcgagcagtctatcccaggacctgtgtccacgtctgctgccgcgagttccatatgaacagccaacttatccctggcaggaatggccacattgctcccaatgtgcgcctcggctc

SEQ ID NO: 149276 - DNA, 620 bp, Zea Mays
gcgcttacaggatcaaatgttggggaagaagtcttaataccaaggattgccctcaacactacagatgtgaagtggcccttcacacttcagcgacgccaatttccagtacgtctgtgttatgcaatgacgataaataaaagtcaagggcaaacgttatcaagagttggtatttacctcaagggacctgtctttacacatggccagctttatgtggctgtctcccgttcaacgtctagaaatggacttataatcctgattgaaaatgaagatggctcgtgtggctcacagactcggaatgttgtttacaaggaagtccttgctgccgctgatgcggctgccacttagccattttctacttggttgttgtagcgccccgtgtggcgtttgtaaataagtaacgtcgtcaagtacctacgcgtttgtttcttatacttttgtttctacgtttgcagctgctaatgtgtgctatgtatatataggttggtacgagagccatgtttttttgtcatgctttgcacatgttgtttcatgcatgggttccgatgtccttgctcttatgttttttcttcctgttttaccttgtagatgggagacgtgttgatcccggagctccagcgtgg

SEQ ID NO: 149277 - DNA, 1033 bp, Zea Mays
cttgggtctgcgttgacatccttatacattcacaagtattgctcattatctatgaatatatatggcatgaaagaagtgtcgcacccccttaatttttctctagctccgcccctgaacatggagcagtactccagtcaacggctgaacgcatactattgtttgcagacaaaacgtactgtttcatctgtaactgcatccctatgttccaaaatcagagtggtgaagacaataatgtgctaaatgtttagcttgccttaggacttaggtaacttcattaccactcggtggacacacattttaggcataaagtgtatgacagatcacttgaaatgatgcccatggtttaagaccttccaatttaaaagctatggaaatagaatggttcaagaagcatgataaaccattcaggtagcaaaatcataactgttacgctctacaaagaatcacatgctcatacaagggaatttctttcaaggttttggtctcttgctctgaaattcacaacaggctaagttattcatctcataaccattagctcagctgattcaacaccaaatacaatcaaataaaagaaaaaagcaagtgaccttatacagccagacttaaccattagcagaccatgaagttgcttggctcctatagaatatagtcccttcaaagccaagtgccaataatgtattgttttgcacaaacgtactgattgaataacatatccctacctacacagatatattaaacaaacttatggtgcacgcttaggactggtcaaaacaaagggaaattttatatgcctagattcttttaggatcaggtggttaataaattaaaaggtgaaagacacatgaagggaacactttgtgggactatagtcgtggccaaccactgaccctcgtgggacgtgatctatcaaggtattgtgatgcacagcagcacatgcccatataacttaatcaggtgggaaaagatatttagctgatttgattagtgtcggccattctggacggttcctacagactccaccagtccatcctca

SEQ ID NO: 149278 - DNA, 1036 bp, Zea Mays
agtcgatgaggtaattaaacaaactcattgttgagccatacactttgattgctcataattaattgtgtgactagattatttttggtcaaacagatagaaactggtggtgctacaacaatattgttggacaaagtcaccgacaaacggaatggatcaccagctatactaattcaaggttctgcttgttatattatactaatgggataacatttttataagtgatatgtgattggataataaactaaaatacaaacttataaacttcactgatttttatggagtttatatgaactagatggtttgctcatgcttgcactgtaatgaagcttattttaaaaaaatcaggcaaatatggatagatgtatgaatttgcaactaacagagtgcagaatttctggttaccatacagatgatggtggaggcatggatcctgattctttgaggcggtgtatgagctttggattttcagagaaacaatcaggatcttcgattggacaatgtattgccaacttttgttctataatcagcaagtcatatcctgaaacccattgtctaacgttttggcatttatcactttgatcagatggaaatggttttaagactagcacaatgcggcttggggcagatgttattgttttcagtcgctgcactaagagcaggtaccatatacctcacttaaatttctttcctttgtgaaccacttttcttttatcaattgaaataatgccaagttattacttgttttcagtgggcctacacaatccattggtctcctctcttacactttcttggtggaaactggacatacagatgttgtagttcctgtggtacgctgtgtgattttattttttaaactgcacttccataatttctggtgatatattttctcttcctaggtggattataaatgcaatctaatgaaaggacaaactcaacgactggagcgtcatggttcggaacaattcttctcaaatttgtcagcattgttgaaatggtccccttttgcaacagaagaagagctgatgcagaatgtatg

SEQ ID NO: 149279 - DNA, 1447 bp, Zea Mays
tgcaagttcacaaaacccaagtgcacacacaaacatgaatacaccaatcaccctacacctacatcatcatgctgatcacctctaaaagtccccaccaattccaagccactactgccaagtgcaactgcaaagtttccatgtttacattagttctcttgactgacgggtccacggaatttaaagaaaaatatgttaaattatcaggaatacacggctcagatacatgagttttctccgtctactgttgtctaaacatattattatacagctgcttgacaatttaaaccctagaaatgaggcaatcacgagcatttagaagcatgactgatccattgcagctctttgtttttctgtttgtttatcccatttgcaatatttagctaacaaagggcaaagtcacaacagctaaaatggccccaacaatcagtaaaaaattgctgatccaaccaaccctgcagagcatgcaacgcaagatgtgtattgaaggatatgcatggagggtatgccataaaaaaatcaaagacagcatgcacagtacggtacagacattaggagaagtaatactttttgggtgtaaaacacaatacttgtcaaaacatatttggaatgggatcaactttgtctatttgtgaaagtatcaagtatggaacacctgtcagaagtcaaaacaagataaaaataaccccagtggagaagtggaaagatatggccttctaataataggggttcgattaaaaacactcagcaaattaagtagcatttgtaattatcacgagcaatggtgaaccaacgaaaatcaatgtagtcagctgtatttcaaatatcaaccatcagcattgtccacaagaaatgctcttaattatctcccatctctctaagagaatatgtgtttgatctttacggaaatcgactcaactatatgaccccacattcagacagaatttacaaacaaatgtaaaatcaaatatcccgccaaaaaagtagaaatagaactactggggtacagaaacatttgagaaacccaatccaagtcatacaacgaatgtcggctgattggcccatctcacatcaaatacagttcttcgtttttaacctcgatcacctggcctgaggaatcacaagtggtttcgccattttcttccatcaaatgtcagccgaagcacatggcgcggcatacagaaatccacaagcgtgcagtacaggtaggcatagtgtgcactgtgaactgattgtagatgggcacgtgctgctataattcccgattgcaaacacaaggttcatccagaagcacgaacggccaactagttttaccaatatgggcagggagccccaaaagccaatccatatcacgatacgctgggcttcttccacttccttatctatatactgtagtaccatatcaggatcttaccaatcccgtccagtatgactatgatctacagccacg

SEQ ID NO: 149280 - DNA, 2375 bp, Zea Mays
cctgctactttgtgtagatcggtgcaactaagtatataagtgggccccacgtcaaaagctggacaatagtcaaattaaaacctcaaattcacaccttaaaactttagcaaagtcaatgaaatgcttttggaaatgacttgatacgattgcccgctaattttgtgtataccagtgtgacaagtggttttgttatgaaatgacttgatcactggcagcaagaatcgtggtgaatctcaaattagaacagatttacggcattaagataataaatgtgctgaattgcatatcaaatgtttttggagttagacctagtaaaatatgatatgacaaataatcactaaggattataccatgctatcatggcaaatcacaagatcatgaggtagttgcaaaaatacagaactggctaaagaactactaactaaagatacatgtgtagttgcaaacatacagaactgcccaggaaacaaatatatattgggatggaaaaatcagatagataaatttgaaaaagccagctgaaaacaccatgcagcagctgttgttgcataatgcattagtcttgttttccccccctctccaatgcataatcacataatgtataagtcctgatatcagatttgcttcttcctttcgacatatgaggtcaggcttgattgtatagttaaacaattaccttatgggaaaaaaatccaggaacgaatgctatgttccattgccatcctcatcaagttgttgtgcaaatagtattgcaggaaagcacaaagtcaccaaaaacccccacaggaaccttttccactcctaaagtgatggaacctgttggtatctctaacagatatctccctctcctcaaggaaagcacacataaagtcaccaaaaatccccacaggaacattttccaccactgaagtgatggaacctgttggtatctctaacagatatctccctcccctcaaaagatgatataaatttcattgcctcatggcagtcgccacaaattcggaggttctttatcacccgaagggttgttcctgggctagtgcttatgagtcccaaagcgacagctagcttctcactgtgaacagcaagaatatcatctttctcttgttcctccacatcatgtaggacaaaatctgtgcttggtacaaagcctagcttcctcatctgaatattaagctggtttattttctcaattatcgcagtcatcatagggtgtgaatcatcaccagccaacaacatatgcaccttgttcttgatctcaatccagctacagcctttttccttcttcaagcctacatccttcatcatctctctaaccctattaacccgatcccacattttcttagaagcataaatgttagagagaaggacataattaccagcattttctggctctagatgaaagagcttttctgctgcaacctcagccagatccacgttgccatgaacccggcaagagcctaataatgaaccccaaatataagcatctggctcaaagggcatgtcacttatgagatcatatgcctcatcaagcttgccagcacgtcctagaagagtaaccatacatgcataatgttccatcctcggagaaacaccatactcattatgcatttctttgaaataatgacgcccttcctctgtgaggccagcttgcgtgcaagcagcaagcaagcaggtgaaggtgaccatgtcaggcttttgtttgcacttcagcattgagtgaaacatccaaactgcattcacagcctctccatacatagcatagccaccgatcatcgcattccatgacaccacattccgagataccattgtatcgaatattattctcgcatccttaaccctgccacactttgcatacatgtccaccaaagcactgctcacataaacatcatggagaaagcccttcctgagagcaaaacagtgcgctgacctcccatgcatcagagctgcaacattggcaaacgctggcagcacacaagggatcgtgacagagtttggttcagtcccttgtgcctgcatctccctgaaaaactcgacagcttccaaatccttaccattctgcacacaacaagcaacaatcgaggtccaggacacgacattcagctcaactccccggtcaacaaactctttgaacaaccttagtgcctcgcagacttgcgcgttccgagatagtcccgcaataagggcattgcaagaagcaacatccatgtggctggactcatcaaacacccgaacaacctctgcagcctggccgcacttcccgtacatgtcgatgagggcggtgaccacgcaggcgtccgccctgcaacctgccttcacagcgtatccgtgcagctgttggcccaccgaaaccaaaccgacgtccccaacagcag

SEQ ID NO: 149281 - DNA, 519 bp, Zea Mays
agctgtggtagcgagccaaacgatggtcatgatcactcgactgcagatcagatcaagcccaagcgtccgaagcgccacacgctgaatccgcgctacatgctacacctcaatccatcggaatcgaggtaaatccgccgggcccttctccggtctgcatcaccacgacccgaatgattgccgtagcggtgactggttgctgtacttgatcaggagctctcaagttttggccgcttctacctccaatctgcaccttcaagctgaggtcgaaggctacacgatagatcggttactcgtcaaccacacgcgcctttcacgtcccaaggaacatgctggctctggcatctccagaaatagatcgctcgctggttttgaggacgagaagacgtacatcgcgaaacgtttgcgggagttgaggaggaagcttcgtgaattctcaaacaacagcaggcgtgttacaagactgaagatgttattgtctgaactctgaaattagaaggctaaagaagagatttagtgtgc

SEQ ID NO: 149282 - DNA, 305 bp, Zea Mays
tgattattggctgataaaaaaatttagaataataagcttgtctagatgcacattctcagtttatgagtacaatgaatgaaacaaatatcacataaagaaaccaagtcgagaggagcaaactcaagaaattcaatacaacagttaaactagtacatatagaatatactcagtggtgcatctagtactcagtggctgagaaagattagagcaccagttgaacctatgatggtgagatagcactcactgatgcaattaaagacttggtgaagatgaagcccaacagatgaagcacactagatgaaccg

SEQ ID NO: 149283 - DNA, 490 bp, Zea Mays
tgagcgtctgaaagtactgcagactcttgttcccaatggaaccaaggcaagctaacaagcagtgcttgagagatcgacaacagaaataactcgcagtagttttttttaagcagaaaggcttaggataacgactagtcgttctaacgtttgtgcatacggccgtgttttttcaggtagatatcagcacgatgcttgaagaggcagctcaatacgtcaagttcttgcagctccagatcaaggttggttcttgcaaaattctagcccctagccaaaatcttgttgctggcgtgcgctgaaatttcatttcatgtactagtagtattcaaaactctttcgttatgcgcagcttttgagctcggatgatatgtggatgttcgctccgatcgcctacaacggggtcaacgttggcctcgacctcaagatctctccaccgcaacaatgatctacgccgatgtgaagatgcatggccgatgttcattgtcaatgcagc

SEQ ID NO: 149284 - DNA, 602 bp, Zea Mays
cattccaagtggtctatggaaggccaccaccatccttactgtcgtatacgcaaggaacaacagccacagatgcagtagatgatctattaaaagacagagacatttttctctcggatgtttgagaaagattactgcaagcacaggcatatgcaaaacggcactatgatgaacaccatcgtgagctagaattccaggtgggtgactgggtatggctgcgacttctacacagccaggcacgagcactagttggcaacaagaagagcaaactgggtccaagatatgcaggtctgtttcaggtgctggaaagggtgggcacggtggcttatcggctgtaacttccagatgacgctcgcatccataatgttttccatgttggcttgctcaaacccttcaaaggtgatacaccaagtgctcctctagccctcccagagatgcaccaggggagggtcctgccaacacttgagcgcgtgctacgcgcacgactacgccgccaagaatggcaccttcttatgcagtggtccgggtcttcagcatcagaggcaacttgggaaccactggctcggttcagagaaagctaccccaattttcagctcgaggacgag

SEQ ID NO: 149285 - DNA, 468 bp, Zea Mays
ccccaacgaccatcagttccaatcccagcaacatagccaacagtgccagccataggcaatgcagcgccgcaacgaccattcaagaagctcacacctggagagatggcagaacaccgaaagctagggctttgttacaactgtgatgaacaatatgttcgtggccatcgatgcccccagttattctatttggaagtagctgacttcgaagaggatactgccatagaggaagttgatgaggagccagaaccagttatctctctacatgctctgacaggcatcagattagaggacaccatgcagattcaagtaaaaatgaaagacaaattgctcactgcattactggatacaggctccacacacaattttgtcaacctcaacactgccttgtcattgcaattggaagtctgctcaagccgaggtaaggtagttgtatcaaatggcgacaagatcgactgtcatggccttgcc

SEQ ID NO: 149286 - DNA, 666 bp, Zea Mays
attcggtcggctattggaatggtgtcccaagtgcaaaccatgaaagtcaatgcatccaacaaccggaatacaatagagaataatgttttgccataaacagcagtaattttttccaccaagattttcacataaaccaagattctaaacctcaacccctgcatgtccacatgtgcaactcctacaacttcaccaatcatcagacaccccaccatagtgtctccttcgctaagggaataaggtatgtaggggcctagggggacaccagcaaagagaaaactccatccagatggggaacatccctgtacctcaaaatctagaggacgcgtgtgtccactcccgatgctctttgagtccatctgtgtgggcaattgggcatcctctagacatgtgaacagggagcaggtgggcaatgcagtggcgcagtagggaggtggcgcctaggcaggggcagcgaacagcacagatacaggtcaatgctgaggagggccgtcgtcactatgggcaggtgggtgggaggtgcaccaccaggtggaagcagctagggcaggctgagacgcccatagcagatggaggcgggctggtgtgtacgaacaaaggaagggaggaagaagtaaaaggtggctgatatctgcggcccacattgacggcaaccaacgaatccaaaac

SEQ ID NO: 149287 - DNA, 278 bp, Zea Mays
cgttcttaccttatcactttctggcagccccttatcttgtaaagttggataacagagtgcaatatatataggaagttggggatcaacgaaggttgattccataattattagattatgcatgcatcatatttaaaactatactaatagatcttcccctcttatggagatatggcacgcactaagactacccagcgcaaatcgactggacctcttggtgtgccacgacatctgctagcctccaggcacgaagaaagtagtagtggcagtaatgatccaat

SEQ ID NO: 149288 - DNA, 962 bp, Zea Mays
taatgcataaaaacctctgtggagaaaagtcaatgatgaaacatataacttagttgatattacatcgttaaaaattttggatgagaaaacctcagcaagacaaaactcatacaaagaaaagagtgtaatatgatggtccaaaacaagtcaaatatcatggagaattactccctctgaactttgcaagcacttaagccttctcataccaatcccttcaacacatttctggaacatggagtatggtagagattttgtgaataaattagcaaaattatcacaagactttgtttgcaagatgtttatatctccattttcctgaagttcatggggataacaatttaggagcaatatgcttattaatattactcttgatataacctgtatccatctgaacaacacaagctaaattatcttcataaacaatagttggtgagtcaatagaaccaataccacaagttgtgagtatatggttcaccattctacgaagccatacacattcacgtgatgcttcaaataacgaaattatttcagaatgattagtggacgtggtcaccaaagtctgtttagaagatttccacgagatggcagttccaccttttaaaaatacgaatcctgtttgcgatctgccgttgtggggatcagataaatagccaacattggtatacccaattaaactaggatcattacttcttttgtaaaagagtctgagatcttttgtgccatttagatatcgaaaaaaattcttaatgccaacccagtgttgttttgttggagtagagctgtgtcttgctagcaaatttattgcaaaagtaatatccaaccgggtattgttagcaaggtacatcaatgcaccaacgacactgagatatgagaactctggtcccaatatctgttcttcatcatcccgtggtctgaatgaatctctctctaaatccaaagatctaaccaccataggagtcttt

SEQ ID NO: 149289 - DNA, 419 bp, Zea Mays
aagcagtccaccagtccttttacatttcacatccccttatatataggggagagggaccctcgccggctagtatagcctgaggagctcactaggccttttcattttttttcaactcccctccgtgcttccgctgtcactgtagtgcatgcaagaggagtggtaaaaagagacgttgcctataccttgagctacctctcatccatcagagctgagcgagacagggagtgtgtgtgtgatgcaacggatggtgtccatcgtcctttcctatgactaggaggagtcagctgctagctagtgttgcgtcgtccatcgcatcacctgcttgcttccgttgccggtgctttgcaatacatacgtcttgcaagagctgagctaagctgagctgagagacggcttgcatttggtgttgtgtgcctagc

SEQ ID NO: 149290 - DNA, 601 bp, Zea Mays
catagaaggtcatgtatattaggaatgggccatgcgcacttaaatccgttgattgaggctcggttgattgaggcctcctgtaatcttggcatgtcaatcacggcattgctgtcatgtaatacaccctgctgtacgcgcatatatatacatgcctatagccccaagagggtagagtcttttgcaccattatcaacatggtaccagagccaaggatattctgactacccaccacaaatttttctcctcctcctcctctccacctccatctttccatggcttcacctgtccccatttcccaagccgtcacaatcagactgactaaggccaattatctcctatggcgtgctcaagccctcccctacctccggagctcaaagctgatggggtttcttgatggctccaaacctgcgccggctacaactgtcgtcgcatccacggttgacggcgccacgccaatacccaatccggagtacgaccgctggttcgatcaggaccagcaactactcagtggtctcctctcgacgatgactgaggatgttcttcgggatgtcgttctcgccaaaacttctaaggaggtatgggactccctccagaagaaatt

SEQ ID NO: 149291 - DNA, 798 bp, Zea Mays
gttaactaattcaagttgagcaatggttgagaaacactgatcaatcggctccaacccatgttcttgagttacgatgtctgaaatggttcgctaagtcttctaccgtgattagccaactcatgttaaataggagtcgatttcgttaagtgtttgttatatatgtgttgtctcggattgcgataataagaggcaagccgacgtgtaggctgtatagcggcctatattgttgctctagttagccgaattgttagatgacttggttaagctcgtaatcacggtgaattgcttgttgtggtctaaatgtgtatggttacggtcgcgggtaaaaaaaagtagtagtgctcatgtgatgtctaatttaaaacgcaaattgttgggtgattatcgtggagaatgcgttgttaattggtcgtagtaattttagtgcactaatgatttgaataaaatttgcaagtcgaattgttggttctaatttgattgtcttaactcgaacaaatagtaaagcgttagagtaattcaagtctctcgagcgcggcgattcttgaattatatgtgagctgaaatttattgattgctgttttgggctgcacacactgttttagttgtgctgtttgtttgatgaaccaaatcatgttttctgtagaaaagtcatatagaagagttgtagataacattattatattgcttgtactaaaatttgacagtcataaacctgatcgtttaggagttatgatttttacaaattcagtaactgaatctgtccaaattctgtacagatttcagaaactgcattgtttg

SEQ ID NO: 149292 - DNA, 522 bp, Zea Mays
gaaaacgtacccatcatcacaggctctccttccggggtggtagccacttgagtatagtagaccaatctagttttcctttcacctttgcctaactgagtgcttagcacaattcccctgccttgagatgtacttccaaaggccttttggaagtttgatttattttgcttcggatagggacaatccttgatgaaatgtccagacttcccacagttgaagcagctgttagatgaactgggtagggctgggaaacgagtaccaggggcactcggctgaatattttgagtaggggcagcagttggacggatgaagaccggttgcttgaaaggataggaggatggacgaggaaaagagcgatttgggttaaagggacggaccactagccttgaccgcttttcggatccctgagaggatccctcacccccttcacatccaaaccattttgtctttccctgccccgaattatttgcctccaccgagagtgttgtgctcacgaccctactgaaagtgagatctagacaggtg

SEQ ID NO: 149293 - DNA, 373 bp, Zea Mays
cgcggatgctcggagatgcgtgcgacgctggcccagacggacccctgtgggctgtggctgccaagaaatttgtcgacggaattttaggcaaccgaaccgagtagtaagtagctcatcactgtcgtaaaacatcaccacgaaagcctggccaaaagggcacgcggggcgggagtgctccaccaaaagcagatcgccgccggaccataccctccctatcgtatcgaccaccgctccctccgccagccgagccggggaccatgcagttcgtagcagctacgcggacgtggtggggttgccgactccgccgaggcagatcgcgcgtgcacgcacgcatgcgcggccacgcgtggtctgcgtgtgcgttgccgccgtg

SEQ ID NO: 149294 - DNA, 1538 bp, Zea Mays
agctgaataaaaatttgcatgacaatagaatagtccaaaaagttgtgtacctgtgaggtataaatagaatggttagctcatgttaaatggttgacataaaagtaatacaattgtaaaaaaatacggaacttcagtatagatacgagtccttcttgcattcctcgtccaacgtataattgtggctgcacatgtaatcatcattagggcttaataacaagatatgaaaaccatcaggtgaagtacaaagaggtataacctacgtgaaagcaatataatcttttgtaattttaaatgtgctgaagttatctgatataaaggacatgtttggcttggctccactccaccctggaacaactctgctccaaaaatccaggaaggagcaactctattctagagtttgaggcattcggcaagaagattgtaatcactaatcagctccagaaatgtgttttttgtgtgacaagacatgtttacccttggtttggatgtttatatgtttactgcggataacaagttatatataaagaatgtcattttatttcccataatccagatgatttatctataacatttcgaatgtatgagtgaacacaattgaactattctttaggacaattaggttccatgtaggacctagatatccatgacggttggggaatgctacatctacaacgttgtactagtgtcaggccatatgtactagaactaaaaactatacaaattcatgtactagtgtccttcgccctacccctgacgcatcgcccgatggagggaggaggcatggcgaacggagggaggaggcatgacgagtggcagaggaaggaggcacgacgagaggaggaggcgtgctggaggaaccaagcggccaccgaccgagaaggtgcggggaggagaagagaaaggttgcgggacagataaagaccaacggttttttatgtaacgagtggcagcagtgggtaaatatttgtaaactccggtactccagttttttgtactacagctccaaaaacttcatagagttttttttctccagagttcaggtgtttaggtagaaatttttactccagcttggaattctgctccagagctatgccaaacaggcccaaaataccccaatgacacatttgaatagttttatgcaaatatatatatattgttatactaaatgacaagcttaaacaaatgggaagaggaagaacacacctgacaccaccatgacaacacattgcaaattctccatgtagatgtctctatgtagttggtgacagctgggacaaaaaataatgccataccaaccacattgcttgcaaggtacaatgcaacaaccaccatatattttgacaagcagaacattcccaaaaaggttttagagcgtttagttgagcaagccttatagttttgagaattagcataaaatacaggaagaataatcgcccatgccaccaccagagagagttttatagtaaatctcagtatctggtcaactctcattgttcccttggttctccatgagaaagcaatgtcaaggatgactgcaa

SEQ ID NO: 149295 - DNA, 501 bp, Zea Mays
tggctttgggtaggtttaccaatgattgatcaggctcataatccactaattaatagttttaaatttaaaaatgcccaactgagtgtaccaacagatattttaaaaatcactggcataaatatttaattcagataacaaatatgaagcatattatagacataatcaacacccgaagagattaaaaacagcatgtcatgtttctgaagttgcaagcattggaaaatcatgttgattttccaaggagatatctcaaatatgtcgaattttctcatccccactgtcattttcctaacatcaatacaacccgaaggggcgaggatggctgacggcagcaaatgaatctaatgttacttgaacccttcatacatcaatgcatctggtgcggaaggggcgaggatggctgacggcagcaaatgcgaacgcggggatccgaaagcaagggtagaatgatcactccggaagcaaaaaactgaaaagaaaataaaaagaagttaaaagtac

SEQ ID NO: 149296 - DNA, 562 bp, Zea Mays
ggctaagctagtgatacccttgtataagtcgtagtcagtgtcgaagtcttccatttcttgagatcaggagaggtcccgagagcggtgacttccatcatggaccttgaagcagtcttctggacagggattattgagcgcgtcatggtagcagtcgagggtatgttctttctgtggggaaagatacgctgttcttgtgtgttacatgcaaggggagtgggtgatggtgagttaaaaatagtgagcacacggtgatgctaataagttatttccctgctatttttcctgcaatgttttttggtggtagattatcgttacaatctccttatttccctgctatttttcctgtgattttcagcacgatgacacatcttggtggtaatgcatccaccgccagcatagacaatgatgtgctggacagaagcagaaacttttacgagagaagaagggaaggcaagaagatggtagcggtagctattgtaacccagtaagtaagcaaaaagaaaagcctggctggcctgcattccctccctgacgcttctgaaaaccagagatgaaaggctgc

SEQ ID NO: 149297 - DNA, 272 bp, Zea Mays
aaacggtccagatctgcgatcaaaggcaaggccacttttggaaccccggacctgctaagggcatcagccaccacatttgccttccccgggtgataatgaatggacaaatcataatctttaatcaattcgagccaccgacgctgcctcaaattctgctccttctgagtgaaaatatacttgagacttttatgattggtgtaaatgtcacaagactcgccataaagataatgcctccacgattttagagcaaagaccaccgcggccaattcgag

SEQ ID NO: 149298 - DNA, 469 bp, Zea Mays
cttcatgcttgaactagacaagttcgtggtggttttcatcaatgatatcttagtgtactcaaagaatgaagaagagcacgccgatcatttacatatagtgcttcagcgtctgcgagagcaccgtctttatgccaagctgtcgaaatgtgatttttggctaaaggaaatcaaattcttgggtcacactatctctcaggcaggcataactgttgatccgggtaaggtgcaagaagtgatgaactggcagccaccaccaactgtccagcagattcgaagttttctgggattggccggttattatcgaagattcattctggatttctctcgaattgtgaagcccatgactgaattgttgaagaaaggagccaagtttgattggggtcagaagtgcgaagatgccttccactccttgagacagcatctgaccacagcaccagtgttagcgcaacccgacaatggcaagccattt

SEQ ID NO: 149299 - DNA, 420 bp, Zea Mays
gcacgggcaagtaaaaatctgggcataggatcatctcgagctcggttgcggctaagcttgccataccccccagctcgtcggtcgctcggataactctcactgccgtcgagctgtcgccgttgcgcaccacatgccttagcgctggctctcgtcacggtgaatcatgcggtgcatgtccggtgatcaccggagcacctgccacggtgaaaggccacctgtgtcaagcgccagagcccttttcccctccggtcgccagtgcgattcagtcaaattgatcaccaccgcttgagcagcctataaattggagcctcagcatgttccgctagggaattgtgtatccagtaaacccactctcagctccgatcatctcccacagcttcccaatttgggatttcccccaaaacggttgaagaacaccgc

SEQ ID NO: 149300 - DNA, 376 bp, Zea Mays
atcaccgtgagcaagcgggtgttcgacgcgcagggggacgactcgaacaggtgagctaggtgccgcttggtttcccttcttgcagaaaagctatatacgacacatatactgcatcaaatttcttctgtctaccaacatattaataagctaatatgtgcaatattcatatatcatctgcgagtatatatcatatatgcgtgctgcgagcaggtacaaggacatgatcgtgtcgctgatgaccggcacgggcctgttcaacatcagcgacttcgtgccggcgctggcgcgtctggacttgcagggcgtgcaggcgaagctgcggcgggtccaccaccagttcgacggcctcatcaccaagatgctggccgagcacgcc

SEQ ID NO: 149301 - DNA, 499 bp, Zea Mays
gttcacgaaaattgtccacgtgtgatgatttagagagtgagagaatatgcgatccaaaacaaatcacacgttgcgcctgcgacagaggagaatcacacaaacaaaacacgacagccgttcctaccattcaccgactatcatgaaagccgcaccaatatgcaatctatcaatcgccaaaatcctcccctggaaaaacctacacataagaaacgcacaatgccacatcaagcatactcacctaaacatgcaggaatcttctggcctccaaacgcttacttcctaggatcccaaaccccgcagccaaggagccgccgccacaaccaagagcgctccccgatcacttctgctgcggtcctgccggcgcggccgtgaccatgcaccacgactcctaccagccaaggaaaccaactgtacgagcagacgccgggccgcgacacctgtaatccggcaaggggtcgggggaggtcgcgggatgcatgtcatcgtggcccgtgaccta

SEQ ID NO: 149302 - DNA, 304 bp, Zea Mays
ctgataccaccgagagccacccgatctcgaacaaagtgcaaatcaatctcaatgtgcttggttcgctgatgttggatggggtttgaagacatgtataccgcactgatgttgtcacagtaaaccaacgtggcacgacgcaacgggtgacgaagctcggccagaagctgacgaagtcaggtggattcaacaacagtgttggcgacaacacggtactcggcttcagcactggagcaggacacaatcatctggcgtttggaggaccaagaaataaggttatcaccaagaaaaactgcaaagcctgaag

SEQ ID NO: 149303 - DNA, 369 bp, Zea Mays
ttctcttccctttcttctgcacgcaagcacccaaaccctaatgtaagattcagatttgatataattacacttgtataatgcctaaattcgttttttgcaataattatccaatgtacatgtttacacccatgtagtgtactgggttcgtcctgcacgcttaagatcgatcttggttgacgataggacttgttgtccaggtgcttatgtctctcctcccctccctcgcaaaaattgtgcgtttagtggaaactcccttgctgattttttctgtttctaggaatgtagtagtagcttgtgaattgagtgtaggtcttgctgatttctctgtttcttggaatgtagtattagcttgtgaattgagtgtaaaag

SEQ ID NO: 149304 - DNA, 321 bp, Zea Mays
aagcaattgacccaattccgccagagaacttgcgcagccccaaatcccctcctcctctgttcttgctccgccgcatgggactccaccgtggacagcactcttcgggttggtagtttctcaattactctctgttctagctcgtgtatagtctcctattgctctctgtactgagcaattggaatttggccgaagtccatcaccagaacgcgcccttgccttgtaaaacgccgccgtgaccccctcaccgtagacccgctcttcgggtcttgttctgcccaaaccaaagtatgtccatggaccttggtgaacctgtgaaccttt

SEQ ID NO: 149305 - DNA, 572 bp, Zea Mays
cacgatcgttgccacgcctaggagcgcgaggaggaaggagcagagcatgatgccagactccaacacgagaacccactccttccctggaatctgccacctaactttgctcaagccctaaacacgccgagtgatgttggcagggtcctagcttagatcgccaacggcttgccatgtaccccgaacgcggaaggctaccgacagattctcacctagccgacaaatcatcttattcccccactcattcggcaccggccatgcgctacatcatcaacagttggcgagacacgtggagtaacatcaatgcttcgcgcgatctacgacccgaaagtgagatgaggcggcgagaagagtacgacccataaagtttctactattcgcccacatacaattgtactttcgcatactactaatggagcaatcgacttaagtcagagatcgtcttaagtcagtgttacatgctcacgcttacaaacaaagggtgcatactatactcgctaacggagcaatcgacttaagccggagatcgacttaatttggtgttacatgctcacacttacaaacaaagggtgcat

SEQ ID NO: 149306 - DNA, 408 bp, Zea Mays
cggagcaatcggcttaagtcggcagtgacttaagatggtgcaacatgctcacgcttacttaacttagggtgaccactataccctactaacagagcaatcgacttaagtcggtagtgacttaagatggtgcaacatgctcacgcttacttaacttagggtgaccactataccctactaatggagcaatcgacttaaagtcggcagtaacttaagacagtgcaacatgctcacatctactcaacctagtataaatatgctacgatcactcatcttatggcggtctctatgcctcgaaaaataggaagaagtttcaaaactagcatactgtatttacttctgcaatcgtaacaactgttgaattcaaacaacagaaaaacaaaaatagcattcagtaccaagaacacgttc

SEQ ID NO: 149307 - DNA, 296 bp, Zea Mays
gtggccaaaatgtttcctgagcttaatgcatggggacatgcacaatctgaagagggggcaggtgtggcaatccctggtgataactgagtcggtaagtccgtagtgttggcttgccagctgttttctggttgtaatccagttggaatatagggcttatggccagtagattgtagtaatttggcttatggccggtagacataaaagggacagtctgtaaccgtgtgcgaaacgagaaaggaataacagaaattccaaccacttcttacctctcttgttctggaggcgagttcctccct

SEQ ID NO: 149308 - DNA, 449 bp, Zea Mays
cgggaaaatgctcaaaccattaccgttactgtattttttgccgaaatcggaaacgggaacgggaatgttggacggacaaacgaaaccgatattacgagatatcgggaacggaatattttcaatcgggaacaagtcgattatgatcgggaatcggtaacacaaaaaattgcataccaagtgcccaacagaccaacatgtcacaactattacttatagactaacaatatcagttattcagtttaggaattagaactaccagtaccgaacagcagagagtagtacacccaagtgcccaacagcagagccatcggcagcaacaatcggccagcagcaatcgcttcctctactccgctcaggcgctcagccaccagccggtccgccgtccagccgcaatcgacaatgccgcacgcagaggagagagaagccaagggcggcacggcacatccgca

SEQ ID NO: 149309 - DNA, 642 bp, Zea Mays
tgactgcggacggtccggccctaaggcccggacggtccgcagtgcaatagaacaaagtgtccacacaaatggtcagacttcggactccctctggaggatcgcggacggtccgcccccgaggcccggacagtccgcacgtccatgacttcgcaattttcaaacatgcttttgaaagaacttttaactcacgaaatgtgaagcgcggttagtcctcatgcaaatgcaactacttgatgctctatgaggcactaagttttacacagatctaagccattgacccctcttaatagtacgactatctagcctactaattcggtcaggtatcttctctaaacacctcaagaccggcaaaaagaaacctatattatacctttcccttcatctgatccacaaccaatgcgtatgattcttcaacatttcctgttctatgtggtccaaccctgcattcttatttctccaagaatcgttagtccacaagcagttgttattaattaccaaaacattaccaaaggggactagatgattcacaatcttcccctttttggtaattgatgacaacactacataatatattaaagagaagtttagtttatccaaatctccctcatacctaaggtataagatagatcttggagatgagtt

SEQ ID NO: 149310 - DNA, 293 bp, Zea Mays
ggaggacggagcggtgccaaacttccctgtgcggcgagaagacggaggggaggacagaggcgatggccggaggtgactgcggtgaagggacggcggaaggacgacgaagcagctgacaagcggggccactctgccagagggagcgagcgcgcgagagagagagggcggctgacgggtggggacgctttgctagagagagggaggcggggtgcggagcgggccggcgcgcacgcggaggcaggccggagatgggccgagagaggaggagcgcgggcgcgagggaaggggaggcc

SEQ ID NO: 149311 - DNA, 489 bp, Zea Mays
tatatttgtgtggttgagacttgtatgtgaatgagaatgaacaatcatgttttaagacttatgtgttgtgtgttataatttaagagtggacatggatgagtgtatgaccaattatatgtggataagattgtgttttgtgtacttttgtgaatgagacttgtatgtggatgtgaatgaacatctgtgtggttaggatttgtttattgtgagcttttccgattacagttaccgtttcccgatcaatttcgagctattttgctcggatttatccgttttcgatataccggaatttaccggccgttatccgtttccgacttttccgtttaccgattccgaccaaacaaaaaattatgcgggtgaaaacggtgagaggttttttccgaccgttaccgaccgttttcatccttagtagcagctatgttaaagaatcgcctttctaactacatgctctttatgtcaattacgagataactttatcatcttcatttt

SEQ ID NO: 149312 - DNA, 297 bp, Zea Mays
gtattcttgatatgtgttagaacatgttaataagaggaaggttcacaaaccattgaaaacattcagaatgcacgcatcattcaatcacagttaacacaagggtattccatcggaccatgtgtgtctgccagccacctgagagggtatttctcttgtaaggttagctagcacttgccattgatcaccgctagtccactacagcaatcccacaggcctacccactgtgtattgagaaacaataaaaagcaattgctttggtttcagttcagcctccagatgactaaagcaagggttctt

SEQ ID NO: 149313 - DNA, 438 bp, Zea Mays
actgggttgaaggaaaggggagacttttaaagggtaagttcaaagtatgcatttaggtaggagacatcaatatcgcaagggtcaaaggcgataacagacaacggtatgagagaaaagatgaaggcatagaagagtcagtgacataattacaacgaataatggagttacaccgaagcttacacgcggtgaagaagaggatatagccaagggtgaggtaagtaaaacaccgctctcaaactaggataggatattggagattttagagaacggacataatgtagttaccaaggtaggataaagagatgagaaaggtaaaagtagtatccaacaggagcacaacaaaggatggagttgaaaactcgcaagcgacaaggaagatgatacgaccaagggaaaataggtaaaatacaactataaaattgagatggaagagagaag

SEQ ID NO: 149314 - DNA, 668 bp, Zea Mays
gcttgccgccatggtcatctgtgtgatcattccggtggtaattcgcgtccctctccttgcatcccttggaaggttttctcatcttggtatcatatacctgcacaaaagtttgcaacagtatccactagggatggagaagtaacttcttgagtgaaaagaaaggaaggaaattggacaggtcataggtaacaaagaaagggtaaggagcaaaaaaaaatttacctcactacagggtaattctgtatatcctattaacaatttagcgctccattctttaaggaagttaaatgcattttagagtacatcaacaattaatctcagagacacagagtgcacgagataagaaaaaatggaattaacaaggggggactggcagcagaagaaacagaaagcacgaaactctaatggtgtactaggtaaaaggtatttctcgagactatctaaaggcagagaaatttcctcaagactatctaaaggaaaccagtagaaaccaaacgacaagtagaacttacagtgatttttgctaagtccaagcgcagaaacgtttctacacgataggagaagatgattaccttgagcccgttcctcttgttcgggagagacggaagatcgggagacgccgagagcttttaatacgttagggcatgtacagtgcagcaccaaaacgc

SEQ ID NO: 149315 - DNA, 697 bp, Zea Mays
agaatacataaaagaagagaattagttctaacccaatttgcactctagaattgagaaaggaaggaaagaaatactatataatacaaaagaagggtataaatacaaactttattcataggggtaagatcaaaatctgcctttaagtgagtacaaaattcacatgtatatttggagtttaaattggaaatttaaaataaaaggggaaagttaaaccagaaaatggataaaggaaaacttcatccgcgggccaactttcatcaattcggcccatcaggaaaacaactgcgctcggcccaactccctttactgcgcgccccgactcactgaccgcgggccccagacttcaggctcccgttcttctccgcgtcgtgcgccgtctctgcctgaggactcgggcgcactgagctgcctcgccctcaactgccgcgcgcaacgaactccgcaggattcgggcgccactttccccctgttgtcgatcccaggtgggtataagaccggacgccgaaccctaaacctcaccctcctctcgttacacggaaaatccagctgcttcggggagtttagtgtcgtgttcgccgccggcgttgacctcacccacggctggcgtccgagagtccgtggcttgacggggtgcttcggaggcttgccggtggatcacccgttgacgaattaggggagggaatcaatccagtggcgg

SEQ ID NO: 149316 - DNA, 1290 bp, Zea Mays
attactgtgcttccaaatatccaaggccactagggtaatgagtgaattaagcccttttttcatctccttaggcacatccttgattgccggttccaccagcttgaaaatttgctagcagaaaccggactgagatggggctcaacccaatttctgaagaataacaaaccatacctgtctagcgaagatgcaagagatcaacaagtgctggatggaatctcttgtgtgatcacaaagaggacaggtcgctggatgaggaaatctctttgctagatgatcaccagtcgaacatatagttgattgcagggcaaatgaaggacttgcaattttgtgaagcccagctcttccaaattctgctcgatggagcaaagtgaatggagccaagaaagtaagcattgtaggctcatttgctagaataagtactagacctgctgagcttccatcggtgctgatcttcaatcccctcgcaacatattatcaaccaaatcccatagcaagaggttccctctcaggaccaggacagaccgacagagagtgtgtacctttaatatctgagaccctatggggggtctccaaagcctgcagaaccgggtgctgttttatgacttaggaattgttttgaaaagattataggtgccagttgcccaactcagaaactgtatttgctcgcagccacctattggaccagaacgggatgccttccccattaccaactatgaattccacagcaaccttgaaaataacctgagcattttgagtgatttgaaattttgaataggtaatcctgcccaaggcgagaactgtctgtcttgtcaagacaaagccacctaacgcggagaggccatcctaaatacaccagatcatgaatatcaatccctccatattgtagtggcattttgactagattccaggaaaccagacagtttccatcattcgcttttgcttgaacaagtcgattttcttttgattactcaagtccatagatgcatctattcatatcttatggaaagatgatttccatcaaatagcacatctttggaagagggattttatttctttagaccatcagaattcagtacttttttaagaccacctttaaacaaatgtggatgttagcattatggtttcatgcgttttttttttgtcaattagtaccttggacttattgaattgaagtgttgtatatatttgtttttacttttctcagtttgtccagtgatttctgtttgtgttggatatcctagtaataaaacacgttaatggctattttcatgttttcacttatagtcagct

SEQ ID NO: 149317 - DNA, 491 bp, Zea Mays
ttcaattccagatgagagacacactcatcgtcgttaagcttaggttccctctccttgtccgtttggttctttggtcctgtcattgttagcacaaaacagagacaaaaaggcaacaaacaaagtgaaccatacaactatctctcagggtggtggtggtggtggaacacaagttatgaagcgtcttaccccgctcttacaaggttcttactagcactgcaggtggcaaacggtgaccggtgtgactgtccaacgagcgtgggtgtgattgcaaaggagtacctgttctgctcgagagaaaggtggagctttgggaaggctgactaaaaatatacatatgtggcacacaagtcagtaacagatagcaatgctgaataagtgtccaaagtactcgtcctagttgctggcctagagaatgtattagcacagttggaggaagacacaaaggaggtgacaaggatctaggaacagcaaggtaacaagttggaatgaaa

SEQ ID NO: 149318 - DNA, 437 bp, Zea Mays
ggtaagtgtaggaaatgcaggaggaatctcaataacctgctctaactttgtccaattcgtgaaggtaatcatgatatcatttggaactggcttgtacaagttgtttgatgctcgaactcgaaagtatgtcatgttgtacacgctgccttcttttatgagtggcctgaatttctctatgaagggtgggtatatcgtagcatgtatgctatttccctgcatatagaaagatgtagattgaactttagtaagagcagaaacaattcagctagtaaaaagaaggcaggctttctattatcatattaaggggaaaaacactgctgaagcaaactggtgagatgcaacaataagctggtagagtttgttgctactttacctcttcgtccagcaacaccatatcacagtgtagcagccttgcatcatcctgaggatcagaaaag

SEQ ID NO: 149319 - DNA, 426 bp, Zea Mays
cctattgccttgtggcaaggcaaggggaagaggcaacgagaacacgcggaagaggaagcggttgcgcgtggggaagaggtggcgtcgggggtcgttgcagcattgctggtcccggaggcagcgctagtcctggtggtcgcggcgacatagggtagctgtgggagagagaaccgaagaactatggggagggagagcaatgacgaagaagcagctgtgcgtgagaactggcaggcgacgactgctgggagtcggctatgagaggataacctaaaagggtggtgttgggttgggttgggctacatggtaatgggcttttttctttttctttttcctgtttttattttctactaggctagaatgggcctacaaagaggccttacagttgtgctacttgtttattagctttagtgatatataactaatatt

SEQ ID NO: 149320 - DNA, 474 bp, Zea Mays
ggaagcgtccttgagagattaccaggtgctggtccaagaactgccggagaatgaggacgtgaagaaggctctctctgaggtcgaagccaagctcaagggccaaaggcatggggccgcagcagccagatctcagcactgacgtcatgtaactacatgtcccttctccagctcttgcagttgtattttgtgtcaactacatttgaaagtgcgcactcatattccttggactaatgattcaaagtgtcggtcctaacaaacttcagtgctctttatctatctaaattttaactggttaataggtggtagatggtcacgcttagataaacaaataagtagtgattagaaaatccggcagattccttgactgcccaccatcttttttaaagcaaaagtttggcatgttgatcataggatagcctgtctttctttgcaggttttctttactctgtcggctaccagagaaatcaaccgcga

SEQ ID NO: 149321 - DNA, 619 bp, Zea Mays
gcgtaatcaccaaggtaagattgagagatgagaagggtaaaggcaataagaaacaaaagcacaacaaaggatgaggttacaaactcgcgagccaaagaagaggatacggccaagagaaagaaggtatgagacgaaagaggggcgattttaaagggcaggtatgagacaaacatcaatgtaggatatagaggtgtcaagggtgcatatgataataattaaaagcataacaaaggatatagttaaggcaagactcgcaaaacgacaaagtggagaaaacaatcaagggtcagataggcaaggttccaacggaagggttgaagtaaagattcattaccgagtggagttacaaggagacaacgggatcaccaaggatatgcaaagtagaatgaccgctcatggatcattaagaaacaagggtggtcaagggcacgttaactgaaatgtcttaaacatatattgggatataaaggtaagcacatataaaaataagagtaggcaagattccaatggtacgagcataccaagaccaagggcatagaaattgtcgaaagatagcgacttacaaccgaataagaaatgatcccagaagacaagaaggtcatggacacctaaactgaac

SEQ ID NO: 149322 - DNA, 1307 bp, Zea Mays
ttttggtccccggaggacggtaaggctattttggcctcccgcgacacatgtttttgtcgttgaacaacaatttgatgccacccgttcgccacccttgttttggccactaagacaggtaaggctgtttttggcctcgcgtgagctacaacacatgttttcatggccgaacaaccaatttagtgtccaaccatagtacactagtgttaaaaccatagtacacatttttgtccccggaggcctgtaaggctatttttggcgtcccgcgacacatgttttcttcgtcgaacaacaatttcatgcctcccgcccgccaaacatgttttggctactggcatgggaaaggttgtttttagcatctattgagctacatcacacaaaacacttaaatcctaaaccccgagccccaaaccctaaaccatgaacccgtaaccgcgaacccttagactaaaacccgacccccaaaacacaaaatcacaaatcccaaactccaaaccctaaacattaaaccccaaacgctaaccctcaaatcgaaacccgaaatctcgaatcccaaaagcctaagctctaaacctcgagccccaaacgctaaggcctgaacattgaaccccaaaccctaatttgtgaaccctatacctcgaaccctaaatcaaagacccgaccaccaaaacacaaaactccaaaccccaaacttcaaaccctaaaacacaaccctaaaaagtaatgtaaggctgtttttggcctcgcgtgagctacaacacacgttttcatggccgaacaaccaatttagtgtccaaaccatagtacactagtgtccgaaccattgtacacgcatttggccccggaggccggtaaggctatttttggcctcccgcgacacatgttttcgtcgtcgaacaacgatttcatgcctcccgcccaaactctaaacacagagccccaaaccctaaagcccgaaccctgaaccctgaaccctaaattgtgaaccctataccccaaaccctaaaacgaaaacccgaacaccaaaacacaactccaaacccaaaaacacaacactaaacagtaaagtaaggctgtttttggcctcgcttgagctacaacacacgttttcatggccgaacaaccaatttagtgtccaaaccatagtacactagtgtcactgtaaaccctaaactccaaaccccaaactccaaaccctaaaacacaaccctaaaaagtaaagtaaggctgttttgggcctcgcgtgagctacaacacaagttttcatggccgaacaaccaatttagtgtccaaaccatagtacactagtg

SEQ ID NO: 149323 - DNA, 278 bp, Zea Mays
caagagcagtaacaccacacacacaagcaaaggagagaacacaagaatcaaaacgacagagtttctctcaagaaaacgctcaattctctctagaatgagtcgaaagcgtggttgcgttgaatcggagtttcggtgtgctcttagtatgctcgggtaacagctccatgcgcctaggggtcctttatagcccaagggccaaaggagctgtttgatcttcatttagaaggctctagttgccttctgtccatgggtgcaccggacaatgaacagtacatgat

SEQ ID NO: 149324 - DNA, 516 bp, Zea Mays
ctccgttcaaggtgttgtatgggtatgaccccccattcgcagctgctccacatattccatcaactactgaggattctgtggcacacgttctggctgagagggctcatttcacagacctgttgcgtgcacagttggctgcaactcaaaaccgcatgaaactgaaggcttatcgtttgaggactgaacgccaatttcaagtgggtgatctggttctgttgaaacttcaaccctatgcccagcacactgtggtgaacaggccctgtccgaaacttgccttcaagttttttggtccttataaagttctggagcgtgtgggaacagtggcttacaggttggacctgcccgagcatgcccaagtgcatccggttttccatgtgtcgcagctcaaaccatatatggcagattactctcctgtgttttccacactgcccattcggattgatctgagcagccatgcagtggttccactggaaattctgcaacgcagactcgtgaaaaaaggcaatcgagttgttc

SEQ ID NO: 149325 - DNA, 957 bp, Zea Mays
agcagaagtgagtagagtagctgtagtccaggatacttctttgaagcaaattggcttaatatttagtagatagcataatgcatacatacagagagagatggtggagtcggtttgtattaaaccaacctagaacccagcaatacttaggtttgtacattgctactgctgctgagctgacaaacctgccataggaaaaaattgctgcagtctgttgactacagctgctactgacctcatccgcagcagaccaaaacggaattggctggtaggactagctgcagacatgaaatttactagctaaggaaggtctgccgacctccatatactaacataaactaaatagtaccttgttaagtaaaagacacaagtatatgtattgtgttgcctatatctcctaatcacagcataggcagctgttttgttttgcttttacggtgagggggagaaacagagaaacagctgttttctgaattagcggtttcagcatctcctactttttttcctgtgctaaggaacagagatgcaagtatgaagaaggaattaaacagctgttttctgaattagcggtttcaacatctcctacctttttcctgtgctaaggaacagagatgcaagtatgaagaaggaattaccacatttcaaaaaagaagagaaggaattaccaaaaatattcattcaagtcgtcgtagtttctccacaatgagtggctcaccttaccacgtttgctccttgcagcttccttttgcatcagttgaaaaatcaataaaaaaaacatgataaaagataagagaatttagctctatagttgttgtgggttcgtaactgttagctatctgtgtacatgggcctagcccacagcccactaggggtccttatcactatagttgttagggttagggtttgtacagtaacattctatcccacaacatggtacgagagctctaggttcaacctccc

SEQ ID NO: 149326 - DNA, 625 bp, Zea Mays
gggcaacgcccaaaactgtcagtggcacattcgggtggaattagtcaacggagcactacggattgctcgtcgtcgttcttcctccgccgcggatccgtgcacctccgtggtcagggcgctgcactgcgagattgacggtatgggtcccttccccatgttcgcgttcttcccaatttcaattcgcacctagtacacctagcagtcgtgcaccataggttgatcagggagtccgacaatggcgcaccgccgtgctgagtgccggcccgccgtgattgtgcgtagtaggggggaaagtgtcgaccaccgtcgatctgtcgatggagggcagagattagatgatagcataccaattcgcgcgattaaatcgtggccattgatcctctatttgatggcttagggcagatcgggctaacataaaatcagaaccctaggatcttgatctaatggtcagtgttgcataccgcttcgtcacttgggcgatttaatctgggcacctcgtttcagatccaacgaccagaataccctcgtaccccttcgtcgtgtcacaattactagagagcccccgagtaaatcagaaatcaacctgccgtccgtagaggagttcggctgagtcttagaattagtt

SEQ ID NO: 149327 - DNA, 500 bp, Zea Mays
gcttcctatcttgcctagacatctggatctgatggaaaccagagtaagcatctaggaaggacaggaggtcgcacccagaggtagaatccatgatttgatctattcgtgggagtggatacgggtccttgggacaggccttattgaggttggtgtagtcgatgcacatccgaagcttcccattagccttgggaacgatgactggattggccaaccatactgggtgatggacctcttcgatgaagccagcgtgcagtagcttccggacctcctcacggatgaaatcctgctgctcaatggactgtctccgaggcttctgactcaccggtttggcgtcagggtggatcttcagatggtgctcgatcacctccctagggatcccaggcatctgcgacggttcccatgtgaatatgtcggcatttgtctggaggaaggcgacgtgcgtgatttcctatttctcctccagattgcccgtgatgcgagtggtctgggaggaatccccg

SEQ ID NO: 149328 - DNA, 998 bp, Zea Mays
ctgtaacagccacctctaaggctgaaggaccttcaaccacttccatgggaacagagcaatccagaccagcctcctgactcttaagaccacgctccaaggtcgatgaggcacgagacgccgctcggaataactccaacccggcatcaggcatatcagcacaaatttccatcatcccaccatctgccggctccgacaacagatcttctggaaccatatcttcgagagtctgatcaaaatttgccagagacaattcttgcagaccaacgagggcagacaaagctggagaaggaacaccactactctccccgctggctatgtagcgctggctattcttccgaattaaagggatttcctcctcctcttcctcatcttcatcaataatgcggatagtacacccattgggatcaactttggccggattacacccattgggttcaacatcatcaaggtcacacccatttggttcagcatcagtcgggtcacacccattgggatcagcttcagcaaaaaccggcactggcacttcctcagcagcaggagcagaagggccggcatcctgattcaagcatgacactcgacgaagatgtctctttttctttttctttttcttcccctcagtaggagaagttggatgattggttcggcgaggacgcttcgggcgaatactatcagacctctgaatatccaaagctttgccagactcggggatgggtgctacaaccagtgttttagcaggggctgcatcagaggaatcttcagccaacatgtccagcatggcacttatttctacgtcactcagattcaaaggcacctcgaaatgaacctgcctctcgtctttggggatttcgccaagtgaagcaaccaaagcctcaacctattcgggagaaggtcgcactctaaggcccaaaccgctatcaccagtagaaggatttgacacaaaactgatgaaggtcttggaaggaggcagattccaggctgagtatgcaataggagcaccg

SEQ ID NO: 149329 - DNA, 1040 bp, Zea Mays
atgttgatgactttgctctccacctcaacactttgttgcagaagatggtgcagttcggcaacgacacctacgatgaggagagagctgttgagaagctcttccgttgcatccccgagaagtacaagcaaattgcttgctcgttcgagtctgctagacctctccacgatgataattgaagaggcgataggtcgtctcaaggtggtcgacggcgacgaaccacaggctccctctgggcctatcactatcggcgggaagctacatctcactcgggagcagtgggaggcctgccagggtgacaagaagggggagtcctcgacacgaggccgcaaacgcggcaagccgcgcaaggcgcgtggaggcgcccaggccggggcgcgaggacatgctgagggtggtgcccgtggaggtgcccaaggcggcgccgtcggcaacaagaagtcgacacgagacggcggctgtcacaactgcggcaagcttggccactgggccagggactgtcgacagccacgacgtggccaggccaacgtcgcacaggcggaggcagaggaggaggctctgctcctagcacatgcaagcattgagctatctccagcggcactggtcgcagcggcactcctccaccttgatgagtcgaaagcacgcgctttcctcggcgacgactctagcaaagacatgatcgaaggatggtgcctcgacactggcgccactcatcacatgaccggccgacgggagttcttcaccgagcttgactctagcgtccgaggcttcgtcaagtttggggacgcctccggcgtagagatcaagggcgccggctcagtcgtattcaccgccccgtctggtgagcacaggctgcttaccggagtctactacatccccgcgttgaggaactctatcatcagcttgggacagttggatgagaacgattcgcgcgtggaggtcgagcacggagtcatgaggatattggatccctctcgtcgcctttttggcaaggtacgcaggagtccaaatcggctatacatcctcaatgtgaaggtggcaca

SEQ ID NO: 149330 - DNA, 346 bp, Zea Mays
cggccatttagtgcgatagctgaccaccggtgtcttcatgtctttgcgataagcaaagttgtagcagccgaagttctcatgttgtccgtcttccctagccttcgtctgatagtgaagttcatgtactcggtagaaggcttcggcgagtggctccaccccttgacttcggagggcccagatgtaaacgctgagcctaacaatggcgttacgggtcagctgataaaggtaaatctcaaaattttccaagacatctccatcatcccgtgcagaggaaatctcagccctgctttgaagaagctcttaaagaccaccacttcatcattttctggtttcgggatagtttctt

SEQ ID NO: 149331 - DNA, 294 bp, Zea Mays
agggaggccaccacctcctcgtcatgcgatgcagcacatcagtcgtgccattcatcttctctggcttgtactcgacggcaatgtcatatccgaagagcttgctcacccatgtgtgctgaggaatggtagagagacgttgatccaaaatatactttaaactatagtgatcagtacgaacagtaaaaggtcatccccaaatgtatggcctccaatgacgaaccgccttgaccaaactgatgagttcacgctcgtaggcaggcagcttctaatggggaggcaccacggtcctgctga

SEQ ID NO: 149332 - DNA, 431 bp, Zea Mays
aaccgatagtaaatttcatatatcttgcaggttagcgtgggctacaaagctttgaataggtgtaaacgctcagaaaaaggtgaattggtctaaacgcccccaaaaaagatatatagtggaaggatcaaaatgtataagaggtgaattgtataagagggaggtgatgagttagtctaaatttattttgcacaaatgacaccgaatattcattatacatgtgacatgatagaaatcacatgtatagcttcatcgtacattgtattgttatagaaccaatgttcatgataaatctttccttgaagccgactggttcattacatgcttaaaccttatcgtagttctaaaactcttgggtatatgacacactcttcttctaagtagtaaaagttcaaagaggtgggtgaaaaaaagacaagagcaattactttcgc

SEQ ID NO: 149333 - DNA, 374 bp, Zea Mays
cctttggccctttatattcccttacctaagtatgcatctatccttggaatcttgcatactcttatattcttatgtatgcttattttcataccccaatgactgttcaaaacacttcagcttacatgcccttgaccaccttagtttcttgatgatccatgagtcatcattttatttcgcacatcctcggtgatctcattaattccttgtaacttccttcgataatgaatttttacttcaactcttctgtcagaaccacacttatcttatccttgattgttttctccacttcatcattttgcgtgtcttgccttaactctgtccatggactatgcttttcatcattatcacctttatcctcatcacctctatatctt

SEQ ID NO: 149334 - DNA, 397 bp, Zea Mays
gtcggaggccattaagattgttgttaagtatgtgccgaagaatcagatgctaaagtgttgggatatccgcggttccaacgtcaggttgaaccatgtttttgagttgaatatcttgtcatacggtccttactcggagggggactctactgtcgctggcgaaccgaggtaaataggtgaagacccgacctaaagagggcacctcgaaggggaaggctgtggttgcagctacccgaaaaaggaaaatagatttgcaaggtatgggggatgacaagatggggctgagggcctctgggatttttgttgacgagttaatggggatgtgcgtgggtccctagtaggtgatgtcttcacctgagctctgggaaatatcttcgctcatgctgaaggttaccggggg

SEQ ID NO: 149335 - DNA, 958 bp, Zea Mays
gattagtcgtccagtcgaacacttgctggtcgtttttgtcgtcgcaattttggtactgagcttcactctattttttggcccatctatagtagcccgcccctctagaagtaaatcagccgccagaaaccctcccagccgccacaaacctgctagaaatcctcccagccgccagaaaccctcccaaccgtcagtaaaccctaatcctctcctctgtcctctctggtttctgccgacgctctgctccaagtgctccagccgtccaacatctgccaccggcgtccagtactccagtgctccggcgtctgtcacctagtcaagaattgaagatgagctcgtcatctgaaggtagcacctcttctctgattatctcccagtctccattccctctattaccactggtagctcgtcatctgaaggtgcacctgcagacctctgtttgagcagtcaccctgagttcatcagtgcgacagtgccagtaggcagtagcccagtacctagttattagcagtaattaagtgctagtcttattccttgagtcaaatatggtcggcagtaattcagtgcttatatagttactatatagtattcaggtcttactgctagtctgctactaattatgcatatattattgcagaaattcaatgcttatatagttaatatatagttatatacatatgtccttaaatctatagaacgactaagggacgacaagaggtcgaccgggaccgattagtcgccctaatcgtcgccctaatcgtgattaggcgcctggtcgcccgacttgtaaacattgagcacaggtatatgtgtgattggtaattaccttctagtcacaatgcatggactgtcttgtagtatttgttctctagttggcctttgtggcgtgccatacaacatctaattcttcaaaaattgcatccatgtgttttataaacacttcttccctataagctcttgc

SEQ ID NO: 149336 - DNA, 557 bp, Zea Mays
tttttttatccacatgtactctagagtttatatttaatgtgaaattttaatatttaatttacttagaaatggttatataaatgtcgtggtttcaaaaaccgaggacatagtagaatttttgtttggtgagagaggcaagcatggactcatttcgaatggtgaatcaggagactcaaacaggaggtttatattggttcaggctcgtgccagtgtagtgttgattgtggtattgttcaaaggagcgtgttacaaggaactcttttatagtttaaggagaggctcttacataggggacttgttgtctaaagcagggtgcgacctgttgtctaaggttgtcctactgacatagttctcttggcgtcgtcttctagtacgtgtgtagtcgtatgtctggcatggctggtcactctgtctatccggtatacgagtcactgtagaaaccatggtgctaaggccccgtgtagcggtgcctagcgggacccacgaggcagagttgggggatactgaggccgtacacggcaacgtctcatcccattgtcaaagatactccatcaccc

SEQ ID NO: 149337 - DNA, 679 bp, Zea Mays
ctttcggactcacgtcgagcgattaaattgtataatgggtactcagatacgtcgatcaggctgcattggtaattggctgagttatggcattagctgaatattgactgcgccctggcaacacgacgcaatatttgtgccgttcgaacttggctgcgtcatgtgattgctatgtcgcgctctccattaatcggatcgctcctgttgagtcagaccgccatcgctgagtcgcgtatttttcgtatgccctgtaggcattgtctatctgcctcgagccacaattgtgcctattgcgcacgttgtgtggacttgtcttgtaccccgactatcgagtcacaattgcgcctgttgcgtttgttatgaaggcttattgtgttgtcgtagccctgatggtcgcacatgctttgacgtcagatacactagagcttgtgctcgcgtggattgtggtgggttgttcaagcccctgaagtcacatcataacgcaaccttcttaaataatcttgtttagctctataatttatttgattgtgttgtgtggcatcatatatttatttatattgccaagtggccataacaactatatcaagctctatagtgcttgaataatctgggaaagtaaatgaaataatataaaacacagataagttaatcctctgctctcatctcatgcataaagatttac

SEQ ID NO: 149338 - DNA, 494 bp, Zea Mays
gaactgtatggagacccaagaaaagaagtgcgagagtgtggaatgtaccagactttaatcgcagagcaaaagtccaaagaaagtgagagaagtcattcagaatgactaggtagtatttgtaactagagaggttgaagacaggagatgtccagagatcacaatgaacaagatgaaatgcctgagcagctctggatgtggaagtagaaaagggaagacgcgaatggcggctgagctgacatgcatgacaaaggttctaagaggggcccttggtccaagatatatttgagctactggagagtttggacatgacgtcaggtccaggatgaccaagacgacgatgtcaaatggtggaggtggtggtagtagccagagcatgaggggaggacacgtcggtggggcaagcagatggctggagcgtgtccagggcataggctagggcaacacaagaggagggaggtgggtcaagacaagagatagagtatagtggaacggag

SEQ ID NO: 149339 - DNA, 480 bp, Zea Mays
gtcttaaggtgtcaaggttgacagttctggacctttgctgccctgtaccaactagatctgaataaaaggaccgaagcacctctgccttatcactatgactagtcaatagctgctccctgtcttgaattttggctatgaaattttttcttttccgataacgagaccaagagtggaagaactttttattagcatcaccatctttgagccaggcaattcttgatctagtcctagccatcgagcggattaaggaggcaagagccagagagcatttcttcaagcgcccaagcagccatgtctccaaaacattaagaattctgctctcttttgccacttcaagctacagcaatatttctctggcaagctcaagttgcagtttgaagtttccaaactttttgtcactccaactttgcagcccttttgttgtcgccttgaattttagggaaagggtcttgaggggacaagaagactgctgaacagaac

SEQ ID NO: 149340 - DNA, 279 bp, Zea Mays
gcaaagaataattgacgcacaaagaaatgatacgggaatgaagcacattcatgagaaaatagaagctggtaaagccaactgcttcagaagagatgatcaaggtgttgtatggtttaacaaccgcatagttgtgccaaaaaatgatgaggtccgccagcaaattttggatgaagcacatcttagtcgctattctattcatcccggaagcactaagatgtatcatgatctaaaacaacattattggtggacaaagatgaagattgaaatcgcacgctatgt

SEQ ID NO: 149341 - DNA, 352 bp, Zea Mays
tggccttagcttggtgggataccttcaacgctgccatcagagatgctacctggacagagtttgaaactgctttccgagagcaccatgtgccccaagggatcgttcagctcaaggaagatgaattccgggaactaactcaagacggaagatctgttagtgagtacgtgcacaaattcacagagttggcccgctacgcgccggatgacgtcagcaccgaagtcaagaagatggcccgctttttgaaggggctcagaccagaactcaagaccatcctagccagccaggatttcctcagcttctcgcacctctccaacaaagccatgcaagtggacagggcaagggaagaagaaaa

SEQ ID NO: 149342 - DNA, 1759 bp, Zea Mays
gccggcttgtccccaagccggcgccgccgagaattgaagttggatcatctgcttgtgtattagcactgaccgcgggtttcagttgcgacacatggaacaccggatggatcatgctgttggctggcatgtcaagttcatatgccactgcgttaaccttgagcacctggaatggcccgaataatctaaaggccaatttatggttcttgcgttcggcaactgagatttacaatatggctgtaatttcaggtacactcggtctcccactgaaaacactctctgaacgacctttgtcggcttgttgcttcatctgatcttgtgcacgttgcagatgcattctgacctgctgaagaacctcttgttgactgttgagcagattcctgagatctgggattgtgcactggttaggggaatcaagtccaaagtgtgtaggtaagtgaccatacaagacctcgaacggtgactttccaagagcggaatggtagcaggtattataccaatacttagctagagacaaccatgatgaccactgtttgggacgtgtgtggacaaaacatctcaggtaagcctccaaacactggttgacccgttcggtttgtccatcggactgcgggtgataggcactgctaagacatagtttggttctcgctagtttgaacaattcttgccaaagcttgctagtgaaaataggatctctgtctgaaatgatagactggggtaaccgtgcaatctgtacacctctgacagaatattttggccacggttaaagcagtgaaaggatgagttaagagcaagaaatgcacatacttagaaaacttgtcgacaatgaccatgatgcagttgtattggcgggactggtgaagaccggtaatgaagtccatactgatcacttgccaggcatgttctgggactggtaaaggcataagcaatcctgggtattttgcacggtctggcttcgcttgctggcaggtattgcaagcctggacaaaggttttgatttgcttcttcatgcctggctagctcatgtatttgcttttcgatctcatctttttgccgcggagtataccgatagggttgaagtctaaaaggttgagctccacttagtaaaggaatatgatggtccacatttctcctgggaggtaaactggtgggcttctgaaataggtgctggaacttctgcaccagagctgcaatttctggatgcagttcagatggaactggtgccctcactggctgcagttctaacagctgctcgacggcctcttgcctgaccaaggcctctagttgtaaactggacagttggtgacaggaatgcagttgaggacttgaggtttgactccttgcaaccgaatggtagcccccttataatcaaactgcatccacttatgggcccaatgcccaaacatgggactatgatcttccaaccaatccattcccaccaatccattcccagtatcaaatcatacactccaagtggtaaaactttaagtcattacagaaagtgatcgcttcacatagccagaaacagttgtgcaccacaaaattactccacatgacatttccattggccactttcacctgcactggttgcttcagacttctcacattctgtagagtccccatcaggtggctgcctacgaaactggctgaactccctgagtcaactagtattaggacttgttggcaatggatcgaagcccataacctgatagttttgttaccttccccaccattaactgctgcgagagattgttagagtata

SEQ ID NO: 149343 - DNA, 282 bp, Zea Mays
aaagaagtttagaaaaaagagatataagcaacaatactttcccttaagggtgttcgcttgcgctaaatggtagatccaaaaaagaagcatgaagagaagcgggtgagagagaattgtggacgggtacaagtgtatcgttcaaaaagaagagggtgagagaaagaattgtgggcgagtgcaagtgcaacatacaaaaagcatgctaccagctaagcctcccaactatcattttttatctaagatttagcatcgacctctatataccggaagcatgctataaac

SEQ ID NO: 149344 - DNA, 1172 bp, Zea Mays
cgggcatcgagtctgatgaccgggttcgaatttctccccgcaagtgtagcacaatccattctgccttctgaactcctttaccagccgctccttggacatctctggcacaacagatgttcccttatggtctgtcttagctggctgcccaccaagccggccttggtttactgttttcagggatcgttgcctttgtttgtctagaataccttgctgaacttgagctagaaaagctgctcgctccaccgactccggaacatgagattgcaccggcccctgcagctctggcttcagccctttcacaaactgagacacataaagtgtttcatccagtgtgtggttgtgtaccgaggtagtataccgtgcctcatcaaacgacttctgatattcctccacggatccaacctgacgcaagttcaacaaggattgcatagcctgcgaatactcttgagccccaaacttttggatcacagccccacagaactcctcccatgaacccagtccatgctgaattttgaaaatctgaaaccaccttttggcatttccttccatattcagtgaagctgacaccacccatgccggttcaggaacccgatacagcgtgaagtaatctacacattgcgcaatccaaatcctgggttccccccctccaaactttgggaatggcattctaggtattggtaaattggtgaactccaattcttccaccctacgccccccatatctcgatttcgatctggcagaggaccttcataccttcggtttggtccaggtggtgccggttgtggtgcaggttgttggacacctcctctcatccttccgctgtctcctgattctgacgactccaaatccctcgccatctgcaccagcctcaactctgccacctccctccccgtcttctccaacagctgcgccaactgcaccctctcctccgctgcctgttgcgccacacttgccgccaaccccgcttgcgccagcagttgttgctgaacctcatccatccccatgaccttctccgtcaaccgatccaccttctgcatcatcctctcccaccgatccgtgtcctccttctccttgctgttcatggcctccaggatgaagcgggtttgggcggacggcttcggaacgggcgccgtcgctgtcgatggtgatgccgcactgctgtagacgaaccg

SEQ ID NO: 149345 - DNA, 805 bp, Zea Mays
atagaaactccggaggaataagtggcaaaaaggaagaagttattgtcattgctgatgatgtaggggctgatcaggaggtgatttttttggtttattctctcatgtagtctgctgtatatttgttatcttttttcaatcttttttaatttatcgtataaacatacattatgttgtatttttctaggtgcaaactgctgctgttaatatggttggcgctaatttacatggtagtagtagatccaaatcagcagctgcaattgatcagatatacaatgatatgagcatattcaacgtagagtcagaagctgggggattctttttggaaaatcaactagaagttggaaatgtagtcaggaatgatgttggtgaaaattggttacaagttcaaaatgctcacgcccgtgttccatgttctaatgtgctattgcgatattataatattctttgtggcatggggcggagccaatggaaagagtaagtgtagcttttatttttatttcaattttttctttattatgtttattttctgttcctatacaccaattttcataatagtctatttttcttactttttttgttcagtttggtcgcagttcagttttccaaaaccaccactgtaaattgggaatctttttgactgtcaatagaacccaaaggtcactgtgacaacttttttattgctggattttgccggaaacattttgaagatattcatcctagactgtcaaagaaacatttcttttatccaaaagtgggggtaattattcttcaactttttatttggttttgttttgttttttttgta

SEQ ID NO: 149346 - DNA, 552 bp, Zea Mays
gtttgacagcgcacaagtgcgttccagtgaggagcttcggccaaactctaaattgccacatctaagggcaataggagatcaaggattaactaaaacagggagcaatttgagagttactgaccagaggaacgctagcgacgaagaagttcttcacggcggagcaagaacgaagaagagagggaattggggctgcgcaagttctctggcgaaatggagttgattgcttaagcactggggtgcgcaatggagagaagaagcggagtccgagctcaatttataggccgtcgaccggagttggagaagaagcgcggactacggatgcgctggcaagcttttccgcgcgacggattccggtgagggcacgggggtcgccgtttaaccggagttcgccacctcggtaaccttttgccacgacgccaaggatatttaccacggccaccgacgaccagtcacgccgcggtggcgttcttatcgccggcggggggactgatcctgatccacggcgggatatttcagatgacagtgaacagtgtgccagcttcagtggacagc

SEQ ID NO: 149347 - DNA, 482 bp, Zea Mays
tcacaacagcgaggatattgatgttgatagcggcgcagatgatgccgaagaccggccgtgcaggccagttcatgtggtcttagggaaatcgactatgaagaatgggcatgttgaggccatgaagggcaagtattttcataatgtatctatagtgaggatcagaggtgaagacattgtttctatccctaagaaagatgaggtggtggtattccaaaacttcatgaaagttgggctacagtttccattacataagatgttggttgaagtcttgaaaaagttggaaatctttcttcatcagcttatgcctgaagctttgaaaaaaatttgaattttcatttgggccataaggagtcaagcgctagaaccagatgttgatttttttgtaatattcatgaattgtcctatcagacgaaggccactagaaaagaacaatatcacaacaacttttgatgctacaccttcatgtaccgatcaaatgtccg

SEQ ID NO: 149348 - DNA, 1829 bp, Zea Mays
ctaaatgtgtgtatgtgtggtatggtggagtggtctatccaaattaactttggagagacggcaataggtatttggagtaactttggagtaacaaataaagagcagttagtgctccagcctccagagcagttagtaaagtagaggagaccttacattttaagtaagcgtacttgtatcttcccttggagcaatggagcagctgaggaagtagtcatccttgaagtgagcgctacattatagtttagctactttttatttattgttttacacatcttttaatgctcatttgtgtcactctagcgcctactcctgaattcctgatatggattaaacttcatgtgtggttaactgattgcagtgaaagaaaaaggcatacaggcatctgaatatcatggaccttactacctttgtagcgactatgcaccattctttcttatgaaatatcacatttgaatgagggtggttctaacctcagcattgaacagagaaccagatcatattagaaggatcgtgttagaccaatttgtttgatagcaacttctgcccaagtgctcttgttttcttttgaagaaataaagagccagtgggcagtggtccttcagggctagggctagattgttggctgtctgatttggcaattagaacttctttggatcagtagcaagaggtgcttctgtctacgtgagcgcaaaatttctgatgatttggtgagaggtgcttcagtctatcctggcaccaattttctgatgatttgagatcaagctgcgtagctgattaaggaataaggactagctgctacaccagtgttagaagaatagtaacggtaaggaagtgtaatcagaagtactagagatgtcatgctcataccgctgagtattgcattaatgctccacttgtatacatcttacaccgacttaaaaactgtatatatatgaatcactccctgcaaatgcttggcttctgtttgcaatggaaggccaggttacattagcaacaaagttacttttgtgttccttatgaacagagtaaaaaaagtttaagctcttagactatttattatgtgtggtccaacatatgtacttctacttgcagtatctagagcaacagccaataaatacagcaacaagatcaagttctgctatttaatatctagagttgacaaatatgttcttcatgattctttcaaccgaaatgtctggtatgacttgttacattacaagatcataatctataaagtcaactagataaaaattgtaagtgcataatgcaagtactgcttgattgagcaagttgtgccttgtcttaatcgcataatgttcaacagctgaatatatacatcataatttaatttaacgggtttgattaatgtcacatgatctgttctatgtaagcctgttataggcccaaatttaactgctagaactggtgctaaactagcttattctatagcggaatttgattagaatgctttggtgccaatacccataggaaactatcatgacttggttctttttctcaggaaattgagaagaagtggttcatcttgaatctgaatcttagttctgcttgctaactagatattagatacatgtttctgcttttgacataacctgtttttaaatggattgtctcagagctgtttccttatcccagagagtaggggtaacaggatgtggcatcttgtcacatggtgcggaagagtgaagtagcgaaagccgaacttacttttgaagtttcatggttctagttgaataatgcataggacaaagggatcacactatcaatctgccaatctggtaaagctcttgagtaagcggtgaacctcaggg

SEQ ID NO: 149349 - DNA, 627 bp, Zea Mays
aaaaattcgtgcatccaaaaattatgaaaattttgtggaatcaactagacttctttacctttccaatgcctctggaattgcattagtatcagctctggtttgggagatatagctgttgcaagtttgagttactgcgcagtctggaactcagaacagattttgtttaactccaattttgactaagttaatgtcagaaacagtaaaagtgatctaaataagagttttagctgacttgttaagctttccaaccatgtattcgacacatctattggatctctgtgacttgagttatgaaataattactgatcccagaaagtttccagcaatactctttatcatttattaaagagagtattaatagttggagtgcctctaaaatttcacacttgttggaaaccagatggcagccagtggaggcagagtctgtggatgtggacgtggtcgaggccgtagtgctcccatggatccaccaccgccgccgccaccggttaccatggagcaactcatgggaatgcaggcacagctgatgcagactatgatgcaacatcttggcaatcagcccgctgcaggattaccacctgtccgggtcagggataagcgtggtgagttcatgaagggacatccccc

SEQ ID NO: 149350 - DNA, 605 bp, Zea Mays
taccacgacctgaacacttgtgttctggtgaatatttttccttacagtggtagcattctccactggcgcgtttggcggctaactcatctggagataggcgcctaaaacgtggtcggttggccgtagttgctgtcggtcgtgccattgttggtgctgcaggtttggagggtacttccagagctgctgtggactgtccagtggagctgcccgtgtgcatcaaacgtcgttcatacaccctggccagatgcatagcacgctgcagcgtctctggagtttgtaattccacatcagttcggagagcttcgcctaagcctgctgtgtacatgttagactgttgccgatgagacatgtcgtcacaacggcacatcagggttaagaattggcacgaatactcttccacggtgcttgtgcgctttagttcttttaaatcagccatgccattgaacctgagtggtggcccgaagcgcatctagatgaactcaatgaagcgtgtccaagtcagcacgccgcctagatcgcgctccaaggcatagaaccattccgcagccacaccttccaagtgaagcgatgcttgccagaccctctcgtcttgatgaactcccatg

SEQ ID NO: 149351 - DNA, 697 bp, Zea Mays
aatgaattgcacagagcttgttttgccacgcaaaccggtatatactcttggaactgagtaaattgcctcacatcagacagctttatgcatggctttctttataccaaaatgttggctgcaaaggaacatgaatggacctgtggaaatgctcctcgtcgtgtgtccgatgcattggccactccttccacataggaccacttctccaatcaattaaaacatacaatttccaccatcaaacctccaccaccaccactagctttttattatacccctgctcgacacacctcatccctctctgattccccatttgcttctatctcctcccgtgctctcctctctcctcacacctcatctcttcaagcaccaatctagtgttgtttatgccaaattcgagatgctagagatctgacctggcaggaaccaaatggcagcatacacgccccctatcaatgccaccaccactcttaacatgaagaagttgtccatcatggttgctgggctgctgaccctgtcctgttcggctgctcctgcttcctcatgggtcaaggagtaggtcaaggggaagaggaagagcatccctggaggtgattgtgtcatcatcaagttgacacaagcttaggtgccatgtgcagtaacagcagcctggccaacaggacctctactccatggagcacttgctgcggcaatgcttcgtcgc

SEQ ID NO: 149352 - DNA, 430 bp, Zea Mays
cgaaaccactgagcgaccatcatgataagtctgaacaagcaagtcttaagggcatgtacaacctagagactcctgatctcaaccccaccccctctctctagactttaagacaccccttaggttacgacacaaccccatgtttatcgagctctccaggtcatcctaggctcttcggacttctaagcccccctgtctcagagctcctcttgttccaatatcaatatggcagaatccctggacctttatgtgggaagcaaagcttcctgctaggctaggtgtgggagccatcacaaactagtgaatatgtatgatgttgcccctgaggcagagtggtcgcagagggtacgacattaggaccatgtttgtctataatctagacgatcatatggtactgatggtttgaatacgactctcgtctatctcatcaaat

SEQ ID NO: 149353 - DNA, 576 bp, Zea Mays
cgaaccctgtgcgcctctcgcacccgtgccaaacccttgccgtcgcgtgtagagcttagggaaagataaagctagggtggcggaagcggggaggcacggaattcacgttgccgtcgacgtcgggtgccggagttcggatcagaagcctgcgccgggttgctgcgaaggtggtagtggcactggccggccggattgaaaagctgagcgaccttaattgctcgtcggagtttggcttgggtgccgcgccgccctgcaccgtgaacggaaaccttgccgccgtgaaacaaggtaaataaaccctctagtgcgttcgccatgtccttctttaggtgtgtgcgttgtttaatttcaatttcgtggcgtgggtgcgcttgtgggtgatcgccggggtgctccgtcacggggaaacttgccaccgcgcggtagatcggctctgaggttgacgatggagtgtgaaccgttagattccaggcgtacgatccagattagatcacagcataccgcttcgctgagataacccatgtcgttagatcgcgatcgggcgtgcgcgggtggacctcaactacttaaaatcca

SEQ ID NO: 149354 - DNA, 465 bp, Zea Mays
gccggtgcagcaacgacaggcttgggtggcgcagcataagcgagcgggagcggcaccgggcggccctacctcacgtcgacgggtatcagcacacaggtcttgtagtgattgaagatagaagatgatgaccgttcgagtgtggcaagggtctctttgcaagaaaatagagagatactagatagagatggtggggggactgcattggatgaaaaatgaagccaccagataatgctctatttgatgagatggatgggattcagggcgccaaaatttgcattcaatgctcagggaccaggggccgtttggttgcagtttgggtgcatgcatcatcaattataagattcaaaagccattaagatggtttgcaacggttttctctaaatttcaccatatattctacccctatttttatctctctcacacccctattttttatgtcatccagattccacccctatttttatc

SEQ ID NO: 149355 - DNA, 415 bp, Zea Mays
ccggagttagaaacctcgcggtcttgtgccacgtgcctcgacactttaaccacgtcgcagtgagtcgtgtcatgcatgtccggtgatggccggtgagtccgccatggtgaaagccactaatcgctcgcaccagtgcaactctccttcttcggccgccaccgcgccattccaaattcatgcgccaccgcccccggagtctataaattgagcgtgccttcgggtccgtaaggtagtaaagcacccaagccaccaagtcgtgcctccaattgctcaccagagctcgccaatttcagatttcccccaaatcagccaaaataccgccgcgtgaacacctcgccgtggacacccttctgcaggtcagttcaagctttcttaattggtgttctagctttccccatgtcccctgaagctcacc

SEQ ID NO: 149356 - DNA, 311 bp, Zea Mays
atcgggagcacgcgcgcgccaccgtgaatcctggtgggttgggggagaagatgtgtgtgccgtcaatgagactcgccgtcgatcgggttctagtcgaccacgattagaacgggagcataccccttcgtagtttgatcccaaaccgtagatctcagatccttgggctctggttgtgcacacattagatcagccatggcattttgcataagagcccctatgattttatttattcaacccgtcgtctaggttccgtacggatcagttaatacgggtccctggtttttgtaaactgaccctatactttccaaaaa

SEQ ID NO: 149357 - DNA, 1777 bp, Zea Mays
aagtgtttaactgctagtgattgacgacgtagctaattgtttcagaacaataaacttgatataatgtctattcacagagggttctacttgtactattgctggtatcatatgtgtttatatatacttatttcataagtatacctttcgtgatattcattatgcagtttatcaataaataaaactgtttaaaataaaatggttttttattaattatcattacaatttctagtttcaggttattattacttacttacttctaattgtcggtgtataaattatgtgtacttgtgtagcatcttttggcctgatctagctaggtgtagtcagtattccttccttccagacctcgctcgtgtgttgtcctataaggtgtgatgttctcaaataattcttatatatgagagtcatgctaattgatgctgttttgaatttaaacaatagacataaaatgctctcaagaaccatcgttaagttcctgtatgtcacagtagcagcatcagctgtaacacatgttaatcaagagcttagtgttaccagaaaattggagatcaataaataaagggtgcatgtgtttcactggagcttatgcaccgccgcctgtttgttgattggtaaatgtatctttgcatcgattacaagcaattaaatctacccttcgatattcatgtcgttatatatagcatgcatgtgtgtgcttactatggtcattaatccaagcattgttcctggtgacagttgttaagcacaatttctgaaggaatcatggtaggggattaaattttctgataataatgtcatctactgcactcagcgaatgcccatatatatgtgtcgtcgcgacgtcgccagattgagggaatttatcacactaattaagaagatgaactgcctaataatgcacattgtgcgacgacgatgcagacatgaatgtctctgagcagtttgaaaccgagagccgagagcaacatttccacacgtactaacaagcgacacttaccagtgttctataaaaaggataacagtgctggcaagtttgcagggcctggagcctcatctggtgctatttgcagcagttcctggctggctggccggactttgtaaagaaccgcctgagaactatggcggccagttccctgcacagttgccatgcattcttctcactcatgctttctgcgtgcttcaaattagggtcacgcactcacggtcctggctcctgcggcggccactccttttcatcacacacgctcatttctgaacgacgcacgcccttcttcccatggatggttggttggtttcagtgcgtggctacctgcgacttgccaacaatgaggagaagtcagaagactccacacacaagagtctctccgggaaagagagaaagggatggcgtttgtcatcaaggggtgaaaccctaaccctaaaagtggccaaaggcacacacagtagcagacagcgaggctggcgggagggggattggaactcacagagctgctagctgcgcgcatgtggaggcctgcaccaattcccacctcgtgtctgcaaccttgaactcctttaaacccccattggatgcactaaaaaactggcttcagatgtggccgcctccaaattccgaggtgcatgggctccctttcccaatgaaccggtgctggagtacccttttatttattagggctttgtactttggtgtctgggtctttcaagtgctactcatcttgttttaccgaggagagagggtgagaataatagcgcccggacaaggataaataagtttggg

SEQ ID NO: 149358 - DNA, 443 bp, Zea Mays
gccttcagttgtaataattggctgtaacctcttatgaggccaaggtcggactagggttctattatctaaaaaaaaccatctgcacgggtgcatagtttagtgtaagattcagatcatgagattggagaacaaagatgtgcaactagaacagctgttggcaggctggttgatacatgctagattgctagtggaaggaagagttgacttcagcgttcttgatacttcacgacaggttggtttgtttctcctgccttctgtacgttaagcatttagaatctgaatcctgcaattccaagatgtccacatgccttccaaatttcatatgcattggcaccttaccatatgctgaacaactattaattgcaagtgcaaatcacatggcttgagttggcatgctatcagttaaaggagcaagacccactttgttaggatcttatgtctat

SEQ ID NO: 149359 - DNA, 389 bp, Zea Mays
gcatgacagaggtgctcaaaaaatcccctacaacctgaaccagaggtgctgctggagagcttggacatcacatcgcgaccggggtgaccgagacgacgatgccagtcatagaagaggcggttgctgcaagaacatgtgggacagaggtcgatgtagtggaagcaggtaggcgaagtgtgtacagcggcccgaggctgtcacactgagcaagaagggtcctggtggcaagatccttcacagaaagaccaaacaggtcaaactccatggaacaagagttgtcagtagtgaaccgacggacggaaagaagattttgaatgatgtgaggggcaacaagaacgttggataaacggaaaggaccgggaaggaccgtgtcacctactgaggtgacg

SEQ ID NO: 149360 - DNA, 582 bp, Zea Mays
tgccatccatttgagtaagccgatatgatcctggccgagtgacctccgacactatgaatggcccctcccatagcggcgataatttgtgtcgtccttctcccattagaattcggcgaaggaccaactctcccactatgaaggatcgatgtcgtatagtcttatcatgatagcgcctcagggtctgctgatatctagctaactgaattactgtattcaatcgctcttcttccagtacatcaatatcttctagcctggtagcttctgcttcagctatgttttcgaataccagcctcggtgccccaaacctgaggtcagcaggtagcactgcctccgaaccatagaccatgaagaagggggtgtttccatggagagctcgactgggttgagttctcaagctccaaaccacataaggtaattctctgatccacttccctgcgaacttttcattcttgtcgaagactttcttcctaagtgcttccagtatcattccattagccctttccacctgaccgttggctcttggatgtgctactgacgcatatttgatctggatgctctgttgttcacagaaatcaaagaatt

SEQ ID NO: 149361 - DNA, 839 bp, Zea Mays
ctcgtcagcatcagggtgactgagggccaccgtggcgccccaattggtcatgacaccatgccgtcgcacacgcggtcacggttaatccatggccgcacgtaaaaaggacgaagaaattgacatcgcagtgggagagatccttaccggcgacgggtccgtggcggcaataatcccagacacggcgcggcgcatgctagcccatcgacgagcgctccaccgttgatgaggtgggcattgcatgtgtactggtgatagccttctcccgcaccagtggttgccaaagaccatgccgagtacaacgaacaccggtggggccaggagccatggcggctgcactttcctccctctctctttcctctctccctgttctcggtaacggtggtggctcacggggtatgggacaaatgcgacaacgcagcaggatagggctgaagcggatgctttatgcgcgaggggaggacggggtggccgcaacggcccgacgattatggcgctcgccgttgaatctccgctccgcgcggaagcatcgaacagaagacctgggcccaccagtgagcaggcgagcggtaactggaatccgggcccgcctgtcggccagtgcgggaagaggtagcgcacggtgagcgactgagcgctggagcgcgggtcccactggcagggtacggacgcgcggagaggggagatggaattgggctggcgcagaacaactgagatgggccaaatttggtgcccagggcccaaaacagaggttttcttcttttcttttcttttctttatccaagttcaagtattccaactccatttaaattcttgttttaagctttagatttaaaaatcac

SEQ ID NO: 149362 - DNA, 314 bp, Zea Mays
gttgagaatggatctcaacttatctgtccggtggttagatggataccgttgatcttggatcgtgcggttggggtcaaatcgtgcatggatgtcttctgggccattgatcttcaatcggacggtccattgtgcgtaccggttcgcgtactgcgccgaactaacatgagccctagattcctgatcggacagtcctaatctggcaataccacttcgtcgtgcgcttctttcaaaagagaccttatgttttactggaataaacccgccgtcccctcggggtgtttactgagtcataagaattcttgcgctgaggcccc

SEQ ID NO: 149363 - DNA, 950 bp, Zea Mays
tgtcaattctgtaagggccggggacacgtggatttcttttgtcccagcaagtttacttcctttggttctcctctgacttcgttccctgcctttgggagtcgggcccttttggtgggaaaccaaaattctcctgatcgcaactcctggtttcgcactccggatgcatctctgtccggtggaccgcccattttcagttgcttcgaggagttcgcccgagaagtattaaaaaatctgaatcggcacctcctcagtccctgacgctttctctgggcgtcacttcaacaaaaccccaacttgctccgtcttcgtctgctggttgccgatcctcgcttcctgctcagatggcgtttaggcgtgttgatcccgaacccttcctccctccgggcttcagcgcttcggtggtccttcaccgggatattatggccaggtcagtctctcggcgtctcccgcctttgcatgaggactgggctattatcagcattcaacctttacctgaccatgagattactttccccgcggtgagggatgtggttagagaatatcttgtggagcaccgtcggcttggggtgcgcgatatccagcgatcgcacctggggcaggttttggtccagttcagcagcattcttgaaagagacaaccttgttctgctcggtccgcagcagtatcttgatgctaccttcactgttcagcggcacaatgatgcttggaaccatagggccctttattttaaccgggaatgttggcttatgttgttgggattccctctggattaccgttcttcagagcacttgcaggtggctattggctcctttggcagactgattctgtgggaagaagacagacgcaatatttataggactttgctcagggtgcgggtcacgtccctggaggaggtcccacagttcattgttttttcagacgctgatggctttcttggagattcgtggacg

SEQ ID NO: 149364 - DNA, 530 bp, Zea Mays
tataagggagtatgaccaaaaggctatgaaaaccacatgatcatgacttgagccaattataaaagatgtagtacacttaataccctacaaacaatagtaagaaagtgaccccaaaaagatttcagaaaaaccccaaaaggttcaccaaagggttgagcataagagaaaaatcagaattcttctaactccaaaaccaaccctctttcaaagatcaaacgtgttcacccttattcaaacttcaaaaccatttgacccaattgacaaagtggcgccaaaatacctctaaaacaccctggaaaagttcgaacccaaccctaagtcgtttgacatgacttggcacaagatttgtctcggtgtggacagctctgacagagccgacttcccacccccgtatctctctaacccgaccacatctccccttggaactcacatgaactaggtagccctaggtgcagggaagagatctctcaaaggtcttagggcaagattcgcacgtttggctgctcagcaaggggaagaagaagagcaga

SEQ ID NO: 149365 - DNA, 523 bp, Zea Mays
catgcagattgacaataaacacttcgagtgcctttgagaatgaagtctttctattgatggtgtatttcccaattacagaatacaatgccgtcccaatagcttttgaaatctagctaggggtaaaacttcctgagatgttctatattccatgagttccctatttccgtgccatccatttgagtaagacgaaatgatctaggccgagtgacttctgctactatgaatggtccttcccatagtggcgataatttatgccgcccctcccccgctagaattcggtggaggacaacatctcccactgcaaaggatcgatgccgtatagccttatcatgatagcgctttagagtttgctgatacctagctgactgaatcactgtattcaatcgttcttcttctagtatatcaacgtcctccagtctagtagcctcagcttcagatatgttttcaaagaccaatcttggtgccccaaacttgagatcagcaggtagcactgcctccgaaccataaaccatgaagaagggag

SEQ ID NO: 149366 - DNA, 424 bp, Zea Mays
catcgagaggacccaggcacggttgtaggcttgcagcgggcagacgacacggtccgccgcatggccgtcatcgtcgtacccaccacccgacggctgcgcacggtctccagatctaaacagggaggcgacccaacggctacgcacggtctccagatctgaacaggaagcggcatggtcgccgttggctggcactgttgccctgcttcgacccaatcgtgcttcgtccaccatatgggagccgcatgggaccgatccaccttcaccttctgcatgggagccggtctgccgctgctatggtggcccctggctccgtgcggacccacgtgcagctgcagcaagcaggggatgcagccctttgtgtgatcctcgtcggtgaacccggcaccccacggctgcatacgcttcagcactgcagcgacatagt

SEQ ID NO: 149367 - DNA, 769 bp, Zea Mays
cgcgcggatcaaccgcgcggcgctccgcgtcgggatcctcgcgtccgccgtggggtccgtcgccggatgcggcttcctgatgatggccctcgtcaacgtggtgcaggtgaagctcgggcgactcgggtgcggcgccggcggggccgccgcctgggccgccgtcgtgccgctcgtcaccctcgtcccttccgccatgctcatctacatcggcaccgtcttctacgccttcacacgctagtcggtggcggatcaaggaacactctgaccaaagcacccgtttttcgatcagatctttatctgtgtgatccctcctcagtctttcttgtgtgtgattggtggtgatggcgtgagagaacttccaggggggaacaatgcagctgacttttgtagatttaagatatgtaaaatccatgcgatattatgattgtgttttggagttttggagcaaagtgaatctgctgtggttttatctgcaattggcctttgtatttgcacttgagaagttggtcagatgtgcctagaatctttaggtccgaagcaatggtgagatggagctcagctgctggttggtctctcaacttgatatgaaacaattgtcccagatctcaactactgactctgtagcaccctcaggtaggtttttcaggtctgagtttgtcatgtactatctgtattgtgagcgtggaaggtcgcagcatccgcatttgtcaagcgaaacttcgtcatttttttttcggtttctccaaatgcacttcccccattctactag

SEQ ID NO: 149368 - DNA, 288 bp, Zea Mays
accaaatcctgaccaaacacaagaccactaattcctgctacgcacaggaatgcagcttccttctgcgcatggaaacagcagcacaagtgccagcaggccacacacccacacaactgctcttcactaagcccccaatagaacccttgacccaaagcctcaagatgtctagcaccggcaagcctccaacactcaaactcatccagaaaaacagattttattctaggaatggaaggcctgacgccataaaaaaccgccttattacaatgcagccataaacactaagcctcc

SEQ ID NO: 149369 - DNA, 382 bp, Zea Mays
cttatagaacgtctgcagagagaagatatcaccttagttaccgttgtgttctctatacttctatgatatttatttacctgagaaacgacatatggcattgcagagtacatcccaacagcagctctctctctgtagaagaccgtcctctcaattgaaacaattggctgcacagttgaacaattgttgatgccgacaaacatcacaattgtgtacattaatccaataaccattctgagagtggttgcatctcccttgcaatagaatacaccaagtcaccaacactttcagattcggaaggttggcaccagcgaccaaaatgaagaaagtaagaaaatttacattgtggtgcctatcctctagaaaatggagtcgagcagcaagg

SEQ ID NO: 149370 - DNA, 455 bp, Zea Mays
ctccgtcgaagtccagctcgtcctcgagctgaaagtctgggtacctggcgcgaaaatcgtcgaggtcttcccatgttgctgatgtatcaggctcgtctttccactggacaagcacctggcgaatgcagcgtgccaggcgagcttgcgtgacacttgcgggctctggcacaaccgcaccatggactgtagggggcatcggtggagtagtggctggtggggtgcctacgaacttcttgagcacgccgacatggaacacatcgtgaagatgggctcccagcggaagctgcagacgcacagttacgtcgttgatgacttccgtgatgcggtatggtccgacgtaatgaggcttgggttttcccttgggcgcatgcggcggggatgcggctgggcactgacggagccgaagaagagcccagtcgccctcctggtaggacacctggcggtgatgcttgtcg

SEQ ID NO: 149371 - DNA, 499 bp, Zea Mays
ccctttccctctctggtgagtattcccttctctctctttcccccttcctctctgtgctcctgccaccagtgagctccccttttccaccctttttgtgcccaattccaaattctgtgaattccagtgaatccaagtggtggaatgtgttcccttgtgtctcttaaatatccttgcaggttcctagctccttcgggagggttttcccatctcaaatagccattcccccgaaaccctaaaactccgccccccacgtgttcgggtgaaatgcccaaaccagaaaaaatgctccaattgaacccaaatttttcaggcactttcacaacacctcctgtaacatattcaccaaatttcacgcccatccgatattccaggctttaatttcacccaattccccgtttcgagcgatcgtttccgagccgagtgcccaaatctctttttcttcgcctaaattcaaaccaagcacacacttcgctcatattcacccatataaacctcttcg

SEQ ID NO: 149372 - DNA, 360 bp, Zea Mays
tgaattcctccggcatcaacattagcacgatggttcgtccaaccgagcatgtccccgattcacaaaactatatagttgagaacctcataggtagattcatagtagttgacagtttgcttaaacaaactgacgtggttgtttgatctacgcaaaagatgacactggttgttggttttaatagtgaaatgtcatcctaaccatttaactagctatgtccaacatattatgtatttatttctctaaatattgccagttgctctccaatacaaattacatggttgcctcactatctgtttttaaaaaactttttgagggtaaaatcaaactgaaattcggcgatggctcgtccccttgcaatcg

SEQ ID NO: 149373 - DNA, 381 bp, Zea Mays
cgggagttgaacctgcaagattaaaggctcgattagttgtgaaaggttttgaacaaagtgaaggtattgatttcaatgaggtgttctctcatgttgttcggcacacttcgattcgagttatgcttgctattgttgctttatttgatttggagttagagcaacttgatgtgaaaactgcatttcttcatggagacttagatgaagagatttatatgacacaaccccagggtttttctgctcctggtcaagagcatttagtttgtcatttgcagaaatctcttgatggtttgaaacaagatcctaggcattggtataagaggtttgactcgttcatgcttgcacatggttattctcgaagcaattatgatcattgtatttatt

SEQ ID NO: 149374 - DNA, 615 bp, Zea Mays
ccaatatcgtttgggttgagccatcgacgtcttgcccaaactttaatccttgaaatcggatctggttccttaaacttcgtttgaaattctttcacgcttgcgttgcatgtgtctgtctgtggcctggcatcgtggcgcgtggtaggtgctaacctgtgtctggatagcacacaacctctcgcccacgtgagcgatgcatgacgttgcttccgaaagaatcacactttcgatgccgcatcgatctcgcgtatttatttcacgatatgtcgagtcttgtgtccgtttaaaatttatagattcagataatacgaattcggaagctcgacccactcttatgattgtatcccgaacaaattaattggaactcgatgaaaatggttttcagtctgaaataaaccagaccagtgtaattagaactgaaagcgagtaattggtaattaatttggatcgctaattcgtagtccgaaaaataaaatgtagtctaaaatgtatttcaggctgactcatttaaactctcacaaactctggaaacttgataattgcatttaactttgtgtaaagaaataggagagggaaaataggaaaattcttgtcgcaaatatctccctgctgccg

SEQ ID NO: 149375 - DNA, 481 bp, Zea Mays
ccgcgcatgtatgtggcctcgtcgggcgagaactacggtcggggaccagaaatttcacgccgatgctcaccccatccaccaattcgcagaatgtcatgggcaggcatactcgttggtgtattcgtggtaatatgctgtcgatcgaatttgttaccttccgatcttcgcttagcagcttctggggatcgattaggtcactggtttgtcgtttgttcggcgcgccggcgaggtgccgccgcagagattcctgttcaccgcggtggctgatcggtgagcgaggggatgagcgcgtgaccatcgatctaggatcgaacggacctcagtagatgtgggtgtaccgttcagcctattaagttgtggccgtcgatccacgatctagcggccgtggggcatacacattaagacgtgcattcaatctaatctgaatcgttgatccctgattgggcggatctgggtggatctcgaatctttgaaacataag

SEQ ID NO: 149376 - DNA, 376 bp, Zea Mays
aacaatgcattttgttggatcagcggcgttctggttacaatcatctgatccggtgttgcgtctggcaccgtggtcggagttttgtgctgcagtgtgtgctcgctttgagcgtgatcaacacaactctcttattagacaatttttccacattacacaaagtgatacagttactgaatacgttgaacagttcgataccctcatccaccaaattcttgcacatgatcctcaatttagtgtttctgccatagtaaatagattcattgatggtcttgcaccagaaattcgtgccatagttctgattcatcgtcccctcgatttggatactgccgtgtctctcgctttgttacaggaagaattggtgcaaccactggtgtct

SEQ ID NO: 149377 - DNA, 494 bp, Zea Mays
ggatattattgtccttgccgcatggaattctattgagtcggctacatgccctttcaagtccctggaaatgaagttacaaggagctgcaaaaagtttgcaggcctagagcgaaaagcaggccgggcacgtgagatcccaacttgctcttgctaaagaaatcctccatatgctggaaatagcgcaggatggtagagtgctcagccctgctgaacgctggctcaaactcaggctcaagaaacaggcattactattatcatcttgcaagagaactattgcaaggctgagagcaaggatttcatggctcaaagatggggatgcaaatacaaagttattccaccttcacgcccgtcatcgtaagagaaaaaattttgtggcatgtctggttgatggggaacaaatcctaaccacccatgaggagaaagctgcctgtgtggaccaattctacaccaatctgttggggaacagtacggacagggttcggacgattgagttag

SEQ ID NO: 149378 - DNA, 467 bp, Zea Mays
cggcaagggaaggaagggcactggctctgaccgcgtttcggcgcggagattccgctgtgattgcgactttgtgccggtcaacggagtccgccacaacaccgtgtgagcgcatcagtgtcggccgcaagggaaggaaggaaacctcgttggggcagtccctcgcagccgtggacgctcgccgtcatccacctagcaatcgactccacccccgttccggactctcggtaagcgtcactctttgtacgtagtcgttcctttactgagcgggcttcatggccggtgtgaggttagacgagagaacagagtgagagataggagagagaaagggatgcaggagcgtcgtcgcgcctggcagctgagggaggaagaaaggctccctgtcgttcgatcgtgaacggacgatggagattagaagggatgtagtgattcggcttggtgattcgcgtcccttggatcccagatgtgtg

SEQ ID NO: 149379 - DNA, 814 bp, Zea Mays
gcttggtaaagtgaacaactttcatatttagagatttccacgttctgtagaagaatttggagtaaattacaaaagttcggatttgggtaacttggattcaacccaaaataattgaatttacctgtttctagagccctgtaacttttaatccgtggacttttggtaaaagatttctataacaagtttgtagagtaattattggagaacaatttttgttaagtataatagacctaaaactatgttctactgggagaaaaagtggtccaaaaaggtgatgttagaattttggatttcagacttaacctaatggctgagatctgaatttcagcacaacatagccatgtttgtacctctgtagtggccaacctgtggagaactaagttatggttgttatagcaaagaggtagagtgatagtaggagagtgagttttattaaaggtcacagccctaaatctatatgcaacttggagaaaaggtttcccaaagaagggttggcagatttctagagtttcagaccaggaacagtaagtctgaatttcagtattggtggttgttttagagttccatttgtggctgatctgaaatgtttggactatggagtctatagagaaattgaagaccataagttggaggacaaatggccttaagggtgatggtcatgattctacatggaaaatggagtaaagttagttccaaaagcagttgtcaggtttgcactaattgaatgtttgatcagctgctgaaaactgaaatcagtaatggatgcatagtttggaggctattggtgactgatttatgtggttttagattaaga

SEQ ID NO: 149380 - DNA, 576 bp, Zea Mays
accatggagacctccgactttgcgtatcaattcctcgcgcggtctcattttcgttcgatttcctaaaggtgcggacaacttatatagttatatcactgttttttgaactcaaatctcatacttcttgatataaaggtttggtcctcttcgtgcttaaccaccgtctcctctgctgcgatatgcatcggtcacacatggctcaaatgtcggcgcctcctcctccaaatccgtctgacagcctatgtgatccgttcatggcgattatttctccctcctctccggcgttcgtccctatgcctctctctccattcgcaaggttagtagcaactacagctaaagttagtagcaacacattatgctttgcatttcttatcttatttctcttagtaccaccattttattgttttttaatccttaaattgccgaataccgaaaatagaatataattgagagactaaaaaatagtacccctttatatacacaattttcaaagaacatgtgcacttattataggctagcctctcatataaattaaattatggatacatcattagttttctgaatttccaatcgttc

SEQ ID NO: 149381 - DNA, 358 bp, Zea Mays
tccacagacaacagaactatgtactatcgtaactgccaatttgatgcagaagtttattactttaatcacatcacatgctataaaaaatgttagaacctcgttagagttttgggtcagtcctcatgtaattacctgcatgcccctagtgtaatgggcttggcccaactactcagtctatgttaatacactcccaaccctggttagggttttcatttcccccaacttggtaccagagccagttttctctgtccccatcatcccatcccatagccgcccggctcggccacccccccctccatgagctcgctggcggcaacgggcactctgctcgcgtggcccctcttagttgaactacgcg

SEQ ID NO: 149382 - DNA, 613 bp, Zea Mays
ctcgtgattcctccacccacggacagtcgtcgccggacacggacgaaaagggagaagactaggacgacgcgtcgtgagattgatcgagatggggtcgtcaaacctctccgtcacgggtgggtgggtctgcgcgcggctacaccatcaccatggatcatcatccggcttccggtccatcctccatggatggccgatggcgtacgtcgtccctccggccgagccgtgtctgccacagccggggagccttggccgctaccttccgccgccgtcgcactcgtcaacaacatccggccaccgctgattgctgaagcaggtcgatctcctctcctcccctcctgagttgacagcagctaagagctggccaagcaaagccaagcaacatgcatggattcagagtcgttagctattggaaaaatttactgataataataacagatcacgacagctacagctacagctaaatgcatggctcgggcaatcaatcgacatcgaggtacaagttagccactgaatttcacagcgaaagaagacggcgatcgatcttagcaatccacttggataaatcgcagagagcctccttcaattcgatgggaatattatttgggagggatgc

SEQ ID NO: 149383 - DNA, 460 bp, Zea Mays
tccagtaagtgccaagtagatactataattttcttagaatttttggagtccgaaaagtgcctgttgcctttctagccttagtttaaaattgaattaattaggaattgttaatgcatgtaacttgataagatgttttggtgtgcctttgaagcatgataccttgctggtatgattgatgtgtgtgtatgtatacacccatatccatgtatgccttgtctaatgatgagtgatattgggatatagatggcatgttgttagggtacatgttcttggatgatgttgactactttgcataagagctttgcacttactctataaaatgagaagtaaaagatgttcacccgcacacatgcactcacgatcatcatgcacttctgcaccttgcacatttcccgtattcacatacgcatatgcatcatacaggatcacaggaggatacaccagttgagatttccgagga

SEQ ID NO: 149384 - DNA, 632 bp, Zea Mays
agacaaagcaggagaaggaacaccactactttccccactagctatgtaacaccggctgttcttccgaattagagggatttcgtcctcttcttcatcatcttcatcaacaacacggacagtacacccattggggtcagtttcagcaggatcacacccattggggtcagcagcagtcgggtcacacccattggggtcagcttcagcaaattcaggcactggcacttcctcagcaataggaacagaaggaccggcaccctgatccaagctagacactcgacgaagacgtctcttcttctttttctgcccctcagcaggagaagtgggttgatcggctcgacgagaacacttcgggcgaacactgacagacctctaagcatccaaagctttgctggcctcagggatgggcgccaccactagtgttttagcaggagtggcgtcagaagaatcctcagctaacatatccagcatggcacttatctctgtgtcacttggattcaaaggcacctcaaaatgaacctgcctctcgtcgtcaggaatttcttcgagtgaggcaaccaaagcactaacttcttcaggagagggtcgcactctaaggcccaaaccgctatcaccagcaggaggatttgacacga

SEQ ID NO: 149385 - DNA, 425 bp, Zea Mays
agccttttaggtatgatttaacgcgaggtgtgttaaataagcttagggacaaccaagaaggctaagaccgatggatagacaagtaggggttagcgatgttgcaatgtggcgatacattggcggaagtagtggacgacaccagtggtcaacgcccataggtacgggtcccatgtgcgctacaataaacctggccaacgcgcagtatagcatgaggaccccaccagcacgatggatcatatccgaaagacctagttacagggagaagaatgtgaggccaggacccctgccatgtggccgcgtgggaggccccagccacgcatgtcttaaaccaagctcccgtcctgcggatgcccccaccaagctatcaaaggggtccggatgcgccacgtgtccttgggctccaactgaagtcggtggccccaagg

SEQ ID NO: 149386 - DNA, 580 bp, Zea Mays
gtgtgagtgccgtggtgtgataaagtagtggtggcgtgagatatttgtttgaggtgtgcgggtatatgccgtgatatggttatactcgcaacgagaaaagatgtacacattgggtaacacgacgcttaggtcgctgttgtataatcgaataaaggatgtattattgatttggagtcaaaatgtggggtactagtggtacgctaggcaggcggtgttccaaataaataaatcagtggatgtggtagtcgtcgtgcgtgatttatggttagtgagtagttgaattacaagttatgcgagaatcatgttagaaactaatgtgcggcgtgtaactgtgctcgggtggtaaaccataggtcggtaggtattattggtgtcgttggcaaatggggatgattcttgttgtgcgataaaattggaaaggcaaagaacatgggtagtgtgtcgatcaagttaaccgataggttccgtaaacacacttgtggtgcttttatgtgcatgataagatcgatgccttgtcgtcgtagtcttaggaaattttctgaaatgcgctagtgctctactgatgggttgaatgaacttg

SEQ ID NO: 149387 - DNA, 583 bp, Zea Mays
ccacacagataaattgaattatttgcttagaaaaatacagtgcattggctggcaaatactagaacagttctctagccagctatcactagaagaaaaaaatagggataaggaccattggcatggcatctttttcaagtagtacagttgaatacttcaaccaatgtgtttgactataatacagtgggcctcaatggaataacttgcaccaatcaaccaaaaaataatttgcagtcgaagaagactgtctgcataaaagcaggacaaacttcttcccaatcagcattctatattccatgtagccgatcacgctaaactgtatgaaggcgacctgttgttaacttgttattattcaatggttcccgatggggactttatggcattagcagaaccgtatttggcaccccaatggtcaatgcagagttattaaattcgtaagtacgatatgcatatatagttgtatcgcatgacgtaagaactactggttttggtcgagaaaaggaagtgatggtgaagtgttaatttactgctaggagagcaggagtacagcattcctccgtaagttgtgcttgaacttctctgattt

SEQ ID NO: 149388 - DNA, 383 bp, Zea Mays
atcttgctaagacaaactgcatgtgaatatcaacagaatcggagtgtgttgaggacgaagcaccttaggctgtctctggatgaacttctccgtggcatcaagaagccttgtattatcaactcctgccttagaaaaaatgcggcgggcaaggccattccgttgctccagcagggatttcatcatatgctcagtctccacaatctggtgcttgctctccttcgccacctcaggggatgagacaattgcttgccacgccatctcagtgaactcttgttgtgtaatctgtcagcgggataggtgctgacgagtgagaaatatgtgtgtgtgtgaaaaaaatatacaatttcctggctcttcatcaaaagagtatcagtagtataaat

SEQ ID NO: 149389 - DNA, 1249 bp, Zea Mays
ggaccgtggattagttttacaaaaacagagggtctcttttgtaaggttgacgcagcgaagaggtacagagccatttcggccgttggattagatgtgatcgcaccagattaaatccgaaccaaaatgaaccggtacgcatccaggatcgctcgatctgagattggcggctacggttttatgagatccagatctaatcggagccgtccagagagcgatcaacggccaacgcctattgtttcccccacggtggtcggatctaaaactaacgactctgatgtaatacaacgaaagggatatgcccaaactaatctataccgtccaaagctggatttgcggtccctaggctttcttctacctcacgatggccagggacagcggagtagaggccgcagcggtgtatgattggcaggattctcgccagtgccctagtgtacggatccgagattaactaggtgctacttgatacgcgcagtaagtataactagatggatggggttctcaccgaaggttctggcgttgtggtctgttcggtgtcgaagttcctgcctggtgaggaatcggcctcgctcgatctcttcgcacacacggtactctctctttctgagtgcgacagtgaacaccgcctcccttgctggattgcaagcgcagcagcgaccccgtggtcggctttcttccttggtgcgccaagaacatgaggtaagcgcggcggctgcaatgattacctctccatatcagttcacgttggtggcatctatggctcgatctctctctctgtattggcggtagtgtttggcttctcaggatgattatggctctatgggtcaggagcatgcaccaggctcctaatatactccgacgtattgaccagggaatacatatagctggcgtaacaaccaacagctggatacgggagggcggctaggtgatccgtgtttgacgcgcgagtctgttacagccgtagaataggagattctgttgaatccacacccacaagcagcgacccaggaagcttagatcacgtttcgtgaggacttctgatggcttgcatgctgacctcattatgatgatagggtgacgcaggctccggcaaggagattaaagaattgataaaaaaactacatgtgatcatgggttgctatatggagtgggctgcgcggtacaagggagggctgggccgactaccgtggtttggtaagtgtttttctatataaattctctatttccaacctttataattattatcttatta

SEQ ID NO: 149390 - DNA, 333 bp, Zea Mays
ttggtaatgtcgatgaatgtagcctgatgttgtgatatggagggcattgcttagcacctgttgcatatattgccaaacagaattaggtttggtcactattgagcatgaggcatgccatggcagtgtggtttacgcccttctttcaaacaggtactcatcagcaaatagatggaatgattcagaggaagtatggaaacagaagaaacaaaaggaaattaggaagagcaaagacttgagctgggttgagttaggggggagcagccatgaatttaagctggtggtagatctcatcctgacactgaggatatatacctagtgctgcgtggattacgt

SEQ ID NO: 149391 - DNA, 543 bp, Zea Mays
gggtaagttgccaagtgaaatttggagaaaatcgaccctcaactctggctgtcaggtgctctgaatggtgttcaccatggtacagtgtacaactgaaacagataagatcgccagcaaacccaccgccgacgaccaattccaccgtgattcgtgtcgttgccggcccgacttgtgctcgggatgggcagataaggacacacggtaaaagatcctcgccgacggtgagctggagatcactctggtgcctccccgtggctctctcttcctctttgcggctgagccgataaactcgccggtgaacgccgcctcccggctgtgcgccgcatggcttagcctttctaccgcgctgtcgtgactcccttgggccatcccatcgtcgccggggaggttgccacgccgttagccacgaattcacgtgcaccagtgctttcttccacctccggccgccgcgcgtccatcgtaaaattcccggccaccgcttgcgacgcctataaattgagccccccaccagttccgcaaagtcatcagctagccagcccccgc

SEQ ID NO: 149392 - DNA, 855 bp, Zea Mays
cgcgtcagtggaggatggcggggccgcacggggcagcgagggggacattagggctgcgcgtggcagcacgggagaggacagggccgcgcatggtggcgcagaaggcgttggggtcacgcgaggcagcgcgaggggggcgtggtcgtgcatagcacgatagagggagcaacagagtccgcctcgaggagggtgtggtattctgaggaggcagcgtaagaagagagagaaagggaagtcagactcgtcaaagacgacgtgacgagagacgagctctgtgagtggaggtctaggcatcggtaccccttgcgatcaggggagtaccaaggaaaacacagtgagtggaacgggacacaagcttgtgaggggcagtggcaaaaaggttaggattgcatgcgcacccaaatacacgaatgtgatcgtaggagggagaggtgccaaagagagtaaagtagggatgaggaaccgccttggtggggtggcggttgagcaaatatgtagcagtggccagcctcttgacctagtagcgggcgggaagggaggcctagaacaacaaggaacgcatgacgttgttcgcggtgcgaatcatgtgttcagccctgccgttctaagaagaggtataggggcacaacatcctcagctgagtgtcgtgggagtggaaggaacgggacgtggagttgtcaaactccctcctgttgtcccctggacagcccggacggtgtgtccaaactgattggaaacccaagcggagaagtgagaaagggtggggaacgtatcagatttcaagcgcaagggagaagtccataagtaatgtgagtagtcatccaagagcaaataatatttattgccagaaacgct

SEQ ID NO: 149393 - DNA, 590 bp, Zea Mays
atggtcttagtcggtgctatgacctcctgaaggctgtcatcaagtggacaatgtcgttcccccttcgacgacgtctgtaacgagctacttctcgagtagctcaccatggacgtcgagttcccggcgcctgcaacggtgctctacgacgcgtcctccgtcggcctgtcccctcgcccttcgacgatgggggggggttgcacgccctcttgccgcccccactactcctagagttcctcgtcaggctcccaactccgacgggggtcgtcggccccacgagggcggccgcgggggcgatggccccaccagtcgtggcggcagtcccatgtggtcatccttctacaacccctggaccgtgatcatcactatgcggttgagccctaccatgggtgcttcctcgccacgccccccgcaatcggctctactagttacgccctcctatggtgtcccaccgccttcggcaccccctctaccatactcgttgccggcttcgcctctcctccctctgccgggacccctgcctcggccccttggtccccgttagctggaggttgggaccaggcttccctcgtcgcctcgttccgcaccatggc

SEQ ID NO: 149394 - DNA, 738 bp, Zea Mays
gttatattatataggtgtaaataagtatttagagctaacgactatggtttaaacccttgtgtgtgtatatatagcatatttttgtcatttgaacattatatattgttttaagcccgttaggcccattgggtcaccccgacagattattaacctagcaggtcatgtctaggcctcactcgggactagaaatgtcaatgaggaattccacaccgggtttagatatctcatacccatccacatgaagctatagctatctccatctccataacccatacccatcctcattcgtgtatcgagtcccaataaattctcattcttatataaaaagcatgaccatattatattttatatgacatcaagatacccaacaacaatacatcacaaataaatatgttatctaacaagaaaatattgtttaaccacacaaaagaggtgggcagagcggctggtggctatactcttgggttgggtggatgggtgcttaaaaaggttgggagagttagagttaattgttgggcttattgtctattgggttgcatatataattttactagatagatattatctatgggtaatcatcatgttcagattctactttctcgtatccataccaaatggagaaagagtttatccataccaaatggagaaagagtttctcaaatctatacctttccatacgatacgaccctgatagatattcgagtatcagcacacccccactcggacccgttgaccggg

SEQ ID NO: 149395 - DNA, 340 bp, Zea Mays
caaaatcttaatctcacatatagcatagctgtgtccaaattagttcccatctcatccttttagaccatggttgggttagttcgcaggtcaaactatgaggagcccaagaactaccgtgctaccttcaaaggtttctgttgcaacaaatggcaccaaaatttgggtaagacaaggaatcagtcttccagggaactggtatgaattactggagtatgttagtttgtaaggtcagcagttcttgtgccagtttctttctgtacctgtctgggtcagatcacaggtaacccatttggattaaatgccttgaaatgtgcagggaacctagagaacctcctagccc

SEQ ID NO: 149396 - DNA, 348 bp, Zea Mays
gtttactctatatctcaaccctatactaattatcatatataattttatttcttcccaattctctttctctttgcactcaactattgaaagacacaggttgtccgcccgtgtacggcgagtaggagggaacaaactctacaaaagtacaaatagagttttccatgctctctcaaattttacagttgcatttacaaagtgtctgcgccatttgtctactgcatatgtataccgtttgctttggcgttcgtcaccgcggccagcctaagtgttttgtttccggtttggacggtttatgggaaaaaaagtaagttactatgttcattcagactatagtttcttacctgtgcg

SEQ ID NO: 149397 - DNA, 591 bp, Zea Mays
cagccagccggcaacgttcaagctccccgcggtggcgccatggccgcccccaaccatccaaatccaagctcgaacatccaccccgagagtgataagagtgaagcagatgaaaatgaacttaggggagggtagcataccttgaatagagcaacagagtgtcctgcccacaacactggatctccggcgatggtggtctcacaacgacgaggaaattcggcggctccgatggttcccaaacccaaaagcccctccaaacacgcgcgacatagactaacgagtcccccgctgagaaatctctactctatcgaacgctttctctcacgacggcccgccctctcttcctccctctctcccatgcgcttctcctctctggttcttctttctcgatggtgtttgggtggcgctggagaacaagccgatcgatcgagatagggctaaggggctccatatataggcaagcaccgtccggagaaacgacataaccgagccccgcggcgagctccgctcatttcagtgttcgctcgcaacgacccccgatagggacgagtccgacatggcggacccaccagcagcatcccaaggcgagccaag

SEQ ID NO: 149398 - DNA, 506 bp, Zea Mays
caaatagagctggccgcgcgcacgcaaacacacatatatatacacacatttatatatagactcacctcaaacgttgtctgtccttgcagagaaaaaactgctttcagtttcacctgaggcggcgccacattccttatctcctttaaatcctcaaaaaactgatcagattctgataggctcataaatgaatagatgtacctatcttcgcatatattagactgcagggtcaaattaaagttttgtgttggtagatacgtcagctccctcattgtgacaacaagagtgtaagtggattttggtggcacaattccacttaggggcatccttacaaagatctgctgccaagactccattccgtcttctatactaagattaaaagccacatgttcatctgttttatttgttaggtgcagcgtgcacgggatcaacttgtgggcatggaagggaaagtggagtgtcagcgggtggacgtcaagcaaaagctcgcttgaccctggggttatcac

SEQ ID NO: 149399 - DNA, 357 bp, Zea Mays
tgctcatctccttgaaatctttcatactctcatctttttatgcttacctttatatcccaaggtctgtttaagatatttcattctacatgcccttgaccacccttgtttcttaatgatccatgagcgatcattttattttgcacgcccgtggtaatctcgttgtttccttgtaactttcttcgataatgaatttttacttcaactcttgtgtcggaacctcacttatcttatccttgattgttttctccacttcgtcactttgcgagtcctgccttaactctgtccatggattatgcttttcatcattatcacctgtatccttatcacccctataccttaccttgatgtttatcttat

SEQ ID NO: 149400 - DNA, 600 bp, Zea Mays
ttgcaagtagcaaagaagaggatacagctaagggtcagataggtaaattaccactctcaaattgaggtggaaaagagtaggatttaaagggtaggttcaaaataagcaccaaggtaaagatatagatattacaagggttaaaggcgataataggcaagggtgtaagagataagaggttaaggtgcacaagaacaaagggtatgagtacaataaagaatagagctaaggtaagactggcacgtgacaaaaatgaggttatgaccaagggtgggataagtagaaccgcactctcgaattgagaggggagaagggaggttttaagtggcagacatatgacaagcatcaaggtaggatcacaagggtaaaggcgatagcaaacaaaacacattaaacaatgaagttgaaagtttgcaagcaacaaagaataggatacatcgaagaaaaatgggtaagatacaactttcaaattgagacggacgagagaagattttagaggaggtataaaataagcgacagggtgagatgtagagatgacaaaggtaaagatgatatcaatgaaagcatgacaaaggatagaattagggtaagactcgcagaatg

SEQ ID NO: 149401 - DNA, 677 bp, Zea Mays
ccctggactgaaaccctagggggctaagtgcaaaattagtgcacttttggactaaagtgcaaaaaccatgaaagtaaggcaccttaagtcatatggttcacaagtatgtggatttgcaagttaaaccttgagatttgggcttatttgcaaaaagtcctatttgaactctattggctaagtcttaatttcaatgggattggctcaactttggagccctatatctcccaagttataaagtttttgccctaggtcaccacatcaactttgtagatctatgaaaggagaataactttactatagagatcatgccttggtaccatgaagaattctgagataaatgtgccccaagttgggctatcagtctgtctgaaacctgaaattggatattcactgacatgggatgaactttaggggccattttgaagatgatccagtgggaatttgactaggaatgctatagaaaaagtgaagatggtttgtagggctacaactttgctgcagagcattggttgtgttgccatgaaaaattgggagaaaatctgtcctaaacatcgtctgtcaagctgtctgctgaaacatcccatggtacaatagctgaatcagatcccggatgcatccccctcgccaccgatgatctttacgccgtgattcacgtcgtcgccgcgattcgtgttcac

SEQ ID NO: 149402 - DNA, 325 bp, Zea Mays
gcaaggcacagaggagggaagtactagtatggatcaagacattaatgttccctgatgggtatgcggctaacctgagtagggggtgaacttatctactatgcgagtcttagggatgaagagtcatgactaccacatatggattgagcggcttcttccgacgatggttcgaggctatgtccctgagcatgtctggctagtgcttgcagagttgagctatttcttccgccagctttgtgccaaggagttatctcggaccgtgattgcagacttggaaaggatgtcatcggtgttgttgtgtaagttggagaagatatttccacctggc

SEQ ID NO: 149403 - DNA, 1246 bp, Zea Mays
atttgggacaaggtcgattaacgatcgagctttgcacatagggctgcaatttgagaagaaccatttctccttcttggaacacccgatcagatctcttcttatcagcttgaattttcattctgttttgggctgctgctagctgagtctttagaatttcagagcactgctgcctctctgttagtaagtcatgcactgttgtatccccttcatcagtcaacactggggctgccgcaaacaccgggtcatatccatataataccttgaagggggagcatccaatagaagtatgataggatgtattgtaccagaactctgctaatgggagccacttcttccacttagcaggacaatcatggatggcacatctcaaatacatttctaaacattgattaactctctctgattgaccatcagattgaggatgataggcagtggttagagccaactttgtatccaatgactgaaacaaagatttccaaaagtggctagtaaaaattatccctgtctgagaccaatgacttaggagtgccatgaagttttaccacgttgtctaaaaacacttgtgccacagttgctgccaaaaatgggtgtttcaaggcaaaaaaatgtgcatacttagaatatctatccaccaccaccaaaattgtatcacacccttccgacttaggcaggccttcaataaaatccatagtcaaatcttgccatgcaccctggggaacaagaaggggttggagcaatcctgggtaaaggactccttcagacttagcatgttggcacaatgcacactgctacacaaatagtttaacatccgacttcaatcctttccaccaaaatagcctcttcaccctctgataggttgccagacagcctgagtgacctactatactgtcatgtaatgccacaatgatcttagttctaagggctgagttctgagcaatccaaatctgagaacctcttctgatcacaccctgctgcacagaaaaaccttgttcattgggactgtgaagcaccaattcagccaatgacctttgagcttcttcatcagtcacataggaattaagcacttcctgtacccataaatcacctctgtcaaggtttgtaatgccataaaatgacccaccttgataatgcatctgcagcaatgttctccttcccttgtttataaacaatcttgtattgcaatcccattaatctggccatagctttcttttgtagatctgattgcaacacttgttcagttaggaag

SEQ ID NO: 149404 - DNA, 379 bp, Zea Mays
atgggcactagttaaatgccaaaacaaagaaaatattagggtaactattagaccaaaacatttactagtacacaatattatatatgttatccacaaaagaacattacactttaactaataagtgttatggaaatatatattaaaaagggatcaagtccagaacgtcataggctaagagatccatgcatccattgaataaaagtttattcatcattggttgagatggtttggaaatgtacaatagagacctctaaagacaccaatgtgtattggatagtaaggcgccacagtagacaaaagataggcatcaaaagaccaaagataagatgaaaagaattgtaaaagaagacttacaatactaaaatacaccaaagaagcc

SEQ ID NO: 149405 - DNA, 1280 bp, Zea Mays
ggcacatggaggtggattgatggaacattttaatgtcaagaagataaagtgttggtcacatacttcttctatccaaggatgaggcaagatgtagagaggttcgtagcttgatacacgacatgtcaaatagctaaatcgcggttgaacccatatggtttgtatatgttggttcatttcttctatttcttgggtggatatatatatatgaactttgttttggaattgcaaagaactaataggggggatagtatttttgtggtggttgatcatttatctgaagtgataacttttattccctatcataaaagcgacgatgacattcacattgctaacaaagtctttcaagaaatcattcacttgtagaggtagggacttttaaatatatgctcctagcttagcgtcatagatcagttttgcacctctctagtattaaaaacgcctcatccattactactagaggggtagaactgagcagtggtgctaaagtaggggaataggattaaaagtacctctaaagaagaatctatgtctagggttagtccatctttaacgttgcagatttaaagccatatttagatgaagaattgagtcaagaatgactccatttcaattgaggaaggatgataaggacatcacaccttcagatgcgcctactaatcatccgatcgttatataaggtccaatgacttgagcacaaatgtgatgattaaattttcaaaggtaagtgatcctttcgataattttgggaatagattatctaattatgttatcgtgcttgataacattagagagggtcatgaagtaattgaaggtgtggaggtgaagatcaaaaagaacgcccaagaccaattaaaggcattagtccaactcgagtttgagtctgagtggacctttaggaccatcctgtagtaaaacagatgtgcgagacatacacgacatacataatccattttttatgatcaatatatgaatagaaatatattttcataagctaactaataattttgatctaaggtctaatttccaccggaattaatgaaattatcgaaataagtcagcattcaaaatatgttagtgttgtgtcacaattttttggttggctaggcatgtgttgtcttagagcccattaggggacacgttcaaggggtgtgatagccttaggatatataattagtagccactactcatgttaggactcaagttttgcttttaaaaattatctttgaataattgtcattatagggttataaaaccccacttttgtgatcttagtcatacat

SEQ ID NO: 149406 - DNA, 301 bp, Zea Mays
gttcaaccggcttttacccattttctcccaacggctgtcagcttttggggatcctttatataccccctcacactctctctctcattaattcctgtctctcacacgaatctttggctgaccaaccttcaaacaagagcattcacttcacctttcacacccgcaatcgcatctccttcaatcatttgaaggacccttggtgtgaggtgaactcgatcgaactcgctgtcaatttcttctcgattcttccattctcttgttcttgagctcgttgcaaacttaatcgtgtgcggatttgttactc

SEQ ID NO: 149407 - DNA, 377 bp, Zea Mays
ggctttaaatattatgattagcccaattaactttctcttgggcatcttaatccttttagaggtatattaataacttatttcacaatctatgatacttaattgttatgattttgctcccactaattttgatgttctttaagaacataatcccttgtacttattacggtgtaatgtagataactcatttacttagaatccaaattcctatcgttagctagattgtacttttgtcttgataaggttatagtcaaatattcatcaatcggtattagccagaatgataaaaaaatgaggcatacgagtttctaataacaagctttgttaaactaatttaataaaatatgcgttggccaaaataaaatgtacaacaactttcg

SEQ ID NO: 149408 - DNA, 3726 bp, Zea Mays
gctccggcgccggatcgagcgtcgtgggtaagtaacctacttccccccttttcccttgctgtggatctgcctatctggtccgttctttgttgtaccttgcgcgggtgcgtgtgccccgatctggcccctgtattatctgatttgactatggctggagatcaatatgtatgtgttgtgcttttgttcgggctgggttggacagattattcttttgtatattgcggcatggataaccaagattcttactgggttggactaattgctagagaatcgatcggttctacatgcatgcaagattaatagccctatgaatgctttatactggttcagaaatcagaactggtgttaattttgctaggaatatcggattgattggattctatttttctttaagctttttctatctagacaggggaatcaagcacatccattggctctgtaagtattttcttttcttccaatggcctgggctctggtttcctgattattttctcggtagtgcaagtcagtacctgatatatactttaatacatttaaagaacaaggttcatattgcacgaataaagggttaggggtgagattggatgattaggtagcagtgcaattagtctgtttgactttgtgacaaaataaagaagaaatacattctcttgatcatgaaatggcagtaaggatagaattttttcattggttgagtttgtgcctgaaggctgacagtggatctatttggcatatttgtgctgccatggtgctttcatcagtctaatattatttttccctttacttcagggttgttatattcaaaatggagctaacttttcttgaagcatatgcagttatgcacatgtaaaatgagagcagtggatgattaggagataactagggaacctatacttcttgtgtttcctttttccttgcagaagaggtggttctgatctgtgcaatacttacccgaagatgaactacacagactgatttgcacacaatggttcccttttttcttttggggaataaactgtctccatacaacccaaagatgaactactattttttgttttatttttgacttttgaggccactcattcaaatgaattacgcatactgatttgcacaaagaatgatgtgtgcaaggcatctacatgttatctattttaagaccacttatcccattttgactatttttacgtttatgttctttttttcaattttttgtctgcatataggttgagtgtcagtcatcttgttcttccttatgtttgtccatgtccttattctacttcagttcaatgcttttctatagtgttgtttgctgttttatataaaataagaaggcccttacagtaaactaaaccaacctaggaggaactatatacattgcaaaaagaggactttagctaatgggggtgcacgcccatatctcccaccaactgagctaggctcaaatcctgtttttgtaacatataagattgatttagtagagtgctgatgaggtctggcatctactacattgtaatggtatctgaatggaaccaaagcattttaaagcatgaatccatatagttactttagatgatatagttgacttaataacttataatctgtagctatggtacattctcaactgtcttctttccaagacatttagaatggtaaagtggtatacagattttacagggtatctgttaatgaaaatctgcagttgtgagtgcatcacaactgtgtatatatagcatatgttgctctttgccaaatatcagggaaagtggaaacatctcaaaatttagtgataattaagactcgaaccttcccaaggagttaactcctttcacattcaaacaagataccatagagaagaaaaaacagatgtacttgtctggacaaaagtccatgcaaaaatgaagaaacatctatgttctcctaatctattgacttgtgcagacaaaatcatctcatacaagaggtgatgattgaagactactgaattgcttctgcattctaaaaaggataaggtacccagccttcatcgatttcatgtgcacaggctgcatccatgtctgcatcagcagactccgtcgcacctgaaggtaaggtaacttgtgctttcaaacaattaataagtttgttgtgtaaccaacctaggccaccttatagattgcctacccagacagctaccagagatattgggagacttagctgacagaactggtgatggtgatagctctgcttccatcactgctgattctaggtacagcctctgcctctttgtaccacaaatccaaagctgatttagaagcgtctcagcctttcttacttttactggattttgtgcatgttttcttcttttgtttcattcatgtttttctagcggtctgcaacatgaattgtgtgggagctttggatggttacagttcttttttgggaggaaggacaaaggtagcaggtttagtaggccttcttatctgataatagaaatatagttaataaataaatttgtgataaatgtgcttaaaaggaaagctcagaaggcggcgaacccagcgagcggtgtggcaaggctcacaagcgcgagagcaggctacactgcagtggttgcaatcctgttcttttcctgaccaagtaaaacataacagcaattcatttataccatgaaggaaattctttgcaggtaacattgtattttactaaaactttttctttgatgtttcccttcttgatagtgtaaattgttctgtatccgattagaaatagagaacactgaatgactacaaattagataggataaacagccttacaaaaatcctaaatcatacctatctgttccaataacataggagtcctaattattttacttttagcgtaagtcaaattgtctagaaagttatacaaatatctactgctcccgttttaaattataaatcgttctacttggtgctatgcttataatttaaaatagaaagtacacaacactagatgacagaactatgataatctatgccatggtggatttaataaaaactattttaattttataattatcgacgtaatttctatagacttagtcaatgccctatagacttagttaatgttaataagagaaagatagaagacttacatttataaaataaatggagtattactacaaatatattgagttattacaataaatacagaacaattatacttagacaacatcaacctctcaatttagagcaaactatattataatatgaagaatacagattattgttgcaatgggatgtattcttccattttgtttattacatacaattttttaaaaaaatacatgctatctcctcaaaatgctgcccatcagctttgtttggtcatcccatcaatttgctaggaatagttgtttgtcttcagtaatattcagtttaggatacacgacatattacttacattcagtaatttcatattttgttttagtaatggcatcatctggagaccaatcacattctgcgtcctctcctttgaaggagcagcagtaggagtttgtagatgtgtcaagctctgagagatttgatatacatgcatttgattctccacctgctcggcgctctttgaggaaaagagcagccccatctccaccacagccttacacagatgaaaatcgaaggccagccaagcgccggcaggtatctaagaagggcaaggagaaggtggaggatgatgaggtgtgtatctaagtattttttacctatctgg

SEQ ID NO: 149409 - DNA, 751 bp, Zea Mays
ctagtgaggcccttgtcgacgtggaccatttattggaaagcattttataaaatccactcatgaatcacaaccacgggatgacgcaaacaacataaggtattcttatagtacaaatttttaaatgagttgccacaaaaggcgtaaacaattcagatcccacaatgtagacgatacaacaaactttagatgggaagacatgaaatatcctatcaattttcttaacattgtggtgtgtcataggactaagaaattgagttttacccttgtgcctcaattcatcttcttcagaatgatggttttcaccctctactgcagaacgaactcttgcttgtcctccactcttcgtcgatgatgagaactaaattgccatatcctcgtgcctcaagataggaatgttccatgattgaacaaaagaactaaaatacaacaaagcatttatcaacagtttaaactaatcactcctaagaacaaacaccgccattttatgattgcttcaatagtatatggctagaatcacaaaatctaattatgctttttgtttgtttcactagtttatcttggaaatcctacatacatattaatatggttggttttgacattgttgtggtatcaagagtcaaatgtcatggtggatggtgctaatttcagctttccctacctatgatataagaagtgactccatggagggacaagggaactagcgaataaagcatagacttttagggaagctataaaggcaagatgactcgag

SEQ ID NO: 149410 - DNA, 273 bp, Zea Mays
cggtatgtcaacggcaaagccgtcgctccatctgaagaaattgatgagaagcagagcgacggcaagatcgctaaggtttccaatccagcctacgacgaatggttcgccacggaccaacaagtcctaggatttcttctcacctccctgtccagggatatcttggcacaagtcgccattgcaagaaccgccgctgaagcatggaagatcatcaccgacatgttcgcctctcacacgcgtgcacgtgctactaatgtgcgtcttgccctcgccacg

SEQ ID NO: 149411 - DNA, 566 bp, Zea Mays
cgtttgggcctgaatcaaaaaatgagaaggatccggtttggagtttttctgaacacagtggcctggtagaaatcctggtgtgctgccctccggatccaatctcggaggaacgggcactgggcgacgctggcgacgaacgaggcgaggagacgccgccgccaagtgacggcgtggcggcgcgaagtgacggcttggcgacacagcgcagcgacgacgacaactctccccgttgccttctcaccggtaaccactgccctctcttcccaaacgcacctgcgctgcctcgtccttcgtcttccactgcatctgcatcttctccactgcatctgtatctgagctcaggaagcacatacatcgccccctactgtagtttgtcgcgccaggacctgggctacacagtgcactccagatcactggttcttggattagacataacttcacaccaaaatgcaacagggtatgcgagggcaaggcaggaaaagaaatcctacggagttgttcttgttccgaatcgtgcggaatacgcacagccaccccgaatgtgttacccgccggctcgccggacg

SEQ ID NO: 149412 - DNA, 554 bp, Zea Mays
tttggtaacgaaaagaacgggtgctccctagggagacgaactgggacggatgtaccctttttgctgcagttctgaaatttgaagttttaattggccaattcagtgggggccatgcggtatggtctttttgcgatgggcgcagtgccgggaatgagatctatatagaactctactcctctttctggtggcatcccgggcaattcttccggaaatacatcctcaaactccttaattacaggcatgctctccgctgttagattaaacatcatcggatcgtttgcgggcggttgggcttgacaggaaactgcctttccttggtgatcggtgaggagaacggtcttgcttgcacagctgatgatacccttatgcttagctagccagtccatcccttccttgggatggcaagatggttaggtctgccaggaacactaccccacttaaaagaattctgacttgggagcacctgagtttgcacaggaggtctgatcccggggttcgggtgaccaaagggataactagtggtgtagagggaatgccatgctcttccacaaaac

SEQ ID NO: 149413 - DNA, 518 bp, Zea Mays
cccttagagtcctcttcaatagtgatttttggaggtgaacaatatatgagccataattcataggtttgggtgaactctgtctgcatgatcatagttagcattagtgagagtaaaagtgtaaaacacattcaagagacaccagagacttagggaaaatgcaaccaattgaaagccatgctttcattttagcatatccctgacaaacaaaatggccaaaaggaagacagtctccaattccatctaagcatgagtattttgtaacatcgaccaatacaagaaaaatatataaccaatttctaaacaaccacccagatagcaacaaatgatcactatgtcaactatgtcagaaattgttgaatggttttggggaggcttcaggactggtaactaatgttaacaaatgtagtttgacgcctattcactgtaatgatcaacatattgggattacacaggagatgtttccctgccgtctggtggatttcccttgcaagtatctgggactccctctatatgttaaa

SEQ ID NO: 149414 - DNA, 496 bp, Zea Mays
gttcaagctttcaatcaattgcagcttctcttgataacaatgcaagctcaaccgctatcggaagaacatgacagatggacatataaatgggactctcccgggttcttgtctcagaaagcatacaaacatataacaaaagcaccaccagcaccactgacattcaccttgctgtggaaatcaaaatgctaacccaaacttaaggtattcttttggttgcttctgcacaaccgtctcaacacaatggcaatgctttgaagaaaaaatatggagttggattcgtacacgtgcgaaaattgtattctacagaaagaagaaacggttaccgtacccacctcttcctcaggtgccattttgcaagaagatgctggcagacaattggattggcaccgccgaaaacaactgacatacacaatgtgatgagattaacttttcaatagcttgacaaaaactggaaagtggaagcagtgatggtcatgccatggtgcatatggaagtg

SEQ ID NO: 149415 - DNA, 1657 bp, Zea Mays
ggggggaatcatagatgacttttgaagaccatcttaatactccacatattaactgaaactggggaatatattacacagaaagaacaaaatctgcaatgaagccgtgcagttggctcttcctgttcatgacccgaattgcatcttacaaaacagaaactggagtgaatgcctcagatcgcaggaccagtacaaggtagatacaccatacatacaggcccaacagaacatgcaataaattccaaatccaatgccccgatttcacatcggactatcggacgtgctataccaaatattgaatgttacctacggataagcgtgtatgaatacatttcaagatattcagcagtattgtagagcacaggtgacaagtctgaacaacccacgtgaaaacaacaggtgaggtgaagtcaaacagattagtgattcagtaacgccgaatgacaggacgggggttctgctgacagcaaaatccaacggctacaaaagcaagggcgagagaggcatcaaggcccgaaaggcataccggtaactgtttaacccggcgcagtaccaaaaaaaaaacccattaggtaagcgaattgatggcgggtggcgcgaggactcaagtgctagcgatgcgaggtccccctgtggcagacgacacatgcggcggccgcgaacaacttctggcattatcccccactccctagcgaggtgacaacgcctcaaaccctcagtctctcaggaggaagaaaaataccatagcatactcataaaaaatgcagctctgggggaacgagaactaatctggacgaaatgcagaaccgtcacctaaatctccagcaaaagtggggggaaataggtttcatggactcaacgaatcaccaccaaggcacagaagcaaagagcagaacagaatggaagcactggtttagggaagtgtcgagtcgagtgcgcttccgattccagccgcgagcacagtcgccgccgccacccaccttatcaggctccgaaacccagcgatcaccggtgagaaacgcgtgacactggcgctagcactgggaactgcctgccagataatataaaggcgcgggaaaggaagaagggaaggagaacccggcggttcgagtggcatcggcgggtgcttacctgctgcgatcaccgctggccacgggcgcgccgccagcagcagcgcggcggcgagaagaagcaccggcgcgaggcgccgccgcatcgagcccgacgaaggaggaggcggggtcgggaccgcgggagcggaatcggagagcatgcagtcagtggcagtgtgggtgaggggggagaaaacgaagtccgtccggctcttcggggaggaaggcaggaatgggatgccaggctgcccacccgacgccaacccgattccctcgctctcctttgctcgccggcgctttttcgctttgcgcgtgccgggcgcagccgcgcaggcggcaggccctcccttttcatctagactacaggagtggtcgtggtcgtggactcatggttgggttgggctcacgggcgcgcagtgggatagagggatacgcgccctgccgcctgtgggtaaatgggtctcgcacgtggcgtggaccggcccatacatacagatacctacagtgccagcagcagacgcgcgcggcgccgcgctcgaggattcggc

SEQ ID NO: 149416 - DNA, 322 bp, Zea Mays
cacacagctaaatcttcatcatatataggagtttgttcaacagcaggtataggttttgcagcctcccacagttccttccacaagttaccttctagataaccacagcacatcagattaaaatgcttggatacatggtagcttatctcggcgcatgcagaagagatagttatcagttatcaccttttgtttgcatcctatcacttaaccgcccacgtctagatgagccttccccaactgtggtactgtttgcagcacaatcctcagaccaatcgggtggagagtgccatctaacaaagtcttccaggacacaaccaggatttgc

SEQ ID NO: 149417 - DNA, 3014 bp, Zea Mays
ggggagccaagatatccaacccgaactttctgagcagattataccagaaaagccttgcaaacacacatgagaccagcaggtgattaatagtttcaggttcctgatcacacaatggacaactgctaggatgattgagccccctttttgctaatctgtcagcagtccagcacctgtgttgggccaccagccagaggaagaaacggcattttgatggagcccaagttttccaaaccctcttgtagtgtccaaatgcacatgatcccaggaagagacccttgtaagctgccttcgctgaatattttccatctggggctatgctaaagatgtgtctgtcttcaatgagggggtgcagttccaaaccagagagacagtcccagagcttaaaataatctgccagaactcccacagttagaccacctctaatatcataaatccatctgttgtttaacaaggcctcatgaaccgttctactttttgctatcttctttgggattacagaaaataggctcggggcaatgatcgagatgctttttccctgcaaccagttatcggaccagaagagggtattatgtccattacctacccaccgagataaggactttactgaagaacgctctggctttacttggaacctgaataggaagccctgtccaaggtcttctagagtcggttttttgtagccacagccatcgcatccggagggcccatccaagttccggtagactagagatacccagtccaccaagctgaagtgggcgacacaccttgccccaagccaccaaacaatgtccccctttagcttcttttcttcctctccaaagaaagccctttcttattttatctatagcatcaactgcccagtggggtatatcaattgccattgccagatacacagtcatacctgtgagcacatgttgcactagtattctcctgcctgctctggtcatcaaatcagctttccaattaggtagttgatcagcaaatttatcaacatacggctggaactgttgcttggacagcttgtgcaaggatagagggagtcccaagtacttgcaaggaaaaactgcgatctcacacggtagcagactttggacttccaagagagtttcttctgaacactgtatggggtagacattggatttttgcacattagttttgagaccagagacactgccaaaaagctgcaagatatcaagagtgatggagatttcatccaccgtagggtgtaagaagagggctacatcatctgcataaatggatactctgtgaagttgtcttcttgctggttgctgctagctgctgcaataaacctgcctcttctgcctttataaataagtgtccaagaacatccatgaccaatatgaacagcatcggtgacaggggatccccttgtctaagccctcttctatgctgaatttgttgaccaggaaacccattgagcatgacttgtgtggtggatgaagcaagaagaccacaaaccatgtccctccagatctgtccaaacccaatctgctgcatgacatcaattaaaaagggccaggagaccgagtcaaaggccttggtgatgtcaagtttgaggagcagccgagataatctatgttgatgaaacagtcttgttgtctgttgcactaacatgaagttgtcctggatgaatcgccccttaatgaatgcactttgatttggggaaaccaattcattcagtcttggtgcaagtcggtttgcgagaattttcgtaatgagttttgcaatgctgtggaccaggctaattggcctgaaatccttaacttgctcagccccatctctttttggcaccatagtgatgtaggcagtgttaagtttccagaaattgctgaaacttctgctccaaaccgtagataccactgccataatatcacttttcacaatgttccagcacactttgtagaaaagaccagtgaatccatccggtcccggggccttgtcagagggtaaccctttgatggtctccaggacctccttttctgtaaaaggggagtccaaggcagccaagttgtatctaggtaggccaagagctgccaggtcaattgttacatccctctgtccatcctgcccaataagatttttgtagaagaggtccactgctgcagctttctcactctgctcagatagaatgtggccgccatcaactaacttggcaacaaaattcctcttcttgcgatgcctagcatgaatgtgaaaaaactttgtatttgcatcaccttctcctaaccatgtgatcctagatctcagccttgccatagtacgtttgaaagaagacaacaacagtgagtgttttttgaggcagttcttgaaccaattttcagctggggagagggctctttcgtcctgtgccatctcaaacctgtgaagcagttcttttgccaaggctaactgcaatctcacatggcccacctgtttgtcactccagctttgaagagatcttgctgttacccttagcttcaaatccagggtttggaatggacacctgatattgtgtaccgaattccaagcagtctgtaccacctccaggaaaccttccatttttggccagaaagcctcaaaatgaaagcgtttcttcccaggtttgttcccttgaagacccagcaggagcggacaatggtcagaatcatgtgatgccatgctctggaggaggacgtttgggaaacattgctcccaagacacagagcagaacactctatccagtttaactaaaacaggatttgcttgctggttggaccatgtgtactttcgcccatgtaatggaatttccttaagagcaatgtcattgattgtttgtcgaaaacgacccatcattgccctattaatattggaattgttcttatccgcagagcagtagatgagattaaagtccccagccaccatccaaggaccatcacatgcatttctgatgtctctaagttcctggaggaactgaattttttccccctcaccctgaggtccatacacacaagtaagccaccaggcctgcccctctg

SEQ ID NO: 149418 - DNA, 456 bp, Zea Mays
cttggctgctcccgatccgctgctagcttcggggggatgattatctacgatgttcatagggggaggggctccaaagatatccagctccccataagttcctccttcatctgcttctgctgcgccagctcccatctctacaacttccaatggcaagtttgggtgtagctggttatacaacacatgcacttcctcgtgcagaacattgttgtacacttgcagattttccaaggccatgctcagctcttccacccgggctcgggcagtcacctcacaatcccaagctatggatctagaattcacatcccagtcaatagcccgatcgtgttctacaatctcacgctgcaaaagctctacctcttctaacaactcagcgatgcggcgactagcacacgcacgctccctgcctccatggcacagctccacagtcagacgttcgactctagcctccaggtcttc

SEQ ID NO: 149419 - DNA, 882 bp, Zea Mays
gccatctctggcccgcgcttcgacttcattgaccgcctacgccaggcacagctcgaggacccgaccctggtggccatgcacgccgagattaccgcagggacccggcctgcgacctggaccatcgtcgacggtatgatgctgttcgggggcaggttgtacatcccgccagcctcaccactgctatcagagatactacgagcgatccatgaggacagcccgagggcgttcagcgcaccctgcagcgtctccgacgtgatttccatttccctaacatgaaggagttggtgcaggactgggtgcggtcatgtgcagtatgccagcgatacaaatccgagcacctccacccggcgggcctcttgatgccactaccggtgccgcagggtgtgtggacggacgtcgcgcttgactttgtggaggccttgccgcgcgtccgcgggaagtctgtgatcctcacagtggtggatcgcctgagcaagtattgccactccatcccgttggcacatccctactcggcagagtccgtcgcccaagcattcttcgccgaagtcgtccgcctccatggggtcccacagtccatggtctccgacagggacccggtcttcacgtctctattttggcaggagcttatgcggctaatgggtaccaaactccacatgacgacagcattccatcctcagtcggacggacagtccgagtcggccaaccgcgtcatcatcatgtacctaaggtgccttacgggcgatcggccacgccaatggctccgatggctgccgtgggcggagtacttgttcaacaccgcataccagtcctcactgcgggagacgccattccgcgtcgtctacgggcgcgaccccccgtcgctccgctcctatgagccgggcg

SEQ ID NO: 149420 - DNA, 776 bp, Zea Mays
cttcagtggcatcctaccctttctacacttgccctttcaatataccaagtcaacgcgccacatggttcatcacattaatcaataataacctctcatgtatgctcgcatctttgagtgcatccgtacgtaggtagccattccctcgctcgtctcagaagccagctgctcctccgggttgactgggaactcaactgacctcgccgccggtgagcacgccgcgctgcctcgctcccctcctcgttctagctactacagtagtaggcttcccacctgaggcacttaagttgcacggtcgtcgcgttcctcatttcgctgaacctccctcctgtgcatgcagatctgtgcaggagctcgggtggcgttggatgactcggatcctgggcaatgcagccatggtgagccaccgacccatcatccatttcttgcacaggcccattcctacactgtgtcacagaggaatagttgatgaaagggatgaatctcatattatttaagctctgttttcgttttccctatctaaaatacctatgcaactccaaaagactctattctttctaattgatatgaatagagctttttctttaaaaaaactaccctgcaacagtttatttaaatagttatccaaatatattcatcttatatttcaaatttctcgctagcccaaggtataaaacgtaaatgactctctagattgtcaataagatattaaaaagttaatgaagattggaaatatatagaaaatgatttttatatagatgactttctaaatgataatt

SEQ ID NO: 149421 - DNA, 281 bp, Zea Mays
tttcccccggactatgctatgtcgagtaaataattttgattctttcgagcattggttccttcatgtgaagtatgtgaggtaaagctagtatattattctttgattgtgtaggccatgtttgcctatttttactgtttaaggtaacttataatttctgattgcattacgttcatcattattcatggtttccttcaggatttaccttcaaagatcataaaatatttgggccagaagaataggtttagctttagctcatgaacgaccatccaccgttaggagat

SEQ ID NO: 149422 - DNA, 328 bp, Zea Mays
ctcatcctcacccttgccttggcccaatatcgtatttccactgctcggcccagccccatttcttgatccgcacggcccactctacgctcttcccttttctttttcgtttgtggcgcttacatgtgggtccgctttgtcagccatctttcttcttcccatggcgcacagaagtccgttggctgtccgccgccgcgcgatatccgccgccagactggggcatcctcagccagagctctcggggtcggactctgcagtcgggtataaatgccgagccgtgcgcccttcctgctgcccaccatgtgccgtttcgtatccgtcgagagcgcac

SEQ ID NO: 149423 - DNA, 861 bp, Zea Mays
cctatatcagattaaaaatcaattatatcagatctgtaatccgaaccagattcaaaatcagaactcgaatctgaatcagaactagagctataatgcacggggttcagaacttgtaactcatgtttgtttttccttttatcttttcagagttgcagtatgtgctttacagtttaggcagacatactgaagttactatgaaggattatttttaggtttccaaatgtctgatcgtttggagggagctaagctatagagctatgaacttttgtgctactgttaccactgcctgtttaatcatcaactcgtctattgtaatagttcagtttctatagttgttgaaagattatgtttctgaacatcattgcccatatgacattttgctgctagggctacaatttgagcatcgttggacaatggtcatgtgactgattatggtggtatttgtgatgtgatttatgtttcttaacattattgttatggtgatatttgtgttgtgatttatgtttctgaacataattgctcatatgcatgttgctgctagtgccgcaatttgagcatcattggacaacggtcatgtgataatgttggtatttgtggtgtgatttatgtttttgtacaatctcatgaatacttagctttgtcagcatgcagagaatgttttctggattagggtacacttgctgtgctgatagtttcttaggtttatgtgctcatcttcctcatctgacatgaataatgtatgggtgtcgtgttgcggagtactatgtgaagccatcaacctgaaagctttcataattatccgcacgcaggaggacgcccaactatgcccagaaaacattgcagctcaaaattgctacaccc

SEQ ID NO: 149424 - DNA, 411 bp, Zea Mays
tacttgccattttctttgtgcaatttacaggaatataggtcacatcatgcaattttatggagcacagacagaggaagaggatagaagttgcaagcatgttaatgccagcattgcaagtagggggaactcataccttgatcgattacattttgcttccctctaatcgattcaatggctgatttcaacgtcttcacagtaatctgaaaatccttgaacagctgtttcccaaaccgcttatcttcagcaaagccaaggactagatgctcaactgagacatatgaatcgccgtactctttcttgaagtcccgggctctttgtatcagagcttctaagtcacgccccaacatagatccaggttcttcacctaatacctgaatcattaaacagaacgtaagacaactatgaatggaa

SEQ ID NO: 149425 - DNA, 325 bp, Zea Mays
gattaagagataatggacatatgattaccagcgaatggaagctggctgttgggatcgatgggcgggatgatcggagcagcgacgctctgtctcttccgtttgggcgccattgcaatctctcgggcggaacgagcgggctcagtaatttagaaaagcagagaagtggcagaggaaaaagtgaagttagggctcggaaatcaaaaagtcacgtcggcacgagtataaatgggctccttgggtcggacattacctctaaagtgacagatcaccactcggaaaaagtaaaagcctcaatcgtcactcggacattacctctaaaatgcca

SEQ ID NO: 149426 - DNA, 1229 bp, Zea Mays
tcaggagccaaaattccagatagattcaaacttaggagctgtctgcaatcaaatttgtgttatacacgtaaatgctttaatagctatggaattaactggcgggtggggtggggtgggcttttttgcggttgtaaattattctcttctttattgaaatgacatgttgctctcctatgcttttgagaggaaactggtggatggaagatgtggtcaagtgaaacaagtgcacagaatcacagtaattacatctgattgtaaaaatagctaacttcagtcataacagaatagtattaacacattatgttccaaacaaaatattgtctattttccaacaatgcaaatcaggaagagtataatgaatgctccaacatatttctgctttggagagagaatgtgtgatagcagttaataggtaatcaatttttatcttcccaaaaatgttggaaaaaagatccaggtgcaaacttttggcctactaaggcagtaaacaaatttataacaaaactaagttcaggtttagtcactcatcaccaaaagtaactcataaccaaatgttaaggtgtagtgtggaatataacaagcacttgattgacaaagagatcgcttatgctcatacaattcttttacatggaagtatccatcactgcctgttgcattgtaacagataacatgggaccaatttcccatgcatggatctcctcggttccagctgctaagatttccgtgtggatctatcaagctgcccctaatagccttgagggcatcaactgcagagcagatgaattagtttgagaataatgttgcaaagaaaaaattgaaggcatgaaaaacaattgtgataatataagtagtactgctgaattgtatacacctctccaccaaagtaaggggctaagggccatgtttacaaggtaaaagtgaaatgggcacaaatgacgattatgcagagatcaagtcgagtaatgggtatgcatgcaaagtgcagtgaataagaaggattttaccttcccatggtgcagtgatctgtgcagcggtcggttgcaaaagggtaaaaaataacgtgaggataatggagcacaggcagagcacttgtggctgtaacatattttgccccatttgtccagaatatatagatttcacacttgcaggatccctctgatagcagaatccattccctgttagggagcagtgaagtaggtgttagttgtacaaaaccaagatacataaag

SEQ ID NO: 149427 - DNA, 283 bp, Zea Mays
aagggggggttaggagattagggttccaaaccttgggttaaattttgggatgttacaaacctaccccacttaaaggaatctcgcccccgagatttagactgggcttgagaaaaggtaagggtattccctcctcaaggagtcctcactctcccaggtagcttcctcttctccttctctgctccactgaactttacagagtctcacttctgagttgcgggtctttcggactgccgagtcaagaatctttactggcttttctcggtactgaagatccttctgaatc

SEQ ID NO: 149428 - DNA, 1016 bp, Zea Mays
gagaatcagaaattgcgcacctcaaatacatctctaaacacttattaactctttcactttgaccatcagactgaggatgataagctgtggtaagagctaatttggtgttgagtgaggaaaagagagccttccaaaatttgctagtgaacaccttatctctgtcagatactagagacctaggtgtaccatgcaacttcacaatattgtccaaaaacacttgagccactttggttgcagtaaagggatgtttgagtggaaaaatgtgcatacttagaaaatctgtccaccacaactagaatagagttatacccttatgatttgggtaatcctttaataaaatccattgttagatcttgccatgcaccttgagggattagcaagggctaaagaagacctggggtgtgaatcctctctgccttagcctgttgacacactacacattgcttaataaagcacaccacatcagccttcatgcctttccaccaaaacaaccttctcactctgtgatagttggcctaacccctagaatgaccacccacaatattattttgcaaggtatcaatgattttagtcctcaaggcagaattgttagccacccatatctaatctcccttcctgatgacaccttgctgcaatgaaaatcccccttcattgggactatgtatagccaactggcccaacaacacctgagcctcttcatctgtaacataagagtttaccacctcctgaatccaaataggttttacatccgctactgattgcaaagccatgaaatgtcccaccctagatagagcatctgcagcctaattttcatttccctttttgtactcaatttgaactacagtcccatcatttttgtcatggccttcctttgcaattatgaatgtaacacctggttctccagaaaaatcagggccttatgatctatcctgatgatgaactcagctctctgaagataagttctccacttctccactgccatcaataatgccagaaacttcttgtcatagatagac

SEQ ID NO: 149429 - DNA, 379 bp, Zea Mays
taaaggatttgggcacatccgaagggactgcccaagcaagcgtgtgctaattataagagaaaatggtgagtactcatcagccagtgatttagataatgatacatatgccatgcttgatgcccaagaagcagaaaaggagaatgatgatgtagagcacattggggctgcatatgctgaacactatgagagcctggttgtaagacgtgtcttgagtgcccaaattattaaagttgaacaaaaccagcgacacaacctgttccaaactaaatgtgtagttttggaatgatcttgtcgtattataattgatggaggaagcagtaacaacttagcaagcaccaccatggtagagaggcttgggctaaaaacgcttccacatcca

SEQ ID NO: 149430 - DNA, 501 bp, Zea Mays
gaggaaaggagattttctggtatgatagagggtatagattgaatgcattgaaagtggagaaattgtcgcgttggatgaaaagaacagtttattaggtgttgtattggaccctcgaccatcatgctcaagatgtttgcctcatataacttgtggatttgcatgttttttgggtagcggtgtcaaacaacaacgttgacttgctcaacaaacaaccattgttcactaacatactcaaggaagaaacaccatatgtgaacctcacggtgaatggatatgagtacaatcaaggatactaccacactaatggcatctaccctcggttgttgatgtttgtgaagaccattctcatcccacatacttcaaagtagtgaattattgttacatgtcaagaggacgcacaaaagagcataaagagagtatctagggtccttaaggctcgcttctatatcctcgctagcccatgtcatccttttttcccactaagtacttaatgtgatcata

SEQ ID NO: 149431 - DNA, 637 bp, Zea Mays
gctgcctttacggcaatccgaagctatgttggatgcaactagcctttcagcacgtacatctgcagcatgtgtgcatgacctcccttctggctgcttttaagctttcgcgtatcgataggttttttttaaaaaaaatattaaaaaacataaattgatctgggttgcgagtccccatcaatttagttggcaacagaatgaaataagaaccaatctaaagagagcatagtcttatgtcatggagattgttgcattaggattttccatccatttccaccacagcaaaatgtcagtttcaacaaatttccttctcaaccacttgggtcttaccaaccatgcaaagctacttcttaagcaacatgttataaccaccaaacacatgaagcgtgcggtggattgtgataaataatctgctgctctcacctgtttgtggcagcgggcagcacccatagtgactgctccctctcctcttgttcataggacactagagtatgcctattgcaatagtaggtagaatagcaccaggtatcactttgcccagtatgcgtttggaacagattatactgattcaggtgagaaacggaactgattccagctgccaaacacaccctaatcaataataggcatgttgggttactac

SEQ ID NO: 149432 - DNA, 336 bp, Zea Mays
ctgaaattagtcggcccagtcgttcaatcccaccgcgccagcccaactctatccctgtgcacacctcacttacgtgtgggtcccagttatcagctcgttatcctcccctatctcttctctgcgtccccaacggatcgcaaagcaggcggagctcacagcgagttctcaggtgaaatctccgcgcccgcgaagtcaggctctatcgcgtgggccacccaggaccgcgtcagtcccttcccctccgctgtaaccgaagccaaagctgccgccgggtcgtccgcatggtggttgtggctagcttccccgccgatatttgctctaacaaccgagctccgc

SEQ ID NO: 149433 - DNA, 1093 bp, Zea Mays
tttattttattagccttgaacgcggtagtcgatacagtataggcctgtttcaaaggttcatcggaaacagttctgttcctgccaaaattggggaatttccagcaaaaacattagatatccatcctgtgagcagcccatccccgtcatgatgtctctgtctgctctcctgtcatctcatctagttatttttggtgcttcagtttattggttttttgcatcctgaagtgatgtgtttctatgttatgttcgtagttttaggttgtgttgctggtgtgcagtgtggatttgagttatacttgttgggtggttagagtaattattttcgtcttacaccataactttggattgtgattggaacatagctttgaactgtggatccttgcaccatatattaggctgtgtttggttcagcttctggaaagtgtttctaatgagaagctgaagctcaaccaaatgtttagaacctgaaactgcttttccagaagcagttcctttcgtgtaacttaattttcaccgcttcttggacccttattttggctttcgactttcccaaataggtggaaatagtgagacttttaatattttatagctgtttcgagggaaatgaagagacggtgtaagttttatagttgtttcaaccaaaaaacaaaaaacttacaatcttttgccaacacatagctcacaacaactttttttatagctcacaaacagacctttagaatctgtaatgttttagttaagcttccttttcccttaaaattccctatagcggattgataaaactgaattccatgttataggggagggcttctatagcaattgagaaaatccatcccctttacgttcatgagacccacatgtcattgcaactctcttcttttatcttcctgttctctctttcctctccctcccatctctttcagtgcttgcccaaggtgacaatgtggcgacccaagtgctcgtctgcctagcgcggtctgggcccgcgtgcccagtgtggcagtggtgtggcggtgtggccaacccacacacttgactgcccgaagtggtgtcggcggcatggggcctgcgtgcttcgtgcttggtgcactgg

SEQ ID NO: 149434 - DNA, 539 bp, Zea Mays
cgcgatgagttcctcctcgtcactggcaaatactccctggacagccacatcctcgatgacactcccgcgcctcacttccccaactgggcacgcatggactgcgttgtcaagtcctggatctccggctccatctccccggaccttgctgaaatggccatggaacgcggcgccactgctcgcaccacttggctgactctcgagaaccagtttctcgggaatcgggaaactcgcgccctccacctcgacgctcagttctggcacttcgtccaaggtgatctacctgtctccgattattgtcgccgtttcaaaaccatggcagatgccctcggtgatcttggcgaaccagtcttcgaccggacgttggtcctcaacgttctgcgcggccttagcgaccgtttctccgacatcagacgtcatcttcgcctcggtcgccccttttcgacgttccacgacgtccgggccactctcctgttggaggaacttacgatggctcatcgtgcgtcttctccatccgccgccctgcttacctccaccaagcc

SEQ ID NO: 149435 - DNA, 679 bp, Zea Mays
tccgattgtaatgggaattatcaattagtccacaactaattcttcattaaaatgagagcgtctatttgggggtcgtgtccccttacccatcaacaaaaatggtttggccgaacacaaacactgtcatattgtaaactagtgtcgctctcctagctcacagcggcatgctaattaaattttgggataaatctactcaattacgcagtcagatgtattttggatttcaataaaatgcattgtttgatgttaactaaaagtctacgaaagagggggaaaaacccgatgtaagcgatgaggtgactgtaggtttacagtaaaggttaaggttgtgcagtggagcgttgtgatagataggaactgataatcgacataaactggttggtagttgatatgacagccagggctcgaagcaacctttaatagtttgggagctaggtctaggcttgcatatggcctcatgctctctctgatcattatcagcgtcgtccgccccgtcaggtaattgggttaaccagaacgcagacaactggccgtcctaggacaccgacatcatacggggcaggagtgcagatggaggaagaagacgacacccatctgattcagatcctgcgccacctagacagtgtcgaaggagaagccttcgatgagtgcataataaatgaagcaaacctgatgaatg

SEQ ID NO: 149436 - DNA, 357 bp, Zea Mays
ctttaacttatgaacttaagaatgggttagtctgttccaagtataatctgctggagcataacaatcctttggcacctctagcttgtgcttgagaatcttgtatgatttcatctcttgttaccgttagtgctataattggcgtttgatatctattaagtatctgcatgtatgctggtttatcactttaggcagggcgtgtgctatgaccttatgttttcctattatgcatgctgataaccttttcaaacttgtcccatggtatatgtacaatcatttagatttgttgagtggcaatatagcaatattttcagtgaacagaaattataattatattttcagctaaaatgttcagttccc

SEQ ID NO: 149437 - DNA, 293 bp, Zea Mays
gcccacttgttcactttctttccccccttacttagggttttggaaggtagggctttggagaggtctagggttcttctcccccttttatccaaggtagtaagtgtgcaaggattagagtaaagcttcttatgtcattggcaacttgattagcacatgagctccaaggttcttatgtggtgccctaagtctttacccttgtgaacacagcttctagtgccaaaatggctctagccaagggaacacctggggtgttacatggattaggatgtgtcttgatgcaagacaacagagtt

SEQ ID NO: 149438 - DNA, 339 bp, Zea Mays
acttttactgcagacagcaagagttgaagtgatcattcattgtgcacttaatattctgtctgcaacgccagcttgcaggggatgacgaagcgagcacagcaaccactccttccaccacccgccaattcagcaggtgtgttgggtggccattcatcctcccatcctttctcgtctacgagaaagcaagccattctgttaggaaaagagattgtgaagtggactctgcactgggtggggctgatggttgcagcttaacaccccctccacaaccataaaatgcacatgttaatgtgatgctgatatttagtagtataataatatagggaagcgctaggcaag

SEQ ID NO: 149439 - DNA, 826 bp, Zea Mays
ggttgacactttgttttctataggctgtggggttgacgtggatcagtttgtatgccttttgagaagagtaattcgaggaccccagttgtatctccattcgtcttttccatccaacagtggggtattttggagctcattgcctagaagctgaaattgtgcaaacgcttcagcagcagatagcggcaaagtggaagaggtccgcagaaacccaggcttttttgtttgctgaatagtgatgtttttgttgattgcataggaaaatagttctggatacagttcttgatgcaccttgttccccaagctgtcaaaccatagttgcatagaacgaccatcaccaatcagtggtttagtcgttctcttatacatgtctatcttagacatatttaagagcaaaagataaagatcacaaagtagcacattgaaaccgcacttgctatagtttaacgaacaagatagacaaaaaaaaaaaaaaaaaaaaaaacagcgaaaccaccttcctcatcgtgagccactttttctcctgccttgttatcatcttgcgtcgccgtttttgaacaaaagaaggcacagtacatcaggagcgcagggtctctcgatagtcaccgatccagcaagcctccgccttccaagccaataagccatcttcttccatctgtgaagaaatccaaagatcttgtgattgtgagccaccattttcggtgatttgataggcgcgttagagaaaaacccagccatcatctgggttttccaccacgcctaggtcagtcaccctgcaagcacaaaaaaacagccactcggtcttttttttatccacgctcctctaaag

SEQ ID NO: 149440 - DNA, 575 bp, Zea Mays
cgtcctgggatcgcaagacatgtggctactttctttgtacgctgattgttaatactatatcttataactagtgtgcatgccacaggccttgtgatgtcatcaactggatagcggaccttatttcccattgacgcgatagagcttgggatggtcgtaccctcggtggaagctggcagttgagctgctggaattatttgcatatgtggagtggtcatctgttgaacagacatcgcactcgccaattgctgcatcaattctagaggaggattcgatagcatttcagacatcaggcctttgaactctttcttggcctcctccttaaaataattcgccatctcttccttgtatcgatcacgtttcttatacagaccttcccattgtggttcgaatccttccttccatccttccttagatgagattccttgtacacgaccaggatgctcagggttaccgagaccagccgttagaatgtctctctccctttgcggcttaaatgttccttggctctgcttagctgcaattgcatatatgttttttgcccgtttagaagggaaatatcacgatgcttccggaac

SEQ ID NO: 149441 - DNA, 783 bp, Zea Mays
ccaataatccttgatttctctgctgctgcagctctccacgatcgtcctcaaggttgaccttgaatgcgagacatgctacaaaaagatcagaaaagtcctccgcacaatccaaggtgaggtgcaggctgcagtgctgtactaccgctctcgtcacagttcattcatagatgcagacgtctctctgcggccgtggcctactggcctgcctggtgtcctcgctgacatgtgggcctgctgccgtcacacgaatgcatgagtgtttatctggccagttggtgcggtcagatgttttacaactgtttcgtgttttattattaaatgtaataataataataatcatcatcatcgttatgatcgtacatgagcatggctgattctgactgatttggattgcgcagacaagatgaacatcgagacgatctcgtttgatgagaagagcaatgccgtgacgatctccgggccgttcgactccgacatggtctgcaacaggctctgctgcaaggccggcagggtcatcaaggagatggacgtcaaaggcaacgagaaggacgccaaggccaaaggaggaggcggcggcgataagcccaaagacgccgccaaaccggcggccgaggaggagggcggcaattcggagatgaaggcggagaaggccgagaagaaggagggcaagggcgacaaggaggataccaagtcagacagggcagagaaaggaaacaaagacgggaaggcggaggccgagacggtggagttcgacctcgacgtggacggcgtggcctccgcggc

SEQ ID NO: 149442 - DNA, 333 bp, Zea Mays
aactctcccaagacacagagcacagtcaggcaggactgcaggttgttttctgataattatggggtctcttatgcaaagttacaaggccgaagaggtatggaatactactggccgtccgatcgcgcaccaaccgcccagattagatgctacttccattgaaccggtatgcgctatcagcccttggatctaggatccacggtcagagcatcacgtgacctaaaaaccatccgatcgaagatctgcggtcatgattcaatgccgcgaatggttatcctcttctctaatcacatccgtccgttaagatcagacggccgaacggccttgctcctattc

SEQ ID NO: 149443 - DNA, 2478 bp, Zea Mays
cttgcatcgcgaatactttgctgtggatgttatttcaatgagaaaatatgtattgttgaggttagctttagctgcgttccgtttcggtattgaagttgttcctgctcttggattgagctggtgttttgattattcagattggcattttgtctcttttaattgcattctggggatcactcatcgttttaattaattgaggatgatttcgttcagcgatttgatcattccctgcttctgtggcctagtttgctaggcttagcacacagttttcctattatcagcttggtcttatggtcaaatttttgatcttttatttgtcagcaattcgtattgtttggtttggtcaattcattaagaatctgagattaagtgacaaacttgtcgtcttcaaatgttttgacctttgctagctcgaggtgaacatgtcaaagaattccagggtaggtgtaggtcttactttcttgtttatatgagatacacacgtggactgattcctcctgttgttctggtaaattttggttggtagttagcttgctgaaatctagagatgttatcttaaatccttcattctatgattcatctgtcattactagttcctttcaccaatgaatgtagttacccaagtggaaaacactaggctcttgttaaattgggaattctgggactggttactgatcatattaccatatcctatttttaagtatatagttttagggtcttagtgaatagtagtcatactcctgaattttttgtttagtccaatctaggatcttttaggatttaaaaaatttgatggtttcaattaattcttcgccctgcaaagactttgaaccatttattccatcttactatcaatgttatcagatcatatgattgaggctagcagtaagatcaccgatcagaagagtaatcatcgaggttagaaaaagcgttaggcagtttctaggcgatgacccaccgcctagagcctaagcacgcctaggtgttttgtaggcgtttttgccaaatttgcattcaacatgtatagctgaataaattatatatataaagagagaaggaccaatagacataccttggttgatacaaaagtgatattcctacttagttgatacaaaagtgatgttcctacaagtggacaacagaccatatcaacaatataaatgatacaaaaatagggaaatagggaattgcaagttaggtacttatctgaatgatctcatccttctcccatccatcagatattatcaccagcaaacgatagccatttgaaatcacaatcatgtacggatagcagcaaagaaaattaaatggatagtagactagcagtagacctgatcaacccgatccgacccacccgaaaaaacccgacccgaccaatgcgacgggcgggtacagaccataatttttgacccgcaacaatcaacgcgccgtgttttttgacccaaaacccgacccaaccatacccgaaaaaacccaacccaaagccaaaaaacccaaccctacccgaaaaaacccgacccgacgcgcccaatcaggaggcacgggccaacacgacccggcccgacgctatgcacgggtcgggcgcgggccatgccaaacgacccacgacccgaccttgacccgacccgaaccaacgtttgaacgggtctaactagcagtactgtacaacacatgattcagttctcacaacacagaatacaggtacataacaggcatgctggagtcctaagttcataagttaaaagataagacatgacatgacatgacatgataaagccccactaccatatcctcttcaatagggttccatatggtcatcttcatcaaacttccttcagagtcaaattcttctccttcgtaaagctgtttcactcttgtacttctacgcaactaagttgttcttctgcttccattgctgtcacgacattgtcgtatcacgtggccgccgccgccgaagagcagggcttgagactccgatgaactcaccttgccgctccttcacgaggaagacgactggaaactctgttctcaatatttttctttgattcctcatctcatgtttaggctgtcctttttgtatcaactcttgcatctcgtgttctggctgtcctttcttcgacgagtccgacattcccttctctgtctcccctttgttgcctcctcctctgagtacgacaccctcctcgaggcggactctgtggtcccccttactccctcgtttcctgcacaccccattgtgccatgtgcggctccgctaccccccgtgttgccccgcgcggccccagcgccgccgcgtgcgtcactgtcgtctctcatgtcgccacgtgcggccccggagtctcctgcaccgccacacgcggccttggcgtctcctgcggcgccatgcgcggcgttagagtctctcgtgctgccatgtgcggcttcggcgtctcccgcgccacctcgcgcggacccagcgtccccaaccccaccgtcgtt

SEQ ID NO: 149444 - DNA, 397 bp, Zea Mays
ctcacctcgccccccggtccaaaccggtacggctactgactgatctactccacagttgacactgtctgcactagccgagccgaacttctcaacaaagctaggtgggtcgatcggagcttgagcttcaattaaagcaagagaaagctgttactgacagcttaaaaccatagtagtactagtaccagtgccggaacagagaagatattgcacaggacacgaccaacgagctgatgcattggtgagcagcaccagcactagaacatggcagaggcaggcccaccccacccaacacagactgtttggtgacctgcatccatgcaccggcgcccgcccaactgggtcatctcatgattcttgacagctaaaccaatcatacatcagcgcacgacgccggttg

SEQ ID NO: 149445 - DNA, 426 bp, Zea Mays
ttcattgtgggattgcccaacacctcccggcaccatgattctatttgggtcattgtggataggctaaccaagacagctcatttcttgccagtgcataccacccacagggcagaaaagtacgcagaaatctatattgaccaaatagtgtgtttgcatggaataccaaggactatcgtgtcagacagaggagcaccgttcgtagcacgtttctgggagcagctgcaagagtcacttgggacccatgtgataagaagctcagcataccatcctcaaactgacggccaaacagaaagagtaaatcagattcttgaggacatgttgagagcatgtgtgttacactatagcaaagattgggataagtgcctttctctggcagaattctcttacaacaactaccaatccagcctaaagatggcacctttcgag

SEQ ID NO: 149446 - DNA, 944 bp, Zea Mays
ccgaaagtgtggctgtcagactgagaatagttctgaaactgaagttcagtgacattttctcaactttggaatccaattgtggctgatccagtgggggtaaggtttgggtcactatgacaaagtggaagcctgtatatcaaagaacaactttgcaaaagggaggtaggtatgttactgcttggaacaggaagtaatagtgacctaaacttgctctgtcagacggtttttgggtgggattcagaatgaacagtaaactgcataagatctcggttcagggaaccttgacgttggtgatctctatgccggtgatctcctcatcgtgattcacgccagtgttaagatacgcgcctggataagagtggatagctgtccacggtgaaaatatcaggggagggggatggatgtggtctctggcgcgagctcatccatttcagccagttgatcccgtggtcggccgggacgccatcaccggagtttgatgttccttgtggccacgccacgtaacagagggtgttaccacgtagctgggagtcgtggcgtgaagccagttactacctgaagccattgctccactacgcgccatggtgaacacgctccagtgaagatcttttctgtcaccaccgtgagcacttccgtcccaaattcgcgaagcaagaaatccatccctttaaattgaggacactccctgctttgcctctctgttacgcgcacagcccacccctcactgccctaattcattcaccacaacccccagtcaccggtttttcccgagaaaggtcggtagcgccgccgtgagaagttccaccgtggtcagtcctgtctgaggtaatcccagcccaactgctatctgttttaatttcctttaggtgtcgtggtgctcactggcttgggaatttgaactctactgcagcagagcatcgagaacatcgcctcgccgttgcaga

SEQ ID NO: 149447 - DNA, 617 bp, Zea Mays
gtgaaatctgccgcgatcagggtgttccggtcatcctctcgggacatatattggcggggccatagacctctttccccatcctagtaggagctagcatagtgttgcctcgacaaatcgccgggcttcatcaccatacacggagagaaaaaaaacggggcccccatctactgtaaaccccgccgtggtggccgttcgaagcatgcagcaggggtaggatgtaccacgtgcacgtgaggctcgtgcttggtgaaaccgcgggatgcgctccgccgccgcgtctggccatgggggaaaagttagagcttgcgcagagaatggaggaaggatgtgacgaggtccgccgtggactgattttcgtccacgcccgtgccagggcttcgattgtgaccaggtagcttcgcagtgtcgtggggaagcgattcctaccactgaatcgtcgtgtgggtggccggagctaggccaatggctcgacggagcaattggcgccgctgtggatcgctccgcgccgtggccgagggccacaccaactccaaccactggtaagccacctcgattcagatcactcggatttcctccttgcgttgcaccgacctcgagagcgaatagggtagtggata

SEQ ID NO: 149448 - DNA, 599 bp, Zea Mays
acaaaaacagacataaaacatagaagtagcatgatgattatctagatttggttttgactgaccgtgttggtttccttgtggtatgctccttctccaatgctttaggaccaagttacccacgtgcccctgccagccctatttccctacgtcgtttctcacctatggtctctgtagattcggcagctgcaggttcgctggtgaacgaacatctgcaatgcacatctgcgacacgcgcgcacgacaggttccaacaccgtgacctacaaacacaaaatgtttttagagaggttccaatttcagtttgtgcatgacttttgatggtacccattcactgtgcggcgatactctataactttattatagataccactattataccacgatagatcaaggtagtggtcccttctcttttgtgttagtaaaaaaatttgaagctgatacaaagtaatgtcatgtgttagatgctaatgttcagtgaaatttttttgggatgctaatagaatctgtgtgatctcatgaatgggttttcttttataaatgatggagtatacgatgtaaactcataacacttaaggtcaatttgttagtcaatttggcac

SEQ ID NO: 149449 - DNA, 719 bp, Zea Mays
gaaaaagcttgagcatatttatcatttagatgaggtgttctggcagcaaagggctggtagaaaatggactgttaaaggggactctaattctagattttttcatctatatgctaatgggaggagaaggaagaatacaattgcctatttggaaacagacaagggggtctgtatggatcagaaagcactgatcgcccacattgtgaacttctacaaaatcctatttggtccgaacacaccctgtaatatgaagctgagtgaggacttttggagggacagatcaatgaccagcaaagaggaaatggaatccctggccaagccgtttgaggttagtgaaattaaacaggctattgatcaaatgcacaatgagtcagcccctggcccaaatggttttggtgcctctttcttcaaaaagttctggaatcttattaaagaggatttgatcatgatgttcagtgacttttatgcagggaagttggatatccaacgtcttaattttggggttatcacgttaattcccaagattaaagaagcaagtaatattaggcagtatcggcccatttgtctgttaaatgtggattttaaaatcttcaccaaagtgctgacaaataggttgtctctagtagccaaggaggttattggaggcagccagacaggtttcattaaagataggaatatcctagagggggtggttattttacatgagattattcatgagctga

SEQ ID NO: 149450 - DNA, 799 bp, Zea Mays
gttaaaccctgagaaatgcatcttcggagtaaaaaagggcaagttcttgggttgtcttatgtcaacaaagggaatagaagcaaacccgaagagaatcaaagcaatacttcggatggagccaccaaagtcaagaaaagaggctcagaggttaccagggagactagcttctctaaacagattcataccaagatctactgaatgaagcttgccattctttgaggttctgaaaccagtagatgtttttcagtggggaccctgccagcaacaagcctttgaagatttgaaagactacctgataaagctaacaacactttctccacctttgctagggtcttctctattactttatgtattagcttcgcaatcaactgtaagtgctgccttggttcaagaagtagtgtatgaaggtgtgaaaaggcaaatgcttgtctacttcgtatctgaagtattaagcccatctaaaaagaattatatagagatggagaaggtcctctatgtagtcataatggctttaagaaagcttcagcactacatccaatcccacaacattattgtgccatcatctcaagcactcaaggatatcataagaaatagagaagcttcgggtcggattcgaaagtgggcaatagaaatcaatgattttatcatagacttcgttcactaaccttgcattcaatctcaagcattagcaaattttattgttgattggactccgagctgacaggacaaagcaacccaatcagacgaagttgtctggacagtcttctatgatggttcatgggggtccttcgtggctggt

SEQ ID NO: 149451 - DNA, 686 bp, Zea Mays
tcttgaaaaacgcatgagaatagctggattcgatgcgccataccattccccaaagcaaagcagacaagaatcgggcacgaacctgtcgactgtagaccgtagacgtgatcgctcccgcagaccgcagacagcagacagctgaagctccggactgtatccttcctctgctcccctccttcccgatcgtctcgcctccgcgttggcgttggcaacgccggcgctccgacgctgcctgtccggggacagggtggactagagggggtaggaggcggccgatgcccggcggatttttaaccgctccactgccccgcgtcgctgttgctttttttgctcgcttctgtggcgacgcgcctattcattgatcattttttagacccatgcatagtgccggtttgagtcgaattagccgtgacccttgatcagacgcgttggatcggtttattccacatgaattgctcgagggtctcggagcctacatctgacaaatacgcttgggcgtacccggaattcggttttaacagaaaaccaataatgatggactcacaatcagcgcgtgacgaccatcgtagaaacgatccgcacctaaactacacgcacgcggaataaaccccccaagcgatccatacatgattactagtactgtgcccgtgcgatacgacggcgcacaggaacaataacacacaatc

SEQ ID NO: 149452 - DNA, 374 bp, Zea Mays
gcggcgccgccaaaacctgtgcttcaactgcaatgaacggtatactcggggccacaacaggttctgcaagcgccttttcttcatcgagggcgtggagatcgacgacgctatagacagcagcgctgctgcagcagccgacacaggggagacggacgcgcccatcttttccctccatgcagtggcgggcgtgtccatgggcaagaccatgcagatccgcgtcgtggtgggcgcgacaactctcattgccctcctcgatactggctccacccacaacttcattgccgaagaggcggcgcgacgatccgggctgcccatcctaccccgaccgcgactcacggcaacggtggctaacggcgacaaggtgccatgtccgg

SEQ ID NO: 149453 - DNA, 590 bp, Zea Mays
agaggtgttgcccgtgtcagggaattgttcaaggaagccaaagaagctgctccatccatcatttttattgatgaacttgatgttgtgggtggaaatagaggtagaagttttaacgatgtgagggaccaaactctaaaccagctaattgcagaaatggatggttttgactcggacatgaaagttattgccatggctgctactaacaggccaaaagcaccggatgttgctctttgtcggcctggtcacttctccaaaaaggtgcagtcttggagacttggtacttttactctaggagtaagtggtctgcaacttgggccatacatgaggagacaatgggatcctggtattacaaatgggcaattggtgatgagccgcgaggagctagctttgcagatcgcagtgttgcttggggacaagcaacatttcgtcggggcggtaatgtaacacccggcactggctcaccacgtgatgggccttgatgtcgcatggcccaactcagagcagcctaaaggcaggaccacaacgacaggagaggtatcgaagacaaatcagaaatcgaaaacagggttcgtccccttcgctcgtcttcc

SEQ ID NO: 149454 - DNA, 697 bp, Zea Mays
gctctggtagtttgcatctgatcaataatgtcacagaacaagtggtattcctgagcaacctgaggggagacatgagtgtgaaaattttcttccaaagacattctcgagaaatttatttgcatagaatagctttgtctcctagcgaaagagaagaagttggggaacaatgacttgagggagaggttgttctagacatcgtgccataagagtatagtcctaccatcaccaacctagatgtagaatgacccttgtaatagtcaaccaatcttataacgactttccaccagaaggaacctttcacatgagaagcatgagggacccgacctgaggcataatatgagttctagacaagatcaaccaggggatgtcatgcccgccgtagaatttatgcagaatttaagaagcagagttatgttctagatcttcaagttgagaacaccaagaccacctttgttcttcgaacgagttaccttctcccatgcaataagagagtttcgatgagtagattcattgttgcctctccaaagacaatcccttctaatgcagtcattggtattgatcacgacaatcgatagcttaagggcacacagcgaaaataggcatcgccgaaaaggtggagttgacaaggatgagtctctcaaccatatatagccaagtactagtgtcgttcagccttctttcaattttagaaatgaga

SEQ ID NO: 149455 - DNA, 295 bp, Zea Mays
agctggagaagcgctggtgccaagcccgaggcgcctgcttgagtccgtacaaggacttttgcaggaggcacacgagatcgggggcggccgagtcgacgaagccgggcggctgctcacagtagacggtctcgttcaggtggccgtggagaaaggcgttcttcacgtccagctgatggatcggccaggagcgagaagcggcgatgctgaggacgactcggatggtaggcggcttgacaatcgggctgaacgtctcgtcgtagtcgatgccgtgccgctgggagaacccacgaatgac

SEQ ID NO: 149456 - DNA, 411 bp, Zea Mays
gtcaaccacctccatgtgttttgttgtttggtgtttgccaagaagctcaaccatgccaactagcttgatggatagagtatgctaggggtcttcatcgactatgttgatggcgtcaaggcatacctcatccacgacctacgataaagcacatgcacatcatgcacgacatcatgttcgatgaagagcgaggctagacatggggcaagatggtggacgatggcttgacatcaatggtcaactagtccatcatcgactatatcaacttcaagggagatgggaggggggctagcaaagcatcacttcatcaagcttgcctatccaacatctagttttccactagctctagtgagtcctcaaccacaaactctatcaacaatgctccactctcctgcactaactcctcactcccat

SEQ ID NO: 149457 - DNA, 539 bp, Zea Mays
ggtttttgtcagcagccccgcgcagcatattaaagtcaccgatcagaagccaaggaccagagatgctggggaggaggtctgagagttcagcaaggaaggtgggggagtcctggtggttggatggggcatagacgttggtgatggttatgggcgcattggcaaagtgcgagctgaaggtggtggtgagggagaaagagcgagagatgctggacgtgagctcaagcacagcgctgtcccaggcggtcacgacgcccccctggaaccgtcggcattgacgcagagaaagctggctagatttttaggcaaaaacgagcgcgctttaaggcagctgaggtcgcacagtttggattcttgtaggcaagcaacggacggggaggcaagggagataacaaacgatagtgcatttatccggatcgcctaaaccacggacgttccacgaaagcacaacacagtttttacaacccggactcatgactgaactgacagaccaccaggggacacactacgaccacggcagagggggaacacaccacggcgac

SEQ ID NO: 149458 - DNA, 633 bp, Zea Mays
ctactggaagcctggacatccacaatgcacatcatcattagtttcctcagcgagatgcagaggcaactgaaccgacatgactttggctccttcgacagaatcaaggaggaatatttcctggcaatcgcgagggtaactgccatgaagctgctcagctcagctagttctatcggctttcaggtgagcccaccaaccgacaagccatgcgagaacagttacggcggcgctgctagacgtggtctatccaaaatggtagatgtggtgatggtgtaccaggcactggatcacggtttgccagcaatcttatcactgctgtcgggggaaactaaggagctcgtcgttgcagaggctgaagggcttatcaagagactgtcggaagcgttcgccaaatcatcagatgagctgaacaaaactgtcaggtcgcagctcttgttcatcgccgacaccggtgtccatcgtttcacgaagcgcatcgtggatcatgtacggttcctggttcagcacaggagggcggtctatccgatgctactagcggacggccgtcgtcgtctagaaccgtttggtgaactggtgacgcggctggtcttgtctctggagttcacgttgagcgtgaattctaagagcctgcagctt

SEQ ID NO: 149459 - DNA, 397 bp, Zea Mays
aggttctagatagaacgagtaaagtggttcgacggaaacacactatggttttcacaccaacatagtgatttttttttcagaataacctctcggaatactcgcaacttcgtgttgctggcgattacatgtccttttatctcatagtttgcttcatgtcatttagcgacaaagagagcaatgtgccaacatctggttgagcaatgtatggctgagatttatagtcttaaattatttgatagggccttttgcttactaatagaatcccaatttgtgatgtcttctatgccaaaaaggctttcatgcattatattatatatcttcgggttacttcgggtaaaactttatgcatgaggagatagcagaaaattaacttatctgggtttaattgtatttcaat

SEQ ID NO: 149460 - DNA, 651 bp, Zea Mays
gcctcatcgctctcgagttacgatgtcatgtgtgccatccttcagttggatcgttgcacagtgaacgattgatgtcgatctgttagtgatgggaggccaggggtcgagaactttcttggttgggaccaatatttcggactcttctaaaccatcaatgggttatgtgcattcttgagtgctgaccaggcattaataccaagaggatggtctttttctttgacgagtttatactacaacaaagtatataaaagttgattatcattttgttcaataaagagcttttagaagaatatttgagattgattttgtttctttgaaggatcaggtggctcacaaatttctaaaagctttgctatatgactactagagaattttaagcataatctaaacccaaagaatgttaagattgaaaaatactgaattctccacttgacctaaagaatgtctctttacttttaccacttgaccactgatttctccaaacttacagcttgaccactgaattctccaaacttaccctggtgcgaccgtgttttagggtcaaagctttattctgatccttgaaattactagtgtcatgaatgaacagatgtggagttacagcacaagtttccttcttgttgttaactctcttcatgggttgtgttccct

SEQ ID NO: 149461 - DNA, 774 bp, Zea Mays
ccgatctttccaaaatagggtgttagaaccatccccaatttgagtaaggactgccacactaaacagatttcgaacctccttacaagcctgaataggataatcagtccatggcttgctcaagtcgctttttggagccacaaccagcaaactctcaaagcctagccatgaaatcgaaggtcaatcaagcctaaactgcataggttttttggccgagtcaccttaggtcaagctagaaggcaatgtcctcctctggcatttttttcttcctttccacaagaaccctcttcgaagcttgtcaatagctttgatggcccacgtaggaaggtctagagcggtagctgcataaatcagttttgatgtgatcacaaactgaacatgaatagacctcccaacccttgacataagctccgctttccagccaggcaagagagaggctacccggtcaacaatagcttgaacttggtctctgggtagcttcttaattgagaggcaaaccaagatatttgcaaggaaaactcaaaacggaacatggcaacaactcttggacacatgccagattaatagattatcatcattacagcggatagggagcacattactttttttgcacgttggtcttaaggcccgaggccacgccaaagagagtaagaatgtccaaggctaagttgatatccgaggcaactggctttagaaacaacactgcatcatctgcatagagggagagccgatgttgcatactcctggaagacaaaggctgcaagcctgcaacagcct

SEQ ID NO: 149462 - DNA, 775 bp, Zea Mays
attttccattgcagacatttcttcatcagctttcattcgacccctgccactgattgactttgtgatggagattctgaacaaagataacaggacctttagaagtattacttccatggatcttgtcaaggtaggcatttttcccacacaaagagcattgtagactgcccccgcctcccccacgcccgccctccgcaatccccaaccgccctccgcaatcccctaccgcctgccgtgatccccgccgccgcggcagccgccctccgcaacctctgcctagataaggataggggcccccgcctcccccacgcccgcccgccgcaatccccaaccgccctccgcaatcccctaccgcccgctatgatcccacacaaagagcattgtgcatgatcacacttgtgatggatgaggcttgagtttgcagctcaagaaagccctcaagggtgtgaggattgaagtcacacaccgaggagacacacgccagaagtaccggattgccagcttcacaaacagtcctccatcttcacagttgtaggacctcacgctttttcctatgttgaatatatcaatagaacatcctagcctgcccagttcagaaatgtcgggatcaacttcttgcagttattgtttattttaatatttttttcttcaaatcaacagctttgaatcatctgctggagttcagaagtccgtagcagattacttcagagaggcataccatctggaaatgcactatgattttctcccatgcctccaagttggcagtgatcagaggccg

SEQ ID NO: 149463 - DNA, 535 bp, Zea Mays
gttggggttgttttcaaccttgagatgaacggacacggtcgtcggtgagtgttcggatggcgaggtacgacggcgagcggcgtggatgaactccggcgagtctccacggatggcaggcgattgtcgaacggcgtggtcacagccacgggatgctgcgcgaacggcgaagctccggtggggaacgtggacggtaactacggccgaaggcgagtgacagtaacagagaacatcacacaaggcaggggaccgggcaggaaacaatttgggcgagattgacgcggtgccagagaatagagcagcaaggcacgatgacgccgccgagcagagatgaggggcgagggaggagaggctcagcgcgggctccatttataggcgatggaggagagggaatcactgtagaattggtgccgattgaattcgtcgacgactaaaaacataccattaatggtgattgaatgggaagggagaaacggcagccgttaatggctcggcatcaatgggcggaaacggtcgagttaacgaaggatgaacggac

SEQ ID NO: 149464 - DNA, 1554 bp, Zea Mays
gtcatcttcttctcaccctcaaatggtatgccttgacggatcatgttcttgctgattcctacttctccaacgacacggcatgggatcgcatggacaacattgtcttgtcttggatttttggcaccatctccatcaagctgcaggagcgtcatggcacggctcgtcaggcttggctcgctcttgagaacgatttcattggtaatcgtgagacatgtgccctccatctcactgttggtgagtattgtcggaagatgaaaggctccgctgaatcgctgatgctctctccgacctcgacgcccctgtctttgaccgcatcttggtgctcaatgtccttcggggcctaactgcctgagtcccaagtatgccaatctccggaccatcatcaccaggatgatttggtcttgtaaaagattgtcgcagacactgctactcctgactctacgaccaccgctctgtacacctctactacagctttgtcgactacctcatcaccttctcgtcctcctgcccagggaactcgaccacctacccagggaagggtgccgggttcaagtgctggtcgtcgcaacaagaatcgtcgtcacgacaatgtcgtggtggtggctctccttggcattccgtctacaatccctggacaagtacaatccacatgtggcctagatccatgtctacaggttcctctcctcgccctagacaacagcagcaccatcctcctgctccgtcgcagtcctacctggctgcgccaggactgcctaccttgcagctggcctgctcggacccctcctgtgcccctgtcggcccttcctgcaactcctgcaacatctccagctcctcaaccttggcctccttgggctggatcttgggatcagcgagctctcgccatcaccttcagtacaatgacacttcagccaccagccaccgttactgattggattccggaccaaccataccacagctcatgctggtaacatctctctctttcgacctcctggcctcgctactccttctatcattgttggaaatggtgccactctccctgtcacctcagtaggcgacacggttttgccaggacctttatatcttaaaaatattctccacactccccacattattcaaaaccttctctttgttcgtcgttttactactgataattgttgctctatggaatttgatccttttggtgtttctgtgaaggatctccgctccaatagcgtgattattaggtccaatagtgttggtccgcactacaccatgcgcctgtgcagttcatccccttcgacaacttgtgccctagctgcaatttcttctcccacatggcaccgtcgcctcggccaccccggcaccgatgttttgtcccaacttgatagttccttagccattcgatgttctcgtagttcccttgagttgtgtcatgcttgtcaattaggtcgtcacactagattacctttttctagctcatctacctgtactaagcaaccctttgatatcattcattgtgatctatggacatcttcaattgcaagtgtgtcgggttataaatactatcttgtcatt

SEQ ID NO: 149465 - DNA, 858 bp, Zea Mays
ggatattatagaatggaaatcacccacttcattgcatcaagttagaagttttcttggattggctggttattaccacagatttatcccggatttctccaagattgttaaacccattactgggttattaaaaaatgatgttaagtttgattggtcctctaattgcaacgaggcctttgaacaattgaaagtattgttgaccactgcaccggttttggcccaaccggacattgagaagccatttgatgtttattgtgacgcatcaggtagtggggttggattcgtcctgatgcaagaaggacgagtaatagcttatgcttcaaggcagctacaccgacatgaggaacatcaccccacacatgatttggaactggccgcaatagttcttgcccttatgatttagcgtcattatctgctaggtaatatatgtcacttatatacggatcacaagagtttgaagagtatatcttcacccagtcagagctaaacatgagacaaagaaggtggctcgagctaatcaagaattatgacttggagattcgttatcagccaagaaaggctaatgtggtggcagatgctttaagtcgtaaagcttcttgtcattgtctcacagtaagatcatctgacaccactctatgtcaagaaatggaaagcttaaatctagggatagtacaacaagggaccatggcacatctgaagcttgagtcagttcttctacaaacaattattgatgctcaaaggaccgataagggtatgaagtatattcaagagaaattggaagctggcaaagctaattgttttaggaaagatgatcaaggagtgatatggtttaaagaccgcatagtagtgccaaagaatgtt

SEQ ID NO: 149466 - DNA, 596 bp, Zea Mays
tatctcgttgcctaatcctcaccacatatcttcgaattgacggccacgctctaacaccctcaccccaacgatgccctataatggcggattgccagccacgacgacgctccactagagtgcgtgctgccgacgtcctggagcccggattccctggtctaatcggtgttatatgaagagtaggatgaggagaacgcgataggagggttcttacccgctaaccaaacaatgacgatgccgaccatggcgtagtgtagccctacgacagaggttggcctccggcgataaattgttgtcaacttgcttgatctctcacccgcagttcctcccacatgctctactattccccgtgaccctgtcaccgaggctggattgacgtcgcaggcgagaatcgactgcgatagctccccggtgtgaactctcgtggtgatggcagtgactcagttttgctggctccgctcaatggggtggttggggaaaagcggcctaagtacttatacgcagagaggaggccgcataacgaaggctgccaacgagatccacggaggaggccgttcacgcgagcgcgagagctggataggaaaaagggagaatatgtg

SEQ ID NO: 149467 - DNA, 341 bp, Zea Mays
cgtcgtcaccgccttggtggacatgtactgcaagtgcggctccgtagacgatgcccgccaggtgttcgatgccgcaaggtcgcaaggcttggccaagctatcgtcttggaactccatgatgcaggggttagcggtgcacgggcagtggcgagaagcggtcgccttgttctcggagctgaaatcctacgggctgagccccgacaacgtcaccttcatcgcggtcctgacggcctacggccactccggcatgcccgacgaggctcaggccgcgttcgcgtccatgtccagtgaacacggagtggagccggggatcgagcattacggctgcctcgtggatgccc

SEQ ID NO: 149468 - DNA, 814 bp, Zea Mays
tgacaatacctgaagtgacaaaagaagttgaaatcagaattcccatttgcctcgaactgaggagtccccatttccattatcaggtaacggaaatatagcagtttagagagttcagaacagcagaactagactgacacagaacaggtctggcaactaacctgcatgtcgtacaatagtaaaccactaaagctaccacccaaacaatttatgtggacacaaaaaaatatgtgcatcacttgccttcatatatcatttatttacttctactgttctacaccatcaatgtgtgtaaatcttaggtgactatcaattgcatatgccactgtaggagagtaacaaatttagaggggcaaaatgatgcactctcagtgtaaaatgcaaggttaagtacatgaatttatctctgccttcaaactacaacaagtgtacattttcctaggtccaatcttgagaaaaaaagttattagtatattgagctgactatcatgaaagaaaaataacattggctgttgacactacttaactctatttgttcttagtagtaaccacaagtccacaacatataaaagccttcacatgtagcatagttacacttcatgaaactacctttgagtaatcttaaacgttaaaccttctagtctacaaatagaaaattggtgcatcttaaattattttgcatataccataaccatataaaggattagaaatagaaagggtgatcaaatatcatacaatccagtgaacgttcacagtcccttaatattattgtatttgcctatctctggactcaggtgcacaaagaaagtcattttac

SEQ ID NO: 149469 - DNA, 288 bp, Zea Mays
ccccaaatgcctgagaacttcaaggaggaatggccaagaaactgagtcaaaggccttgccaatgtctaacttaagcaagattctaggagttttctgcctgtgaatagcttttgcagtttctcgaaccatcatagaattgtcatgaatatttcttccattaacgagtgcactttgattagggaaaaccattttagggaggttttcagcaagcctattagccaatatcttggtgacaatcttggcaaaactgtgtattaaactaatcggtctaaaatcctttacctccac

SEQ ID NO: 149470 - DNA, 389 bp, Zea Mays
aacatttggcaacagcaacaaccactaattgcaattgatgggcaaaacaatgtatataaaatgcatagggattttcatccaatacccgtcgttgtagcccatggaattcacctctcatgtttgatgccccatcatagccttgccctcgtattttatgtatggataaaccatgactcagaagcatagagtccaaagcttcctttagagctattgaagaagtgtccggaacatgctgaattcccaaaaatatttcgatgacatagcctttgttgttcacatacctatatcacaacacatagaagccaattaaatcacaaaacatgtacacttgttgcttaacataaaaatgctaacctcacaataatagccatttgctcttttataaaggc

SEQ ID NO: 149471 - DNA, 766 bp, Zea Mays
atgaccaaatagtatttgtatccggacagactgagtacaggggaggtccagaggtcacaatgaaccaggtcaaaagcctgctcagccctagatgaagatgtagtaaaagggagacgggtatggcggccaagctaacaagcatgacagaggctctcaaaatgtccccgattacaagaagaatctaaagtgctggagagcttggtcatgacgtcaggtcctaggtggccgagacgacgatgccaagtggtggaggtggcgatggagaccaggacggggggcggagacacgccggtggacgacgccccgagtgtgtagaggggcccgacgctgtcacatcgggcgagtggggtcctggtagccagatccttcacagaaaaaccaagggggtcaaactcaatggaacaagaattgtcggtggtgaaccgacggacagaaaggagattgtgagtgacgtgaggggctacgagaacgtcgttgaggtagaacggtccagggagaaccgaggcacctactgaggtgaccggaagagtggatccgttgccaacgacgatcgaggtagggtgtgtggaaggaggttggtgagagtgagatagcatgcctgtagtgggagtggtgtggtaggaggcaccggagtcgatgacccagtcagaggaaggtggagcaaacgccatggtgttgtaggcggcggcgagggcattggcgtcctagcctccagccaacggggaccatggtggtgtggtagaggtccccataggctgttgcggag

SEQ ID NO: 149472 - DNA, 458 bp, Zea Mays
atgaaggtgcaaggatggatagcaagagccgctaaatttaaagagtatatgtatagaataaattggagacgttttcccttctaataacctagttacatttacgaaacctgactaagtctgttggagttgatcattcaaacgagctcttcaaaacactcacctacgttagcacatgcggttgttataaagatttagtccgtccgctgatgttcccgtttgtccatcctagacgtaacaagtttcgtgcgccatgatgcttgagatagacggaagatcgccgacgttacctaaacacataatagccgacgaccagtcaaccacagatacactatccctgtctgtttgatccagagtcaatccgtgggtctatctatgcaggattgcacgaactgtatgcacacaagcgctctcgttcaacccccgcacggcacaattcaggtcctcttatccgccagcca

SEQ ID NO: 149473 - DNA, 518 bp, Zea Mays
agggcccaaactgctttcaaaattgtactatagagaagctgcttttttcaaagtagctgcataaaaattgaacctctttggttcagcttgcgcttttttcaaagtagaagcagtttaaaaaaactgaactaaacgcaccctgtatgtcccattaaattcaatggttattgaaatttggttggataacatttgaaaccagtctaggatacaatattcgggagtatttagtccaaataatatacctctgcaacagctgaaccatcactaaagaaagcatcaagcaacctttcatctcagtttagcactcatgttctaaatatgagaaaaatttatcctcgatgagaacatacataaggaccataatcatggttaatagacaccgttcatgtttaaaataagcaacttcctatgaattctccgcaatgttttcaagtcgtctagtcggacctagtcgtatagttaatcgaccctaatcgagctgatcgtccgtttcgtcgtccatatgtttctagacatat

SEQ ID NO: 149474 - DNA, 1249 bp, Zea Mays
gtggagaaggatttagtttgggatttttttgtgtgaattatgtaaccttacctcagaaattaaagtctaatacatgtgacacagcttagcgcacacattaccattgctcacaagatgaagaagatgaggcagaggttggagaagattaaggaagaagcaaaactggatatattcaattttaaggctgattgttgctccttggatgaaaatgttaatagcagggctacgttttcttgtatcagtgaagatattgtggggaggtccacggagaaagaaactatagttgctatgttgacaacatatagtgaagaagagattttgaccatctgtatttatggttttggtggccttggtaagaccactcttgccaggttagctttcaatgatgaaaatgttgggggagttttcgattaccgagtatgggtctacgtatctatgaaatttgatctgaagaaaattggtgaatctatactttctgaaattgatgaaggcaactgtggccaccacggaaaccttcaggaggttactcgtcatctccaaagagtacttgatggcaagaaattcttggttgttcttgatgacttatgggaagacaattggatccaattgcaaaatctgaaggcaatgctcagctgtggtgcaaaaggaagtaagatcgttgtgactacacgcactgggaagattgcttccctgatggatcattgcatgccttacaagatggatgtcctatctgatgatgattgttggattttgtttaagagaagagcctttgttcctggaagggatgatcctaggatagaagtgattggaagggatatagtgaagaaatgcaatggtgtgcctttgtctgcacaagctttgggtttcatgatgcggttcaaggaaggggtggctgcatgggaagcagtgagggacagtgaaatatgggagatagaagatcagaatattatgccatctttgaagcttagttattgtctcatgccttgtcacctgaagttgtgctttgcatactgtgtagttttctccaaaggagctgccatagacaaggacatgctgatacagcagtggattgcacttggattcattcaacccactagtggaagcttgacacatgtaaagcgcggtgaggagtacatccgtgaactagtgagcatgtctttccttcaggcttcgatgttctcatcctcagtgagtcacttttacatgattgtgactatactgctgaaattaaaatgttgtttacacaaca

SEQ ID NO: 149475 - DNA, 495 bp, Zea Mays
attagtgcatgatttttgtgagacatagattcgtattgaagcatgcctgtttataattatgatgttatatacatatcacataaggacataatagtggagtaattattgaataaatgtttccccactctcgaacacgtaggagttattatatgttggataaaggcatcaagcctcgtcctaacgagatggaaatatggaatacgcctgagatttcaaacgaagacaggatatccttttcttgctaaacaatacgtgttttttgtaatcgtgtctctcagtgtttacttctcttgagttcaacaggaagccttacgcctgttcaagacgtcaggtgttggtatttgggttgcaattgagtgattgggaaacctgattggacagaagcattgttggtcaaccaatgggaagcaatgaccctagcacaccctccaaggcttcaaaggcatcaaaacaagtacttgaaacagtggtaacacactgttacatatttacttg

SEQ ID NO: 149476 - DNA, 1635 bp, Zea Mays
ctgccgcagaacattgtaatcttcccatgtggtggcatcatctggaagcaaactccaccggatcaacacctgtggcacggcacgattccctttcttgaccaaccggcgatccagaatctccaaaggttggacattgcggctactcaaatcagagtaagcaggcagattagaaaaaacaggagtgtaatctggaatgaatggtttcaactgtgagacatgaaacaccggatgtacttgagccgacgcaggcaactccaaacggtaagccactgctcccacacgctccacgatcttgtaaggtccaaagaacttaaatgcaagcttcggacaaggtctactgaccacggaatgttgcgcatacggctgtagtttgagcaacaccatatcgcccacttgaaactgtcgatcagtgcgaagacgatctgctcgcagtttcatgcgattctgggctgcggccagttgctcccgtaacatggctgtaaactgtgctctctcaactaaaacttgtgccacatcagctgcagtatcggaaggcacagaaggtgctgctgcaaagggaggatcatacccatacagaaccttgaatggagaacaagctaaagatgtgtgataagaggtattgtaccaaaattcagcaagtgagagccaggtcttccacttagttggttgagcatgaactgcgcatctcaaatacatctcaacacattgatttacacgctcactttgaccgtcggtctgtggatggtatgcagtgcttaaattcagcttagtacccaaaatcttgaacaattgagtccaaaaggcactggtaaagatcttgtcccggtcactgacaatagacttgggaaggccatgcaaccggaccacctgatccaaaatgacctgagccacttgggaagcagtaaatgggtgtttcagggcaataaaatgagcatacttcgtgaaacgatccactacaaccaggatagtatcacatccaccagattgtggtaacttctcgataaaatccattgtaatatcctgccaggcaccttgaggaatgggaagggggtgcagcaaaccagcggggtgtactctttcgcctttggcctgctggcagatttggcattgttgcacaaaatcagccacatcagatttcattcccttccacacaaacaacttcttgaggcgatgataagtggcatgcatcccagaatgacccccagccgcgctgtcatgaaccgctgccactaatttagtgcgaagagcagaattctggcccacccaaatcagacctcctttcctgatcaccccttgagataaagaataaccgtgttcatcaggattatggacacatagccgagccaggagagattgagcagcaggatcagtcacataggaatttgtaacttcttggatccaaagtggttgaacctcactgactgctgttaatgccatcactgcccccacccgagaaagtgcatcggcaaccttgttatctttaccttgcttgtaaaccactttaaactgcagacccatcagcttagccatcgcctttcgctgcaactcggaatgtaaatcttgacttcccaagaaactgagagccttgtggtcggtccgaatttcaaactcactccgctgtaaataatggcgcca

SEQ ID NO: 149477 - DNA, 402 bp, Zea Mays
agctgatgtgtgggacagatgcgaatttggaaatttggtttcactgctagcctggtggtctcttggtttatatgttaaactggtactagcaagttaccgtcaatctgtcgatgccttcccatatactggcttgtggcatgattatttccttattcaaactagcatgtaaatcggcatggctagttcctggaggattaggtaggtcgttactggcaatgaagtgaatttgtttttgtatattcagattttacgggacagagatgtcatttaccttgtaatttgaaggactattacatgtgcttatgacataatatgtagccgtttcatttgcatgtgtcaaaatccatccatcatgactggatcgaggtcaaagttgtcatgttttggccccgtttgggttgg

SEQ ID NO: 149478 - DNA, 912 bp, Zea Mays
gatctatccatccatctccgggtctccttgcaccttgcctggctggggcagacgcagacccggccacgtccatcctcgccatttctgagatgcgcctcgcctgcctctccgagatcagttttggcccagcaggatcaggatcacacgcatctcgcgaaaaaaaagttgacttctcccatccgcgccagtcgacacgtgatgtgctcctacctctctaccttgcactttcttttcttttctttttttttcctgctcgaaaagtccccggtccgatccggcacgaggtggcagcagctgctgcagggcatctgcacgttgatccagagtggattaacgaggaataattcgggagtcacgttcagcttttttccaccctgaaaataaaaaaaaacgaggtcaaatatcttcatgagctctttagaggcgtgcttcggtcagttctcggtggccatgatgctgaaacaaactgatcggagtcagccgtgggccgtggcccgtgccacgtgcagtcgcagcagagatgaggtggtcctgtgctctgcactgcacgacgtatattttttttccacatatatatatcgggagttctggatatgttatctttctgttcctatactagtataatggtacagtgttttcgtgcatctggagggacggaactcgacaagttggcctgtagtggtcgtcgtccctccccacacgccgttggcccagaactgaacacgatattacattgcagccagaaagcgagcggcagctccgtcggtggtgggtttgatcggatcgagctgccactgccactagcggcagcgcggctgacgatatgatgtgacgagtgatagctagctccgagctccgagccaatccgtgccgcgcgtacgcgcgggcgtgcgtcgcgacgcgcgcgcgcgc

SEQ ID NO: 149479 - DNA, 586 bp, Zea Mays
cgtagacctccacaaccccgtagcgccattgtactccctgtccacatcaaaccggtcgaaggtgaggaccgccgctcgcaccaccgcagatccacgcttttgttgtcaatccgtgccttggtgcgtgtcgtcgtcctgcgatgtgaggcggtgaagccatccaaggcgctaccgggcaggatcgccgaccatcccgcctccaatttctcgccgacgaccacgaaccgcagctcaccgaggccagtccagacgaccccacggttcacggtaaatcatcctccaacggttttactacagtggtggcaagcgatttaacctagtatcatcgaaatagatcacgggagaccccgattgagcaattctcccgcgttgcgccaccatggcagcccagtccgccgccgtggctgggtcggaggaaggagataaggtcttgatcatagatcatcgcgtggatagttacgattagaagtaggataccctttcggctgggttcgatctgtgacgtcaagcgtcaatcggagggcctggattgaatcgtgatatgggagtagtgaggccatcagatctcgatcctccgatcgctgtt

SEQ ID NO: 149480 - DNA, 286 bp, Zea Mays
gcggaagataacgcattatctgcggccttcgggaaccggaaaaagaagagactaaatagagtttttgatgctattgggttcatgtaccctgactaccgctactcgtcctaggggcagaaaagaaaaagtgcggctcctgtgaaggatgttgcttcggctgcctcgagtgagcctacgccgaagaggaaaaaagtgaaggttcttactcaccgaccacgctacattgaaatggccacagtgcccgaatttggtggtgagacctcttcggctaccgaaaccaaagaac

SEQ ID NO: 149481 - DNA, 339 bp, Zea Mays
ttgacggcacaaactacccctattggagtgttagaatagcttgtcatctagaggccgtaggtttggatgtttggagaatgacgatggaagcaacgaaaccccacgctaagcctgaaaagcttaccaaagcagaacgaaaggaggctaaactcaatgcgattgcatgtgatgctatctttggcgcattgagtcttgatgtcttcaatagagtaggtaccctgaaaagcgctcatgagatatggcatatgcttaaggacctccatgacggcacgagtgacgttaaggagcaacgacttagcttggcttcccgtgcatttgaatcttttgaaatgcttccta

SEQ ID NO: 149482 - DNA, 322 bp, Zea Mays
ccaagttaaaaactacaacctagttttaattagattgtcgtttttgaataactatagaataccaaaaatatagataattaattaatcaattaaacttgcgacatgactagataacattactactacaaaatcgacgatatggcgcattctcatttgctgtgaagtcgaccacacagatgatcacaaataccgtggttgtagaagatccatagaggaatgtgtgggtgcggttttgcatttggtggaatcgtgttgcatgcagcagctctgaatttgcgtggtgcatgcaacagagtcacggtcaaacacacggcaagggaat

SEQ ID NO: 149483 - DNA, 379 bp, Zea Mays
gaaatagaatatgtgttacgagcaggcactaggattcacctttgtttgagttggctgatggggaccttatttattcagtagttgggccctttagcaagtgatggtgtcatttcctagctggctccacggcatatttattcaaactggtgtccatcactccatcggcctatatgaatttagaaccttgaccccattgtgagggcctggtactagatagtgtttgttcaatagcctaacctatgtagcagatttttagtgctcttaataatatccgaggtgtgggttcttgatagattaggttggtgctgggatctgttatcctactatttttctggattcttggttgtgtctgctctgccctgattgttgtagttaaatt

SEQ ID NO: 149484 - DNA, 612 bp, Zea Mays
agagttaccataacattcattgccattgcattgttgtgctgttaaaaaatttaaccatagtcaaagctttttcactgcactctcgagcggaccatcattttgagttaacttcgtcaaaaaagagagcttcttcaaaactgcaaaagacatcaacttcgtaaaaactgcaaaaaatccatcagatggccagagtacgctcgactgcaagggtgattcgtgaatgagaggagaccgaggccaccgagacagctccaattttcgaagttatgagacagtcaggtctagttgtgacagagggaaccattgacgaagtcacacctgctgctgaagctgaacaagctaacattgaagaagaaaatgttgatgaagaagaggaggattatagcattttgatcccatcaaaacccagccacctagattttgagaaatctgttgtgtctgaagtcgacgtgcctatgatgatgaagctgggttactttggagaagctgaaaggaaactgatccgatttgccggagaagagaccaccctagtgccaaaagatgatgaagtagttgttttcaagagttttttcagagcaggactgcggttccctctgaacgagatgataggag

SEQ ID NO: 149485 - DNA, 740 bp, Zea Mays
cacatgtgccatagttgtgaggcgaggtgaatggttttaatggcacgacggaattcagtggatttttgtgtttccactggttttgctgacagtcgattcaaggtttgtagggcgttgatcttgaactgattcatgggagtgaatataattggtgattagctttgtctaagatgagcgagtccagtttccttgtttgcccatgtggagtaagcatgtctgagatgagcgagttcaattttcttgtttgcccatgtggaaataacaaatgttatatgaattggttggtttttatacattgttagggttcctttaaggcttgtgtaaactcattagaaattcccatcatcattttctataggtttttggcacatgtggtttttgtttgacaaacaattaaattattggggttatgtcacctaattcttttgtatggtccatgttattgttatatgtaaatgccaaaattaaaaattctatgttagttcaccatggaacttggtatttgttcaataccatgttccatttctaattgaaattgcttatgtgtgcatttttagcttgtttgctcaaattgttacttgatgctctttaatctattcattgtggttgaaaatatatctgacaaccagccatctatttagtttatagttttagtccttaagcttcagagaaaatatcttctcagggatgattttagcttgaaggttcgagctttgcgggtgagtattcacgttgaggca

SEQ ID NO: 149486 - DNA, 1060 bp, Zea Mays
ataacttgaactctaccaacctcaaattgcctggtgtgtttcatgtccacatcaatagatgtacccagcaaactgcccactgcccaaattgttgggaaagtacgatacaccaacggtatacccaacacctgcacccagtagctgttcaccaccttgcacggtttttccgattgcttttcctcaaaatgaaaaagaacccctttcttctttgagtgaaccgttccccattccaccagacgctgtagctcagttgtggaaggaaaagctgtccggaacacgttagactgaaccatttgcaccttccaatcctgtgtcccaggtattaggcgcttcagttcagcagtaacttccacctcagtaagctcgccctcggtaactctgatcactgcgtcaaggccctccctctttgccggattcttgacagtcactggaatatggaaaaaacccagccccacagccgcgaatccgctgagatagatgcatccgggtctctgtttgagatgattaaaaaccagacacctactcttaggatgatccaaaatcttatctttatctaagatcggttccaaaatcttatcttgaagttccaaaaccaggcacctactcttaggatgatccacactatcacagacctcagattcaaaagtcacaagaggaaaacatcctatctttccataaaaaatgcataccccattcccatcaaatcttgactgagcagtcgcacataagaacattcctatcaaaccataaaacctaaaccctacaagcctagttgtaattgcacataacacagtgtagcggtaagtaatcaagccagggacggttgtgacatagtaaatcgtagcattttcgtaatgtcaccctaattattttcagtctccaatataaaacaaacattcgataatcggtcgtgcctagacacttgtccaaattgtgtcgcaaactttcatataccgatatacaactagttctggttacctatcctaaaactagaatcatatatccttatgacagatggagttgtaatgttttaatgaccgtgaagttgccatcatacccg

SEQ ID NO: 149487 - DNA, 316 bp, Zea Mays
agtagagtctctcatacctaatacactgcgagttgatgaattgcaaagtattataaaaaggaaacatcacaaggatgcccagccccaagaagaaatacatgagtgttacattgatggatggactattacttgcacacagtttcagcctcgtcgtcgcatcaggtccaagaaacaaaaagggaaacatggaaaaagtcaaggaataacttcaagaaaagcttgctatcaatgtggacgtgaaggtcattactttcgtaactgtcctgagaagagttcactacagatcacctccgagatgaagctatctcagtcttca

SEQ ID NO: 149488 - DNA, 447 bp, Zea Mays
tgaagcccagaaatgcgaaattgaagatcttcggaaacagctggcagaagcaaaattaaaatgtgcaattgccgaagctgactgagacgccagtgattactggaaaaattattgggagaaaacagctgtagaacttcggtcttcaaaagaaagatgttatgaaaaatccatagaatgtgtgagaaaaataaagacaagcttcgccaacgttggcgcatactccagcgaggacaacttcgtaagaggcgatcctgagggcccaattgaatggatcagcggcgaagccaatgctttcgaggaaattctaaatggtcgtggagacgtctacaccttttctggcgtgaggggagttgcagctatcttggagaagataggttgcgaacacgtaaaatccttggcgcaaaccgaagctgccttatctattgaagatacaaaagacccctcggc

SEQ ID NO: 149489 - DNA, 282 bp, Zea Mays
ctccgactttggtttgtgcagtttctgagctagagctaggaccacgccctatatagcacgccaaaatgaccatatgcatgtacttgtggatgtttgatgaaatatatacaaatttttagacaccccgaccgtgagttgactacgcatgcagaagtaatgacagtctcttgtgaatcatctttctagatagatctggtgtccgaggcttccacgtaaataaggtctgaaaaatagataaacaagatacgcaaatgcagagatcctctccttctccctgccgag

SEQ ID NO: 149490 - DNA, 414 bp, Zea Mays
atgacgcgtgtgtgtggtgtttctgttctctatttgattgttgcctaattgttactacattgcatcacttactcaatatgttcacaatcactatgtctgtaaggcattttatttttatgaggaaccttactaaccaggatttttgctatgatgtctgatgttcattcaaaacaagtgttttattgttacgctagataagcactcgaccatgggggtatcactgtgtttacaaattccagtatgtttattggtatctattcttggtccgcaataagtatatgataagcttttcctcaggaatatgttactaaaaactgctgaggctcactgggaacttcagttagttactaagtaggtgtaaattaaatctgacatataaggtggcacgctgcatgatgaccctttgtttcttgt

SEQ ID NO: 149491 - DNA, 365 bp, Zea Mays
cgtcggtgttgtcctcgccacggctggcgtccgggggtccgcgacgagccgaggtgctttgggtggttgtcagtggatcgcctgtagctagattgggaggaaatcgaccctggggcggctggaattcatcaccgtacacatcgatccgccgcaccgcgtgggtagattggagtactcctggaatcgcggtgagcaacctctcccctacatcgtacggttatcctctacgtgttactaaaattgattcgaagttcgtgcgagtgggccggattttgggcgacaccggccatggcgccaccgcgggcgagacgctctgccgtgctcgttcgccgtaggggagtagagatagatgacgatgcgatcgg

SEQ ID NO: 149492 - DNA, 444 bp, Zea Mays
ctctctggcgattcctctccctcgccggcgacgtcctctcaccggcgaccaccgtgctccggtgatctttcgtgcttgcgcctgctctttctctggtgagcagccctgttttcccctgcatctcttcttctcctctctgtctgtctctgcagtaagcactctcttccaccccctttgtgcccatttcaaattcctgtgaattccagtgaagccaagttgtggtatgtgttcctctgtgtgccttgatcatccctgcaggttctcagctccttagggagggtttcacagccttaaacagccgtttcaccgtaaccctaaatcctcgcacaccacatgctcggtgaaatgcccaaaccagccaaaaatgctccaattgaacccaaatttttcaggcactttcacaatacctccagtaccatattcgccaaatttcacgccaaaccg

SEQ ID NO: 149493 - DNA, 724 bp, Zea Mays
tagaaactgaaggcacgttcaaatctccaaaaaaaagaagagccaaattagcagactacacaagcaacatcgtctgtgggggagcagcgatactcaagcacgcgcggatctagttgtagatgtcgagggagaaggccacgttgaacgctcagcttggggcagcagagcgaatccttgtgcacgacgacgaagggcatctcggtcgcggattcgggatggaatcaccacctcctcgctggatctttgccaacagtcttcaaatccaccccgagattcccaccgggcaaggaatcgccctctgctgaaggtcacttcccggcctcagtcccaacttcatccctcggacgacctaagtcttctggaatgcaaacctaagtctttctggaatgcaggagatgaagaggtcgggggatcaagatgccaggaacgcgggagatgaagagggaaatgggacgacctaagtctttttggaatgcaaacctcagtcccaactggtcacgtcgaccaatctttcctctgccctcgatgtccactaccaccctattgtctaaataggaggaactatgggagagcaaactatttttactactaatagctatttggcaacttactaaacaaaagtttagatagcttttttcgagaaaactatcggagtttgctctaacatggtgttcccatctttcagcatagcggcattcaatatttctttttcatatgtttaaat

SEQ ID NO: 149494 - DNA, 321 bp, Zea Mays
agacttgatccggtcagggtctatctctataccatgctcttggatgacaaatcctaaaaacttaccagccgacaccccaaaagcacatttacgtgggttcattttcaaaccatactgacgcattttataaaaggctttgcacaaatcagctatatgagaactaaactcagccgatttgactacaatatcatcaatgtagacttccataatgtttcctaacaactcatggaagatcaaattcatagccctctgataagtagcaccagcatttttaagaccaaatgtcatgacaacccattcaaataaaccaatgaagcctgg

SEQ ID NO: 149495 - DNA, 551 bp, Zea Mays
agcatggataatttagggttttcttaacatggtaaatacagaaaattgattaactaagtagctgtcagaaattaagatgcaattatgcaatgcataaagaaatgctaaaacgaagagcaacaaataaaaaacaagaccaaaagtacagactaagtattcaaaagtagtaaaatatgtaaaattacaaacttgtgcttcttgagataatcctcaatttgatcatagagttgagaaaggcgctcaaagtgaatatgaccacatattcgatggaaatcaaaatgcacaaatctacaacggatgattagatcacaattagcaacagtagcaaatagcaataaggaaaaggaaatgaggacatgcaaatgtgaccttatatcttcactaagtatcggttcaatagattttgcgtatctttcgtagagtcggccttcgccaccatgctaaatatgattttagagggaaaaatgtgtcacaaggaaacattcattagctttattaggcaaacagagaagtatgtgatcacaattattaatattgggaacaaatatata

SEQ ID NO: 149496 - DNA, 508 bp, Zea Mays
tccaaagcccgttgcgtgcgttccgcgccggtgatcactgacaacggatagccttgtcaccttgcagtgagtgcaggttcattttctgctcttttccagcgccattagagacttcagtatttgttttttttttcaagtgtgtacgcgtggacgcgtggtgatcccactgcctgtccttccctttgcttccgtgatttgttcatgaaaagtcggtccttttattttgtttaacatgcctagtctagtacgtacaatctacttattagttttagtccctgtctcctattctttttttaatatattttcttcaaagatatcagcatttgtcgcctgtccttgatgtcatatatgattgcaccttttaatcgttgacttgacccaggggtggtttcatcatgcacgcagtccttctgtctcctgtcatgccctctgtccaaattttcaaacatacgaattacgtcgttttcgcgctcgataccgcgactagacctcttaatcaaggactcgg

SEQ ID NO: 149497 - DNA, 711 bp, Zea Mays
ggtgccgcggggaaaccgagaggcacacatccacgacggattacgtcgataggagtcttgcccacgtagagcagcggcacaacggcggtgccaaggccacggtgagaaattcccggccaatggtagcgacaaaacccaccgcgggaggcgccagacgaggttaagatgagggcgattctcacagaggggctcataccgatgattggagccacgaggaggtctgaccacggcgagacgcaccaccgcggcggcagcctcgccctgccgagccgttattgtcaccgtagccccgattccacccggttggcgccacgatcgacttcctggggactcggagaagcgcccagactggtccccgtcgacgccggtggtccaatcccccggttgcgggttccaggcgtgattccggcaagcgcatagaagaaacgcccatgtgatcaacggtggctgcgcgtggaggggatgtgaagggaaggtaagggggaaggtggcttatatgctccaagaatcggaatctggttgggagttgcacagaagccgcgacatccatggcggaaatctagcgttgtttgttaggatggggaaggagcatctggcaaggtgggcccacacaccggtgacagtgcccaagtgcgcggacgcaagggagataggtggtccacatgcaggcgacaccaggaggggaagatgggctggcacgaggtagtttga

SEQ ID NO: 149498 - DNA, 1427 bp, Zea Mays
gattaagcaagcatttcattggggttgcgaaatgatgatgtgttagggctgcatagttttgatttgtcactgaatcatagtaagtttcggtactcttgggggtggggggtttgcaagttgtgcaagaaatttttggggtgcacttttatttttatacatggttagctaaatgattgtttatattggattgatgcgtgctaacttcaggtccacgttggacgcataattggttcgttttagttttgggtggatggttatcggtgtttcagagatggggcctctccaatgcaatgcaagtgttgttcccaacatttttgttcctttatgagttttgatgcgatgaaataggtctagaacttattggtgcattgtttgcacggatgaagttgaaatgtttcaaaacttaagttgatgtaaaggagtaggcctgttcatggtcctgtttgtgcaggtttgagcgggttcgcaaaccaagccgtgtgcatgtactctggtctgggttgggtagctctgcacaggttagtagctggtttcataacatatatggttgggtcagtccagtctgggttgatggtttttcacggtttctcagttgataagtcccatcgctagaaggaaaaacaaaaaaggaaggttcctagaatcccatccccttcaaaggtaaaacctgaaaccaacccagaatctcaacaaacacaggtttcaccatcagggctataaaggagtatgttttctgtcttaacttcacctgatggtgaaacttgtgtttgttgataacttaatgtgagtccaatgtactgcaatgtgcccttgcacaatctagctcttgtagttgtagctatgaaggttggagggttatgtgttccataacaggttcttagaattttgatatattattttgtgaatgatgactcgcaaccatgtgagcacaacttcataggctcagtgtatacaaatacaagtgaatgctttcatgaattgtcatgatcgtagttggcgtataagtttgtcaaaaaaatggtgatccttaatggcattggaactcaaatggtaggattgcaaaccataggatcataaaaaatagaattgcaaaaccatgctgcttggcatatcaatcctgaagaaatctgcatggagattggttatgtatctatttcacatagaatatatgacgttccccaaggtatttggtaatgacatttagttctaatagattgaaaagccattattttttcctgtttatggcctagtttctgagatatagcaaggcagaaacagctgctacttataaagggaggggggtttaagtcagccccggggcattatattaagaaaaagacctcacgcaggtcaagaaatcagatggacttgcatttttataaccatgccgcttgtcatatcaatcctgaagaaatctgcatggagat

SEQ ID NO: 149499 - DNA, 699 bp, Zea Mays
gtttgtttcctctgcttgtttctttccattccgttctacctatatatgatgggtcacctaaagctgaaacgacacaaactgcaaagtctgccgaatagacacaaactggcactctgctgtttgctcacctgaaactaggtagctttctaaaaaaagtataaaaaattggctgaacctacactgattgatattaaactggtcaaattgagtaatgattagtgcatatggaaacagaactaaagtcatacattgcaaacatgctgcacaaactacaccagaaattcaacatatgctaaaaagaggctaatatgcgtcatttgtccagaacaccatatgctgcgcacatgttgcacacaaaactggtgtatatctcggaaaattacttgaagcaaccacaatattatagctcaggtagatattcagaatatgttccgcccatattaaagactcagccacattacactgggaggggccataacaacgtttaggccgtattgttacagtttaaaggcattttttccatctacagaacaagcatttcccccttctgacttagtaggtttctttttgagtacaactcttttcactgcaccctctccccatcaattgcagctcttgtggctctaacctgtttttttgtctggctgctaactccgcggtaggacaaggatcaggtgtcacacagaacaggggggctgc

SEQ ID NO: 149500 - DNA, 529 bp, Zea Mays
ccaggacgagctccggcggctgttcccggccaaggagagcgtgggccacctcctgtcccggtaccttttccacccgaccaaccccgtgtggagtctgaccaccaggtactaccgctcgtacctggctaccgcaaagcggaggatcggtgtgcaggtcaggatgttcagctatggctccatctccgccgacgacatgtacagccagatcctcgcgtgctcccagcaggagcacatactgccggagaccgaagacggtgatgaggacgaggtggtggccgcgacgaggaacggcgacaatgccgatggctccaactccacggccatcttggtggcgtctctgtacgcggactactacgagaggctgaggtcgaggtactacgaccacggggcgaagggcggcgagagggtggccgtgttccaaccgtcgcacgaggagcgccaggcgacggacaacatggcgcacaaccagagagcgctcgcggagatctacctgctcagcttctccgaggagcttctcacgtcggggagg

SEQ ID NO: 149501 - DNA, 1512 bp, Zea Mays
attcatcatacgcactgatcagcgcagtcttgtacaccttgatgatcaaagcctgaccactcaatggcaacaaaaggctctcaccaaacttttgggactgagatataaaatatgctacaaacaaggacaaaacaacagggtggccgatgccttatcgcggagaaccatggatcagctcatcgcagtttctgttactcaacccacctggctgaaggatctggcagacacttatctccagtttccagaaacaaccaaaattcttcaagctgtttctactgattcttattcaggatcttactccttgaaagacggtctcatatatctcaaaaaccgaattctgttgccagcaacatcaggattcccttggaaagtattccttagtcttcatgcatctccaattgggggtcactctgggtttgcagttacgtatcacaaagtcaagaagctgttcgtgtggacaggaatgaaaaagatgatacaaaattggtgcagtgagtgctccgtgtgccaacaatcaaaaccagaaagagtcaaataccccggactgctccaaccaatcccagtccctgatggtgcttggaaaacaatatcaatggattttattgaaggactccctaattcttgccactccaactgcattttagtggttgtagatactttttctaagtatggtcattttatcccaatgactcatcctttcacagctttatcggtggcacaacagttcatggatcaagtgttcaaacttcacgggttcccgcaagccattatttctgatcgggacaagatctttaccagcgctttctggaaagaattattcaagttagtgggagtagatcttcgcatgaccacagcatatcacccacaatctgacggccaaactgaaagggtgaaccaatgtcttgagacctacttgcgctgttttgttcatgcttgccccacaaaatggaggaagtggctctcactcgcagagtactggtacaacaccagttaccactcatctctgggatacactccttttgaagttttgtatggacatcttccaagacaacttgggctggacctgagggattcctgtgcagtccctgctctacaagattggatgcatgaaaggaaattaatgattcaattggtgcaacaacagctcactcgtgctcagcagcgttacaaaacccaagcagacaagcatcgctctgagagaacttttgaggttggggacatggtatacctgaagttacagccatatgtgcaatcctcattagtgaaacgagcaaaccataagctgacttttaaatactttgggccttttccagtggtggccaaagtaggcgcggttgcatataaactcggcctccctgagtactcctccatacacccggttttccatgtgtctcttttgaaaaaagtcgtgggatcacaggtgcaagtcagtccaactctaccccctttttctgatcccttacaatggcccgagtctatcttgcagcgcaggaaggtgactaccgatgctgg

SEQ ID NO: 149502 - DNA, 1518 bp, Zea Mays
cctttatggcatagtaggtggtaaacggttttacagtccataaagaattaaatgacactgaatagacccagccaagtgcatggtagtatcacagtgaggaaagccaacacggatctcatctagggtattcttactactgcatggtagtatcacagtgaggaaacccaacacggatctcatctagagtaattcttactgggactattttgtgctcactatgcaaattcagatggaacaaacaatcacagtagagtttgagaaggtcatttcatctctcatttcaaactccacactgtaaacagcaaaacagtgttttgcatggtctgctggccatagccttaaacatgaatgagaaaagtacagtctcaggcaaatggagaaaaacagttaaactacccccctccccgagtaatcatttttttcaacgccaaattcagcagtgcctactgacaaagcactaggaaaacacatcgatttttttctattgtacctccaacgcagttcatcggggtagtactactactagaccactttaccatgcttcattgttctcacaaggacggccatgtgactatgcccatcgatcttatgtggtgaggccgtgaaagtgaaacatctaccaactgtcctccaactgggtaccccatgtagtggtccaaagtccagagcactatagatcatggcgtggatgtgtggtgatgaaggtacgacataaaaagataggcatggacctccacggcactgggccatcctctgaacaagttatttgaccctcgcgaacagggttcaatgagcgctctgcagcagtatgcaaaggtcagctgtgccttgctgctccctctagatctgagtttactacagcagcccggatttccttttgactttgatctcgccctttagcggtggtgccataaataaaacacctattgaaagtgagtaggcgcgtgtttcaactttaaaataattaaaaaaaccatggatttatttgtgtaaactacgtttgtatgtgtgtgttgcattgtttcacatccagcagaacgtctttctcagcttgcaaggcagctcactttactgtcaccacccattttgaaacacaaaaatacatcacatgattcgcatcagcaagtgcgagccttaataagtggatgaactgcaagagcgagctcatgcagtatatagcagagagagatgaaagatttggtccacttccgttttggggcagagctggcacaagcaacagggcgcgaaatttttacagctcagcggttcacattttttgtctgaactcagtatgcccataactgcactgtgtttgaagctacctagtatctggttgatcctcgctgcctgtgaacaaccatttagaaagatgttactgtgcttaggaaaggaggaggatcatcgctttgcagtttgcggagcgcctcccccctaaggcctaaacccaaccaagtgcacaaagtaacgttcttgtactacatcagacaggcaaacactagtgccaacactacttttccg

SEQ ID NO: 149503 - DNA, 582 bp, Zea Mays
cagcaggccaaaagtgaaaaacagctgcctactggtctgttacaacccttgccggtgccaacaggggcctggaaggatattaccatggatttcattgaaaaattgccaaagtcagaaggctatgatactatactggtggtggtggacagattttcaaaatatgcccatttttacctctgagacatccattctctgctcaaatggtggcacaggtgatattggacaatgtcgttaagctacatggggtccctaattcagtagtgtctgacagggataaagtgttcaccagtgcattttggagacatttgtttgatatgctgaagattaagctagctttgagcacagcttatcacccacaaactgatgggcagagtgagagggttaaccagtgccttgaaatgtacttaaggtgtgctgttcacgcaacgccccacaagtggaagtcttggttggctatggctgagttttggtataatactacctatcactcttcattgggatgttctcctttcaaggccctttatgggtatgaggcttctgtgcttgctgcaccagatttcctgggcacagaggatactgaag

SEQ ID NO: 149504 - DNA, 521 bp, Zea Mays
aaagttttcacccctatttacacatgcttatcagtagaacgatacgaagctcccacaacattggcctacatttgtgaagactactcctccacacgcgtctcatcaacactgtcgtctagtgtggccagcgagccctccaagcaggcaatgtttttaaccttttcatccctcagcatctgtggaaaataagaaacaaagcatcaaagatcatgaacataaaaacacagctttccaccccaccagaaaaggccttcacctgctccaatgctcggccgtccctttccctaacgacagacgaccatgcggctccacatctgaatgtacaatgcactagcagaccctttcaataacgcgtcttcgacatggaaaacctcctactcgaagtccatgttgacatgttcgaaaacctcaatgtgacggtagacttcgcgagacgggcattagcagcaccctcataggtgacgagggaggcataagacattaagcctgtcatgatcgatgggagagtctctagctcctcc

SEQ ID NO: 149505 - DNA, 457 bp, Zea Mays
gccgagctagagccagggacgcgccgagcagaggagggagatgagcagtctgcgcagaggaggatgcacagcgctgggcaaaaccgagccagaggggcgcgccggtgtgcagagggcttggagcgacggtcaaatcggaggtcggagggcctccaccacgcgctgctgcacgccatcgttgcttgtctgtacggctactccaggcgattggaactcccccagcggcggtggctactccggtgctctgctccctcggtccctccacagcagcggtgtgacgctacaacagatggcagcgggcagcgctggaggccgagcgagctgacacggaggagataagggagctgcggccaggagaagaagataaggaagcagcgcgtgcggcggtgaaaaatctgagcaggggcggcaggatttttcctccatgagctaagccacacgcacggcaaaagaaaga

SEQ ID NO: 149506 - DNA, 1087 bp, Zea Mays
cagcagtattcgcactgtttcgttccaactaacgcatcgtttggatatccatttatcctcctcaatatatatacgcaagtagtttaatataaaatttaattaaattctacagtaaactactctaaaacaacatatggtaacacgtgtatattgattggatggagggaaatacatctgcaccacagttgcggaaagcaaccccaatcgaagcatcatgagagcaagtgagcaaccacccgtgaccgtggtcgcgtcaagccgccaactgctgaatttgtttcactagctttctgatctacacattttttttccatactttaaatattacaaggagtatacagacaaaccattgcgatgcgccgactacattaacatacctcgagcttaaccgatcgaaatataacagcctcatgtacatgtgcaacgggtcattttgcacctgaatacttctgctagctcacgtaactggagtccttggtcggaataaaattttggtggaccgtccccgcatacgcgttgaatttcaaaaagaatgcacctcaaaatttacaaaccctcgaccaagcaggtctcgaggccgagacacccagccaaaaaaaattacacgtacaccaatgcgtgcgcacttactggccttatcttgaccttaagctgcccgcttcacgcgaatcacgcatgattggctgtggcgaccacttcagatgcaagttcagcttcccgctcttcgctccctccaggttgaagctttccttgtactcttcctccagcaaaacttttgtcaaggtcaggatgcaccgccccatgtaatcctacggaaagcatatccgacggttaccttacatttgcagttggcaaactactcaactggtaagaatatgaaagctcccgttgaacttactctacggaaagtgtcatgatcatatacttccaacataagcatgtcatgtaagccatcttcaacgacaaaatcaaaagtttgattccatactgggttcaagctttcggtcacaacctgtggtcagtcacatcatagggacagttgaagactttgcccaagcaatttctgaccatagcattattatggttc

SEQ ID NO: 149507 - DNA, 342 bp, Zea Mays
ggagaatggcccttaatgggaaggaggtcaccaccatgaccctgtgtgcctgaaaatagtggcgcaacttcctggacgaaacaagtatagcatagataagcttgtgcgtctcaaggtacctggcctttgcctcatctattcgttgaagtggatatgggtccttaggacaggccttattgaggttggtgtagtcgatgcacattagccttgggaacgatgactggattggccagccatactgggtgatggacctcttcgatgaagccagcgcgcagcagcttccggacctcctcacggatgaaatcctgccactcaatggactgtctccgaggcttctgactc

SEQ ID NO: 149508 - DNA, 833 bp, Zea Mays
caagctgcaatgatcttgaagaggtcgtgcatgcagcagtgtgcactgggcgacattctccaggttctgcatatcgttgttgttcgaaagaaatggctcgtgcctcattcttcaggctggcagccgctgtccttaaaacgcaacagcggatcctgcaactactgatggtacaggaaaagttaaatcttcttttcctgtggccgtctaggattctgcaactactgatactactgaactactgatgagtggcagcaagaaaaaggtgaaatgattagtcataatattagtattaagttatcgagtaggtagtttgtgtgacagtgataggtcaatcaagggaggtatcaggtctgtgtatcaaaggacgtgaatggatttgcccccggtactaccggagcaacgcaggtcccagcatttttgctatctgcataggaagttctatattattttgagaagagcaagacagaaaagtaaagcttttttatgtgtctcctgagtggctctggcacagtggtgtctgaaattggattgaacttgggtctgtgcatctctagttgggctacagaatgtcatcctctgatattcattgttgatcacgacgatgcttcgactccgaggaccaaagtatcatccaccatgtttgttgcggctttaatctagctgcggatacggtttctacaatattttgtccctatagacagttgatgctactagctgataagtctgagatagtgtcatgtgagtatgtgactatcatacaaccgtttagcatcactttttttagagtgatgcgaaattctttgatgcactcaaactttcctccaatattcatt

SEQ ID NO: 149509 - DNA, 1955 bp, Zea Mays
gtacgaaaaacaccatgaccgtgaagcactgctggcactcaaagaggctctgataggcagctcgggactactaagctcatggaacagcagcagctccgacgtgtgccgttgggccggcgtgacatgcagccgccggcacgcgggcagggtggttgctctgagcctgcgccagagaaacctgggaggcagcatctcccctgccatcggcaacctcaccttcctcaggtcgctcgatctcttcgacaacatgctgtcaggggagataccgcgcactatgacacggctgcgtcgcctgagcttccttgagctggcgtacaactatcttgctggcgagatccctgaaggcttggccaactgctccaacctcgcgtacctgagcgtagaggtcaatcagcttcatggcgggatccctagcggtctgggcttgctgtctcggctacaagtcctgtatgtcggcgagaacagtctgacagggcatgtaccgccatcgctcggcaatctctcggcgctgcagaggctggcactgtatcagaacaagctggaaggagccatcccagagggcctttcccgtctgaggtatctccggtacatccaggcggcgaggaacagcctctccggcacgattccgcctcgcttcttcaacatatcctctctccagtacttcggtttcagctcaaacaggctgcatggtagactgccaccagacgcaggcaggcacctgccggacctccaagtgctccttcttggtggcatcgggaacaacttttctggaacactcccggcttccctctccaatgccactaaactacaagagcttggtcttgctcacaacagcttcgaaggaaaggtgccgcctgagatagggaagctctgcccagagagcgttcaattggggggtaacaagctgcaagctgaggacgatgcggactgggagttccttagacatttcaccaactgcacccgtctagcggttctagatgtcggtggcaacgcccttggaggagtgcttccacgcttcgtagctaacttctctgggccggtgaatactctgatcatggagaagaaccggatgtctggatcaatccctctgggtgtcggaagcctcgttcaccttgaagacctggaattcgggggaaacaacctgcgtggtgttatacctgaggatattggaaggcttcggaacctcaagtttttcacgctggaggagaatctcctgtcaggaggtatacctacctccttcggcaacctcacgcagctgctcagccttttcctgtcgaacaataggctcaatggctccatccctgagaaccttgggagcttgcgcaggttaacgtccatggcattgtccttcaacaggctcaccggtgcgatccccggagcattattcagcctcccgtcgctagctgattcattgctgctttctcataactacctttctggcgtacttcctccacaaatcggtagcctcaagcatgcgacaacattggatctgtcaacaaacaacttatctggagaagtaccaggagcgcttggagactgtgcaagtctagtatacttgtatctggatggcaatagcttcactgggagcatccctccatcgattggtaatctgaagggcttgagcacgctgaatttcacaaggaacggtctgtccggtagcatccctcaggagttgagccagattcatgggctgcaaaggctttgcctagctcacaacaacctgtctggagccattccacagctcctccagaactcgagcgctcttgtagagctggatctctcctacaaccatctgggcagcgaggtgcccacacacggggtgttcgctaacatgagtgggttttctgcaactggaaatgatgggctttgtggtggcgttgcagagctgaaattgcctccgtgtgaggtcaagccacacagccaccggaagcggttgcgactgaagatttttcttc

SEQ ID NO: 149510 - DNA, 410 bp, Zea Mays
acagttttatcatatttaccaaaacaatactgtagcagagtatattgagcagtttgacattttaatgcatcagttgctagcacatgaaggacagttaaccccagctatgatcactgctcggtttgtggatgggctaaaggatgaaattaagtcagttgtggtgattcaacgtccagttgatttggacactgcctgttctctagccatgttgcaagaggatgtgttgatgcacactggaaagagggaaaataggagggtggagataagtgggtattcaaggccactgggaaaacctaattcagtgggagtaaattcagtagcagtccctgtaagtcgtgggtttccaccatatggggaacatcgcaagacaacagctagtggacataaggcagaagagaataaacttgctg

SEQ ID NO: 149511 - DNA, 605 bp, Zea Mays
caaataataggttatatataggagacagggaatcaacaagtggttgattccataaccgtaggttatgcatgcatcacatttaaacaatactaagtaatcttcccctcttatagagacatggcacgcacaaaggttacccagcggatggcgaccagacctcaaggcgtacctcgagactagttggctcctcgacatgaggggagtagtagtggcagtaatgatcccctagggaatttggaggccagagttgaacgtctaatgatggaactgtgccatggaagcagggagcgtgcgcgtgatagtcgtctcattgctgagttgtcaggagaggttgactatttgtagtgggagattgtggagcgggatagggctattgactgggctataaattcacgatctatagcctaggattgtgaggcgaatgcccgagcccgggtggaagagctaagcgtagccctggaaaatctacaagcgtataacaacactctacacgaggaagtccacgtgttgtatgaccagttgcatccgaacgtgtcaccggaggttgcacctatgggagccagaacatcaggagtagctagcggaggaccttatggggagttgga

SEQ ID NO: 149512 - DNA, 278 bp, Zea Mays
tgatggaataagtcttgtaggcgttgtgaaggacatcacgtggtgaacaacagtttggacagcagctttgctgcagccttgactgtgctttagcatctaaggacagcatgggggactgcagtttggacagcagctttgctgcagcctcaactgtgctttagcatctaaggatagcatggaggactgcagtttggatagcagctttgctgcaaccttgactgtgctttagcatctaaggacaacatgtggaggactgcagtttggacagcagttaggac

SEQ ID NO: 149513 - DNA, 645 bp, Zea Mays
gcttacgatcgggtttggggtttggttcggggaaattagtttctctttctctctctccgtctccaggcttggattgagggtttccgcccgtgtgatgtgttgtcgaagcaaggaacgaactttgctttcacgaagcttagtttcgagctggattttacatttgtttctaggttgcggaggagactttcccatctgtgtatactttcacgaagcataatttcgagctggagatgaacttttacatttgtttctaggttgtggaggagactatcccgtatgtatagcacgtcggtaacctcatgggttgtggcagtgacacagtttgttacaaattaccctcgtcattatgtgcttttctaaaatccgagtaagaagcgtgacactctggcaaggctgactaacaggttgcactgagtgtggtacttcctgcttctgcccacacacacagcatgggttttgattgcaacttctgccttgaaattccgattgtactgtttctacatgcgaaattgcaaactgaccccctagatatgtttttaacactgactacaactgaatgagactgtggcattgacgcaaggctaattggatatagctggatgttcagagctattgagtttttaacctagagagtttgtagtgccg

SEQ ID NO: 149514 - DNA, 1000 bp, Zea Mays
cttcccatagaggtgacaatttgtgccgcccctcccccgttagaatttggtagaggacgagatctcccactgcgaaggatcgatgtcgtatggccttatcgtgatagcgcctcaaagtttgctgataccgtgttgattgaatcaccgtgttcagtcgttcttcttcgagtacatcaacatcctccagcctagtagccttagcttctgctatgttttcaaagatcaaccttggcgccccaaacttgagatcagcaggtagcactgcctccgaaccatagaccatgaagaaaggagtgtttccatgcaaggctcgactaggttgagttctcaggctccaaacgacgtacagcagctctctgatccactttcctgtgaacttttcattcttgtcgaaaactttctttctgagcgcctctaatatcatcccgttggctctttctacctgcccgttggctcttgggtgcgccaccgaggcatatttgatctgaatgctcttttgctcacagaaatcgaagaactctgagcttgtgaagttggatcctaagtcggttatgatgttatttggtaatccaaacctgaatattatatcttgtatgaattccactgccttagctgaagttagagaagcaatgggtttgaattctatccacttagtgaatttgtcgatagcaaccagtacatgagtgtatcctccttgagcttttttgaaaggtccaatcatatccaatccccagcatgcgaatggccaagttacgggtatggtttgtagttgctgtgccggtagatgctgctgttttgacaagtactggcaggcttcgcacctctggactaactcggctgcatcactttttgctgttggccagtagaaacccgacctgaagactttcccaaccagggtcctggatgctgcgtgcactccacattgcccagcatggacctcatccagaagttgctttccagtagctgagagaatacatttcatgaggactcctgatgcgcc

SEQ ID NO: 149515 - DNA, 366 bp, Zea Mays
ttgcaagaaaaagatccaacgacatatggctagactttgcagttcaattgttaatgtggcgaaagctcccaaatgaaaacaaaaaatcaacgacatatggctagtttaatctaggtgtgagtaattcttggcattcttaatctggcattcagtctttcgcacgatgctcccaaatggaaaaagctccaacaaacaccatacacagggaagtctaaatagtcggctagaactgctatttagctattaaaaaatccatcaatccagggtttacaaaggtgagggtaatcgtcatagtcgaacccaccagatgccgcaaaaaatagtgccagcgatgtccaggtaagcaagaatagtacctaagactac

SEQ ID NO: 149516 - DNA, 352 bp, Zea Mays
aaaagactccatccaagattgtggctcttgattcttttgaagatctggcttgactcttattactcctcaacgagtttgatctccttctcgagttttgatgtcttcatcccatgcacctactctcccactcacactgcatgcaagcatgcaactatgcaagttatgagtgctccatcatccactcatgctgcatgcaagcatgcaactagcctccgaagctagaccctgtggctcccttcgctcacgctgcatgtgttcttgtcgaggcaaatttttgcatgtgttcttaattaaaatgaaaatttgaagaagttaagtgtagctcagttggtcgacagtatgcatgtacgct

SEQ ID NO: 149517 - DNA, 411 bp, Zea Mays
gtctgaggcacgtgagctagagcaggagtagagaatagagctggaacagacactgtcactgaaggagtagacaatgctgggcacacaggtgacactgttgcctgaacactcctaactccgatggtctgagtagagaagtcaagagtaactagctggagaggagaaactacaagtcctaaagtctgactatgaatagctaggacgactgcaatctggagtagaggaggaggtgttgtttgaacaggttgaggtgcagagaagccgatgtgatgaaatatatgctggaagtagagtcggatctctgccctgtctgtaagcaactgttgctgaaacatgtcctgataggtctaaatgttctcaaatagtgcaagcatccggtcatcccatctttgttgagcctggcgatgctct

SEQ ID NO: 149518 - DNA, 799 bp, Zea Mays
aaaggaaccacaaatctgcaaccaccttactatatcactcaattagtatactgcattatacaggtgtctgtaggagttatgatctaattttgtgagattaaaagtgttcactttttaatgatgcacgtgatttttttctaatattttagtaaatcacaaaatgtctaatagttggcttggcattcatgcataccatgtgtgttcagtgttcttaaggcggaattttagtaccctacttttgtgggatttgtgattgagtttgggcatttgatactctgcaatgggtaggtaggagcaatggataaacttttattttctttgaacataaagagagccgcagaccatgtgcaattgccttcttctgcgctaagctgatattgctctgtatgatggagaaaagctaccatgtaggtgtttagctgctgctgcattaagtctagttttttcaatagttagcttgacattcatgcataccctgtgtattcagtgttctgaaggcagaatttcaataccctacttttctggaatttgtaattgagtttgggcatttggatattctgcaatgggtaggtaggagcaagggataaaactttattttctttggacataaagaaagccgcagaccgtgtgcaattgccttcttctgcgctaagctgatacctgatagtgccctatatgatggagaaaagctattgcataggtgtttagctgctgctgcattaagtccagattttaaggatcctaatctctaatcattccgacagaaggaatcgcaagtcctcaaacatcttactatgcc

SEQ ID NO: 149519 - DNA, 567 bp, Zea Mays
aaagcatgacgacaccgatagatgctatccactaattgtaaaaaaatattaaacttacttctcgctttgccattacaccaccctttagtcacatgaccatcgggagcatccttcacacgattatacgacagcaacctaaacgttggtttacacaacacatacatctttcttcgtcgcgagtataaccatgtcacggcatatacccgcacacctcaatcaaatatcttacgccaccaccactacaatacaccacggcacacacatgcgtaccaatttctcctctatgaacctttaatctacgccgaaacatactcgcgcacatacctacttacaaacctaagcacaacaatgaaactaacgaccatcacatgacgcacttcctaaatatacgagtcatcgcagctattagatatttttatccaatccattcatcacgacaaacaaccatagtaagaattttagcttaccatatgaactatctaatttggggctggcatttttatgaggcataggtgatgataatttatgactaatgtataaatttcacatgctcaggttttatatttt

SEQ ID NO: 149520 - DNA, 435 bp, Zea Mays
tcatcttcttgtagaaggataggcttgttgttaacagcagtgaggttctcttcaccaagagtgttcttccgttcagtagaagccagtgaagaacttccaacctcagttgatgcttcagcaaaattgagatgagcctcaaaactaggcttgtcagacttttccttctttagggattgttgatataaaagaacaaggtgcttagggcaagtgcagtccctagcaaaatggcccttagtaccacatttgtggcaaattttgttgcccttaggtggtagaggcttgcctttgccctttcctttccctttcttatggaatttgcgcttattgaatttgcgaggtccacggggattcttgaattttttgaatccctttttattctcaggtttatgaacattggaatgcacctcaggcagtggggcagaccctggagggcgc

SEQ ID NO: 149521 - DNA, 600 bp, Zea Mays
tcgcgacgttctccagcagacttcaccacagcggccaggtttctatatcagctcatgagacggacgcttctgccacggatgggttacagggaggctgccactcatattcagctttggctccttggtgcccttatttctcactcagagtttgatgttgtggattttctcatttgtgagatcgaggacaccgtactggatggtctacgtgctcgtcgacagctgccttatgctcactatctgtatcacatctttgctcaggtgattcggcccacacagttccagggtactcttgaggcctctcgcctcatctttgggtcataacgtccagctccagaggatcctgtgccggcacctgctctagtgattgatactcaggccgaggataccaccttccatcagtttgagactccgggcgcaacagtccatgatgatgatgatgatgatgactttggggttccaccttcgcctccgcctcctatgcctccacacactcatgatcatgagactgggagttccagtgatgctgcccctgctgccattgaccctgctcttgctgcgatcctctagactcttactcagtaggctcacttggcagtcgag

SEQ ID NO: 149522 - DNA, 473 bp, Zea Mays
ggcattgataagtgctaccgttaggagatcagcacatatgctaggagtataggtccagacttggcatcctttgtttttggaggcgagacttattgaactcagttctcttcatttcacgcttttgggcccttttctttcgaggttggttttgcattcaaccagaaagaaccctagtgcttgcaaatacgtttatgtctgagattttggcgaggggatcgcgattcaccactacactggactcaaaatcgtcatccatccatgacccggaacatctgaaaggggtgacgtctatccacttctctctccagggaaaacaaaaggaaaaatatctctacattatcttgcattttcgagcctctgacagagcttcttccccttatcccagccacaaccagcatatgctcaggttggcatataaggtggcatcaagcgggcctttctgtctgtgcttcctgccattaaccatcagagag

SEQ ID NO: 149523 - DNA, 586 bp, Zea Mays
tggccatcaagactaatgacagagtgggtccctattttaccacccataaaggggttagacagggtgaccccttctcccctttgctatttaatattgctgctgatggtcttgcttgtatggttcacagagccaaagatgaaggtattatcagtgggctcattccacatataattcctaatggctgttgttgtttgcagtatgctgatgataccatttttttgctcaaagatgatctggagggtgccagaaatcttaagttcattctatgtttatttgaacagatgtctggtctcaaaatcaattttcataaaagtgaaattttctgtttaggtgaagctgttgataaggaattctggtatgctgacatctttacttgcccttctaattgtcttccaatgaaatatttgggagttccgattgatgataagaaactttgcaagtctttgtggttacccacagtggagaaagttgagaaaaaattgggggcttggcaaggaaaattccttagtttgggtggtcggttagtcttgattaatagcagcctcaccaatgtccccctatacatgctttcgatgtataaagctcc

SEQ ID NO: 149524 - DNA, 654 bp, Zea Mays
agccgagatcccgtcgtagccctcggatcccgatctaacgccccaggcgagataccccgaatcggtatacttagtctaatcaacaccgtcggtgcaagatccaacggtcatattcctttacaacccggatctaatccgagtcgttacctacgagatcgacagctatcgtatcgtcttcatctcggtagctcccaacgacggagcacgagctgcctgctctccattaccgagctggccacacgatgccccaggcgaaccgaattccaacctaacggaagctacacgatgcaggggcaagggtgaacgcgcgaagaaggatctcaccatagatggcgcccagcagagctccgtcgacgagggggcacggccacgacgaaaattcaacctccggcgagcgattccccatggaccgagatgcctccacgcaaattgatgccactggcgcatgcgatacatcatggcgaacacccggttacattctcccgtacccaaacgacgacgaacacagaaatcagtggcggtggcactctcttctcaagttatggtgttttctcgatggcggtacaaaaggggatggtcaagggagcgagcgcttcgcttataaaatcggagttcatgacgtgagtggacggcgcgagattagcggcaattgga

SEQ ID NO: 149525 - DNA, 1077 bp, Zea Mays
caaccaccctcccttccaagtcaccttcattggacaccacttcctagatacttgccaaaatgttgcccgaaaagccctccgacagctatgccaaaactacagcaaggaagtctttgagacccccttcgatactttccacctagcaacaaaatacccctacctggaggaaaagacttcaggccctgttaggaagagatcctattgaagatgaccccaccatagtctacatgaccggatacctccacacactcgataaccactatgacgaccttttctcccactgcacccacctaaactcccgggtggaaagcttagagcaacaggtcaaggaacttaaaagagagaaggcgtctctccaagaaagtctcgaaatagaagaaggggaagaggccaacacccgtgaagcctaccgaaccctgaagatggattacgataagaagctaaagaagctcgcccccacgaagaaaatccgaaagaggaccaagagccaaggatgccagacttaacggaagaaggaagcccctccagcactacctccctccaggatagagaacttgtccgatgtagagaatttgtccctagctagccttgacgaccttctcaaggaatttggggacactttagaaagagagttcggaagcaccttagaaagcactcgcgtgtagtgtgacttgtggcaactgtatgcttgtaatgaacttatgtgatgaataaaataacatggttgaaaaaaaattggcatatgcatagtagtaattctctccccctggcagatggctttggataaaactacgcctaccgcctccgggattggagccaggtttcccctaggagctgaaggagaagccggtggagaagggagtgagacccacctccccgcacctccagagctaccattagatttagcccaagttttggccaaccaaacccgactcattgaagtcctcactagaagtctggagaatcagcgcctgaatggtggaagacctcaggacaggatgggagattttctaaggctcaagcctcccacattcgctaagtccagcaatccactcgatgatgatgactggctgcgca

SEQ ID NO: 149526 - DNA, 1101 bp, Zea Mays
gtcgcatgcaagatgcaactctcctgccagaatgcgagacgccgagcctggcaccaacgagtcaatgagaaggccctccacctttcgataccgcaatggctcgctgttgtagcacgcgttgacgcgctcctcgtcgtgggagagcggggccacgagctccactgggtcatgctcgacccgagctggcgtcggagaggatgttcctggggagggtaccatcagtgctggagtacgtggtgacggagagctcgctggagccagagtcgtggctggattgagttgtggtgaagagctcgttgtagccgaaataggagagcgtggcgctggcgtcgttggagacttgggggctggggtagacttgctcggagaagagttgcctactcccccagctccctcaaagtggacgtactcgatggtgaagtcgtcgtacgtcggagtcgtgccgtcgtccaccgccttgtcccatgcccatcctcgcccttcgtcgaacactacatcacgcgccgtgcgtacacgctatgtttcttggtcaaggatgtggtaggccttcgagccctccgcgtagccaatgaacacccctggggtgctcctgtcgtcgagcttgctgatgtggccaagctccttggtgaacacgaggcagccgaagacccgtaggtgaaaaaccaccggcttgtgcccatgccaagcctcgtacggtgtcatcctattgagtgccttggtgggcgagcggttgaggatgtagaccgctgtcaccaccgcctctccccagaagacagccggcattcccctctatttgaggagagcccgagtcatccccacaaccgtctggttgcgacgctcgacaacgtcgttctgctgcgggttgtacggtgcggagtagtggcactgaacgccctcatcctcgcagtacgatgcaaactcagccgctgtgaattcgtcaccgttgtcggtgtgcagcacgcacagcttgcggtcgcactccgcctccgcagcgacctgcacacgcctgatggcgttcgcaacatctctcttgctaccaaggatcatcacccacatgtagcgggagagatcatcgatgagcaacaagaagtagtgtcgtcc

SEQ ID NO: 149527 - DNA, 681 bp, Zea Mays
gcatgatgcaagcaacatgactagccttgttaagaaggctgcaagtgcaggagcaatagaaccccatgcaacctataagaaacttaagatagtcgactaaatcgtttcagtagttataataatgtaatccatgaaagaaagcgaaaaattactaaaaatctttaaaatacaaaaatgtgtaactgctgccacagacccataacaagtaatggtcttaatttcagttttgattaagtaactacaacttacatgtacaaacaaaataaatatatgcaatactctagccaacagagttaatcttgcctgctctatacaacatgacaattactaataaattatctgagataagagaagccttatcctagaaataaggatggcatgcagcaggactagaattctgatgcatgccagggacacaaaaagtgtcacataatggctaccaagaagaggcaaggcatcatttcactatgatcttaacagcaacgctgtcatgaagcccaaggcaagtaataatctgctatccaaaaaaagtagcatacaaggattgaatgacaatgaccctttctcttcctgaaaggaacatactattttaagaagacatttgaaaatagataaaatatgcaatctgattttggagaaaatatgcattatatatcaggattaacataagagagggcccgc

SEQ ID NO: 149528 - DNA, 284 bp, Zea Mays
gaggattattattttagaatgcatggactattttgcgacggagtatacatggtgaatgggtgctgctagtttggatgaaaacttcattttcgtaggcatttctaacccagcggacatgcttgttttgttgggtgtgctattctaatgtcttgatcagattcagatccgttcctgtgaagtgttggttcccaaagagatgtctgttcaaaacactagctaaaagcccagactagtaaagcgcgtgatttgatcacggaaataaaaacatatgcatgaaaaagttt

SEQ ID NO: 149529 - DNA, 310 bp, Zea Mays
gagtggcaacgactgccacaaaacccacctcgtggtcattgctttggaatccccttccctttccctttagccaaagacgctctgctcagcataaagagaagggcgggcggcatcttctcctcccttccctttgccctaccttttgctatactacaagagcttcaaattctccgccttcattcatgcatgctttctgttggcaaacaacaaacatactagcactgctttgacttaaaaggttccgagacagcctgatggtcaagagagagatagtttacgtacctgcaagtgtgctcaggcaggctggccc

SEQ ID NO: 149530 - DNA, 730 bp, Zea Mays
tgtttttgtattaaaaacgaaattctaatattatttctctatttttaatctaccctggactgggcctcaatttctgggaaagacaggggctagcgggtaaattatcctaggctcagtcgacagtgccactagactgcgggttcatttctgtaaagctcagggttccttttgcaaagtcgtcggccgaagagggtgtagttaacgctcggccacccgatccacaacggacggcccagattagaagtagcatacgccgaacaggtatgtaatccgagccgcaggatcttgttccaaccgcccagatcagatctgtactaacacgcaccggtacgcaatcacggcggttggatccaggatcaacggtcccgattttatgatacgcggccgctctgaatcgtccgatcaaacaccaaatcctacggtgcacaccaatgctccctccccccaacagagctgagccagggcgcgacaacgcccatggcggagtcctcaccgacgctccgccgaattctcccaccccggtgaccgagttcgagcaataacgtgcggaaaacgaaattgatagctaggcaaacatggagggggtgtctcaccgagaatgattacgatggaaggctggccacggtgcggtgtggatccgcgacggtggtgaagctccggtgaagaattcgccggtttaggatgctcccaacccgatgccggtgcacgcacacctttcctgggtcctggc

SEQ ID NO: 149531 - DNA, 821 bp, Zea Mays
ctaacaatctcaaatttctttccttcgtctttcttcttcggcattcccctcccacctaataaaattttgtacgtcgagtattcttgaactaggtcccgagtactgatatgctcggcccataaccctaaattctactttggctagttggcatggggagccaagttgcatgttgcataatggccttgtcatgccgaagttcggtttcaagggactcatcaccatactcataagcttctcccttctcttctcatcagctttcacataaaaccattcacttgtctagccagtgggccacttggtgcggtatccttttggtatgcaaaattgtagcatccaaagttcttttgcagaccgtctgctctcgccttggtctagtaatggagttctggactctacagaatccttcaacattagcactccttccttggcttcagagagcccatatgtacacactaagcttgactatagcatttggagtcagttgatgaagatagatttcaaatttcttcaaaacttcacccatcatttcatacagagggaactgaagccctgctctgaagaagctcttaaaaacaacaacttcatcatatcttggctttggaaccacttcgtctctggcgaaccttatcaactcatcatcatttttccaaaatatccaagcttcttcattaaaactaaatcttctaccttcatagtggatttcccaaattcaatttggctaggcttgctcggactctatgccatcatcctcttcatcatcactagcaacttccgcattagtatgttcagcttcggcaataacgtcatccttctcgggaata

SEQ ID NO: 149532 - DNA, 391 bp, Zea Mays
gtacggcgtggaagggaaacagacgatgacgagtgtgggtacggtggttcgccggtgctgggtcgctgtcaaatgcagtcccgtttcgacaacccgtccaggcccgtaagaggtaaacagaatgagtcaaacgggcgcctcccgacgcacgcaacaaaccgaaaccattagcggcagtagcatttgctctcgcaccaaacatccaacgagcacaggcctactactacggccaccctaccgggtcaatggctcagatcggctccgcatagccggcagtgcgtgggtggggccaccgctaaactgttcaaaacgctggcccacgggacaacgtacggacaccacgcacgcgatgacactccgagcccaccgacctcgcgggcccagcgtgcag

SEQ ID NO: 149533 - DNA, 418 bp, Zea Mays
ataagcttccacacgcttgccccagtgatcggctaagcatgtttgaatagctctctgataagtcgctcctgcgtttttgaggccgaacggcatggaggtatagcagaaggcaccgaatggagtgatgaacgctgttttttcctcatcttctttcgccaggctaatctggtgatacccagagtagcagtccaagaaagacagcacagaacatccagcggtggaatctaccacctgatctatcctagggagcccgaagggatcctttggacagtgtttgttgagatccgtatagtcgacgcacatgcgccaatccactttattctttttgagtacaagaacaggattggctaaccactcaggatgtaacacctctctaataaatccagctgcgaccaagcgagccagctcagcgcgaatg

SEQ ID NO: 149534 - DNA, 636 bp, Zea Mays
cagaccacgaggcttattccaacagatggtgcaaccaaacaaagtggaaacacaagggaagaagtggagaagagtcacaaaagtgtcagactttgaacgcaagggaaaagtccatgaataatgagagtaatcatcaagaatcaataaataatatttatattccgaaatagtggtaacaagagaggtccacaaattgcagtgtatgtgatcaaaattgtggacaacctgagaggagctagagaaaggaagttgggtagaggatgacaggaactaaagagcgaatgttctagacaaccaccgcctgggcatggagattgctgatgacgacggtatcgtactcagaaggaggggcgatcatatgaggcgttgggagggcctaatgcaaggggagtcaagcatgtgacgctcagcctcgccaagctatcgggtgagggtatcagtagcagtgcaatcctgttcctaggtctttcatgcttccgagcagtagctacgatggccttggccatctggaggggtgcaacaagagtggactgggccacaacgtcagatggggggcagctgacggagcaacgaagtaggtaggagggagcttgggagcagtagtgtcggaaccatcggccagggcatgcaacacag

SEQ ID NO: 149535 - DNA, 1846 bp, Zea Mays
ggatgtcctgcgtttacacgtcccctcaaaacagtaaagccaagcgtattattcgtaccattaacaatgtcattctctcgttactgatccaggcatccctttgtggacggtacttggttgaggggctccacacttccacttacctactgaacttctccccacaaagatgatcgatgttggttgtcctcgtgtcgctttgtctggttctgcaccttcgcatgaccacctgagttttgggttgcgcatgttaccctaacactgcctctactgcttcgcacaagctcgctccttgatccacctagtgtctttctcggctactccgacgatcacaaaggctatcattgtcttgatctatcttctaaccacatgctcatctcttcatctcttgccatgtggtttttgatgaggacagcttcccgctcgctgccatgccctcatcccatctaaataactttgattttctctgtgagtctggttcctcggtttccaccttacggtccctctagcatttctgccctatgcggcagcgccaacttcgttatgctatgcgcaactcccctgctagttggatcgtgagtgacaccgacacccctgacgcgtcgtaagtagcacctgtgcctcttgccacgctacacgcggcttcggtgccccgagtgtggccatcttcgctgattgcctacactcgtcgctcgcacttgcccataactctggcacccctggctcctgcaccagtgacaccacgtatgacatcctagttcgcatacatcttcacgaagggcctccccttatcggtgttcaatgagttcacgtccagtgtcaatatttgcagtggctacagtttcgactgcgagaggtataacatatttggtagtctagatattgtgtctagtagacatgccatatatatgataaagtatatttggtagcttagatagtgttttatagactgtcgtatgtatttgtgggttaccttatctcctacgccatgtactctatataaaccatctaagggctcaatgcgagacattatcttttgctacaacatatacttttggcttacagcatatgttgctaatatgaagtatacaattcttctatatttttttaaaaaaatagtatgtacttttatggtcgaaaagtgaaaaaacatagtatgtcggggttctccacacgtagattataacttagggctagtttaaaaaatagtatgtatattatacggatagtacccgtatgactgtattcgtcccgccaacaaaaatacccgtatcggtgtccaaaatttcgggttatttcactacccgtatccggtacccgaccttggtacccaccccgttttcacccctatttggctctgttgtgacaggtgtattggctctattgtaataagggcttgtttggtgtggttcctccacgctcgctccatagcgtacatgaaaatggcactggctctgttctttccttttgctgtccagaagcactccacacgagggcgtttggtgcagcagagccgcagagctggtggtgaagccggtgcaggagccgcaccaaatgggccttaagtccttattgtggcatgtgtttggtcaatctgatggcatgggcgcatcgcctcagtttcttgtatgtgtatccctgatgctgtgaacagatgctacggaagagcaaaattcttatgtcatttgcatgttcatgtatatccgttgaccataaaagcaaatagccatgtcgccataaactgatatttacagtcatgatctgtcaattgatgagaacttaaaattaactcaaaatccttttgacgctagctatttatatgtttgtggatattttcggagaatgtctg

SEQ ID NO: 149536 - DNA, 474 bp, Zea Mays
cgggttgatactagtatagtagggggtctcttttgcaaaatcgccaagccgaaagggtatggagcaatcctgaccgcccgatcgccaatcgaccgcccggattagatgcatccacggctgaatcggtacgtaacgctgcccatcggattcgagatcgacggcggatatctaatgttgcacgatctattctaggccgcgagatctcgatcagacgattctcgactccccacagccatccggtaagcggatctaatccaggccctgcattccagatcggacggcgcccactccatcatcaacccagaggccgggcgacggcggtggccgtgcccccacggcggcgccattgacgcggaccgcgatcctcccagcccgcacgccaagccctgacccaaaccgaactacgcagagagaaggtgaacccgaactcgcagagagacactcaccgacgaacggcggcccggagattcccga

SEQ ID NO: 149537 - DNA, 847 bp, Zea Mays
agacctttgctgttatcattggtatccatgataacaatgccccccgacacaagtcaagcaaaacacaagccgtttttacctaataagtcaaaaaaagaaagcatgaataactttctgtgggatagttcttttttaagcatggtgaatagcaaacaggtggcaacaatataaataatttcctgaaaagtgaagagaaaaagattgcagcagagatatacgaacatgtgatggaaggtaggatgaaagataaccagcacaagctctgagaagaggatgaaaaactgatgacgatactgacattgtaacaatctgcagccatagtaatcttcaggaatggtataacaaatcatatcaatcaaacccattgaggtacctgggagagagcattctgaatgtttggatggttccattggctaaaagaatcatcaatatgttcaataggaccagaactgattggaggacgaagtgctacagacacacaagagcaactactcagcaaatgcatgcttgtttcaaaaacgaggttcacttcattatcataatcatctttgtggatcggcaactaagacaccacgagaacatatcagaccaaaataaatcagctgcgacattttctttagccaaactaaaggagtaaccattagccacaaaagacacaagagtcatgacaattagttagccacataggcctgccatcagttagtacaagatactccaaccagtaaaatatgctatgaatctatgcagagcaattatttttgtttttctcaaatgatgctggagagctgcatgtcacttcattaaggataagatacaattatacaaacaagcgagactagagccaaac

SEQ ID NO: 149538 - DNA, 538 bp, Zea Mays
ccatgtctttctcggcaaatggggtctgcgacaggaggcactaaaacacatgcaaagcttaaagttgccaacaaaattatggcctgtttgctggttagaacaaaaatgatcttatgtttgcaagaatattgcttgcaaaaaaagattgaaagcagtgagtagatgcaatgctgccaaagagaacagatggacatggttttcaattatgtactagtaggaattctattgggagctagttgttgagttcctcatggcccagtcagaccttgtctgttaaaacgctctgaagaaaatctggcaagcttatgtatctaaaatgaaggtctccatttcacggcccatgttaggctacttacaaccttcctataggctataggctttcagatttatcagctctgtgcatcacgtctgctctcaagatagtaagctatcaccagaaatgaaccgaagaacccctcacgataccagaaatgaaccctaagagcatgttcgtttcaacctcaatccatatggattgaaggtgattgagtgggtttga

SEQ ID NO: 149539 - DNA, 897 bp, Zea Mays
cttctaaaggacatgagctttcagctagagacatagcatgtcacccaaagttttttctaccgtactcgagactttttgtgatagaaagaaaaaaaaaaagagacgcagcagatcaatcagtttgacgaagacatggccttgcgattggtctggggctcagcagaggcgagaatgaagaacgggtctcagctagtcagctgccaagtacgctgtgccttcccggcacctgaaagaagcaagcacattttcgactccgtttggtggtctatctttctgtttccacagtcagggtggttgggtggctggccggctgggtgttgctggagtgctgctgctctctgtctcttttcgttctgggcccttttcgctgcttaggtaggttccccgtgtcacgccatccaactcgcaaggagatagatagacagcgatcgtgcttcgttcatatcctcggaagacagcggtcatgcttcgttcatatgagcaaggaggaggaggcgtccaatcttggatcggaccacgcagttcagttcctcacaagcaacgaaaaccaaactaattgtgcaagaatgatgtaatcctcctccggggaagaaggcgtcttatgcgtgcgttctaattttttttggttaaggattagaggatgagggagttaataagtggcaggcagatggcgccaaattgtttgaaaccttgtagctgattagtcgcaatttttatgcgtggcgtacgggtaaacaatcataatctgacgagcacaaacaaaatcttggtgtggcgggggatgggtcatcatggtggtgggaggggtgtggggactaggaccggcggtggcggaaatagggatgacaatttgactcgtggatttgaatatccgtcggatatccgacccgatggagc

SEQ ID NO: 149540 - DNA, 793 bp, Zea Mays
cttcctgattccttttgagctgaagtcgcctcctttgatgcataccttcacaacagttatatgtagtcgaagctccatggcttcaccttcctgaatcataagcctcttttgatgaaggatggcttcgttgctcctttacatagtgtctgaaacacaccttttagtttggtagtaagggggtttgaggaccttcgacgatagaggtctccaacaacttatgtatgttgtatagaggcattataagttagatcatgataatggtagttgtttgagcatattgtgcccttattaatgttgaatagttttggattttaaaagatgagcgtgaaggttaaagattgactagttctaagtgttaatagtgttgaagggcatttagattagtttttgttttgacagaggggataaccccctatttcattacgaaatagaaagagacatatgttcttacaataacacataagcattcagaaatgaaaagctgacaaagcacagaactatcagcaactaaggaccataccctgaccgcaccagactactaatagcacacatatagaatcacaaagctggccaaaatcaaagttcacacagatcaaaacagatcatcgagcaacattctatcccagagtttttcctgtagcttagcgctaccgggaagaggaagtagaacggccgcagagttgttgaaccaaaatagccaaataacaaaacaaatttctttcatcggattcgtctgtcaactggcctccaaccacgagccttgctgtagatctcacacgccatcttttttatt

SEQ ID NO: 149541 - DNA, 322 bp, Zea Mays
ttcaaccaattctggtccagataccctgtaggcttttttagaaatgggggcggttccaggaagaagttctatggcaaactcaactttccgctcaggtggcatacctggtaaatctttcgcgaacacgtccgaaaactctgatacaaccttgatagtctggagtgaatatgcctccttgctatcaatagccatctgatgacaacctcctttccttggctcaggtgagactaactcaactaccacttcttctccttgtggggacaccaacttaattgtcctcttatcacaactgataattgtttggtacttatctagccaattc

SEQ ID NO: 149542 - DNA, 423 bp, Zea Mays
cggaaagggtgcttgcaatatcgaggcgacgtggaggcagcagtgaccttacaagctcacgtggtcatcaccagctaaacgtggtcatcaccttcctgtctcggccccctttctccaaaagatcacatgtaccatattatattctacgactcgtcatattgcttgattgcgatagatgtccaatagcttagagttactattaccagataagatgctaccctaattaggaatgctgtcggcctcacttgtagaacatctctgctgtgttattgtgtcttgtccgatcctctctaatcttagtgggtccatgtatcggcttggatctgtttgggatgctttgctcgggatctctccttgcaaacggcggtgctttctccttatggaaatttaagtccatcaataatatacttaactagtaatata

SEQ ID NO: 149543 - DNA, 372 bp, Zea Mays
ggctgttgctgtaggttgcagcggtcgctggtctctgatccggttgactgttatttggctgctgcagtctacgactctacgtgaagagagcatgagcatgaatctggggcgatgtccaatggtagtaggtttgatatataccatctcatcttgagatgttccagatctagctagtagtacaggggggcgaggagaggaccatggcatgccctttggatcatgcaagcgtcaagtgtgtggttgcaccttccggtaatccggtagacaccggtggttgcgaaataatcctagctgtggtgccatgccagttcaaacccaacagcgccaacgcccctcgccatccatcttcgatctacgcacctaacaagggat

SEQ ID NO: 149544 - DNA, 525 bp, Zea Mays
aacgctttataggcgtgtggaatctaagttagaaatgtgagttagatgaagaatgtgttggcagacgtacatacatagcttgagtggattaataatataaaatatagattgagtattttatccggctagcttataggttctaacgatgttgttgtgccaatttaattttatttgaggaaattaatgctttgctagtagtcattatatgctatgtctagtggtgggatagcggtcgtaaatagatgttgatggctatttgaatatgtagtatttggcggcactctgcctacttaatcaaggaatgtgctgtcctatttagttggtgtgcgatgtgtagtagtatgagaaaatagtttagaaaattagttgaattatcttgttcttcttctaagttttaatgtcctaggaagatgaacctaggtgtggtgatctccccgtgatgtaccttagcttagtagagtttagagcgtgcatattgtttagcattttcttgatgttttattcggttagtatgttatgcgggtt

SEQ ID NO: 149545 - DNA, 403 bp, Zea Mays
cattgctagctttatttacaatagaaatgcatatggtatatattatgcccgtttacttatgttgcttgggttgggtagttctggttgacttagtgctacttcggtattcccatttaccgccaagaaatcctaaaatatgtatggtgcaatcgttaaatctgtgcatgattgtttatgagtgtatcattgttgggaaaaatgggcagaatttacaacaattgaaccctccaaaagttttctactgctctgtgctgagcaggttccctttgggacaagatatcaggatattattttgtttgatttattgcataaaggactacgatatatatcactcagctgcatgtatgttggagtcagttccttggagctccttgcaattgaaaattgaatcattgcccttgaa

SEQ ID NO: 149546 - DNA, 558 bp, Zea Mays
tgtggagcaaaaaggttccagtacgagtctcctggtttctgttgcaaacagggaaaggtcaaacttgtgatgccacagccacccgaagagcttcacttgttgtacacaactagggacgctgattcacaacattttttggataacactaggttttttaatggtcacttttcattcaccacattcaactgcgagtatgaccaaaatcttgcaagttcaagagatggtgtttatacattcaaagcacatggtcaggtatatcaccagatacactcttttggtcatcaagaaattggtccaaaacacctggagttgtacttctacgatgatggtcctcttttatcacattgaatgcgtcttgcgcgtgatgaagtcttcaaagctaaagatcagaatgtgatgaccaaattagcaaacttgctaagggaaaatccttatgcagagacattcagaagtattggccaatatggaaatattgatgaataccgtattgaccttaacacagactacaagcttgaccaaagaatgtttaatacacctacctcatcggaagtggcggct

SEQ ID NO: 149547 - DNA, 866 bp, Zea Mays
gccgggccgggtggggcggacgccgttcgcggttcgcctagcaatagcaagctgctagctaatccccattccagacgggcggacattcactcggtttatttcagcgaaccaacggagtgatcagattttttttaccccgtggtctgctgctgctgctgccaatatgatgggtaggtagtacatactcgatggactgtagtatgtgttattcattttgctttcgctttcacgtgcgtgtatgtgatctgtagtaaatggttgtttttatctctccgtatctaccgttctttggtattttccttttttctccatttctctcacctttctcttggtcacattcatgggctgacatccgttcaattttctcgcttttccatttattgatttttttaatcttttttccctatcagattttattttctcgcgttctttgtcctcctcctgttttttctctctctatctttttatttatctctctctctctcttttgtattaaacgttgagaaatccgatcaaaataaattacatacataagaattaagaatacgtcgagaaatctgatgagtgcgatatgatgttcggcggtggacgtggaccgggctggatggatggatcaacaaatgttgatggatgggccacaccccacttccatgtttcatggccgattcaagtcgtctagctagctagtgcatgtcgtcctggctttttttctctgctttgttctggatcggatgggaaagctaaaactagcgcatccgtgtccgtgtccgtgtccgtgccactagtaaaagcagcgatgtgcatctccggctgcggcggggcagccggtcaaagtcttcccccgtcggagacgggcttaccgcacg

SEQ ID NO: 149548 - DNA, 377 bp, Zea Mays
tttttatacgctctaaatatttatgatatgtgttgagcttttggagtcacgtcgagcgattaattgagcttttggagtcacgtcgagcgattaaattgtataatgggtactcagacacgccgatcaggctgtattggtaatcggctgagttatgacattagctgaatattgactgtgccctggcaacacgacgcaatatttgtgtcgttcgaacttggctgcgtcatgtgattgctatgtcgcgctctccattaatcggatcgctcccgttgagttagaccgtcatcgctgagtcgcgtatttttcgcatgccctatatgcattgtctgtctgccgcgagccacaattgcgcctattgcgcacgttgcgtggacttg

SEQ ID NO: 149549 - DNA, 363 bp, Zea Mays
gtctaccttatgctaagttctcttataataatagctatcaggccagtttgaagatgtcaccatttgaggctctatatggcagaaaatgcaggacccctctatattgggatcagactggagaaagacagttctttgggcctgaactgattcaagaggcggaagaacaagtccgtataattcgagagaatttgagaattgcacaatcaagacagaagagttatgctgatacccggagaagattactggagtttaaggagggtgatcacgtgtatttgaaggtgtcaccgatccagggtatgaggagatttaaagttaaaggaaagttgtcccctcgcttcattggacctttcttgatcttaaagc

SEQ ID NO: 149550 - DNA, 688 bp, Zea Mays
ccagtgactgggggctgtggtgaatgaactggggcagtgaggggtgggctgtgcgcgtaacagcgaggcgaagcagggagtgtcctcaatttaaagggatggatttcttgcttcgcgaatttgggacggaagtgcacacggtggtgacagaaaagatcttcgctggagcatgttcaccgtggcgcgtagtggagcaatggcttaaggtagtaactggcttcacgccacgactccacgctacgtggtaacaccctcagttacgtggcgtggccgcgaggaacatcaaactccggtgatggcgtcccggccgaccacgggagcaactggctgaagcggatgagctcgcgccagagaccacatccatccccctcccccgatattttcaccgtggacagctatccactcttatccaggcgcatatcttaacaccagcgtgaatcacggtgaggagattaccggcgtagagatcaccgacgtccagggtccctgaatcgggatgttatgcaggttactgttcattctgaatcccatccaaaaaccgcctgacagagcaagtttagcgtcctttttctccagatttcaggtgacaacaggtcccagtctctgtaccaaagatgtagtgctacatatcagctacaattcaactataggacttgatcacatttgagcactggatccaagtcaaaat

SEQ ID NO: 149551 - DNA, 319 bp, Zea Mays
ttcaacacatgtgtgtggccccactacttttgttatcttccactttgcggtgatcttttgtatcctagcacaaaccctccatgcacagttgtccttgtcgcatacaaccgtgtaacgacgtttctcgtacgaatgaagtactctatacggcctcttacgtaagactgtgtaatgctgcaaccacctcttcaaggcagttaggtccttgaagaccctacccttttcaatcatcgtgctaggaccggcctcaggagcatctagcagctcatcatcccttccttctgcatttgcctgatgagaaagactaagatcgctgaac

SEQ ID NO: 149552 - DNA, 677 bp, Zea Mays
tcgaacaatagtcatatgcgcaacaggtgcaaaagtctcatcataatcaagtccttgagtctgttgaaaaccacgagccactagacgagctttatacctcacaatggaaccatctgattttgtcttaaccttgaagacccatttacatgtgataggaacaacatgcgagggtaaaggaacgatatcccatgtaccagtgcgttcaagagcagccaattcatcaatcatagctagctgccactcgagaatcccagaagcttcctgatatgtagtgggttcaacaattgccacaccagcctgtggaaaaccatagcgatctggaggttcaatggtaccacggtcacgaagacgatatccctgattaaaaacatcattagactcattattgtcagtacaagaatcaggtacatgatcagtatcaggaccaaccgtagaaatagagcgggaacgacgaatttaggtttggatgacaggtggtttggaagagtaagaagaagatgacgtggaggtggaaggtggtgttatgagaatgagaacatcaaatgtggatgtagaagatgatggtgcagatgcaagaatggaaggaagacacatgaaagaagtagattctgtgggataatatgaggagtgagtagactggttgtgaaagaagggccgattttcattgaaactcacct

SEQ ID NO: 149553 - DNA, 1603 bp, Zea Mays
catgccctcctaaaattttgggacgctggtatatatcgcgacgtgatggtagattggaacgagcctaggctgtcgtcgctctctctctctatataattacagtgtgccagtatgttgagttctacgtggtgcccatgtccaatcctcttcccatgctcacccttaccatcatatgcgccactttgtggctaactagtggtgctggtggcactggcaccgacaccggcggcgacaacagcagcggcggcggctgcatcccatctgagagggctgctttgctgtccttcaagaagggcatcacgagcgacaacaccagtcgcctgggctcatggcacggccaagattgctgccggtggagaggtgtcacctgcagcaacctcaccggcaacgtcctcatgctccatcttgcctacccgatgaatccagatgatgacttgtactacacagatgtatgcgacgattacacaactttgtttggtgagataagtcgctctctactctttctgagacatctagagcacatggacctaagctggaactgcttgataggcccaaaggggcgtatgccttcattcctgggctccatgaagaacttgagatacctcaatctctctggagtaccattcaaaggtagcgtgcctcctcagttaggcaacctatctaggttgcagtaccttgatcttggcagttcatatttaggatatggcatatactcaaaggacattacttggttaacaaacctacctctgctgcagtaccttggcatgggttctgtcaatctctcagggatagctggtcattggcctcatatactgaatatgctaccatctttaagggtcattagtctctctttctgttggcttggcagtgcaaaccaatcactcgcattttttaatctcacaaaacttgagaagcttgatctctcgttcaacaacttccatcacacatatatatcgagttggttctggagagcgacaagtctcaagcaccttgttctgaaggacaccggactgtttggtgaattgcctgatgcactaggaaacctgacatcccttgttgtccttgatttatcaggtaatgcgaacatcacgataacacaaggcttgaagaacctttgtggtttggaaatccttgaccttagcgccaataggataaatagagatatagcagaattgatggacagattaccattgtgcacaagggaaaacttacagttacaggagctccatctggagtacaatagtttcacagggaccctgacaagttcgataggtcacttcaggagcttaagcatccttgagctcaacaataacaatctcagaggaagtgttcctactgaaattggtacccttacaaatttgacctctttggatctaagcaataacaacttcggtggagtaatcacggaggagcactttgtaggtctgatgaacctaaagaaaattcacctgtctttcaataatttgagtgttgtactggatgcagattggatccaaccattcaggctggagtctgcagggtttgcatcttgccatttgggccccatgtttccagtttggcttcgccagcagctcgtttatatcactacgctagacatttcaag

SEQ ID NO: 149554 - DNA, 479 bp, Zea Mays
cttcaatcagcggtattgtgtgatcacaaaatctgctaggaggaagggaagtgggctcctcaaatagagattggaatgaacatagcagacgtcggacgggttcaggcacaggcaattctgatagtgaatgcagctgggctgactccagtggtgatgaatctgaatgtctgatttccaatagagtaccatgtggaacagattgctgaacaccatggaggagcactgttgaatcctgatagttgaacttcagccacttatgtttccaatccacaaacattgggctgtattgttccagccaagacatgcccaggacaacatcataacatggtaagggcagcagcttgaaatcggtttgaaaccgaggagtttgtatagaccattcagcctggcacaactcggacacactctggactatattcccattagcaacccggacggacagaggttggtccaaaggtgtgacaccaaccagagaagac

SEQ ID NO: 149555 - DNA, 277 bp, Zea Mays
cgtggccgccgacgacatcgtcgacggcatcggcatgagctactacgtcttcaacgacggccatgtcgaccacgcggccacggtcgacgctgagatcgacatggagacgatgatgatgatgtgggacgacgacgacgactgcgccgccgccctagggttagggtgtgctgctgggccggctggtgtggagagtgctgtgcgcgtgaaggaggagatggacctgcaggtggagacgatggtggcggccacgcacaagtgcggcgatgcacaagatcac

SEQ ID NO: 149556 - DNA, 719 bp, Zea Mays
ctggactttgggccaggattggccttcgcggaatccctctgggatgccttggaagcttcggtttgccctgctcgcccgtgtttgcggtcacccttttggctggtggtttccttcggtagatgcatcttcaagttgaattcggtttcggttggtcatcttctccaggctgcccttggtgggctcgctgaggatttcgaagtgtttcagctggctgaccgcgtttttcgattttcggtttcctcgatggcggtgggtttccacatctataacttgggctccattgagcgtaaagagttcagagccttcttcaacctctggaatcgcggtggacccaattggaagcatgaattcagactctttttggaggaggaagatgcctcctggtcgagggtccgtgtcaggaattctctgtcatatgcggatgtggttaagctccctctcactggtgccaatgcggtcccgattcgtcgccctgccaggccgcttggtggtgttcagcatgctgctcgggttggctcttcggttttcaatcgtttgggccgtctttccaccaatcgtgcccaggctcgtaacttctggcgcccgcaggctttacctcggcctctcccgagggtttccgtgttcaaccgccttcgcccgcaggcttcgggaccgtgccatcctgcttctattggaagatctggtcttcctcggttcttggatcctattcgttctggggt

SEQ ID NO: 149557 - DNA, 447 bp, Zea Mays
tgaagcctttgttgctgaagctctgaagcaacaatttgaaactgaagctgggccctcagagcccaccaaggtaaaacctttgaaagctgaagaaagaaaattgacagaggtaactttggaaacggaaaaaataaaaatgacagagccaattttgattgaagaaattgacactggcgcccccgaagcattttccaaaatacatgattatattgtgcgacatgcttcggggaagaaactatctgaagaagagatttttgaagccaatcactatgcccgagaactgaagtatccgaagggggccgtagtgttcaatggaacagacgaagatgacttcctgtactgtctcccagacaataaagaattatccgtctgccgagagatggctaggagcatggggttcccgaagcttgaagctggcctttgcgccatgacgaaggaggatcttgc

SEQ ID NO: 149558 - DNA, 426 bp, Zea Mays
cattcttctacccttggagctaatttgagaaccttattttatcaattgatttctaaattctccttggcattgaattggatcaacagagttgtttttccaaattcatttcaagctgaaatggtattggggcacgtttctgtttcatatgttttgatgttcaattccagcaaataccaagctcctcggttccgtattgggggtgtgtggtttgcttctgtactgatatcatggtgaattgagggtcaaattctaaggctcaattccaagacatccaaacacgtggtggtattggagatatacaattccaattctccaaatcctagcttaatgccagcatccaaatggggtgttaggtttttggggggcaatgcatcaccacaagttacctgaatattcagaaacataggtgctgtttggttcgtccgg

SEQ ID NO: 149559 - DNA, 461 bp, Zea Mays
cggggccttcatatccttgtgatatgcgaagttataacagccaaagttttcatgcagcccgtcttctctggccttcgtctggtaatgcagctcatgcactcggcagaaagcttcagcattcatgtccactccttggcttcgaagggcccagatgaagatgctgagcctaacgatagcgttaggggtcagctgatgaagatatatttcataattatttaaaacttccccaatcatctcattcaagggaaaccgcaatcccgctctaaaaagctctagaaaaccaccacttcatcttttttgggctctggagtgatttcttctccggcaaagcgaataagcttcttcttggtctccccaaaataaaccagcttcatcatcatgggcatatcagcttcagaaatggtagattttccaaaatccaagtggctaggttttaacgggatcatagtgtcataatcttc

SEQ ID NO: 149560 - DNA, 280 bp, Zea Mays
tttgcaataaccacttcatctttggagctgattgatgggtaccacaaatccccccatgtacttcagccatggctaatatagcttcacctgggcccaagcatttaagtaggacatcgttgactgttcggtggtacagttcatcactcattaaaacatacttgaaagttgtacgccgaatgttcctatccgtcctaacactgggatttcgtaggtaattaattatgggtgtcctccaatcaattgcatcggcttcattatcagccgaatcaatcaggagaac

SEQ ID NO: 149561 - DNA, 440 bp, Zea Mays
ggagtcaccggtggcatccgaagctcgcctcgacgacggtggctttgggtggcacagggcatgtggttacggctcgatctctcagttcgtggcgacaatagtcgagcgttggtcatccaggagaagcaggggtacgggtcttattgttctcgaggagctcaggctgggcgacggattcgaactctgtgattcccgacggcggttgctcggtgcagcggagaaacagaggacggggctgggttttatagaggcggcggaatccgttcagcgctccgcggagttcggcgatgacggggaggttgttgacgcagtcggtgagcaagctacggactcggcgagaggtgcgggagtttgttcccaaggaggcgaatctgacgccggagcccacctggtcagtgactgagaggagcaggcgcgcgtgcacctgcgctcccaggcag

SEQ ID NO: 149562 - DNA, 533 bp, Zea Mays
gaggtttgattactaaaattgacaagtgcaacttgaagtgtatatcattgcgagtgttgaggaggtattattaccggcaatgaagtcacgtagccccctgacgacggtggacggtggagtggcaagagagacggagagagtacagagagggcgaggcccaggaggacgtcagtgcatcatcggccaagtcaacagaaggaaaggggtgagtacgtggttggatccttgaggatgtcctcaccggagaacaccagaacagattgacgcactacaacggctgggcgaaggagagaactggccacgacaaggtaacggcggcaacaaggtcacccccctggtatttatccccctgattgctcgagcctaacaaaccgcgagccgaggatcccagcccgcctggattttgctgtttagctacaacggactctgcgattcgagcggaggatttttttagctgcgcgcgattccagcgggataatcgtgaggagggagaagacctagcacacgggcccgcttgtcattggtactacccg

SEQ ID NO: 149563 - DNA, 281 bp, Zea Mays
cttggaaaccatgtgaaacctctattgagattgatttgtttcatcttcacatattttactaacttctattggccattgagttgcaacatttaattggtatgttagcatgtaaaacagtgaagtgaaatattgcatcgagagacattgtttcattcatagtttcatagcccttttgatgatgtggcataattggaaagagcgctacaaaattcccattgaaaatagccttagaggttccaaatgccctcagctaattactagctaactcacagctaacaatt

SEQ ID NO: 149564 - DNA, 1397 bp, Zea Mays
tcttcatttgttattgttacgatacaagataagatttttgtgatgtaacatgcccttgtacacaattaattaatatgctcttgaaactttataatatttttttgaccattttgacgacctaaaaaacctcataatatgcgattattaggccgccgaaactttatattatttttagcacattagcaatcttaaataaaatacttgatataaaaagcttgcagatctaatcgagatatatatagttttgatataaaaaacaacttcatcatatatcatataaaaaagtacgattttttcaaaaggtcttgtcgccttattcatattggtacagtaaaacaacatattggcgtgatatggtaaggttttccacctgaaaatcgacatacaccgtgacaagtcttgttaagttacgctaataattatggcgcggcatcgtgattttgcggccctaaatgtgtggacacgaccaaaaaaatctaaaaaccggaatgaaatcaaacggatctatttctaaaataaaatttattacaacatttataataaaaaaacagtggtgaagctgtgtcacaacggccatgcatggtgaggctggacataacacgcacaaagacacggacagtttctggcgccgagctttgccgcatatatacgcagatacagccagcttacgctctatgcgtgaggtgtacatgcggcggatctaacaacagagaagacggtgggcttaagtccattcattttaaccagaggcattttttttatctttttacttgaagttctctctcctatgttaaaaattttattttaattaatacaacgtggtacccagaatcaactagtggaatataaaaatcatcgcttgctgatgtcatagagagacagatttctgttatccgccgctaccatatagctagctagctagctgtatattaggtctagctaggcggttgggtgctctcagcaattacttactagtcagacgaacttctttttagtatattaattgttgaaaggtttttattatgtactaattcctttcttattagttgtctgtgatattcttggtaattcacggacctgaacacccggtatagtagttgactgcgccacttcctatcatgcatttgtttgtctattctccctgcttttcttttgccttccttaacttgcttgctagctagctagctttctgatgttaacttcattgacaactcaaaccccgctttgggtacgtaggggtgcagtggtattttcttcgcccacttgtgttgtaagcagtgactttgcaaatttttcgtactagcagtaataaactacaactagttaatatagtcaacttgcttgccgctgtagcacaaccgtaccccgccccacatgggatctatatgttgttcatg

SEQ ID NO: 149565 - DNA, 454 bp, Zea Mays
cgtccgcaggcaataccgaaagccaacgccacctcgaattgcgcggagaacctgcgccgccattgtaggagagagcgccgccgtcagtgaggaacccatagtttgccgctgcactggaatctcgagctcaacgcgaccgtactcacgtcgagtgtccaattgggttcgcccggtcttgggaagggtggtcaactactttccgtggacgaatcgtgctccagcacctcggaatttcccaccggacttcgttcggcggcgaccgtccgccccacgccgtggccggcccccttcgcgacccaatcaacaggtaatacccttcccaattgattcactgcatcgtcccgtaggtatttccatcgtctgtgcgcgctttagggcatcgggtaggggacaggaccctgtaattccgccgccgctgcggtagaccggccgcgccgccgtgccatatgtgcgg

SEQ ID NO: 149566 - DNA, 529 bp, Zea Mays
tgacgtcgagagtcatggcgttaacaaatttgaagctgaggatcgaacacctttgataccaattgttagcctcttctactagattaactaagaacaaatatagaattcagagttcgggaaggaagaggagaaaggcagctggagtttgatacttggtgacaagaagaagcgtaatagttctgttacagtctggaggaatacagctagatctagacgtagagaaagcagagaagcttgaggtgaaagataaacaggagttggtgttctgaataattctttcataaaccttctcgtcaccttcattgcgcccttataatattttcctttagctacctgggctggcatgggctgtttgggccgacagtccctaacacaatagttcccctcgaccgactgccaaatccatctctgctccccacaaagcccccaccggacccagctccagtggccgctccccccatcgccaacaatcctcccacccagcgaccacccatgtcctatctggcaactcagcaccactacagtgccc

SEQ ID NO: 149567 - DNA, 1942 bp, Zea Mays
ctgaggatgaggttgtggcctttcgcaagaagatcgacgacatgttcgctgcggctcaggatgcggacaaggaagctgccaatgcacacattcgtgtccaggtagccactcatctcctcgaacaggagaaggccgccgccctcgagtagaaggctagcgccgcttgacatgatttgttcctacaacaccccacgatcgcagcttacggggctgccgtcattgccaacctctacgtctaggcagctactgtttccaacgttcgagtgttggtgatggttgtccccgtgtcctcctttgacaattatgccggttggcttgattaggtgttgcttgctctcaagtgatacgcctttgtcaaccacatcttgtttgacccttcgttggacaccggtttgtgctgggatcgaatggacatcatctgttggatctccgacaccatctctctaggttgtgtcaggtggctagggagcgcaatggcacgacatgccatctttggctcactctcaagaatcagtttcttgggaatcgtgagatcgacaccctctagctcgacactaacttccacaccttcatccagggcgacctactcgtgggtgactactgttgcaagatgaagatgtttgactttcttgccgacttgggcgcccccgtcaacaaatggatcctcatcctcaatattctttgaggcctaaacaagaagtttgagtgcattggggccatcatccgacgctactccccctgttgcaagctaaggaaatggcagactccctagctggcttgggcgccgctgtcaacaaccagattcttttcctcaacattctccgaggcctgaccaagaagtttgagcatgtcagggccatcatccgacactacttacccttctcgtcctttctcaaggtctaggacgatcttgttctagaagagctcaacatgactgccattggcactgctattgcttcgataaccttcatggccactcctctgccagtcccccccactagcttccctagccccttactctactctggcacactcctctaggaccaggaggaagcccactcccacctagaatatggcaagaagaaagggaacagtcagggtaatgcttcctagctgactttctacaacccatggacgagcatcatcaccatgtggcccagctcggctcctggtcacccgactttcttggctccgacattccttgttgcgtctacctagcatcgacgtcttggtcaccctggctcggatgtgttatctagtttgtctaatgcttcaactatgccatgtaataaaagcacacatgatatttgtcacacctgtcaggtaggaaaatcatacccgtttacctttctctagttctttcagtcaagcttcgaagccatttgagttggttcattgtgatctgtgggcatctcctgttgttagcgtgtctacttacaaatactattcgatcattcttgatgatttttctcattacttatgtgcctttcatctgcgattgaaatttgacacgttcactactttgtcccacttcttctcatatgcttccacttagttcgattcttccatccaggccatctagtgtgacgatagccgcaagtttgataatacttccacttggtcctttctcctttactatgtcatttttctctagatgttgtgcccctagacctcttcgcagaatggtaaaaccgagagtattattcgttctattaataatgccattcactctctgctttttaaagcttatcctctagcatactactaggtcgaaggcctccaaaccgtgacatacttgctgaattgtctccccacaaacaccatcagggcctcatgcccccatgttgccctgtttggtactccccctcctatgaacaccttcgtgtttttggttgcgcttgctatcccaacctttccacggttgctccccacaaacttgcac

SEQ ID NO: 149568 - DNA, 334 bp, Zea Mays
tagcgcgttgctaaggtcgatggaatttgctactcaaatttgcagtcacagttcagggagttgatgtggcctcctgacgcttttggtgaacttgacttccatgttgtaatacgtactgatttccatctgaagctggagtggtgtagtagtactgaaaaagtcgtgtatatactagtgggggatgtcgtgtttggttaaggtggtgtttatgttctttgatatatataccaaagagttggtttcgggtccggggaatgttttttgggtcttgcaaggcaccttcgtctacctggcacttggaggcagcagaaaaatgtttgtggagttttggaca

SEQ ID NO: 149569 - DNA, 703 bp, Zea Mays
gcatgctacacaggcgtggatgcagctgaatatggaggttccagagcagtccatgtgctaccgatgtagcgcaggcgcaatacacgctggaaggtaagggaaccgttttcctctccagaaggggaaataaaaacgagaggtaagggaaccgtttagggacaaagccgagaatatcattagggtcagtttcgttatatggcataaattttcttaaattctataagtattttacaaaaaaaaattacaattccatcatagttgacatgctctgacaaacatctctagattcacctctgcaaaggttcaaatgaagacggcgttctcatgtggatggatgacccgacctttgtgagttctgttttgtatatattcaggattcggttgcttgccattgtagcgttatagaggctacaagtttaatggaatctgctgttcttgaccatccaaaaggggaaaaaaggaaaatccgatggccaaagtcgtttagagtttagactgctaccgattctgggtgtcctgtcgatatgcgcaaggagatatttctgtttacctagtcgccaaaattaaagcatcacctgaattggataaaaaaaaaagaaataactaataatgtaacaataatgccaacaataacatgcacagagtatagccagcgagaaccaactgttctttaggaaactaggcagtacacaatcaaaacatt

SEQ ID NO: 149570 - DNA, 552 bp, Zea Mays
gccggcggagatctcggttgggcgactccaagatagttagactagctaggagttagttgggagtcttgcgcacgcaatgatgcctgagagagatggctggcatgcagggcccaagcaccagcgagtgatggaggcgcaggatccatggcagaagtccgcaacggccacggcgtgaggttgatgttgaccgcgtgggcccaacctgtcaatggcaaaaggcacgcagaccgtgtagtcgggacttgtccagtggggcccacctatcatccacgaagcgcgacggggcaatgcaatgttgaggagcgcgcatgtggtgccagagattctccaaatttattcatatatcacttagcacaattacaaatcttgaaaggggcaacactttgacattttttttcgtgacacataccgatccttctagctaaatgatatattattcttccttgtcagatgtaccaatcttcagggctggaggtcggttgtcttcaactactattctttctcctgatggggtttccaaacacatggttctctcagtatgttggattactg

SEQ ID NO: 149571 - DNA, 325 bp, Zea Mays
gtcggattgactggctacagagggatggggtcttgttgctggaagtcgatagggtattaaggcctggaggatattttgtgtattcatcaccggaggcctatgctttggaccccttcaacaggaagatatggagacagatgagtgaccttgctcgaaggatgtgttggcgggttgcatctaagaagaaccagacagtgatatgggctaaaccattgactaatggatgctatatgaggagagagcctggaacacttccccccatgtgtgaacgtgatggtgactcagatgctgattggggtgtccccatgaaagtatgcctaacccc

SEQ ID NO: 149572 - DNA, 379 bp, Zea Mays
gagatacttgtacagtagtactatgatgactgtggttgcatggccatagcgctctacgagatccaacgtcaacttgctaaataatatagcatcttaatcagctaagggtgtgaacactgaacacgatcaatcgtcgccgggacaagcttgtcaatggcttggagcgggggccaagcacctggattgacccactcgcgacttgcggcgggtagtgaactccagcaaaattggccgggccaagcttgtcaatggcttggagcgggcgccaagcacctggattgacccactcgcgacttgcggcgggtagtgaactccagcaaaattggccgggccaagcttgtcaatggcttggagcgggcgccaagcagctggattgacc

SEQ ID NO: 149573 - DNA, 762 bp, Zea Mays
tgggcacctcagtcatgaagccctatctcgttgtgctatctcttctgctattccttataataatggggcctctaaatacctctgtcacacttgtcagctcggtcatcatgttccccttccttttcataataattttgaccttgtccactgtaatctatggacctcactagtacctagtgtttcaaggttcaaatattatgttgctattctcgacaattgttcccattatttgtggacctttcccctccatctcaaatctgatacattctctaccattgcccaattttctcctttgttgccacttagtttggcgctaccataaaaagtgtgcaatgcgacaacggttgcaagtttgataactccaactcatgcctcttcttcctcatgcgtagtgttgatctacgcatgtcatgcccctacacctcacaccaaaaagggaaggccaagcatgtcttgcgcacggtcaacaacatcattcattcccttcttttttagtctcatcccccaccttcctattgggtggaagcacttcacactaccacctatcttttcaatcgttatccaaccaaaaccttatagttctctacctcttatgctctctataggcaccctcccctctactcccacattcatgtgtttggttgcaagtactatcccaacctatccgctacttctgcccagattctcgctcctcgttctgtcctctgtgtcttccttggctactcgtccaatcaaaaaggctaccaatgtcttgacctatcc

SEQ ID NO: 149574 - DNA, 664 bp, Zea Mays
ggttgatggtcaccatgctagagattgttttagatctttgtggtgtgacatttgtcacaaagaaacccacacgactgctcgtcgtgtgttgcctaaacagaacaaaccttgtatgcctattgttggtatggcggctgatggattagtgttttactcttctcattttgcgaaacccttgtccagaaaacccaaaagaagcttcatcggtttggtgactgttatggagggtttgatttctgctgaagatcttgagaaggactttgggttccactttccgtggggcaaaacttggaaagctaccaagtgccatgccgggttccttatgcaatttccttctcaagagaagcttgacgagatgattaatttccctgagctcaaaatgaaaatgtcgggagctaaaatctctgtttctcattggagctctcaggctaaacctaaatctaagctgcatgcagtttggattgttgctgaaaatgttccagtggaactgcaaaactaccaagcaatatgtgaattaggatctacaatcggggctgttgaagaagtggacatcctatctttagattctaaggatatggttagattcaaagttcatgtcaagagtgtcgccatgatcccgcccatcattgaagtgggggttaaacctttcctttatgacattttc

SEQ ID NO: 149575 - DNA, 1140 bp, Zea Mays
gcatactgcaacaggttgcgcggtatcttcagttgataacttatctttattattcttccctgtcacaaaaaaaagagaggctggatgatatgatggtaaggtcgcatcgaatggcttaagaaacttgtagggggaaatggatatgccttgtgagtgtgagactgatcaaacccttgcaaaagttctgtgatagtcactgcttggctgattgaagtaagtttgatgttgatatctgctgggaatatatataatcaatataaaaacttatcaaagatgcagaggaccttttagacgtatgaatgactcgtgagcaactatatggcctggccacgggtgctttcggagagattcaaagtgcatccaaatgtggatagttgggagggggtactacctccatttttatttatttgatggcacttagtttaattgtgtactaaccagcgacaaataaaaacaaataaaaacaaatggagggagtatcaagtaatgcatcctaaacaagtctatccgcttgcgaatgagaattttgtagcagttgcttgatgcctgggtgatagtgataatacctatacgttacagtaccatgtgctcatttcttgtgcgctccgtaacatgtttggcgtggacacctctctattgcctgctatttgactaatgggggagtcgaactgattgcgtgttcgacaccctctgatgcgaaatgtattgcagcgtcctctagttaataatgcatccatatagtctgtgaacactatggtagctgtacaagggcatattactatcgtgggttcggaaaataaaaaggccctattactatcgcactgagtagagtagacataaggcggccgcgtgtacatctatctgattaacgccggaaatcgttcagtcgatcgaagtgcctccatttgtcgctggattaggaaatcgacaccactaatctgcattaaattatctctcccgcttggccttctccttctcctttgcctttgacagggacgcattggttgcatataatacgtgggtcatgagttgtcacgtctgagtggaacccatatcggtaagatggaagcaacgctaaccaccttcacgataacacgacaagcgcctgtgatattctggagccgtgatgctggcctcccc

SEQ ID NO: 149576 - DNA, 651 bp, Zea Mays
gcttgaagtaatttatctctgacttcagcaagaaataagtcacactcttggagcatgtcatcaactgcctgtctggatgcggtgcctggctggtaaggaagcagggctggcggttctctgccatataccactctgaatggggtggtttgcaaggctgaatggtaagaggtgttgtaacagtattccgcccaaggtagcaactcaacccatgctcgagggcgatcccctgtaaggcatctgagatacatggcaatagttttattgaccactttggactgaccatctgtctctggatgaaaagctgtgctcattcaaagttttactccagatagtttgaacagatcacgccaaatattctctgtgaagaccgggtctcggtcactgactatggactttggaaatccatgtagtcggactacttcaaagaaagactgagccactgttgctgctgtataaggatgacttaaagcgatgaagtgcacatatttggaaaactgatcaacaattgtgagaataactgacttgccatgtactttagggagtccttcagttttgtccattgatatgtcagaccaaatctgagaaggcacctctagtggttgcaacaataggcacctctagtggttgcaacaatcctgcgggatgtaaggc

SEQ ID NO: 149577 - DNA, 514 bp, Zea Mays
tcttcttcaaatctgtattcacctgatcgatagcatactgcgacaggtgattgaatttgttgaggtattgagtgacggtatctccgccttgttgtaacttcataaactcctcttgtttcatatgcagcactccttcggggatgtagtgttcacggaaggctgctttaaattcattccaagtgatttgatggttgtcaggttggatggccacaaaatttccacaccaggtactggcaggaccacggagttgttatgcggcaaacaacggcttctgcgtctctgagcaacgaagaagaccaaacttttgctcgataacccgaatccactcgtcagcttctaggggatcttctgctttgacgaatagaggtggacgagtttccgagaaatccagataagtggtctcacggggaccctgcggataacctcttgctgcttgctgctggaattgttgctgacccgccatttccctaaggaagcgggtattatcggcggtggcattcaccaaggcggcaat

SEQ ID NO: 149578 - DNA, 579 bp, Zea Mays
gaggcgagctggtgccggtgacgaggatcccacggccatggacgtcgccaggacgtagctgatgccggaggaggaggcacttcggctctgcacaggctgcgtccacttctagacttccttgcctcgcttgtcacctgcaggaaggtatgccagcgtcatccccaccccacccctccattgtcccttcgttatgaatatgcatcccctcacctccacaatgccgcagcgatgcccaccttgaaagaatttgggggatgaggagcccacgtcgcaacgttctagatagcgaacgaacgagggcaaaagagaggcacatacatgttctgcaaggtctgggctacaccacgtcttcacctgcggtcacgcctcgtgcctaagactggttaggattcttgacactggggcagtgggtcatctctagcgcctagcgggttagtacttgatccttgacgagttctttgcttgggttctgaccatcgatccagaagccttctggaccgaatctcctctggttcttaagttgcagttaacaggatttgagaagttacttctgtgtaaactactactacggttggatta

SEQ ID NO: 149579 - DNA, 638 bp, Zea Mays
aaaccatctgatcttcactgaataacccaaagaaataactccttgcgaatctccagtaggcgcctgcagaggctcagtgatccagagctcccgtgactccggaatcatggatgtatcaatgcatcaggcagagcatctgaaggaaaccaggtcactcaagccagaggtatccgaatgcaccttaaatagccaagcaaatgggtttattaaatgttccaccgaggccgtctcccacacgtgcattgggatgccatctaattccaggtcaaccagctgaggaagagttctgccagaagagttgaaaaatctagaccatcgcttgcagaccattgtgaaagtcgcagcccgctaaatggaccacctcgtgtcaagcctttgagccaaatcgtcagacgggagaaccagcaggaaactatttggtgataaacaacggagaacaagggagtctttaatgatttccaatcttggtgagagcagggatgccacttcgaattcagatactgggtcacgattgctgatcaccgagacaaccactgccaagcgaagatcttcctcggcaacagtcatggcgtggttccaacccagtaagcatgggggtacaagtcctgaagaaggcagacggggctgcatataattcc

SEQ ID NO: 149580 - DNA, 1540 bp, Zea Mays
ggctacaaatatattttttatttatttctaaatactaaggtatgtgtggtctggtggttagccccaaatttctggagcagaggggtgtgtgggttcgagtgctcgttctgcactactttttgcggacgctgggtgtggggagggtgaagtcgtggtagcaccaggtgcccacattaggttcttaatagagtagaatatagatttgttcctgtcaccataagaaaatatcaacagaaaagagtacaaaggaggatttacaaacagatctcaaatgagttaaacctacagaacaatcaaatgcatcctttgtcaatccaacaaaaccaataagaaaaggaagaccttcaatgtaagtaaagattaaatagttttactgccattgtgtattatatcacaagatgaactttgtgactacaagaaacaatacaaaaatagacttgggattatatcaatcgttttcagtgccttgtactccctccaataaaacataaatgatgcttttgacattagcagttcagcacggtctctaaaaaacacacaaaaacactttcttacaaaatatttattaaacatggaaaaagtatttttatgaaactgcattttgattcaaatatctacttgtatcattaccaaatatctaaagttgacatatggaaagcaattaacaaaaatttagaatggttggtttcaggcaaccccaaaacaccccactatttttgtgtgcaacactgctgagatagtatgcaacaagaatgacacactgatctaaccattatgtaaacatcatcaagacgaatggtattataaggcattctgagtttttgagaccatgtgtttgatgctggtacacaattggcacactagtactcaagaacgaagatacttgcagacaaactcaagattattaagtttatgaacaacaaaaatcatgtaacagcaaaaaatgaaagacatgactgatcctgacactatgtattactattgtaatatgataacaacgaatccaacactatgaatcctgatacaagggaccatcaatgttagcttacagaaatttcaagggaatttatatttaagacattttgtgctcaagggagtatgagcaaatagaaaatatcaacatgccataaaataaaataaatataaaccaacccatatgtcacactgacatcctttacagataaaggtcaggggagaaatgcgaactctagggatagacaggccattaaaagtcatgagcaaaccatggaagttctaaagatcgggaaacaggcaggtacagaagttacaagtagtggcatccagtaatagcaatcaaatgaaagaacctaaccttctttagccttgcttcatccatgtatttccttctgagtggctggcttactccattagctttctgcttagtgggagcatcgccacttattgtattctggtaagcatgtacattcctaaatagtggtggtggcatgatagaagtctgcataattaaattaaataaaatgaaactcagctgacactaaaataatttcaaaactgaaga

SEQ ID NO: 149581 - DNA, 462 bp, Zea Mays
gcgacagaggcggaggaggatggttgcaaagagggagtgggcgaggacaacctcacacatggaggagcgaagcacgatgcagcggtgggaggaaaagaagacgatggtggaaagggcggtgaaggggagaaggaggtggggacagaagttttcaaggaagacagtggtgtcatagtcggagggggcgaccagtggcgcgggcaggtgcgaggcgcaactaatgaggaggtcgtcacattcgtcggctgcgaaccacgagtttagtaggcggcagttgcgagtagggtgcaggagaagaaggggtgcgtaaggactcacgatgacgcacgatgaaactcccatattaaggagtatagaattttgtataaagcagaaaggggtgggtgatgcacgacgaattatggaactgtggaaactggtgttttatatagtagggagggtgacacgatgactataaaaccg

SEQ ID NO: 149582 - DNA, 520 bp, Zea Mays
tgcgaagcctgccagaagttttctccatgctcgggaaacccttcgcaattcacaaagctaatcgcccacacgtggccccttcagcgctggggcctggacattgtcgggccactacccacggcgcaggggaacctcaagttcaccttcgtcgccgttgagtactttaccaagtggatctaggcgagggcagtatccacgataacatcgaagactgctcagaaattcttctggcaaaacattgtttgctgattcggagttccatccgagctcacagttgacaacgacaaacaatttgacagccaggacttcaaagacttttgcttctcaattggcaccaagcttgccttcacctcagtatatcacccacaatccaacggcgtcgtggagcgcgccaacggaaaaattttcacgaccatcaagaaaatgcttctcgacgacaagaagggcaaatgggccgacctgctacctgaagcagtctgggcgctgaacacgaccgagtgccgggcgactgggttcactc

SEQ ID NO: 149583 - DNA, 803 bp, Zea Mays
gccatgtacacctctcatagcacaatttgcccagctccccacatacccttatctcctttagaaggaactggagtctatagtggagggtgatatttttaggagatatttgcaactgcattgaattgctgttgctcactgaaccatggatattttagcaagaagcgaaacctctagtaccctcaactcgccactatagccttattcccatataagtttacaggtgagggtagcagggggtgatcttcttcagttctaactgaatcagtcatttcagcacagctgcaaacctccctgtttaagccttgatatttcccaaatacataaggcaacaaacctacctctcctaacataaaccactctccaacaatagctctaccaacttggtatagcactgatagcccaaaaactcacagaacagaaattgaggtaccccaaagttaagcaaatctcacaaaaactcagtttcagttcagctgacagcacaaactaagtctgacaggaggttttgcaactcctgtttctcccaattctatacagtaacaagcctaccctttgcatgaaacctgttgtccttgacatggtatttcatcttgctgtgccaaccctaacccaattctccttggatcaactaccacaaagctccaaagcatggcaaagacacacaacttcagacttggatattatgctaagtctgaactccaacatctggcagtccaattttgaatacactttactccactttttatgcaacaccaggtccctctcactttataaaacttgttcactttactatggtatccaat

SEQ ID NO: 149584 - DNA, 375 bp, Zea Mays
gatagatgttagacgtcagagatgttcttcagttcttgcttagcagttctacactcgggaaacagttggaggcttggagcagagtagcagacggccagacgccatggtccagacttgagacagatttcctcaagaacttaggataggaaggaggaagggaggagtcagccagccagattgaagaaagcaagtagcagaagtgaaaaggaaatgtgccttggttttggaaacgaggcgccagtgaggcaacgaggcaatcaatgagccaatcagtatttaatacggcacctaaaaggaaacaaaatgtttcaggcgccaaaaaggggtcaccagaccgacatttccaattccaggtttctggtcgctgtattcatg

SEQ ID NO: 149585 - DNA, 822 bp, Zea Mays
atgtcaatcatgtactgctgttgggaaaggaataatccacttggtgtgcgctgaacctgcatccccaggaaatgatggagttcaccaagatccttcattgagaattccttctggagggatgtgatggtgcgtcgtagaagactggtggaagaagctgtcaaaacaatatcatccacatatagcagcagatataccatatcatcaccgcggcgaaaaacaaataaggaggcatcacacttggtttctacaaaccccagcgagagcagaaacgtggcaaaccgactgtaccaagcccgtggggcctagttcaaaccgtatagagatcggtttagtctgcaaacgaagtctgggtgagcagcatcagcaaaaccagagggctgagagcagtatactgtttctgacaaagtcccatgaaggaaggcgttcttaacgtcgagctgatgaatcagccagttgcgagttagagccaaagcgaggactgtgcgaacagtagcaggcttcacaacaggactaaaagtttcatcaaagtcaattccaggacgctgtgaaaaacaacggagaacccatcgcgccttgtagcgctcaagagagccatcagcattgaacttatgtttgaatatccacttgccagaaacaacattgcaggagggaggacggagaacgaggtcctaggtgttgttactctgtagaccagagaattcctcctccatagcctgacgccaatgaggatcagcaagagcagtgcgataagtctgtggcactggagactatgctgcagcatgaaacaaagcgagttgtcgaaatcccaacttagcacgggtg

SEQ ID NO: 149586 - DNA, 531 bp, Zea Mays
gcaagcgtgtacacgaattatgcctactagcttctattctttgtgcctccaaaactcatgaactgcttgctagcttcacgaagtctgggttttatttaggcacattttagggcatttaattggttgaaccaatttggttcagagaaaaatgttctgttcctaccacagaacgagtgaacattaatttaacctgtgaaactctgatagccaagggtagaattgctttacggtaccctggatattaagatactattcattatctcactgcttttttgagtaaataatttatggagggatggatttttttcaatgcaacaggtccttttgttcctgcatttcattctcttttgggagcataaagctctgtttcaaggggctactttatgttttggggggcaaggcacataccacagatgtcccttattccacaatcccacagaaatactcacataagagcccatacttgaaagtagaggactctctgtatgagattccaatcatgacaaacctttgtgtgcatgtgcgtttagt

SEQ ID NO: 149587 - DNA, 778 bp, Zea Mays
gaatcctagcagaggaaaaagcagagacacgctgcactgcggctccgtgctgtttgcttcgctttattccccttccttgttccagcaccagctctcctctcccctgtcactctccatccggccatcccgccgcccaccctttcccccatccgccgaacccttcgcctgctgcgtccgtctggtccgaggcgtttccgttcctgacgccaagaacgagctcttctacgtacgcctgcacgctgaggtggtttctttgctcctgcctgccaccgtcgtcgattcttcttcttattcttttccccttggtccgtagccattgttggttggtgtcatatactttcatgcttcgtgtcctcctgctccttccattcctctccttcccgtagccattgttggtccttttacctgttatatattggtagtgccatcttcttgctgctacttctctttcccctcatctcatttgtcctgatcttgtgtcgacttttctgttcccagtttagatctccgcgtccgcaggcagggccgaatccagttgaaggcaggcggcgaagagccaaagatgggactcgacgcaaccaacgccctgctgcacatcaagagcgcgttgcgttcttccgccaggcttgcctgccagtccgcgtccgagtaccccgtggcgctcggcgtcggcacgctgctgctgttcctgcacaggctctgccctgccctgctcgctctcctcctgtcctcgtcgccggtgttcctgctaaccgcgcttctgctcggggcgctgctg

SEQ ID NO: 149588 - DNA, 295 bp, Zea Mays
acgttgctgggataggagtggagtttaacatgcgagattggagctgcagagcatccaaaaaagccttgaaagccctgcacatcatcaacgaaaatgaagaagtcaataaagaagccctggatgactacgctctgcttttcaagaaccctctatcacaagctcaggtggaggccgccttatctgcactctttggctggtccacacctgcagatttgcagttccagtaacccccctggtggtagtcttgtggtttagttttctttatggatccttctaaaatattggtttggacaca

SEQ ID NO: 149589 - DNA, 439 bp, Zea Mays
ggttgcacactttacccatgagctgtgatccctttttgcctcgggttgtacggacccttaaacacttccaaggtgagtaggcaaggtttcactacgtggcttttccctagggtcctcactatgcgaatgttggaaatgaccattgcatagtgaccatctgacgtaccaaaacctatacctctgccctcaggaaaagccatgggacgatgcccgtacctagatccctaagcgagattataggagccataacagatgccaccattgccatagagaccatctgacgtaccaaaacctatacctctgccctcaagaaaaagttgtgggacgatgcccatacctagatccctgagcgagaatataggagccataacagatgcctccgtcccccaatgaccaaaaacaacacccaacataagacttccctaattacttggccaag

SEQ ID NO: 149590 - DNA, 543 bp, Zea Mays
tcatcctatcctaatggatctaactaatctcaaaagattctatcttattcttagagagtcatcttcctaataagcatacttattcccctccactttgcttatctcataatagtgtcacaaacatgatctatccaaaaaaaataatagttcttatctagtctaatctgattgcaccaattttgatctcatctaatctaatcagatctaatctgatggacaaacatgatagataatactagaaaaatagaatggaccctacttctatgagcatgttttaacctaaattggtgacttatgtaaactcggctacacccaacaaacttgacctacataataggttacataacctatcccacccgtctagaagcaaacgaccaaaccagattctgactaacctcattaaactcatagccatctactaaaccagctgctctacctacggatctatcttaaccaagacaccaatacgaagaagatcaacctcatcaaggaaaggataagagtcaccgtcaaggaaggtaatcgtcaaggataaaagtcaaa

SEQ ID NO: 149591 - DNA, 499 bp, Zea Mays
cctccttacccgacgacgcctgcaataacactgtcttccaaaaacaggatataactgcgcgatactgagataaccaatccatacccaagataacatcgaatgccccaaggaaatcaccaccagattggtcgaaaagacctcatcagcaagaataacggaacacccctgacaaactgaacagctactaatggagccattagcagaactaaccaaaattgggtgacccaacctctgcaccgaaagaccagcctgtgacacaaaatcctccgagacaaacgaatagctagcaccagagtcaaaaagagcatgggccgcaaacgaatcaactgaaatcgtacctgtcacacgtctccttgctctctgccatccgcagcgggtagcacataagctccaaaaatacccgcagaagaggaagctcccagagtgaaattaacagaagaaccccactgagccgccaggtgaggcagacgcggagctccaaactgagacgacataggag

SEQ ID NO: 149592 - DNA, 307 bp, Zea Mays
ccggcatgtcaccacctcactacacaagccaaaattattattatttaaccacactcctagataagcatgatttcaatttaacttgcccatattttaaatctcggcataagcttggctattggctaacgaagtgaccattttctaattaccatcatacaccacctttcaccatttgtggatacttgcacgacacacagctatggtaatacatcacaagtacatacatcttccttcgttgcgagtataaccatattacggcatatactcgcacacctcaatcaattatcttacgccaccaccactataa

SEQ ID NO: 149593 - DNA, 363 bp, Zea Mays
gtaaggtttttagttagcttcaacaagttttgtcccgatatatattgttcagccttgatacattaattttggtatctatgccctgaacttctaatgtcttgtttatttccctagttagtagcttgggtaggtttatgatccagcgcagaggcggatctacgatccagacgttcggtattcaaaatcacattaggtgctcaaaattttgaagaataaagaaaattttcccttgtcaaaaatgtacgtatagtgtatggaaattgtttttgtgtgaatcatgggtatttgacataatgcccattatccttctgtgcctgcccctgatccagcgtatgatggcaacgatgagtaaatagttctaac

SEQ ID NO: 149594 - DNA, 1510 bp, Zea Mays
gctgggcttgtctgcttcctgctgctccgatgtgattggccgtggatggggccatgggggtttagctgtatcaacgcgattggctctgcgctccatcccttggtgaaatctgttccgtgagtaatcttaatatctgtttaaacggatagctagcacctagcaggttccaaaatggttgttagtcttaaaaacctgttagttgctaactctacaaaacccaactcatataaagggaaaatagaatggccctaatactgttagctgtatgaaatgtatgattagatggttggtttgctatgttattctggttgcttctacactggtcattatctctgatcagtgttcaatgctggttatcgccctacaatctataattgccctgaggcttgcaatcaatgttctccacaagtaaccagagtggtacaaaagaaaacacgtgtattgatgcctgttatcttcgatcaatattctagtgtatcatttatttgctaccagggtcatatctgtggaaacatgctcaggtcgaggctacgtccacacagcacagcagccccgagctggacccactccacacatatgaagcacaagtgatcgaaacacagttccttgcttctttgtgcggccacatggcttgtgcccaagaaactcaccacactcagggtccatactggtgactagagaaatgaaatgaccctatcaaccatccattccttaactgcattgcttccctcacggttggcgcgtaggacatgtccttggcaccatattagtctgggtagcttccatgttcacgacgctcccactttaccggtggcattctgatagatatcccatgctcccccttatagtctagaaatgatgtgatagctaacaaaagtagcatggatgtccttgtatattacgaatcactcatattgctctgagcttgtcatccactctaagtatcaaattcaacttttaagcaccagcaccacaataacataatcctccagaaggttctttcataatgagcacatgaagcaacagaaaatgaatagtctggtcatgcttggcaatttaccatttcaagactagaacatgcaatcccgaccaaggtgggagcagggcatcaagatcagcatggtaccaggaaagggagattcatgagcccgacgaacttgccagccagattcgtgaagcagttagtgaggtcagggcatggcaggttaaaaaggcccttcccttctattatccaaattcccagcgattgtgagtttcttgggtatcagccatgaggaaaatgaagtgccttgtggatcatttgtgtgccgaggagatccaacaccgggttggtgagctttggaaggcagccttgactgagtttgtgtctgtactatttacttgatgaatgtcctaataatttcagagtgatgagtaaaagctgggcctagtagctggttctgaacttctagtattccaccgtttagaattatctaaatgtaagcatattttatttgtgctgttactcgca

SEQ ID NO: 149595 - DNA, 433 bp, Zea Mays
gaggcagtcgacaccagcaacgtcgagcgcagcgaggatcggtgggtgatggaggcgagcctacgagtggttcctccggagatgcaccagtccttgggggtgaaggtgacgacaaaggaggcctaggacaacctgaacacgatgcggaccggctcaaggctggtgaagtgggccaagatacaacaactgaggcaggagtatgagctcctagagttcaaggaaggggaaggattgatgaaggcgcaagctggagctgggagacgccagatgcaggggaagatgggcgcgactagagctccttcaccatcaattacactctgtattgaggtgcaggggaaaagttgtgggtgacgaagctgcggacgcaggggaagtagaggagagtggtggcgggtagctagagcaagaagctttagttgagccgtcgtcgccg

SEQ ID NO: 149596 - DNA, 904 bp, Zea Mays
tgtcctcgagcctgaaaagaccttgactgctctaaaatctgatggtgctcgcccaaagcgccttcgcccggccagtcatccaactactcctgccgaggggaagaagaagaaaaagaggaggcttcggcgagtgtcatgtttgaatcaggatgccggcccttctgctcctgctgctgaggaagtgccagtggaactttttactggagctgatcccaatgggtgtgaccctgctgacgctgaccccaatgggtgtgaccttgatgatgctgatcccaatgggtgcaatccgcccagagctgaccccaatgggtgtgttgtttgtattgttgacgaggatgaggaagaagaggaggaaatccccttaatttggaaaaacagtcggcgctacctggtcagtggggggagtagtgatattccttctttagccttgtctgcactcgttggtctgcaagagttgtccatagcaaattttgatcagcctctcaaggatatggttcctgaagatctgctatccgagccaacagatggtggtatgatggacgtttgcactgacattctggatgtggggttagagttatcccgagcagcgtctcgagccccatcgaccttagagtgcggtcttcacagtcaagaagctggtctaggttgctccactcccatggaggtaactgagaatccttcagccttagaggtggctgttgcagagaacccggtccccaaggatggcaccagcgatgacccaggccccaagggtgttgccggcaatgatccggcccgggtgggtagtgtgagctacaacccagcccccgagggtgctgccggtggtgatccggctccgatgggcaatgcaatctacgacccagcccctgagggtgtccgagtgggctccccttctcatacctcc

SEQ ID NO: 149597 - DNA, 709 bp, Zea Mays
agtgcacatattcaaaataatattacagcatgctaaatttctatgacttcataatttactgtataacaaatacatgggtattcgatgaacttacatggctttggagaatgtgtggtgtgtcctgctcatgatcaccaattgtcctcatgggtatccgttgagttgctccaaccaaacttggatgaactgtgttgttgtcttcaaggattcctagcgccagtaacgcagccgggggagttacatcatgccgaccatctgacctacaaggtaatgtcgatgttgtattctctccacactgcactggtccgctagccgtcgccatggtgtatgccctaaccctcctaggtcaatgaactaaagcggcggctgtgtgtagccctgttttattttttggagttatgctcctggattggccaaaaccgtcctggccaatattcatggtctgttcaaaatatcctgcatgatttgcatgtcccgagatttacgtgtcccgaccaatttacgattacctgcctattctgttacagcaacataaactcctcacccccacgtgcgaccccaccacgaaaccatgatcccagtagacctgctcgccacccacaccacgatatgcatgcgtcagatcgttatgcagttgttatcggcaatttaaacaagcataaatgtccaaccacatcctgctcgcgtcccgacataccaatatgcccat

SEQ ID NO: 149598 - DNA, 792 bp, Zea Mays
cgcggcacttgtcttctcttctctctctgtggctatgcgttggtgacgttgcgggatgtttccaggcagattgccctgcccctaatttgtcaatgacttgattcccatcatctcggccgacctgcaacagctattagttaggctaacaacaaggataataccactacaacaaataatactgacaaaactaatgggaccaaaatttctgaaacatggtagcggtagcgggagaaatagaaactatataatttacaaaaccagaacgaactgtatctgtatatctatctagaaattaggaaggcaccaagtttattcaagtttctacaggtaagaactaatggagtagcagttacattagcatatgatgcaagcacaatgacttggtaaataaataaactaaccaaacaaaaatcgaaacacaagcccgtcggcctagtagaggagtatctaaagcatggcactggtactatactgaaggactactccagtttataacgaagaaatgtgtggatgagagatggtggacggaagcaacaaatcaggacaaggaccctaggtgctccgggctggatcctgctcctgatgctgtggggaggcggaccctccgagcttgcgatggatgaaggccttggcacgctggggctcgatgttggcgtaggagagcctggcggcggcgatgatgagggcggcgccggtagtggcgcgctgcgaacaggtcgccgtgtactcgagccgaaccatgatgccctgcggcgagcaggcgggtgctctgccttccgtaattgggctcgg

SEQ ID NO: 149599 - DNA, 522 bp, Zea Mays
cagcatcaacagagcactgcgccgcatggacaggaggcagccgatgaacaggagcacacagacgtccagccatgcgcgagcagaccggtggaaaggaaggttgctgtcggtaaggctggaggcgacgcggacaagtgtaggaagtatgcccaggtgtatggcaaaggaggcagcggatgatggaacggcagagggcaacccggtgatgaggtgagaggcacttgaagcaccgtcctttaaaggtctccagagcttgaacaccaaacgacttctccaggcggcgtctctgcttctgtgtgcggcgactctccacgagtgtgaaaccatcacgatccaccagaggcttctgaagcctgggctgaaccaaagagcgcagtggggaagaccgacggacaaaccgtccaccatcaccagaggaattctgcacggaggcctgcaaggtcctagcctgggcgccatgggaaactatgtccccagacgtcaccgagactgaggccgagaccgttcccgcgagcaggatat

SEQ ID NO: 149600 - DNA, 578 bp, Zea Mays
gtgctaaaaactgattctgaagcaacagttgacaccggaattggtagcacatcacgagccaagtgtgctaataccgggaatcttgaggaattcaccttccaccatcctaaaatatcaaacttattatcttctggttcagtatcttcatcaaggtatttttcaagttcagatttgttgttgccaccgccatagttgtgttgttttagtttttgtgcaattaaggacttcatccttccgcctttggactgtcttgcttcttgagaatcattggctggtgttgttgcatcaggtggagcataaagtctcctatattcttcaaacaattgtcgaacacatagtttaacagcagcccaaaccttatgtccattttcctcactaaacatctcttcaatcgctagctttgtgtattctgatagtttgtatcttggatccaaagctgcagcaacaaaaatcagcatgttcatattctctttttctttctccttccccttccctctctcattcacatttctaccagtttcgccaagaggttcatgccagtttccccaatacttatcatacttgtctttcattttctg

SEQ ID NO: 149601 - DNA, 433 bp, Zea Mays
gatactcctactacaaatcaaataaacccaccgatatcacgcttgttcgctctactgatgatgctagctttctgcggggaatgtcgtggtcgatcgacgatcatggcaaaaatcaagtcattgggtgcctttcacgtgctggtccccattttgttttcctcttgctgtgacgcatatatgatactaaattccactatctgcagtttgccagttagaaagtgagaattgcatccatgcacactgctgctttcagtaagtcagaaaaggttgtcagcatttagatccatactgatactgctgctcatcactctgccaggaacctcctgcagtagtctgtagtcggtaaagagaaaacaccactttgtctatctactgtgcatagctttatgaagagaatctatcagcaactgaggataagtttatgagtcctatg

SEQ ID NO: 149602 - DNA, 596 bp, Zea Mays
tgatgatgctgtgatctttctccgaccagatagaaatgaccttgtggtgatcaataatatccttgagtgcttcgggcatgcatcggggcttcatacaaaccttgccaagagttccgggggcttcatacaaaccttgccaagagttccggctccccaattcattgcccggctgaggccctggcccttactgcagatgtgctgtcatgtcagattaaggagtttccctgcacttatcttgggctgccactatgtatccatacaccaacaagaatggggtcatgcctcgtattgataaaattgcagatcatctcccgggttggaaggcccccctaatgaataaggctggacaccttgttatggtacggacggttctgactgccaccccaatccatcatttgattgctcttgaccttccaaaatgggtgttaaaagctattgacaaaaggcgtaagggtttcctttggaaagaacaggagcatgccaatgaaagaaattgtctggtgtcatgggcaagggttcagcgtcctttggagtttggtggtctgggcattcacaacctcgaagtacttggctgggccctgagaattcgctggctc

SEQ ID NO: 149603 - DNA, 388 bp, Zea Mays
gggaagaagacgagtctcctgccgttgatcgatggatggacgcgtgggattaaatctacgcataccggttcgatgtttcactctggaccgtcgatcgtggatccgggggctctgatctgataagtggcgtggatagatattaggcgtggatctcggatccatcggcccatgtgttgtaccggttcgtggggatttgagatttaatctgggcccttgatcagtgatcgggcggccaatcttcaccgatacctcttcattctggttcttttgcataagagcccctcgtctttcacaaaattgaacctgccatccatatagggttaacctgagtctggggagatttgcgagcttgcccctgatctcttgagaaataatgcgcccattccag

SEQ ID NO: 149604 - DNA, 714 bp, Zea Mays
ctcgagcatcacgccattttgatttaatacattgtgacttatggacatctcctgttgctagcgtctctggttacaagtattatttagttatcatcgatgattgctctcactatttttggacatttcccttgcgcctcaaatccgacacctttcccaccctctctcatttttttgcatacgtccacacccaattccacaccaccatcaaagccgtgcagtgcgacaacggtcgagagtttgacaacctctcctcccgttccttcttcctcactcacggtgtttcacttcgcatgtcgtgtccctacacatcccagcagaatggcaaagccgagcgctctatccggaccattaacaatgtcatccgcacccttctcttccactccagcatgcccccacactattgggtcgaagctctccataccgccacctatctcatcaaccgacaccccaccaaaactctcaatttctccacccctcaccatgcgctttttggctccccacccacctatgaccaccttcgggtttttggatgtcgttgttatcctaacctctctgccatcgccgccaacaaacttatgcctcgctccatgttgtgcgcgtttcttggttactctcctgaacacaaaggttatcgatgcctcgacatggcctccaatcgggtcatcatttctcgccatgtcaccttcgacgagacctcctttccgttcgccgaac

SEQ ID NO: 149605 - DNA, 545 bp, Zea Mays
agcacctatcgacatcgtcatgatttttgttgtatggcggatcgatgccttgtcgtcgtagtctcggggaattttcggaaatgtgctggtgttttactgatggggtgaatgtatttgtgatgtcttagaataactgcgtgtcgtacgagtatccaaaaatggtgaaagttggtgtatgttggtaattagaaaatagtcacgacgttagccaatagccaagcttatgccgaaatttaaaaaatgggcaatttgagttgaaattatgcttatctaggcatgtggattaataataataattggaagaacagtcgttcaaattggtcattccaattaagaatggttttgcatgtggggtgaggtggtgacatgcccaagtagtcactgcttccctatgtttataagccgagtcaatacccattaggcgttcattaatttttacgtcgcgcatagtgtatggttgtactcgtgacaaggaggtgtaggtcttactcaattagaagtttggttggatgtgataagtagattggaagtgtgggtttgttgag

SEQ ID NO: 149606 - DNA, 514 bp, Zea Mays
ggggagaagagcctgcgcttgcaggcgaggcggcggtgccagtccaggaggtggaagagcacgccgcccgtgcagccgccgccggggaacggcggcggcttcttctccactatagcgaggctgctcatccctctccctccgcctcacctgctggctgctgccaagtcggccgtgccgctcggggccccgtgctttaaccgacccgtgcttcgatccgggagctggaaggtgtagtagctggcacgcaacggcaggtagctccccttcccctgctcctcctccacctcggcacgcgccgcgaggaggtacacggaggcaagagagtcgagcgtgggcgtggcctccctccctcccttgtcagtgagcgcgaagagaaggtggcgacccggtctgttcaaggaggcaggggtagcagatgacaggtggggctctgtctagtgggcgcagctgtcagactgtcagtgagagtagcgcaggagtcgctcggaagagaagaacgcgtcgcgaggaagcc

SEQ ID NO: 149607 - DNA, 483 bp, Zea Mays
cgtctcctaaaatgctactttttaggtataggagattgtataggaatacctggtggagatgctgtcttttctgcaatttgtcgattacaacgcatgccacattgttgttggataatttgaaacttgatatgtagttcaatctattaatcaactatttagtaggactgtggacttcggtatcatcaatgccaagttgaagctctatgtccaatttaacatatacttgattccagaaaagttgcaattctagaatagtgctaagtatctcaagtttgactaaatttatacaagtatgattagatttgtgatgaaatatattttcatggtatacctatctgaagtcaagcatgctgatactgctttctacaaacttagtcagacttaagataattttttaaccacacctagaactggtaccgagtcagtatatgtttttccccacatagaaacatatattgatgttaccgaccacactgtacatga

SEQ ID NO: 149608 - DNA, 303 bp, Zea Mays
atccgaagtccggcgggcatggattaggatattaccttctactcgcgggttattcgttggatatccgaaatcgactcatagtgtattttttggcctagcccatattacatagcaaagaacaaattctaacaccataaacccacgcctaacgaacctaatttcacactgttggctgccccttatagcattgatggcttcctaagctgtgcctcgaggccccttccaagtctcatagactgtagcaccactgacggctagcccttccaagctctagtgctcctaactgaggctcgcatgtccata

SEQ ID NO: 149609 - DNA, 377 bp, Zea Mays
gccgccacgaaatgcaaatttcggtgagagattcccagtgctcaattaccccatcccaagtcctggagtgttaatcgcgattacagtgacgagatgaacggattgcgaggactcataccagcgccaaagctctagaaacgattgtccacaacggcgttgtttctccccctctctgattctctccaatggcggcgaggttctcgggaggtctctgtgagcacggtcgacgggacccttcccccatatataaccacgcggatgcttgccgagtcagccggagccaggaaacctggggagggttgttgcgtcggccatccccgtggatctcgacgaggaggtttcggcatacctaccgcgcttgcgacagacactggcaa

SEQ ID NO: 149610 - DNA, 895 bp, Zea Mays
ctttggggccttgtaactttcaaaccataagggttttgccctaggtcaccacatcaattctgtatatatatcaaaggagaacaactttgtttaagggatgcaacactgttgttatgaaaaatgtgaagaaaaatacacccaaagatgggctgtcaggctgtctggagactgaacctggtctgacagtatgatgaggcaatctttgaacccagatttgaacatgatccgacgcaagtttgggcatgatccccatagcaagattgcagttggttaattgggctataactttgatgcagtgggatgatggggttgtcacatgaaatgaggagaaaagtggctctaattttgctctgacagactaactgcatggtaatcaccatggtacagtgaatgggggggattaggtttagagaaccttgccgcggacaagccgcgcgcagattcgtgcctttgccaccgtgattcgcgttcggatcgactggataacgctcggggttgagtaagtatcatcgccattaaactactccggccaccgtaccgagcttgccacggtcgcttcggatgagctcgccggtgacagccgcttcacggccttgcgccacgtacctgggcacattcaccgcatcgccgtgactcacttcggccgtctgatcatcgctagtgagggctgccacggtagatgccacgaataccttgcgccagtgacctcccactcatccggaccgcccgcgcgtcatcgtccgattcaatggccaccactcttgcctactataaattgaggccaccatgagctccgtagggtagtcaagcaccaagccacccaaactgtgccctccatcgatcatcagagagcttcaattttggatttcccccaagaacactcaagaacaccgtg

SEQ ID NO: 149611 - DNA, 457 bp, Zea Mays
tgtctgaggcctcttctatgttggataattgtgcctggaccgccattcaaaagcacttgagtggtagatgatccaagaagctcacatatgatgtctctccatatcagaccaaaacccatctgtttcattacttcaatcaagaaaggacaagaaacagaatcaaatgcttttattatatctaacttgaagagcaatctggccttattctgtgaatgcagtaatctggatttctgttggaccaacatgaaattgtcttgaataaatcttcctttgatgacagcactttggtttggggagactatctcattcagtttttttgccagtcggttggcaagcaccttggtgactaatttggcaaaactatgtaccaaactaatgggtctgaaatccttgacctgatcagccccctccactttagggatcatagtaatatatgctgaattgagtctgctcatat

SEQ ID NO: 149612 - DNA, 846 bp, Zea Mays
tcccattggctgacaagaagataaaatctccattcgtttatgtaagttggccttagttcactgacatgaacctcccctccaggcctgatattctttgatgactttataacatttcagagaagttgattcacttgatcaggattttccggtgatcattattgcttcagaagtgcagcaaactctgcatggctattggtagctgttgtaagagttttttgccactatagcactcatttaagcatgccactatagcactcatttaagcaggcttctgtcttctagtatccacaaaatcatatacatacacaagctttaggaacatccacgattgtttccctcgaaggaaagaagcccatctcgtgccccagtaggcagtacgccagtaccaacccccaaagaagaacataaagcgccttaggaacatccacgattcccatgggagtacgtaaccagtgagaatagaaggcattgcatcccaaagacagcagtgacccagaaactaacctccataactcaccaagcaccactacattgaaatgaagtttcccaagtggccaagtgcgtgcaaggtgcaactagagtaagacgcgctacagatggcactttgaaaggacatagtataataggttagcagtatgccaataactatcactgtcaatagagtgtagtagagcggctgtctaggcagaacaatagcccgagcctcgtaggcgacgagcgctccgaacacctctgggacggcattgtgccggcaggtgggggtgttaaaacaggagaccggagagcacgctggaggtaagaaactggagcgaagacgcatcgtgtatcgcagaggccggagacggg

SEQ ID NO: 149613 - DNA, 997 bp, Zea Mays
agcagaaggcagaaggggaaggtaggcgacctcaccagtgtagcgtagagacctacccatgccaaggcgtcaactatgatggaggaagaaagccgacgatgaagtcctcgaacaggtggtggtggtgtcgcggtccgtgccgactgcggctccacaacgaaggacttgctctgatgatcctcacaccgagcacgagtctgcagcgagaccacacatgtgccggcgacgtccagagcaacaccacgaggatggaatggctacatagagaaaatttaccggtggcggctccaggtagttccttgcctctctctcctatctctcgcgttccccggcagctgcacgcataccactatcgtggggcacagcaacatgacgcataggagcatccccatctgtggctcgacgtgaagtccaccccgccggccagacgctctgccccaggtcacaatcgcggccgggatttctcctaggattcgagtcaccaatggcggcctccctttcactatcttcacggtgcttctggtggtgcgtgcagagatggacaaagggaaggttggctatggtttgttgcggtcttatagcggcgaggtggggacgggtttggccacgagccatccccgcttcgtcggcacgcccgccatgctcggagggcggttgactggaactgagctgatgaagtccgcgcgtgaggaagatccataggcgaactgacgcatgggaccgtgtggtagaggcacgagggtggaagaacgtgaccgcacaaaggggctgccagaccgggcccgccaaccagttgcgcaacgacgccgggcgcacgcgcacccgccgcacgagccggttcattcctgggccgaatatagcggatcacgacccaagaagcttgaattcgttttctttttttctttttctgttccttttctctgtatttagaaattcaactttgaatttgaactatgttgaatttgtactcattttcaaatgtatcttttgatcaaac

SEQ ID NO: 149614 - DNA, 745 bp, Zea Mays
gtctctcccccctcggtcagggagacagccggatgttcgcgctccaagttggattgagtctcccacagacttagagatagcagaagccaaagttatacttgctgaaatttgcttgttgaaggagagaggtatgaccgctgaagctgtggttgcagactttgtttttaagaatattcagccactgaaggatagggcatacccagcttatttgtatagtggtgtcaccgattcaacccgggttaccaacaagaggattcctgctgtggatttggtgagtcgactggaaatgatccttagaggcaaggtatcgaacattggtgttgttgttgcatattctgcctggaatctgccgccttccaagttctttttcgattttgtgtcaaatcctcctgctagtgacagtggtttgggtcttagagtgcgaccctctcttgaagaagttgaggttctggttgcttcacttggagatcttcccaatgatgagaggcaagttcactttgagatgcctatgagtctgggtgatgcagagataagcgctatgatggacatgttggctggggattcttctgactcggtccctgctgaaacaatggttgttgcaactatcccagagcctgagaaaaccgtggatactcgaaggcctgaaggtactcgcccaaaacatcttcgccaagtcagtcatccagctgctcctaccgaggggagaaaaagaaaaagagacggcttcagcgagtgtcgtgcttgg

SEQ ID NO: 149615 - DNA, 610 bp, Zea Mays
gtttcaccttcgagacaaaagcaacatgagatacctagttaagcgaacactggtagggaagtgtctcatgttgaggatacctggttgttatataattgatggaaaaacgcctgggaagactaaaaattgctgaagcgcagatgctcctccagaacatgcacgcttgtgttcgaaaaatgggttcatatcctgtcgtcgatcccagttaactacttccggtatatatttatacaactagtgtactacaatactagtatatctcaagtacctggcttatccatccttttatatatatatgcagacatagtcacacacaatgtgtcagtcagtactcagtaatctccaaaaccatatgaatatcactaaaatatctgcaggttcatctggctacggaccctcctaatgaacatgtcacaagcctcatcgatgtcatcctccacgttgaactccagaccttcaacctccctattggtccttatgatctcgatgaccgatggctcctcgggattatcaagggcatgaagctcatcgtgatcgtcctcaccgttgtaatacttgtcatcgtcaaagagggaattgatccagtctgggtagccatgacaataatctt

SEQ ID NO: 149616 - DNA, 317 bp, Zea Mays
ccgggaggacgatggccaagggcagactgtgacggagtaggtggacgggtcggggtgaaagccgccagtgcagtcgaggaggacgaggaccccgggccggagatcgatgcagcctgagcacccagagtgatctcctccagggcgaggtcgtcgcagacctggagaaaggtagggaagggcctctggcgcatgatcaatgaccgtaggtgggtgtagcgatcgctgaggccgcggaggatgttgaggacgaggacgcggtcctccacggggcagcccagatcaccaagtgagtctgccatggtcttcatcttgcggca

SEQ ID NO: 149617 - DNA, 497 bp, Zea Mays
acctaaacggctaaaccgtaaatacagacaggagactgtggcggcggcggcgctcctctgcgcatgtgctcggcgtctcggctatcggcttctccagttctccttccggcgcaccgtgattcaggcgttcagcgccacgctgccgtcgctcgcccccaggcctggcgtcgctcaccgagtctcagcgttcagcgccacgctgccgtcgctcgccgagtctcaggtgtcaggtaggctcgccgcttgcccgcttgtcctcgccttagttgctcgttgactggtgtggaccgtggacgtgtgcctttgtggttgctcgttaatgtttattacactgctcagttacgtcattacgtggaatgctcaataggcaataacattttcattgttaaattgttctgtgattttgtcctatttcacataaatttattacactgctcagttacgtggagttaaattgttaaattgcactgctccagtcaggaaccgaaccaccgatt

SEQ ID NO: 149618 - DNA, 565 bp, Zea Mays
agtaaatcgaaaatataatgcatgaaatcctttatggcatataagacatcacaaattgggattctattagtaagcagcaaaagaccttaccaaataatttaagaccggaaatctcagtcatacattgctcaaccagatgttagcacattgctctctttgtctatgaatgacatgaagcaaactatgagataaaaggacatgtaatgctagcaacacgaagttgcgagtataccgagaggttattctgagaaatttttcactatgttggtgtgaaaaccatagtgtgttcccgtcgaaccactttactcgttctatctagaacctctatgcttgtgtcgcatacatctctcagaattgtaaatacttatagtcactgaattgactcgagatagtcctttgacaagtttggtatacactgtaagctaaatggtaaaggtcggtcctaaatggacacatacctggggtttatgttgtcgaactacactaaattctaccctttggcatgcttaccattatctacctccgatctaccagaagtgagaagagtagacaaataactataaaa

SEQ ID NO: 149619 - DNA, 703 bp, Zea Mays
gaggaagtcccacctgcaacaacagtagagcaaggcaccgaaaccatatcgtcgtcgaggagaaagtcatgggaggcgtgggaggaggcgtctgaggtggctgcaaaggggaaagcggactcgtcgaatatgacatggcgagagatgatgcgacgtgtcgataggtcgaggcagcggtaacctttgtgtgaggggggatatccgaggaagacgcatgccgtggagcgaggggcgagcttatgtttggaggttgcttgcatgttggggtaatagaggcacccaaaaacacgcagatggttataggttggcggctgattatgcagatgagtgtatggaatgtcatgctgaatggaggaggatgggcgcctattatggaggtagcaggccgtcaggagtccctcggcccaatatgcggggggtagggaggcatggagaagcatggtgcgaatggaattgttgagtgtgcggatgatgcgttcggctttgccattttggggtgatgtgtagggacaggaggagcggaggtgagtgccttgagcagcgaagaatttggtggtggcagtgttgatgaattcagccccgttgtcagcttgaaaacattttatgggagagctgaattgtgttttggcgagcgcaacaagctcaactaagtgttggtggacttctgatttttttgaagcggaaaaacccaacaatagtggct

SEQ ID NO: 149620 - DNA, 285 bp, Zea Mays
ttgagatcccttataagtagtcttgaccggaatgaaatgagcaactttggtcagtccatccacaataacccatatagaatcgtatgctttcgaggtgcgaggcaatccagtaatgaagtccataccaatctcttcccacttccacttgggtatctttagtgggtgcagtagtccagctggcctctggtgtttagccttaactctttgacacacatcgcacatagccacatgtgcagccacatctctcttcaatccataccaccagtatttctgcttcaaatcctg

SEQ ID NO: 149621 - DNA, 410 bp, Zea Mays
atagacaatattaatacaagatccttgcaactggaatgggttaaaaaggagtaaaaatggaatttctatgaattaaataagttctagatatatttttatacataaaatccatttcctaaattattttcttgaatttcctaagcttttggactgggcgcatgaataatcaaaaggtcaggggctactctgcaaaagttcccagacacaggctaacccccaaatggacggcgggttgatatatgtaaaaggcagtgtctcatttataaaacgtacccgcgaaggggtattggtggataggagtcgtcagattcaaaaccgatggttctgattagatccaccgctgccccaaccggtaagcgcagacaattgaccgatccgagatctacggcccagaaagtgccacgcccccg

SEQ ID NO: 149622 - DNA, 2911 bp, Zea Mays
cttatctcctacgtcatgtactctatataaaccgtctaagagctcaatgcaagacatcatcttttgttacagcatatacctttgtctaacagtgtaaatagcagaaagggaaacttattttagcatatactgaagatattcaaattatttacagcagtaccttgaacaagtcgcatgcgtgctataaacgaattagcacggctttgaaacacttctctttcttgctgccaccatctctccttttcaacatcagtcccataagactcggctgatttccccatcaaaaggttccaaaccctcgtcgtctcaaaatccaagtcaaccttagcacgaggccgctgctttttgactaactgcaagggcctctcattgggaaccatcaccacaccaccatatgggacaagagcatttgaaggaccacttgttccctcaaaagaaataacagctggtgtggtcagagataaatgcatctcagttctctgcacctgttcagtattcaaatcaagatgcttcaactttgatgcaactccttgaacgtaatccatatagggtcctgttgatgtgttggttgatctcccttctgctacttcacaatgagtatcaacgttgattcttttattgtccagggtctgagatgaaaagtttggagaactctcttctgatattttgcatccattagttgcgccataaaaagtgcttccagctgaaagcctgtccttcagctcatcatttggttgaattacactggaacagtgcggtcttgccttttctgaacgttttttggtcaaaaacttaatgcaagaacttctatgcagcgcatccatgcatggctgtggcagtcttgttgatgcttgtagagtattattcttaagatccatagtataaaagggggaatttctgcggagtcgggcagatcgcttcttttttattgcacccgcttggaaaaatgcgaacatctcagctgcagccctcaagacaacagagtcccgtgtgccaggtagcgaaccattgctatggtgtgtggggttttccacttccgacaccttacccatctgacttcttgtgggatccatttgaggtaaagacctagctgaggaaacaagaccatcagcatcagaatagtttaattccaagtcctttttgttcccttctattgtggggtttaccaccctttcatcagcaaacaaactgcacttacttttgccatcaggtttgcaagttcttcccacattatcttcttcccttgccagttccgtactaaatgatgcagaagttgcagccgaaacttcttgtgtaggttttagcatatctggcaaatgtatgtactcatctaaaaatttgttcagtctgcgactcatgtcgaaagctaattctcctggtgaattctccataccttcttgcatcacacgcccagtctgcacttctgactctgagtagaaagaactttgagcatggccaggtttctcatagttgtgatggtgtatgttggccattgacgaatggccgccctgcaatccttgttctttggattcaaattgcagacttcgtcgaactgatgatgttctgcttctagctgcaactcctgttgctccagagattgattgatcgctaacaggaccagagcaattctccagagagctgaggtttcttttcttccggacataacttctcttgaccttttggttcggagattttccatctggtgttgaatcaggtttctgcactttggctggcttattctctctgattacctttggtctgtgttttttcttccgagccttcattttcagcgctggggtttcctcattcctgaacatttcggttttctcggcacttgctagctgcgtctcaatttgagtcagtgttttctccttgggtacagttggtgctgacaatggtgtgtgttcactcttgttgatttgtgtcttgagccttttttgcatagattggtacatatgaatgttgtcatcagtggtactttctgcaagacaggtggttgattcttgagaatgttgcactcgtgtttcccaggtagctgcaggaaccactgattccaaatcattgtagctgtcacggaaaattgctgttgctaattgtggaagttgggtacttccttttccattttcagtcttggatgcttcatcatgtaaacaattcatccgatgctctgaattgtatttatctgcagtggctagctgtgaagaattcgttgtcatatcacctgcaacgatgctaggtgttcttccatgtgacaagaaattactcccagcaagccgaatggaagctccttcggaatacatagagcaacagaaaacaaagagcgttcagtgcattcataatgtatgataatatggccacacaaaacagaaccagcatgacacctagaaagaacaacaagatgagaggacatgcttaccctctgaaacatcaggtaaggcagtggccgacggcgacaactgcggcctcgaaccccttctagtgagttccctatggaacactatgatattaataggcacctgcgtgcaacccccaggcatattccaggatggctggatgcagggcacatcaccttgttcagttgcacggtttatcggactcaacagagcagattgtggagcaggaacctcctgaatagtattcaggacagacgtggagcatggggagaataagacttgcgaggcgatcgagccgctgttgcctgctgcagctggagctgcaacattgtgacagcctaagttgggcaccccagcactcaggaacagaggcctgttggcaggggtgtttggatcgcctctccccgcagacatggcttcaccgggtcttcgggagttgcgttcagtttcgagcttgagggtgaatccttgcttcttccagggcctgcaggaagaacatcatcagaatacggataaat

SEQ ID NO: 149623 - DNA, 870 bp, Zea Mays
agggccatcccagaaagctgatgagcagccaattgaacacgctgattttcggggcatccgatggcttccagtttcctcttgatcatgcgcagccagtcatctgcatcgaggggattgctagaccccgcgaacgtgggaggcttgagtctcagaaattctcccatcctgtcctgtggtctcccaccacctgggtgctggttttccagacttctagtgaggatttcaatgagttgggactgattggctagaacttgggccaaatctagtggtagtttcggaggtgtggggaggtgggtctcactctcttctccgccagcttctccttctgctcttaggggaaaacctgctccaatcccggaggcggtaggcatggttttatccgaagccatctgccaggggaaaagagttactactatgcacatgccaaaattttttttcaaccagttactttattcattacacaagttcattacagcatacaactaccataagttcattacacgcgagtgctatctagggtactcccgaactccttctctaaagtgtccccaaattccttgagaaggtcatcaaggctggctagggacatttcctcggtgtcggacgagtttcttattctggtagggggtagggctggaggggcttcttccttctgctcagtctgacatccttggcttttggtcttcttgcggatttttcttgcgggggcgagcttcttcagcttcttgtcgtaatccatcttcagagtgcggtaggcctcacgggtgtcggtttcctcgccttctgctatctcgaggctctcttgaagggacaccttttcccttgtaagttccctgacttgttgctccaggctttccacccgggagttta

SEQ ID NO: 149624 - DNA, 358 bp, Zea Mays
caccttcagggattaaaatcaagtatccaacacacgagatgaatctcatactatactctaggacgttgtttcattttatgttgtattatttgcctttcttcctaaagaccttcgtccttcgcgctgttaaaccaaaggacgaagattttaatatttaccttatattgccttgatttttggtaccttaaagggattgaaatcaagtaccaacagtacgccacgctctaatcgatcaacagctaccagagattagagcagagaagatcttatatgcatggagaggggaacgaaccgacaaaaaccaacaggagcaggggacagaggaattactaatagggtgtcgtgtggtgggacgggg

SEQ ID NO: 149625 - DNA, 563 bp, Zea Mays
ctgaacctgtaactctatgcacaagttgctaaaactaataaagtatgactttgcttcctttttaacacaagacagattggaaaggtttgataatggtggtcatgtgcatgtccataaaataaatgttgattgccgcgtagaatatcaagtacatgatggaaaacaaggcccagtatagagttgctcaaaacttcaaacttggtaacacgctccaatcatttgaccaagttgcaaaacattgggatgaaaaatgttttcttgttcaaaaagtgaaccacaatgtaacaatttcaaatgaatgggaacagcatcaaaccattgtgcttgcgtagctgctttgttgcacacatggcaaagcactgaacagccctctgtacaaataagtaccattaaggttaaatgccaaattttggagaaagagcacatgcatgcgcaataatttcctttatggtcaatgtttcaggattccctgtttgtctatatgctagattaattagtttgtccatgtgctatctgcttgctatattaattagtttaccaattgagaacattgttcttcatat

SEQ ID NO: 149626 - DNA, 652 bp, Zea Mays
gcagtactggcgagtacgctggtcaaggggaggaggacggagcggtgccaaacttccctgtgcggcgaggagacggtgatgaagagacggcggtgaaggacggcggtgaagggacggcgggcgtcgtatgcggggaggatgacgaagcggctgaccggtgggaccggtctgccagtggaagcgggcgcgtaagagagagcggctggcaggtggggctggcttgtcagtgagagagcggcggagtgcagagcgggctggcgcgcgcggaggcgggccgggagtgggccgaaaggaggagtgcgggcgcggaagggggggaggagccgcgggtttgggccgagagccggcccagcagggggaggaggaggcttttctctttttctttttactctctaattcctatttctctttttacatctttttcttttgaacaaataatttaatagataatctaggtgctgaaaaataaaatctaagtgaggtgctcatattcaaacaatgtgtatgcatatgttggaaagaatctaagggagttttgggatagataataagaaggggggttagattagggtttcaaacctgggttagaaattgggatgctacaaacctaccccacttaaaggaatctcgccctcgagattcagacggggct

SEQ ID NO: 149627 - DNA, 416 bp, Zea Mays
ctgctgctactgcaggctgggaatagcgggatcgggatcgggtgatgctctgctctgctctgctctgatgtgatgtgaagagatggtgtttcgtctgcctgcagtgagctgctgcgctatatatgctatgcaaaggtgatgggtcgaggtagaagaggggaggagacagtgttgcgtgctgcttccacactctaatgggattgctgcctgcgcatttatagggagatccaaggggctaccttgcttaggtgtgcaatggaatctgtccccttttcggtgcaatttttattttctgtccatgctaaggtttgttatatatatacactgcacttggcatatgacgcgattgcttgtcctaatttgctcttagcgcagcgcgtgcatttccaacgggttctgaaaaatgaaagtttgat

SEQ ID NO: 149628 - DNA, 456 bp, Zea Mays
gcggggttggtggcaagtgtggcgcaacaggcagcggagaagagggtgcagttggcgcagctgttggagaagacgaggagggaggtggcggagttgaggctggtgcagatggcgagggatttggagtcgtcagaatcaggagacagcgaaaggatgagaggaggtgtccaacaacctgcaccacaaccggcaccacctggaccaaaccgaaggtatgaaggtcctctgccagaccgaaatcgagatatggggggcgtagggtggaagagttggagttcaccaatttaccaatacctagaatgccattcccaaagtttggaggggggaacccaggatttggattgcgcaatgtgtagattacttcacgctgtatcgggttcctgaaccggcatgggtggtgtcagcttcactgaatatggaaggaaatgccaaaaggtggtttcagatttcaaaatt

SEQ ID NO: 149629 - DNA, 278 bp, Zea Mays
gtgtgtgtttgctgtcacagaaatgctctggttggccatcctgagtggaaaagaaaaagatgggacgctgcgggagcatcctcaactacacaataaacacacctatccctcagtcatctcatttgccttgttcacttctagttcagaacatctagcattcatctccctttctatgcctctcgcttggttatacagtaacttgatcctgatagtgggcagttccatcccctgcaaagaatcgtcatgggaagcctcgcaagctttagggaacaatggct

SEQ ID NO: 149630 - DNA, 743 bp, Zea Mays
atatgagaaattgagagctgagaatttgatgaggaataaccaaaagttgcaaagacttggtgtcactacactagcgtcaatacttaaccatacttctgcaaagagcaaggttgacactcgtgaaaaatctggatctttgtatgaggtccaggaaggtgaaggttctgataatgaggaagtcaatcaggtattatttttcgtagcatgtagatatttcttcaatctaattttcttgtacatttcagcatacaaatttgctaatttggttcatattttttccacaagtgtgcaacaaaccggagaaacagattaaagagggtctaggcacctgcgcaacaagatgaacctacaagatttactaggcagaatacaagggatttggctttaactttcagtccagaactgcaacaagtcgaaaccttaggactctctactatcacatccacccctcaacaggaccagaacaactctagtgatcaaggcaagtgattgtatgtaatttgtgcaatgcaatctattttcattttgttttcatacaatgattagttacatactctggtaatcggtgaacataataacgagtgtggctcaaaactggagataacttttccatttttaacaaaccattaagcatcacactttgcaattttagagaagcttcttaaccagatactacctaatcgaatccatgctacaatacttcctagcatcgtaatatagtaataaaactgtggaagctaaat

SEQ ID NO: 149631 - DNA, 332 bp, Zea Mays
caaacactttgggtatcaccaaaattacccttcccacaaactgctatagaaaatcggcatcctctcccttagtctcataaacgaggaaaccacagtgtataaacataatgcatgataaggataaacatacataacattattaactcagctagcaaagaaacgatcaccataatgaccagaacagattaaaccacttgcacacattatttaaaagagaccaacatcattgacccgaagtccctaattaatgtcattactaagcagtggcaaagttatttaaaagtgtaggtgaacgtgctgctacttccctcctttcccaaacaagattcaag

SEQ ID NO: 149632 - DNA, 745 bp, Zea Mays
aacaaccacactgaaaatacaaatttaggtactgatatgttggatcaagcagcactaatcattaagaagtgtcatggacttccccttgcaatatctgcaataggtggattcctagctaataagcccaaaactgctactgaatggaggaaggtcaatgatcgcatcagggctgaattggacatgaatccggaacttaggagtataaagacagttcttatgaggagctatgacggtttaccataccatctcaagtccgctttcttatacatgtccatatttccagaagattacaaaattaagcggaaacgtttgataaggagatggattgctgagggttactgtagaggaatgcatggcatgagtgcagaagaagttggtgacagatattttgaggagcttttggataggagcatgatcctgctgttggaagaggacactaagtatggtggggccattgattcttgtcagcttcatgatatcatccgtgaaatatgcatactaaaggctagggaggaaaaccttgcttttactctggaggaagggtgttgtttgagcgacgcacaaggtacaatacgtcatcttgctataggcagcaactggaaaagagataaagatgtactggtggagagcatgctggacttgtcgcatgtgcggtcattgaccgtgtttggagaatggaaaccattttttatttctgataagatgaggtttctcagagtgctcgatttgggtgatacatttgggt

SEQ ID NO: 149633 - DNA, 452 bp, Zea Mays
cctttttctagattttataattctctggactgggccacaaattccagagaaatcaggggcaacggcgcaaaagtatctaagactcaacactacctgtcgatggactgcgggttggtttcaactatttacagggactcatacgcaaaaccaacagccgaaagggtatcggcccatcggagccgaccgatgaagaaaggatggcccagattagattcatcccgcggataactgatgcgagactagcacggtcagattccgatcctacggtccaaatggatccagcgcctatacgagtctcaaccgatcgatccaagatcaacggctaacctagccccggccgaaacgttacggccagccaatctccaccgcatagactctatccaatggctaaaacgcgtcccaccaaggatctaatctcagcccttcacggagatctaacggtcctgcgccct

SEQ ID NO: 149634 - DNA, 382 bp, Zea Mays
tgctcggggaaaccatccccacttctcaacctgggctcataattcttgcttaatttcttgaattcagcgtttcttggtggtgcttgattattgccgtctgatattgcacagtcctgagtttctagttgcttcgtcagcaaccggtagaggtgtcttttttgcgggatgatagaattgagcttgattgcggtggagcccttttggatttgcagccgattcttgaatcttttcttttctctctctccttggatgcctgcatgaaagccatgctcttaaagcacggttccttttcttttcttcctatcagtttactcatttcttttctggaggtggctcttgtgttggattactcccttaattactctcttatatactttatatg

SEQ ID NO: 149635 - DNA, 498 bp, Zea Mays
gcattctttgtttcttgggcaagccaagtttctgctcgggccaatcgatgtgcttggcctccctcgtctttcttcggcttcggtgacagtaagagcgctaggccactctcttgtttggctcgttccacgatacccatgagcagcagctcagtccttgggtctttactagtctgaataatgatggttccttcctcctcatctctccagcgtccactcatgaccaacgccttcagcttctaccgaggtggccgggcatgcaatggcgtcaatgaagcgctgcagcggatattgatgtatatccatgtttttgtctttgtattttctttagataagaaacatcagtactcatgcatgctgcagcaacgaactaaataatgtacagaagcacaggattctcactccgagatcaatttcctctgcttttgctaaggcaattgtttttccttgtattgctccagcctccaggtcccaacgtctactagtgctcgcggcttggaa

SEQ ID NO: 149636 - DNA, 592 bp, Zea Mays
gcaatatatctcgacgccatagcgagataccagatacgctgaactctttataatacgttggcctctacctgacctagctcggcgccattgaccacggacgcgcagagctgcatgactcgatccagcggcgagaatgtcggatttgaaaactgcgcggccccaccacgtatcatcggatgcaactgcctgcatgcctagcggtcacatccttcatgttttttggttggtaaaaaatgatggacgttgatggcagcactgtgatcccatcgcatgcatagcacgtcacagtgatttattccagtacgagcagttgaccaagcaaaaaaacgcgtccatcatttgcaaaaaaaaaaaaaaacgtgtccatcatttcaggtgaaagtctgaactaatccacagtttgctccaacaaatttaccactgcaaaagtgcaaacaagtaattcgactggattactggaacgtggacgtgccccatcagaaaaacaaagtcaacatccacgtaaccttttcgtttggctgccttcttgtcagttccagatccgatgaacaaaaattttgcaatcagagaagagatttttcatatcatcagc

SEQ ID NO: 149637 - DNA, 841 bp, Zea Mays
ggtgccggaaaactaggtttttacacaactacgatagtcccaggaaatcaagctatcgtagattatgagattccagttgccagcacatccataccaaaatttaagcgtgatagttcgcttacatcccctaacacttggggtaaatatcatcggctcgcaggccggcacacacacatgagtactcctagcatctagaagctcagagtagcagccgtggtcttcggtcctccacaggcatccttgagcgtagacccgcaacctagtcataccacccgtcgttggcgaagtcgtactccggctcgtcctctcctaaacctgccgataagcgtgcaggccacgttaacatcctcgagcatttagccagcggtggaatctagtagtttaggtggctgttggtttcctagcaggcatgcgacattatctaaaatactgctgtagtatattagatacaaatcaggaggtccggtctcacaccactggttcctggcttaactcaccacacacacacatcaccaaatctcccattcccaatccacactcgcacacacctcaccatcatcaccagcacatcacccaacacatgcttagactaaatctgtgacaagggcagctccctcccgtccttgtctcaatggcctaaagccggatcctagatcagaggtagaaaagaagattcccatactaagacgagaaaactaagtccctaggattgtccttggccatggacacggctatacgttagatttacactctgcagaggttgtacaactgtacccatacgaagcggaggcttggccgagcctcgacacaacaccctccagtaaatcccccgctcacggca

SEQ ID NO: 149638 - DNA, 565 bp, Zea Mays
gtcgatagtagaaattgttttggcttatatagagaggtgatgacatgccaaagtagtcatcgcttcctctatatcttgagtcgggtcaatacacgttatgtgttcatgatttgggaagtaagcgcatgatggtttcgagttagagattagtggtttacgattcgtataaattggtcgatgtacgaaaatacttgtaaatctgtgtatttataaaaatgttgtagtatatgttgtgtctcgggttgcgacgataataggcaagccgacgtgtatgttatttagcggctatgtcgttgctctagttagccaaattgttagatggtttggttaagtgtgtaatcgcaataaattgcttgttgtagtctaaatgtgtatgattatggtcgcgggtaaaaatttgtagtgttcatgtgatgtctaagtgaaaatgcaaattactatgtgaagagcgcatcgatatatatgtatgccggatttgatgattgtggtgaatgcgttgattaattgtgtatggtagttctagagcgcgaaataacttgtataaaaattagtaagtctacttgtt

SEQ ID NO: 149639 - DNA, 294 bp, Zea Mays
tgcaacaccgacatattgatctatcaggcatttgtcgactcgaccgttgtttggatctcttcgggctagtttgggagccagaaaaccggagggggattggaggaactagaatcctgctgtataggacatgcccgacggtgagaacacgaggcagtacattttgccatccatttctagcagtaggttcctcgtcggcaggtgtgagcgtcagctggtgggcgtcgtccaagtaggacacttttgcacgcgcatgcgctcaggtcgtagcacctagcacgtgtccaacagtcatgt

SEQ ID NO: 149640 - DNA, 362 bp, Zea Mays
cctgcatgagttgcaaatgggtcttcatagccgaagtaacataattatcccaatccagttgacaatcaattgggatgactcgtcttatgatatttggtggatgaccaatattaagcactccgtcaaccgcaatgtcatcatcttcatggtaacctagcttttgtttagcctttgtaaacacatcactcaacgagggtctaccatcgaatagtaccggcacgtgtcgcatgtcaatgaacttggcatttccatacggatcttgttccacattgcctccatgatataagctcaaaaaattgtccatctatttcaaacacgaattaaacattcaatataaactatggatggttattgcctaacca

SEQ ID NO: 149641 - DNA, 430 bp, Zea Mays
atagaagcaatttttgagattagtggcataccgcttggattgaaggctaaacagtcacacattaatccttgaagtagtaagagccaaaggtctaagaatcattgcataaattatttacctatcggactcataatttgtattccaaaatacgcctatcaagctcgtaaatattgtgttcagggaatagcatgtaggcaaagataactgtgaattcttgcctcctacaactcttagtaccaggcttaggggcgacttgcagtagcaatggccctgcctctgcactctcatggtccaatgttttcattagacccttctatcaaataaaatcttatgttgtagctcatttggtccaatcttctgtttaatgcaaatgtagttatgcatattcgttcagtgggtctcatgctaactatggtgcccctaccttgca

SEQ ID NO: 149642 - DNA, 555 bp, Zea Mays
tgcatgacaagcttagcaggggagggagatgatatgaagctttggaggtgcttgagcgggttaattcaattcttattaactcaagctatcaatcttacaatgttatatatatcgaatattgacccaaagttattttgagttagtatatctaaaactcatatcatctcgagccagatattgatgttgtaggattatcctatgtggaaaatcaagaaaacctacaacatcgaggaaaaccgaaggatggtaacacttatgtcttcaagtgcaagtatcttcagttatcatttctcttgtgtcttgtgtagtcacatagaaaaaggaagcacttaagaatattgttaagttatgttaccattctttggaagaagttcctctcatatggtagattgcatatttatcatttctatattatgtcaatctacatgctttaaattgtttttactaccttatggcacgatctacattaattatccttttgttgccatgttctagacatagagagagatattccaagttcttaaaaggagagttctctttatgactagaatcatg

SEQ ID NO: 149643 - DNA, 505 bp, Zea Mays
tgggagtagagcgaggacgacgaatgtaagtctgagtaacaagtggtttggaagagtaagactgagatggtgtggaagtggaaggtggtgtgatgggaataagaacatctggggtagaaacagtaggtggtaatactaatgaagtttcagaaatgggaggaaggctcatgaaggaggtagactctgtggaattaaaagaagaatgagtggaagagttgtaaaagaagggtcgattttcattaaagctcacatctcgagaaatacacatgcgacgagaagatgaatcataacaccgatagcctttatgttcagggttgtatccaagaaaaacacactcaacagattgagcagtcaatttagtacgttcacgaggtgataatagtacataacacgtacatccaaaaactcgaaggtggtcatatcgtggaggagttccgaaaaggacttcaccaggtgttttgccagagagtttggatgacggttgtctattgatgaggtaaaccgc

SEQ ID NO: 149644 - DNA, 411 bp, Zea Mays
cctcccagcgtgccttggtgaggccgaggactccggtgcggcctccggtgtggcagaggttatctggcatggacaaggttcactctctggagggcgcgcgcaagacctcggtctggaggcgccttgcttcgtcgcatgatcatgccgcgatggagcctgtcatggatctggagaggcagccgcccttacagcccaagcgaaaaagaagacgttcaaaacgcgggaaaggggctgcggtgttggggaacagtcagtctccccctgctgacatggttcctctcacgtcgaacttgccctcttgtgttctggaactttcaacggacatggcaagagaagaagttgcactccgtcgagcattttttgtctctgttactggtaccagacccgctgttctcggctcggaggtgttgg

SEQ ID NO: 149645 - DNA, 343 bp, Zea Mays
gggaaggtgacggtggcatatgggcaatagatgaatggcagtgtcgttggggcactggtatgcgacatgccataagatgtccgcgcagtggctactgctacgggggaagaagggcggttgctaatgttgcctgcatggttgccacggatcgcgtgagctcatggacgactgctaccaaggactcgagcatgaggggaagtggaggtgccgtggatgaggatgtggcgggtctgggcaccgaagttgtggagatcgggagcgtggcgaaggaggtcggtggctggatggtggtggacggaaggcctgacatatccgataccagattggtaggattagggttacg

SEQ ID NO: 149646 - DNA, 565 bp, Zea Mays
aagccatcttctttatttcgaagtcggaacttacaataaaaatctccttcgtctatagctccaatgtcatagacacccggattcacgcctaacatcatccctcctgacctccctctaggtggcattaggtgccaaagaaaatcaacaccaccacagaaatgtctcaaagtggattccgagaaagatctacgacccgtttccatgagagcaataaagtcgagtctatgttctctagcaagttgggataggtaattatgtttggccaaatcccctagtcctctacaattccaaaaaaatcccttcatttcaaactaatcttggagggtgtaactggctttttggaagggcgattaaccttcccctttaaaatagacctattcgccttctttctacgcggcgccacagtaagctcacaacatcgatctaagccacacaactcagaatcatcgtcccatctatcagtaatatgggataattcatcatctaacacggcctcctcctcatcgtgaaaattattcacactaaagggtaatgtagactttgcggctaccgtgagcctatcaat

SEQ ID NO: 149647 - DNA, 588 bp, Zea Mays
tcaaggactttaagataagttaaattgcaaagtgtgggtggtatgtagcctgctatgttattgtcggatagcttgagatacacagtttggctaagatacaaagtgaagtttaacataacagatgtgaaactgttatttgaataatccaagacttgttcataattgctttccattgtcaacatgttcggaatcgggatttgaccctggattctgttggaactcaaatcaagaaattccaaatgactattagggagaatatatgaagtgagctgcaaatttgtgaatgcgttgtttgaaagattcaaattcctaaggctatggtcccatgtgtgccatatccaatttggaatagtcccaagtatcttgttgcaagaaaggtccaatatagtgatatgatcaaggtgtaccaagaaactaggaatttcagttaagccacatgatttcagatctaattcagtgagctttggtaataaccggaatgtggagttacttctttttccctccttgatatacagcttgttgttggataaactcatttgagcgagcttccgtagtttccaaaaatcatcaaggtctacaaaacctgtt

SEQ ID NO: 149648 - DNA, 315 bp, Zea Mays
gcttggcacttgggtaattgtttttcaggactgtaaagcattgacttgagcctgagagggtgtctggtttaattaaacaaatgaggggcgtacatggccggcggtgaaaaatagttacatacatacacatacggttttgcatctcagatctgtgcctggtaatttgaataatgcgctttgggcccggacccataagccccttgagatctgtgcttttgcaagcacgtttagtttgctctatctatctagttcctctcggataaaaccgtacatgatgcatgcatgcagtagtagtaggttgtctgggcatctcac

SEQ ID NO: 149649 - DNA, 434 bp, Zea Mays
taaactatgaaacttggaagtgtatggaaacatttaagcacccgactgcaaccaaggcacatcaatgcagcaatactgcagtgctaatgtagtttgatccttaaagagtggaacaaaggaggcaactatcataataaaaaatcaagataaattaagtataagtgcacagtgagttatcagctatcactgattaatgagactagatggcgttgaagcacctcgagcatggattttcctccaatcagatcatgcaagccagaagcttctgttaccctaatatcctggtcagcaagttgaatggttgggtctggctctgcagaacaaggagatgctgttaatccataaaatatacacatcagcacatgcctagggatgttgctaacaatgcatgatgtaaatacattgttcggaacaggctttgttgttgtagcaaa

SEQ ID NO: 149650 - DNA, 578 bp, Zea Mays
cctccgtggccaggaccgtcctcgcaacaatcggtggtaagccgtccctactctactcgccctagatcccctctgcgtataacttcgatcaggggtcgaattagtcagtaggtgtgtggagtaccaatttctccggcgagctttgtcgcggcccggtgggcggcgccgccgtgcgagcctgccctgttgaagcgatgatcgggctccgtcggatcaatggcggacggccacgattagaagttagataccggttcggtggatcgggtccgtgccgcgcgatcgtgatccaacgcgctaggttgctccgtagtattttaaatcttgaccgcgcgtgctcgatccgacagctcggagcttacgtcggttgatctgggttcccatctaatcctgaccgcagatcaagatccaacggtcgagatcttttcataccccttcggtatggcattttagcatatgaaaccctaggtttccttggattagaacccgccatcctcatgaactgtcccctgagtctgtggaatatttacgcctgagcccctgcgctttctaggatttgaggcccagtcccgagatcagat

SEQ ID NO: 149651 - DNA, 282 bp, Zea Mays
ggcagataagctcgccggtgacagccgtcgcacggcttggcgccacgtgccctggcacctccaccggatcgctgtaaccctctgtacatcgccagagtgacagccacggtgaccggacactaagcacttgcgccagtaaccttcccttcctccgaccgccgcgcgtccttcttcaaattcgcggccaccgctcactaggcctataaattgagcccgccgtcagctccgcaagatcatcacgcaccacaccacccagtattgcctccaatcttgcacccatga

SEQ ID NO: 149652 - DNA, 404 bp, Zea Mays
ctgggccattctctgtctgcgtcctggatgtcgacatccccatgggtggtgttgctcactgttcagtgtaacaacaccatagggcacctcaagtcttgttgtacaaagattttcttttatctctatataaggctgcttgcattcctggagagaaagacatgctcttcttcctgccacctcctgctgaagggcttgagcataggtgacattgctattaatcaaggtatgtgaagtacagcttcaacgcttgctcttcatgtccaagctatattagccattatacatgcatcctgcagcccagaaaagagagaaaattaggagcatccattctgccgcaagaaacgttgtgaatgagtctttcatgtgtggcactgatgccaacaagaagactcttaataggcaaa

SEQ ID NO: 149653 - DNA, 542 bp, Zea Mays
gttgatggacctataattggctgaaccatgctttagctaaagtctatttaacaaagggagcatacataatacaaaccaccaatttcctgcaaccatatccagaaaaaaacactttaaagttcaaggttaactgtcttaagcaaggatttcatctgatacatgtgttgcattattcacccttttagtgctctttaacatgtgtgcacatgacttaggagttttagctaatttatgttcagctgcatttattgtcacacattttttgtggaaaacttgaacctagacaaaatctgcatcgctgcttaattagttgatttattccctcaggtttctgttcatttcctctgaaatatgttttgggatggacctcggccagaagtgctagcaacaaaagagacaaacaagcaacccttttttgactttggaatttcatgaattaggttcatgaatgaacacgccatgaaatgcatattttccattatccacactgtcatgttcattcgcttgtttagatagaaaggtctacatgttcattcaactgg

SEQ ID NO: 149654 - DNA, 538 bp, Zea Mays
ccgatttagaggtgcatctatcctatctgctaggatttctttctctactgacagcgagtggcatatatattgaggagtgggtcagagtatttcatgctacagtatggatagacccgaatcatcagtggatgaggtttcgcttcgagagagaggatgtcacattgcatgccagctagatacgctagctatttggattcccagagtcgttgactcggctccatagtctatgctatggtacctcagatcctcctcgtcaccctaacggtggagttgcaccagccactgctcacatcgcggccctgtttagacctcctttcacagatgggtcgcgacgctctccagccgacttcaccgctgcaataaagtgtctgtatgagcttatgcgatggacactactacctaggatgggttatagagaggccaccacacacattcagttatggatacttggtgccttgatctcacacactgagtttgacgtggatgactttcttatctgtgagatcgaggacaccgttttggatggtcttcgttctcg

SEQ ID NO: 149655 - DNA, 275 bp, Zea Mays
aaagtagcacaaaagtagcacaagatatacaaggacaccgtggcgaactaaacaataaaatggaagacaccgtaacaaccatatgttcactttagttatctacacattatcgacgttcagcattaacaccattaaaaagacgacaaacattttgtatatttacgcaacacaactacgacatcacaagtacacgcatttaccacgttcactttactcatccattagttacttaatcatcaagttagttaagtacctaagtttgctacgactgatat

SEQ ID NO: 149656 - DNA, 822 bp, Zea Mays
cagccaaagcagtggagtttatccaggacataatattcaagtttgggataccgaatagcatcatcactgacctgggatccaacttcaccagctctgagttcttcgatttctgcaagcaaagaagtatccagatcaagtacgcatcagtggcgcacccaagagccaatggccaggtggaaagagccaacagaatgatactggaagcgctcagaaagaatgtattcgataagagtgaaaagctcgtagaaaaatggatcagagaactgccatacatggtatggagcctgcgaactcaacctagtcgagctctgcatggaaataccccgttcttcatggtttatgggtcagaagcagtgctgtctgcttatctaatcttcggggtgccgaggttgactttcgaaaacatagctaaggcagaagcaactaggctgaaagacattgatgtgctggaggaagaatgattgaacatagtaattcagttggccaggtaccagcagaccttgaggcgctaccacgacaaagttgtgtggcaccgatcctttgcagtgggagacatggtccttcgccgaattctaacgggggagggaagacacaagctgtcaccaccatgggaaggaccgttcatcgtatcagaggtcacacggccgagatcatatcggcttactaagatggacgacacagaagtggggaactcgtggaacatagaacacctcaaaaagttctacccttagcaaggcctcaaaaaactcttgaaggaatattgtactctgtaatccgaagacttcatcatcaataaagctttcgttttccaaaggcattcag

SEQ ID NO: 149657 - DNA, 349 bp, Zea Mays
aagaagaatgggtggaagagttgtaaaagaagggtcagttttcattaaagctcacatctcgagaaatacgcatgcgacaagaagatgaatcataacatcgataacctttatgttcagggctgtatccaagaaaaacacactcaacagattgagcagtcaatttagtacgttcacgaggtgataatagtacataacacgtacatccaaaaactcgaaggtggtcatatcgtggaggagtgccaaaaagaacttcaccaggtgttttgccagagagtttggatgacggttgtctattgatgagataaaccgcaatagaaactgcaccccaaaaatgtgaagggacaaaaga

SEQ ID NO: 149658 - DNA, 417 bp, Zea Mays
atttaccttatttttgaactcgaaccttaaacagacacacgtcagtctagacaggaaaatatattaattatgaatacttaatatcaactctaattatctcggatttttaaatatgaaagcaaatcggctaaccgttgttttggtttcgtttagttgaacctaaacgaattttaccgttatccgataaatttgaatagcaccggacacgatattttggaaggtcgataaagtctaaatttcacgaaatattttggacagtccagatagttggagacagatgctatacggcaaacagctacacactctattttctgaatcacaaaacggaaaatctgaggtttacaattctgactaaatttcgtttagatagttttcgtgactattttgggcaacacgtaaacgaactggatatcggat

SEQ ID NO: 149659 - DNA, 498 bp, Zea Mays
cgcacgcattaaaaaaagaagaaacaaaatttgaaattaaaaaaacaaagattggacgtacgcacccaagtctcctaaccactcacggcccccacgccagacttcctctctcacattttttacaagccgatctcacatccttttcttttctcttgcattttcttgtatttgctgcagccgggtcctacctctcattaactgatgctctttcgtctttcctcaaccttgttctcgcacgcacgatggacggaagacgttgccgccaccgcttcttcggagttaggaaacgccgccgcaaccggctgtttcttcgacatctcgtctccacactccagtgcgccacgactacaagcattgcccatctctcttcgcctctctccatcacaccacgccattactcgcgaccgtttcttccccacacaattatatcgccattaatggtcttcatgcaccttcaatctggcgcccctccgcgtccctccacctccctggctattt

SEQ ID NO: 149660 - DNA, 441 bp, Zea Mays
gggagatctcgtcccccgccgaattctaatgggggagggacggcataaattgtcacctctatgggaaggaccattcatagtagcagaagtcactcggccgggaccatatcgtctcactcagatggacgacacagaaattgggaactcatggaacatagaacacctcaggaagttttacccctagctacatcccagaagctctcgaaacgacgatgtactctgtaaatcgagaaaaatatcatcaataaaaaggtttcaaaggcactcagattgttcactgtcaattggcacgcttacttaactcggggtgaccactatgccctactaacggagcaatcagcttaagtcggcaatgacttaaggcggtgcgacatgctcacgcttactaaactcggggtgaccactatgccctactagcggagcagtcggttcaagttggca

SEQ ID NO: 149661 - DNA, 363 bp, Zea Mays
ggagaattggagtcgtgttattgagacgttggagggagtgagtagcaggttgaaggatgtggagagggtgcagcaacaaatcatgatgcagactgaattagtggcatcagttgctgaacaggcggcgaaggagagaaatgatttgggtcgtaaattggaggagactggaagggtagtagcacagatgaggttggaacagttggggaaggaattaggtgaatcttctgggggttctggttcaccatcattggaggtgcagcatagtgggtctctgtatacgagaggtcgtcatgagaaggaggtggagggcggtagagctttcagaggtgattcagggaggatgcaaggggaagacagacagtc

SEQ ID NO: 149662 - DNA, 1915 bp, Zea Mays
catgagaaatctgtatatcactcaagttatcacataacagagtgtaggagtgtcacaaaagacaccaagatcagccaatagccaacgcagctaaataatttcagcagtggtagtagcaagagtccgaagttcggcttcagcactagaacgagatatggttgcttgcttcttggatttccaggcaataggagaggatccaagaagaatacaataacctacagtagaacaacggtcaacaagatcacttgcccaagtggcatcagaatacgcatgtagctgaagtgggctatcagaagcatagagtaaacatctggatcttgtcccgcgtaaatatcgaagcacacgaagcaaatgaccataatgaactgaggttggtgtggatacaaattggctcaacatatgaacatcatgagcaatattaggtctggtcgaagttttaaatgaatatccattggtgttgcaactgtgcgtgtatcagtaattccagagcgatcaagaagatcttgtatatacttggaccgagacaaataaaagccttttggagtttgatgaacttcaatgcctaagaaataactaagtggacccaaatcagacatctgaaattccttactaagatgctgcttgacatgagaaatatgttctgagttgtcacctgtaatcagcacatcatccacataatagaagtaaagtgcgtccttttggagagacatgaacaaacaatgtaggatcatgttcactagaagaaaaacctgcagccgtgatgacagagatgaatcgctcaaaccaagcacgaggagcttgtttcacccatacaatgcgcgatggagacgacaaacgtgccctgagggagtatcaaccctcagaggagggtgcatataaacttcttcatgtagatcaccattgagaaaaacatttttgacatccatctgggagatagtccaagaagatgaggctgcaactgcaatcaaggttcgaacaatagtcatatgcgcaacaggtgcaaaagtctcatcataatcaagttcttgagtctgttggaaaccacgagccacatgacgagctttatacctcaatggaaccatctgataggaacaacatgcgagggtaaaggaacgatatcccatgtaccagtgcgttcaagagcagccaattcatcaatcatagctagttgccactcaagaattccagaagcttcttgataagtagtgggttcaacaattgccacaccagctcgtggaaaaccatagcgatctggaggttcaatggtaccacgatcacgaagacgatatccctgactaaaaacatcattagactcattgttagtacaataatcgggtacaagattagtatcaggaccagccgtaggaatagagcgagaaccacgaatgtaggtttggatgataggtggtttggaagagtaagaagaagatcacgtggaggtggaaggtggtgttatgggaatgagaacatcagatgtggatgtagaaaatgatggttcagatgcaggaatggaaggaagacacatgaaataagtagattctgtgggataatatgaggagtgagtagactggttgtgaaagaagggacgattttcattgaaactcacatctctagaaattcgaatacggcgagtagatggattataacaacgatagcctttgtgttcaggtctgtatccaagaaatacacaccctacaacaaggttatattaagcgctaggcgttaggccactgcttagtgcctagagaggttaagcatagattaatcgtgcttaagcgtttataggaatataatatatatatatagttgcatagaaaaacagttttagctaggctcagatgaagacatcttatacaaagcatgtgcatgtactaattaagctttcaagtcaaagcatccgtcttaaacatagaac

SEQ ID NO: 149663 - DNA, 333 bp, Zea Mays
tacaaggtacaaagtggaccaaaacaagggcgagctcacggtggccaaaaacaaaaaatacacaggcatccattaggaacacaaggacaaaatagccactaagctagatatccaggaagggagcagttaggagtgaaatgcccttagctccagctatcttccaaagtcttctctcctctctagcttggatcaaaacatcaacaatattgggagactctgcataaaaaacacaatcatttctatgcttccaaagcacccaagctccaaggatgataagcgagttgagtccttttctaacttgacccacagcagcctcatcagcaactccaccat

SEQ ID NO: 149664 - DNA, 811 bp, Zea Mays
ttaattttgactactactgactgactgctgctacaccgcacgcgacgaccattactacaatgcaacaaagctagctgcagcagcctgcagccatggatggttggacatgcatctactaataactcggccaacgaactactactatcaagaaacaaatgacaaaaaaaaattccccttatacacccagaataaataataaataaaagaagggaacaagatgcggcaaataggtaaaagggaaatgcacatcggtgtgactgtgatgagccaccagagacgtcttcttctccggccgtatgtagcagcttcgtctccggcggtaggctaagccactgacatgatcgagatatggatcagctagctaggtagctcgatgagatgccaaatcaacccccccccccccccccccccccccccaatatcagatgatgagcagccggctgaaaaggcacgcgcgctttgtaccacccaatgaccatgcagtacttgcttcgccgctcactgctagctagctagtcacaagctgatcttgatgcttcagcctctcgtgcttccctggcctccaagatcctgcgagaatgtggcatatatatacattgttgtcaactctcaactgcatgccgttccattgattgtgaggagaaaggacattgaattcaaatacttgtgtgagaaatatgtgcaatctggcgctagctctttactgaagaagctcagctccccagttagcacggagaaatcttggatattggatgcagcaatattgcgagtacatactctatggctctatatgcccagagttgcagttgca

SEQ ID NO: 149665 - DNA, 406 bp, Zea Mays
catgattttgacaggcatgaactcggagccttaaataaactaattggcaatcatgaaaaacctcaaaatttaaatgagcacacgagaatcttcagaatgaaataggcacataaaatagacagagaacaggagtgtatgccttggatttctgaaacagatactagaagatttctatggtttttactcctactagtgctagtttccatccctgagatgttttgttattattagagaactgcttacgaagccagttgacgaaatctcgtaacattactgtgggcatctttggaagcgaatagcgtgattggttcacagtatttgtgatgagaatattacttctttgatacattgtaagatcagttacaagagtgccaacacgtcaactgaatctccatgtgtgttcttt

SEQ ID NO: 149666 - DNA, 617 bp, Zea Mays
caggtaggtagcaagctttcctcacgagaaacggaatccctccctcctggcacgccgcctggacccggttagcggaatcgctcgtgtagccgcagcagcagttgtcgattggagtcattggacaatggctagctataaaaaggctaacacatcatcacatagtaaccctcccaaagctgactgcaaaagatggcatcctccatctatggcaattaaacaaacacgtagcagcagcttttatatactatactcctagtagtatatctatctctatctacgaaaacgtaccagcagcgaccactgctccgctccgagtccgagcacgtaaatttcacgcgaaaaaggcgaaaccgcctactttccctcaagagtcaagatctactactagttgccactacctcactccctccatgtgcctacgaggctacgaggcaccggcgcgtcaccggatcgccttcgggtttccttgcatatcaaactgattagtgattaccctgaccccagtggcaccgctgcaaccaaccgcgccgccagcggacccgtccttttgcatgtactactactagtactgtactctgccggcccgacccggcccgtgcagcggccgccgcgcgcgg

SEQ ID NO: 149667 - DNA, 426 bp, Zea Mays
acaacacctacaaatctaacctgatctccctcgctaaaacacagtttgcccatgcagtaaaggtgcactcagctacaggaattgtgttgtttaatctggctagctcttgctgttttgccttccatgcgttatgagcagatagtgttatgttcttttggctatgcctcccctgtctagtgacaggagcatgcttgtatggcctagcagtaacagtagatggtatggccagtatggcactgcaatagtagtagttggtagaatcttctacatcttatcttgctatatcaagtaaagagaggcaggctgcaccctttagggtgtgtttggttcaagagtgtgttggagtagagccactccattccaattccaggagcggagccgttccgctctgtgtttggtattgtagaacggagcggctctattttt

SEQ ID NO: 149668 - DNA, 626 bp, Zea Mays
gcgaagaagtctgtcatcttgagtgccctaaagatagcgtagaacatgtttcatctccattagatggggctcttgcaaatcatgcatgtgaagacaaaactgctgaacaacgtaagcaaagttgggcctagtgaacgtcatgtactaaagggtgcccgcgagactccaaaattgtgtggcatccaccataggagggttgaagttggcggtgaacttggcctaaagatccacatgtgtggtgtagtgcttgcaatctgtgattccccgcgctcaagaatgtcacacgtgtagagacactgatgcaggaagagctcatcggatcattgttccaagaaagcggtgaagagatctcatgtcctcattgcaaattccaactacagagctgagatggtgcactgcaaaagctcaatgctagaagctatgagaacaatatcatcaacctatagcaacaagtatatcctctcggtgcctcggtggaagatgaacaacaatgtgtgtacaatcgttgatttgaccaccagactatcgtagtccactcaagccgctgggtgaagccccaaacaacctaacgagccttgtagcgatctagggactcgttactcgttagcatgaaacttatgcttgaa

SEQ ID NO: 149669 - DNA, 397 bp, Zea Mays
ctttagcgtaaacagagtaaaagtcgcgagccctcgttccagaaaaagcggttttaggcccatttatcacgtggtcaaccatatcttccttagtcaacacatgtttacactactccattctcctgtttatacacaatagcgatttagcgtaactacttcatccgacccaagttacagaaatacaggattaggcccactaccccacttcccacgcggtcaaacatttctataccctaacccccgcgcggtcaaccttcctggccgactcgccgcgattcttcaggcgtcgccagggcgattcgtcttcatcctctcccgacagcgcgattcaccgtcctccgccgccgcacgccctcaactttaatcgtcgccgctgttgacagtatcgtcgagccgc

SEQ ID NO: 149670 - DNA, 433 bp, Zea Mays
agagcacccaaataaagcgtaatcaagatcttgcacacagtgccgctaccttgcttcatagtccgcatcagtagatgggtaggctatcggtaggatctttccttggcaccatgacgccatctacgctcactttctcactgggcctcactatgcaacgttgcaacgcggcaatggctgtcgcttgctgccgctgccatgtaccgccgcatcatcgcctgccctcgctaaccctcacctgttgtcacctcattgtcaccgtttcacgttggattcattgacacgtgacacgccacactgacgcaccgaagcggcttctctgccccagcacaccgccaccgacggcctacctctttgccctctccaactctcatttaggatgaccaaaaaggtttttttatattcatgtcattttagaacacttctcgtattatca

SEQ ID NO: 149671 - DNA, 285 bp, Zea Mays
agccaacctgttcgacgagtacacgaacaggtcgttgttgacgatgctaatcaggaagatggacatggagagccaggtgttcgtcgtgcgggagcccacgacggtgaccatcttagccctggtggcttggaagtactctagctgcttcgacaatgggatgcactcaccagcttttctatacgcatgcatatagcatcctgggttgatgttcggcttaattcgtccgtaagaatactactataaaagataaaaagacgagacttatagtggagttaagaatgccag

SEQ ID NO: 149672 - DNA, 441 bp, Zea Mays
cgacgaggcacgggacgacctcaacccagcatctggcacggctgcacaagtttctgttgcatcagcgtctgcagtttccaacaacaagttctcagggaccatatcctctagagcttgatcaaaattggccatggacagttcttgcagaccaataagagcagacaaggcaggagaaggaaccccactactaccaccgctagcaacgaactgccgactgtttttccgagttaatggagtttcgttctcttcctcttcatcttccacagcgacagcacaaacagccccctcattagggtcagcagcaggcggagcacacccattgggatcaatgtcagctaggccagttgcagtcatttcttcagcagcaggaactaaggtgctggcatcctcatcaaagctagacactcgccggaggcgtcttcttttcttcctctgctcatc

SEQ ID NO: 149673 - DNA, 1350 bp, Zea Mays
ctcccccgggtataagaaccagttgccgcacccatctggctatcgtgcgtcgtcaccttcgaccgggtgtagaaagccgagagggaggagagagatcgccgttggcaatgatacatggatgcgtcgctaaagcggccttcatacttggtccagggagtaacccagatcccatggaagatgtacgcatgaagctatgggcgcacttactgttcggcgggctcggaatttttctccggtgccaaccaccctccgtggacccgcgccacgacgagagcaagcacctctatggcataatcgacggtaagcaccccaccaagcctttttgcctatgcgtccacttcaggtaccaccggtttgcgtgtggattagtgctctgagacatgagatggttgaacgccggcgagacaccatcgggagcacgcgcgcgccaccgtgaatcctggtgggttgggggagaagatgtgtgtgccgtcaatgagactcgccgtcgatcgggttctagtcgaccacgattagaacgggagcataccccttcgtagtttgatcccaaaccgtagatctcagatccttgggctctggttgtgcacacattagatcagccatggcattttgcataagagcccctatgattttatttattcaacccgtcgtctaggttccgtacggatcagttaatacgggtccctggtttttgtaaactgaccctatactttccaaaaacctacaccgccaacgaaagggaaatatattattgggccatttctacttcgttttggtgattaaatgctcaacacattatatttatactgacatcatcttacatgagcaatgatcataggtacataaaagcaaattgagcttgaaatagggcataatacaaatctatatggtaccaagtgaaaagggtaagctccggacacttagtcaattattttgggtactaatcatatttttctaagtgctagggactttacgaagtcaagccaaaaggagcaaaaaagattctaaatagaaaagagaaagttggactactatgtgtagcaccggacggtccgatgccacccaccggacagtccggtgtgcatcggacagttcgatgcacggtccgaccaaatggctgctctggagaaaaatcagcaagcgtaggctataaatcatcagaaagtccgcacggagcgcgggacaatccaatgtgccagccgaccaatgactagtagacacgtcggcctgggaccaacgatcacttggagcaccggacaatctggttttctggtaccacccaccggacggtgtggtgcccctcagaacgaggtcaccacaacgtggagtaggcattggccgaaccacggg

SEQ ID NO: 149674 - DNA, 729 bp, Zea Mays
cgcgtggagcgaggggcaagcttatgaggagcagtggaagcgagattggggtagtaagcgcacccgaagacacgaagatggtcgtaagagggatggatgccgaagagagcgaagtaaggggtggggtgggcaaccgccttggtggggagacggttgagaaggtaggtggcagtggcgagggcctcagcccagtaacgagcgggaagggaagcctggaagagtagagagcgcacgacatcgttcgtcgtgcgaatcagcccggccgttctggggagacgtgtaggggcaagacatgcggagatggacgccacgagagaggaagaagtcacgggacgcatggttatagaactcgcgcccgttgtcacactggacgctccggatggtgcaactaaactgtgtggagacccaagcgaagaagtgagacagggtgggataagtgtcggacttttgacgtaaaggaaaagtccacagataatgcgagaagtcatcaagaatgagtaaataatacttatagccagaaatgctgattacaggagatgtccatacatcacagtgtatcagatcaaaagtgcctgttgctctagaggaggagatggggaagggaagcctaacatggcgacctaactgacaagcatgacagaggtgctcaaaagatcccctacaacctgaaccagaggtgctgctggagagcttggacatcacatcacgaccggggtgaccgagacaacg

SEQ ID NO: 149675 - DNA, 500 bp, Zea Mays
gtgaggtgcaagataatcagtacagtttggataccccgagtccacaagatagaattctccttgaggtggatgtggaaatttatttccatacttctcaattgcatctttgaaaactgtcacgtcatgaactgaacccagccaactagccacaacaaaagtaaacctcatatcaaaagcacatatagccaacacattttgagaagtgtacccatgtcttccagtatgttgaactactttgcttgtcggtaccacaacagggatatgtgtgccataaattgccccaatgtaattgtctgaggtatggtgcaaatctaggtaattgcagcctttgatagacacttataaacttaggatctaccggtctaatgatatctactaccagtttgctcacattgttgagaactttgtcgaatttcctactgcatctttcaagtgatctagtaaatcgatcttcatcttgtcttactgattgaggagcaccacaaatccataaaaacaga

SEQ ID NO: 149676 - DNA, 283 bp, Zea Mays
aatagcagagcaaccagtgtgggagggagtttaccttgatgcccctgagtactaggaatagaaccagcatgtcactctcatgtgtttatgtgacatgtgcatgtcaattacctcctcgatcatcacctcaaagaggtctagcaatgtcttcatcactaaggcaacctacatgcactttttatggatggcgtggaggaacttatcgatgagtttcttcttactgatgtcatgtcactgtactttgtcatatgttgcattaggctggagagacagagagaaaaat

SEQ ID NO: 149677 - DNA, 284 bp, Zea Mays
tgacaactatttgtggactaacagttcttagagaaataataatgcaggttggaccacagagaacagaaaatcttggagacttataagcattggttgtggatcaagtgaaggcaaaggtataacataggtttttgtttttgccggtctccaggagtttagataagacatttgaccggattagtaggctagatggccatactattaagaggggtcaatgactttggtctgtgtaaaacttagtgcctcatagagcatcaagtggttgcatttgcatgaggtctaac

SEQ ID NO: 149678 - DNA, 516 bp, Zea Mays
cgcgtgggcagggccacgcggcggagctcatgcctatttgccgctgtgatacttgccggtggagttgcccttaccgggggtgttccttgtgcgtacgacgttgggcggacacagctctagcaccacgcgaagaagaccgtgtagggctgccatagtgtgaagttgttcgtccctgtgccgaaccacggtatgcctccattatttcctcgccgttaccccctctgatgttttagctttcatggcgggaaggcaggccaggtccgccgtcgcggtgcttggctagctgtgggtgtgcgtcgcgaggaggaagacgctagataagccctggatcataggatggacggctagcttaggtatggggcatctgttcggcggggatccgatccagacggttgaacttagatcctagggccaggtatgcgtaccggttcactctatacgacatctaatcagggccctcggaatgagatccgatggccagaatccatccatactctcagccgcgatagatttaca

SEQ ID NO: 149679 - DNA, 391 bp, Zea Mays
acatgcagcactagtcaggagatagatttggggctgggaatcgccggtgaccacctccggtggggagcgcggccgtggagtcgaccgccgccgtgcttggtcttgtcggagggaagggacgaatcggtggccgttaatcaggacacgaacgactccgatttgatctagtgtaccccttcatgtaaacgtgctggataccgtcgatcgggattcatacggctaggattagtttcgtggtaccccttcgcgctggtttgatccgggccgttcatttgagatcgtgcagttctcggcgatgaataccccttcgctgggacacttttacgtaagagcccctgtctttttctagaataaacccgccatccacaacactgttctctgtgtctaggac

SEQ ID NO: 149680 - DNA, 410 bp, Zea Mays
aagaaaaaccaccaagagagctcgtcgccgagggttaggagagagaaagaatgagggatctccatcgtcgtgtggatagatcatggtcgtcgttgttcgggccccggagagtgatcgagggggtccacgggggcaccttgcacgtagtcgttgccttcttggacggtgagatccaccagagcgcctccaattgctcaccgaagcaacccagctgcggtcgagacgcatctcttcatcagcatgtacttcaacgcgtgcgattcatggtaaggatccttccacctagtttgccatgttcttcttaacatatagcatacttcggattgttgtttcatgcaacgaattcggaaggggctttgcgccgacaacatcgccggagcataggcggcaccgccgaccgggggtgccag

SEQ ID NO: 149681 - DNA, 662 bp, Zea Mays
gcttataacaacatctaccaggctagcatcaagatggcaccatttgaggctttatatggcaggcgttgtatctcccctctatgctgggagactttgggagagagctccctggttggtcctgattgggtttagcagacttctgagaaggttcaggaaattcgtcagaatattttggccgctcagagccgtcagaagagttatgctgatgtgaggaggcgggatttggaatttgcagtgggtgaccaagtccttctcagggtatcacctactaaaggagttgttcggtacggtgtcaccagaaagcttagcccgagatacattggaccattcactatcttggcccgggtgggcaacttggcttatcacttgcaattgtcggactccatggcaggggtacacccggtttttcatgtctctatgttgaggaagttcttgcgggatccgtaccatcagatcgagatggaaccaattgcggtgcagcaggatttgactttggagtgtcgtccggtgcgtatcttggagacctcggagcgtgttttgagatcaatcaagtatgttaaggtcttgtggactaatcagtctgagcgcgaggctacttgggagcttgaggagctgatgcggcagaagtatccggaactttttgttgtgggtgagtattgttg

SEQ ID NO: 149682 - DNA, 565 bp, Zea Mays
agtgaggacggcgggttggttttatgattctgcgggggctcttatgcgaattagcctggccgaaggggtatcgggggagatgggccacccgatcacgattgaacggcccggattagattgtcattaaaacgaagcggtatgcgatcactgcctttggattcgaaatcgacgctctggattcaaaagacctgaaaggattcctatgcctcggatctaaatcggacggcgcatttcctgcacccgaagggatacgttggcttctaatcacgaccgcccattgttagatcgacggacgatgcgtatcccccatcaggacacccgcacacggcggcgccaccatggttccgcggcggcgcacacgccggagtcacccaatcgccgcacaccggagcccaaacctcaatccacatgtcccacgtcgagtatgcgcaaccaggaatcgattgagggggttctcaccgtggttttcgaagccgcaggaccccggcgacgacgcagggggaatccgccaggcacaccaaattccagtgaggaattactcgccgacggagactctggatcgccc

SEQ ID NO: 149683 - DNA, 474 bp, Zea Mays
ttttgagtaaaatttaggtagactgctgcaaacggccttagcggacaggagagtacgttcgttcgttctgtcgtgcaatgatgcaaagggaaaatagagagactcgttagtatcattagcaagaagaaaaattagagactcgctagtatcattagcaagaagaaaaatagagagactcgttagtaccgtctgatccggaccattctgtagtttgtccccatcaatctgtgacgaaggaacaccaacatactgttcgcacgtccccttcagtacgtgctacggtcatcgtcattatttggatgcacaatcctctgccatcgacacctagcagatggcaatagtaacttgccatttgcccatttggtaggccgtacagccatacgtttggcaaatagccagctaaatctatctcatatttcaaatttcactatataattagggcaatctatagcatgaaactgtgtttgacacggc

SEQ ID NO: 149684 - DNA, 327 bp, Zea Mays
tgcaagtgtgtgctggttttcttcgacgacaacctgattttcagcaagtcctgggcagaacatctccagcatgtgaaacaagtattccagctgctacgtgagcacaagctagcactgaaacgctccaaatgctcctttgcagcacattctgtggcatatctcagccatattatttccaatcaaggggtgtccatggatccttccaaggtggatgcagttgaatcttggccgcgtccacaatcgctgcgagctctacgcgggttcctcggcctaactggctattaccgcaagttcattgcaggatatggcgcggtagcagcacctctc

SEQ ID NO: 149685 - DNA, 418 bp, Zea Mays
tatctctcttctttctcctctcgtctccactctccactgcccgctcgatacgggcgggcacgactggtgccaagttgttttcttcgccctccccccttccgcggcgcgttgtagaaagcgagcggggggtagtaggatccatcggtaggtcgtcccatcccgtcgcaccgcccgctacatacgccgcggcgggtaccttgcttccgttcatggcatgtttgtctcggacggtgggttagccatggacgccggaggccgtgcgggcgtgagcggccccgccgcggcgaacggctcgttcggactcgtccgcaccgtggtggggtactccacctcgcccctcttcttctggctcctcaccgtcgcgctcgtcgccgccatccacatcgtctccggctcgtcctccaagcctgccaggtac

SEQ ID NO: 149686 - DNA, 396 bp, Zea Mays
cagggatctcaaagcaaacaacatattactggatgatgaaatgaaccccaggatatctgattttggtatggcaagaattttttatggcaaccagcaacaaggaaacaccaaccgcgttgttggcacatagtgagtgatatctattacattaatgagctttacgatattgttcttgtgcttgaaccaaaataagttgggtcatttcatacagtggttacatgtcgcctgaatatgctctggaaggtgtgttttctgtcaagtctgatgtgtatagcttcggagttttagttctagagattgtgagtggctcgaagatcacctctacgcacatgacagaacattaccccaaccttatagcctgtgtaagtattagtacgaaatactcaaataacggca

SEQ ID NO: 149687 - DNA, 574 bp, Zea Mays
gcataccaccccactggcgcccatccctgtttcgacgcagctgtatgctgcccaacagcaacatcagttgcagcagcaggcgcaggctgcgtatggggcgcaacagcaacaacaggttgcccaaacaccctggaacccgtggcagggtacctgggatcagcagtcgctggcctcttccttcaacacgatgactcttcagcggtcccaatccatcatcgagtggattgctgactctgaggcctccaaccataccaccccggactctggtaacatctcccgtttccgttctccaatttctactattccttcatccatagttgttggaaacgggtctagtctgccggtcacctctataggagatacggtgctttctggccagttttatcttaataatgttcttgttacacctgctatcattaaaaatcttctttctgtccgtcagtttacgactgataataattgttccatggaatttgacccgtttggcctttctgtgaaggatctcaattccagaaacacaatccttaggtgcaacagctctgggcccctgtacaccatcagtcttcctactgcg

SEQ ID NO: 149688 - DNA, 301 bp, Zea Mays
tgaggaattagattcagggagtcatcgatttggcaagggttgagctaattggagaatggtgctcgggatggtcggattcgcagttccgacgatctcgccgccgcgcggtggctttgctctggtggtctgctgctcggggtagacgatggattagagccgcccgtttgatgatgtgtggttctgattagaacacgtgtacccgttgcgcgattcgatcccgaccgatggatcgagaccggatgggttacatcagaacgagcttaatccaatatgggccgtagatctcgtatcctgtggtcat

SEQ ID NO: 149689 - DNA, 903 bp, Zea Mays
gcaacacatttattgttactattcctttctttgctaacttgttgacttctattgtttctatcttgtgttggatctttttgctcacttcattgcttctttaggtagtcaaactatcagaattggatgtgcacacttgttccagtacaagcaagaagaagggacgagaggcttccactacttggatatctcaaaaagttaaggattgtaaaagaggatcctactttgggcgcaaagaagttacaaaaaagattggagagacactacaacattcaattgttactttaaagtttggtctagaaggaagtctacgatggaagatattcatgggatttgggaggagagcttcgaaatgctatggagattcaaagcagcactagaaaattcatgcctaggaagcattgttgagattgattgcgagaagattgatgggcaaatgcatttctttaggatgtttgtggcaattagagcatgcgttgatggatttctaactaggtgcaggccttatcttggggttgattctactcgcttaactgggaaatataaagggtagttagccacacaactacaattgatgggcacaattggatgtatccagttgcatatgggatatttggcaaggagaaaaattccaattgggcatggtttatggcacaactaaaaagagcaattaggaattcccctggattagcaatacacactgacgcttgtaaaggattagcctatgctgtgaacaaggttttcaaaggtgatgtggaacaccgtgagtgttttaggcacataatggctaattttaggaaaaaattcaagggttttgtgctgaagtatatgtggccttgttcatgggcatgtacagatcataggtatgatacactaatggagaaaattgtagcatctagtcctaaa

SEQ ID NO: 149690 - DNA, 303 bp, Zea Mays
gaaggatggaaatcgacatgccttccatcagttttgtacattaattgtatggtatatattgcctattgcattcttcaaattaaatgcaggctatgtaactatatgaacaaggttctaactaggctacctacaattctataaggaaagcttctttgtagcatcctagactgggactaccagttaatagcagaaccatcaaataaattttcttgcacttcattggttcacgactgttaacaaatccatttcgatactgagagacatgcgatgggtactattgtgtttcatacctaactgtcaaat

SEQ ID NO: 149691 - DNA, 406 bp, Zea Mays
ctttgtctgctctcgttggtctgcaagaattgtctctggcaaattttgatcaggctctcgaggatgtggtccctgaagatctgttgtccgagccgacagatggtggtatgatggacgtttgcactgatatgcctgatgttgggttagagttatcctgagcagcgtctcgtgcctcatcgaccttggagcgcggtcttaagagtcaagaggctgatctagattgctccattcccatggaagtggctgaaaatccttcagccttagaggtggctgctgcagagaacctgatccccaaggatggcaccagcgtttacccagcccccgagggtgttgccggtaatgatccggctcgggtgggcagcgcgagctatgacccagcccccgagggtgtccgagcgggttcccc

SEQ ID NO: 149692 - DNA, 400 bp, Zea Mays
cagttcctcgtcgccgccgctcaggggctagctcggtccatcgtcatcaatcgttgagtgcgcagctgcgctcgccgtactccaactcgccagggggactcgccaccatctaagagttccgcgtctggtgttcggggcgcgcggcgaactgctcgtcggatcttcaaggccgcgtctcaccgtgggcagggaatcccactgctccgatctcggtgagaattacttctttagattcactatgttccccgattcgatttgcgctagtcggtcggcgagtgagggtcttgggtcacgggaacgctatcgccggcaatggcctccgccgtggggtctggcggtgaggccgtcgggtcggccggagactgggggcaaggctgttggccgtctgatcttagcggac

SEQ ID NO: 149693 - DNA, 337 bp, Zea Mays
gttctgcgccccgttcctgcgagcgcaagataccagatgccaagggaagggtggttgttcttaccttcgatggaaacaggtcggctgacgacggagcgcggctaggtgcagcgtaagccctccctcgtgctcttctccttcctgcgtgattccgaacgtttggggcaacaatggtggcggcggcacaatcaccacattcgcacacagcaaggcccgatggcgcctacggcttcaccgatgatggacatagcaggataacgatgggccatatatatacccagggaagatggttaattaagattattacggatcctatccacccagaatcgactcgccc

SEQ ID NO: 149694 - DNA, 472 bp, Zea Mays
gacaatcgtcatcctgctgaggcgcttgcaggaactggcacagttcatcaacaacatgtagctgcactgtttctgcacaatgatgtcccttggaaaatggcaacccacacttgtagcatagacccttggccttgcgatatgcaaacaaggaggcaaccttatcatcagcagaagaccctttggttacacccccaggtgatggcacgttctgtctggttgaagtatctgaatgtggaggcaacggcaacgacagcggcctcttgctcgctgactttgaaggaaatggtgcatcaaatcttctagtatcccccttttgtcactcacctcctcctgcaactgagcgagaacaaaggcagtatccaaatcctgaggacgttgaaccataaccacagatctaatatcgtctctaagaccatcaacaaaatgcatgatattataaagaggatcagaattcggacaatacgcacgcaac

SEQ ID NO: 149695 - DNA, 615 bp, Zea Mays
tggattactctgtgctgtttacccacgccggcccaaagacctttgggttgcgcttcctcagccttttggcccgacacggcccatctcctgctgttgcagccaaaccttctttgtcatttgccgcaccgatgactgcttcctccgcttcgctgacattccccctgctaaatccgctggttgtccccaaacagctgcatgcggaaactgctgttgcaagtcctgcgcaaactcccaagtagccaactccacgggcatgtgtgaccactggacaagaatttgttcactggactgccccccacgagccaccgtccgacgctgcaagatcttgacaggcacactgaactgaaattgctcattaggcagcactggagaagacaccaaacctgtacccaaggcacgcttgagctgggatacatgaaatacaggatgaatccgtgacgaagatggtaactataattcgtacgccacggctcccacacgtcgcagcacctgaaatggcccaaaaaacttaaatgccaatttctgatgagcacgaacagcaacagacgactgaacatatggttggagcttaagaaacacccaatcaccactagcaaattcccgttcagaacggcc

SEQ ID NO: 149696 - DNA, 350 bp, Zea Mays
gcaacattgacgagacctcttccagccatgttcggcagaagagctcgaaagttcatgtggctcagtcattacaaaatggcatgacccacgaggatgcaatgcaatttcttaaagaccatgacatcttaggtggtactttaaaattttgtatagccaataagttacttaaagactatcaaaatctgagtacgttctcccgtctggaatcccttgaggaaaggatcagtttcctggaaggaacctggaaattagaatctgatgggtcagtttcctggcagtaacctggaaattagaatctgatccctcttccttaaaggtaagccagtttgtttaggtcttctgtagtcatg

SEQ ID NO: 149697 - DNA, 1411 bp, Zea Mays
agcccaagcacaaggagtgtccacatcctatcaaagcttctgaagagatgccaaaaagaacggacctcaacaaaattcgtttttcccaaccatctctgttgagaactggaactcatagcttgctatgcagtaccacaaaaaaatgcagagcaacaagtaaacaacaaaatcaaacaaatgtacccaaacatgagcatcctctgagtacatgtacatgaaaaaacatgcatcatagagattacagcatggtgaattatatcaaagcacatagaaaaaggtgttccaactctttataccttgagagttctaataagtgatgtatacagtgtgataatatttcaagcaatacattggacttgtgaagcaatcacagcatcagactagccttttgggtcaattcaagtcaatagagcaaatttgtgcaaaaataagtgcgtgagtgcaaaaataaggtgtgctcattttttttaaaaaaaaaagagttacctgttgtctttgttcagctgcttctgaattaagatagttttctgttgatgatgattcaggaggcagttgggaatttagttgctcattctgctgagatgtgtgtagtgacactagtggaacacagctagcacagttttcaaggccatgtggcacctttgataatcttgatccgcaaagaacctaaacagtatgaaacgttaacgatagtaaggataagaaaaaggactccatcacaaagggaaacgttgattgcgatatctcaaaaatctatgcatgattaagtttgttggaacataaagtaaatctgcagttctgcttctctatctccaatctcttctcctgtcgtcgttctctgtcctcctggctcctggtttttttatcaccgacgtggcgtcggcgcaccgcgcacggctcctggtaagttgatcaccggcgcggcttcagtgacaatcgacgtcgtcagttcgacactcgggcactcagccccagttcatcttcctcggcgcacacggcccagttcaccggcgcacggcatgagttcgtcatctggaggtcgtattcagttctatacttcactacttctgtcttctgtgttctgttctgtcaagggccttagtgtctagggtaggcggccctcggctacggagatcgtagccacggtccgttgtcttctccggcgaggttatcccctctgctgtcggcttagttgagagagagagattaggataatgatctttcttaattccaactcaggtctggttacagaaatatataggcccctaggcctaaccacatggagctaactgctccctaattctaggcatgcaaacaacccttaattctaggcatgaaaacaacctttaattctaggcatgcaaacaaacttatctagtttctatccttaattctaggcatgcaaacaaac

SEQ ID NO: 149698 - DNA, 501 bp, Zea Mays
gtttgtggaaagacttcccctccttatataatgaagaaaacttcagctcgttctacatgcatttcttgcttttccactgttcctttgtagtcggtcgatcgattgtatttgtgcttaatgtagtcgttgttctcaaaggtaatgctcaagtaacgacttgcaattgttgtgtcgcattttaattccgcctgcatattcatagagaaaaaatggctgatttactgtcggtgtcttcagaggtaacaaccgaatggtttttggcgacaccggcattttagaggtaacagccgagtcctttcgagccacatctgtgttttagaaataacggtcgagtgattaccggtgacgttagcgttttagaagtaacagccgagttatatcgagccatgtcgacgttttagaaaataacgactgagtgaggactggtgacgtcagcgttttagaaataacagctgagttacatcgagccacgtcggcgttttagaaataacgacccagtga

SEQ ID NO: 149699 - DNA, 2836 bp, Zea Mays
ggccggaagattatgatatatcttcgagttctcagataactctagtcatgtcagtttctcaaatagattctagttctactccgccatagcccttagatatcttttttcccgggcgtttattttaatttctttatttcgaagttgcatcagggatgggtgcttctcacttgcgatgtttgctaaagactaaagtttcttgtttctcattcaaaaggtcgaatttagcgacatcaacataattagcatataggctatagttccatcaatataattagcataggcttgctcatttctataattctatttcgacgggctggaaagggagctttacatccacactagacgatacatactgtctcctgagtatatacaagatgtttttttttaccatgcattgcatgataaagacgcctaggccaatcttggacaatagatgacgcttagatcatacatgacatcacaggagccgtttggtggcagtggcataaaaaaaatactactagaataaaaagatgcactgaaatatctggtgggctgtcggttatcgagcaacttgtcgatttttatcttccaaaggggattccattgcacgctatacctacctgacggaagtaatatatatttcggaaattaattaaaccgtagctcatccaacccttttaaatttacatctgtttgaactctgaagtatgagctcagtatgtataaagtggcagcagtgccttctgcaattaaacctagctgccaaactggctactgtggatagaatataaccgattttaggcgcctaatggacaacccaaaaagtatgacggcttcgatctgaaacagtacatgatcagctggacctgaattttccacacactgttccagtttcacctaaaggtgtcgcctcaaaatgaaaagtattagctgaccatatcgcgacctttttctttacaaggataatatgcctaatcattgctgttctcttagtttatgcatagctttgctttacatcttttgtgcagtacggttagcagctggaaggccatgatcactgtagatagtttatgtagcgctatgctcgcaatcttttcagtgctactagttctgtggagcttttgcttatttgttcctagtcatcagtcagtcctatcctacctgctatgctaggctgctaccggtgctacctttgttcaccctgttcggctgggacctataattacttccatgaacaagaacatatatattctgctcctggcctcaagattcaacaccgaagaacaagtttaaatgctatatattattctattagaagaatactgatcttaatttgttggaataatgaaatgcttaatctgttaccaaatattccaatgtaaagccacctaatctgaaaacctgtaatagtttactgagccttctcctagaatgaccagttgctttcagctgactgtaaggaattcatcgatgtgaccttgcattgcaacagatccctgctacgctgccttccatgaccaagagtggggagctccagtacatgacgacatgtatgctctaaacctgctcagatcagctaattttttttttattattttctgagacgtatgatcagcagtggattgaaaaagttacgatttttagtcctaaaccgcaggaaactgttcgaaatgctgactctgtctggtgcactggctgagatggcatggcctgcgattctcagcaagagggacaccttcaggtaaagcagccacagactcacagtatagtcgtagtcgatattttaactgctcaccaaaacatctcagatgtcctaaaacaaactcaaaagcgattacactgcacagggaagtgttcatgaactttgaccctcagttggtggcaaagctgaacgagaagaagttcttggcgccaagcagccccgctagctccctgctgtcgcaacacaggctgcgcataatcattgaaaacgcacgtgagttgctgaaggtaaggtgatcatgcacgcagcacgccattctatcctatccatctgccccgcacctaaattttgatgagccgaaacattattaccaataatttgcaagtgttaatattgatcgatttctgcaactactacatacgctgctgctgacaggtcatcgacgagttcggatcgttcgacagctactgctggagcttcctgagcaacaagccaacggtcggcagataccggcacacgcgggaggtgccgctgcggacggccaaggccgacgccatcagccaggacctgatgcggcgggggttcctcggcgtcgggccgacggtggtctacgccttcatgcaggccgtcggcatggccaatgaccacctcgttacctgctaccgcttcgaggagtgctgcgacctcgaatcttgcgcggcgcctgagggctacggcggtgacaattgcaagaagccgccggcggcggcgagcgaccaggagttgagcatgctctgtgggctggtgcagtgcgtcgccttggagccatcgagagccgccaccgccactgtgatcagcatctcgtagcagggaatttcagttacctgcatgctatgctggtgactaacgaacgagaacatgtttgtcattttagtgtctgcgagtggtttaatgcttacatgtacagtagctattatcaaccatggatatcattttagtattgccattgtgttgctatttaatacagcatgatttcacacccacaagcaaccaaatagcacaaatgttcgtactataattgtacagaactctctttcactctgaagcaaacaaagagcctccctgtcattcttttttcatagttacataaaacaagaaaaggcaagaaaatgc

SEQ ID NO: 149700 - DNA, 551 bp, Zea Mays
gttgcagctgcctgattcctctcgcattcacccagtctttcatgtttctcagcttaaaaaggctctgggtagtgggttcaatgtttcaccggcattgcctactgatgcttatggtttcagtgtcccttgcaaaattttgaaacgtcgtactgtcatgagagggaacaatgcttgtgatcaagttttggtgcaatggtcgttcatgcgagctgaattggccacttgggaggatgtgcatgaattgaagcaacaatttccaaaggccgctgtttgggggcaatcagcgttttcagcaagggggattgttagcggtactacatcttctgctactgggaccattgtggcgcaacgggttagcagactgaccaagaaatctacaaaggtgtataggccggattgggtgaatgagctgcagctgtgctcgctttgcgaataagtagaacgagagttgcctggtaaagggcatgtaagaattattcactacaacttcttctccaagttctactgctcgtccgccgccactcttcttcctccttccctctgctactcct

SEQ ID NO: 149701 - DNA, 453 bp, Zea Mays
ctcagggtgcgaccttttgtccttcttggacgcctactccggtttccatcaaatccggatgtctagggaggataggaagcatactgcttttgtgacggtggatgggctgtactgttatgttgtaatgccctacgatctaaaaaacgccttgccaacatttgttcgggcgatgagtaagaccttcggggacctgattcgggacaaggtggagatctacgtcgatgacatcatggtcaagactagagaggggtcgactatagtggaagacctgaccctggttttcagcaatctgcgggcaacccacaccaagctaaacccagagaaatgcatcttcggtgtctccgcagggaagttgctggggttcctggtttcataccggggcattgaagctaacccggagaaaatcaaggctattgaggtaatgaggcctcccgcccgtattaaggacgtcca

SEQ ID NO: 149702 - DNA, 781 bp, Zea Mays
tgactggcgtggtagcattctgtttcctcttcctgggcgccatcacgatccttcaagcagcgtggctcaagaacaaaacgcaaaaagatgtgggagctcaggaagctagaaagcgacggaggaaaaataagaactagggttcaacggccaagaaaacattgacaagaatttaggttggcacactgagtcgggcatagaattacaggttgtgtggctcggacgagttttaagcatagcaaagtaaaggggctcggtcagtatctctagaaagctaagactcgtcaaccaggtgctttgggatcaaactgtcaggtaaaaggacagagtgcacaacaacgaaatggcatcgaacaagcttcattcatttataggttgggaatcattacaaaaggaagaagaccaactcattatgggccgaccaattacctccttgattcaacactacattactagtactaatctacattactactaataaactacattactattactaaactacattactacaactactaaactactactaccactacaattatgtactactacttaagccggtggcacattgccaccaacgtcaccgtcaccgtcgtcgcctactttgccgttgtcactgttgccgtcgccaccatcaccattgtcgctgccctcgacgccgtcgttgctgccgccaccacccttgttgctgtcgtccttgctgtcgctactctcctcaaagtttgagaagtcctccacctcctccgtggagacctcctcctccgagtcatctgacccaccg

SEQ ID NO: 149703 - DNA, 489 bp, Zea Mays
atcaacccttggagctagagaatcatggagcggagctgtaccaaacaagcactaaagcctttgattcggtttcttgggcttttattcttgaggtcttatctcaccttggatttggtgttaaatgtcgtaatttggtttcaaatcttctggcaacttcttccactcaagtgccgttgaatggctcccccggaaacttcatcatgcacaggaggggtcttcgtcaaggagaccctctttcacttatgctttttgttttggcgatggacgtccttagtagtctttttaatctgtctgaaagcagaggtcttctgcatgatttaggtgaagtaggtatcagaaacaggctttccttatatgccgatgatgtggtgttgtttgttaggccagttgaagaggatctgtattgtgttaaggtcatattagattgttttggtgcagcttctggtctcatggttaatatgcataaaagttgtgctattcctataagtt

SEQ ID NO: 149704 - DNA, 1120 bp, Zea Mays
acagagtttggcctatgccaaagcccaccaatttcccacgtttgttgtgcccctccgatcgctcctcctgcactccgacgggatactagtggaatttcttcttcacgtcagccaccaccactcctccggcatcttacttaaaatgatggggcccattagtcgatttctttctcataactcaggcaccttgttaaatcctgttcaggctcagctgccactatttgtttcgtttcacatctttggaactgttcacaatcttgcagtagaatcaatctgaggaagctcgctgaaggccaaaaacaataacaatgtggtcagtagataagtctgttgattttttttgtctacttaaattaaatgcctagtgcttgaaattaagcggaacatatattagtatactagttcacaaccatacatggaaccaccagtagaggcaatgatcatcaaatgtgttttcagtaatacttctctatatacttctaaagtttgattgaccaataatattatgcagaactaaggaacgccgcataacaccatctaacaggctaacagtaaagcatgtcaattctttatagaaggcaacataataggcaaactaagatcaggtgatcacaaaagacatgtatcatgcagagtaaaactgtaaaagctatgagaagttggcaattaaaagattttgcaaaagtcaggagtaatggtaattaatagaaatcagatttaggaaagggaacagctcgatataaagcatgaagaggagaaataaaatgtgatatagcacctctgctaccttgggtcttcaacaggccttgccaaagcaaaaaaggaatcttgatttactgacatcaataattcgatcggggcagccttagctggacgagaaattttgagcctgggttctataatgcctgacaaagtccatttcaaaagataaaattgatatccagtgcccagtgcccatacatataaaagagaagcccattgctcctgttgtacctggagaaagtgaccgtccttgatacagaagtgttgctagtgggtttgttgcccaatggttcacagctgggaggttagttggctgaaatcccactactttaccttcttctgacatgaccacctaaaa

SEQ ID NO: 149705 - DNA, 416 bp, Zea Mays
gtttatttgtttgagtttacgtgaaagagataaatccccataattttgaggctttattagttggtggtcacatgtcatgctggagatgtgtgttgtgcattgcaattattgtgtgccgatgctgctggatctccttccttcctgttggttcgttttgcctgcttgtccagcccctgccgaccgccacgcgcgcgttttcatgcgtcttgcgtacgttctggttggtcgttgcccctctgggcgccgagtattgggagttgggacacactgctacaggacctcgtgatgagcggaggtattttgccatcgcggaaacggatgcgagctgacgcgacgtcgtcgccctcggtggcgccttgcgatcgacggccccgcgtggcgctagctgtcccgtctttagggattgaaactgccgg

SEQ ID NO: 149706 - DNA, 408 bp, Zea Mays
gccactgacatttctataggatgacaaaccgacatcaacataacttccataaaataggatggggcttccataaaaggaggacaatatatgcatcaggactgaccacacgtaccatatgtaaccctctccatcttggtctataaaagggagagggaggcctccctaggaggcaggcaacctgagggacaacacatgccaactcaaacaactccacacatttctacttaggctctagctagccaactataatatgacttaactaatctcttgcaatccaatccatctgaggaggacatagggtattacgcctcagcggtctgaacctctaaaaaaccctagttccctaaccgtgtccaaagtgttgtcgtagctatcctttgcaacctgtgccatggtagatagtaaaat

SEQ ID NO: 149707 - DNA, 445 bp, Zea Mays
tttgaatttgatattctcaaattcttggagcaattttttggcgttaacctccttcacccgatcagcgccgagccgcatcagtttcactgcctcccacgcctccttcaaggtcggccgagcactaagagattgccacatttccttcggcaccgagcgcaggagcacgctcatggcttgacggtcatgcgccctcttggggttgatccctggactgatcacatcccagatctccagcgcctcaaagttacactgcattaacatcgcccactcggagtaattatcacgagtgaggagtggccacatcagtgaactctccttcacgccgccaccggaacctgatgcttgattcatggtgttcaacggttgtcgtcgagggagaacgcgcttcttcttcgctggttcttgaggagggctcaccgatccgtcgtattgcatacaacctcgg

SEQ ID NO: 149708 - DNA, 382 bp, Zea Mays
cccaagggagctacttagtacattgtcaccatgcactcctacatatacatttttaagggtttacagtccagcggtagcttcccataccatgtcttgttaacattgggggcatgaccatctccgggcgctgataatgatatttgttttatgcagcatgatgatatctagtagctcccagctgatgcagtttccagttcatttgtgtccgttaaattctgtctaattcatgtttgcatttctgcacctattgaaatgctacataccactagactggagctattgttttgcactgattgatgcacaagatcttttaccttcaagaagctttcatagaagtggttgtgcagtagtatttgatacattattaattgcacactttgca

SEQ ID NO: 149709 - DNA, 822 bp, Zea Mays
ccagcccctggcgccgaccctcgatgttgctaccatgtcggcgaccgcagcaccccactccttccccatctacgacggcagcagtgacctctagggtggttcaacggttgcaagcagttcttctggagccagcgcaccctagagtctgacaaggcctggctggcatcgtatcacctcacggaccatgcacatacatggttctggcggctggaacgcgacgagcgtcaggtcacgtggccacagttcaagatcatgtgccaccaacgctttggttccctcgcagcagtggcggcttctattgccacgtttgtcgcgtcctcgtcgccgacaccacccatgtcattaggggcagccatcacactacccttgaccccaagagcgacgtccagaagagggtggttgctccatgacagacggcggcggacgtccacctgcaggctgcaacacgcggtttccttgcgcgtcggcgggtgaagcagatgttgggggtgctccattgcgggggagccgtagctgcaccaacgcggccgagcaatgtggtggatgttgacctccacgtacaagaggttgcaagacatggcgtgtggcacccctctgcatcgctccttccgacgctgaccctcatctgcggcgaccgtgcaactacctcgactactctccttcgtacaaggggggtctgctgacctcgccaccatctactccagccacaccaccctctgcgcacaagtggccgcaggaccatgaggggctacgctgcacgggatccacttgttgcaggcaataccaacatcggcctccacgggccagcctccgaaggctgtt

SEQ ID NO: 149710 - DNA, 441 bp, Zea Mays
tgttaacagttctagaatgcaagatcgatcaaattactgacctcacgattatgcaaaataattcgagctgatctcattctcaggaaaactcatgaagtccatgaactgcggaggagtttagggttaggggctgggggttttggtggggaggaatttgttcttgacaatggcaccgctcattgtggtggtgggaattgatgatgggggaggtatgtttcattctagttagcgagggactagcagtgatgacagatgcagtggcaggagccgctagagacagaggaggcaggcacagtgggggtgctagagccaggaggaaaactatgggagaagcgaaaggagtcgtacggcttggtgctcatggtgtgcgacaccatgacacgcagatgacaggaaggcggcaggcggggtgcttcatttggcccattgaatctggtgtac

SEQ ID NO: 149711 - DNA, 508 bp, Zea Mays
caaaagagtggtgggtggtggcccatccttgcgctgttgcacaccctgtggcgacaaggaaggatcacagaaaatgggcgacctagaggggcccccagagctctgtaatctacgatgctaaccgagatgcgtcatggcgaatggattccttcacgtcatttccaaatgattgcagcagcgacgcagaggtaatccacacgtcactcccactgtgctctgcgctctcctttgcccggaaatctattgctgtttctaatcttcttcttctaggtaagtttctggtaggatatatggctccttgttaatttttcttttagccgtctggttcgcagcttcattacagatctattaacgcgtgcgtgtctgcttcgcccgttcgagcgccgtgcaaacatgggcccgtcgctcagtggaccgccatgggctgggctgggcctcctctccttcgttgcagtatctcccgcactggctctctttccagtcctgctcgtacttgcatcttgtagac

SEQ ID NO: 149712 - DNA, 419 bp, Zea Mays
acgagttcctgatctctggacgtccagcggccgacaactaccatccccttctccggtgtcggtgtccgacgactgccctctccttctttggtgccggtgcccgacggctgccctccccttcttcttcggtgctggcgtccgacggcgctgctgccctccccttcttcttcggtgcaggcatccgacggtgctgctaccctccccttcttctctggtgccggagtccaacggtagagtccccttcttctcttgtgcctccatccgacgccactgctgccccccttcttctctgatctcttttcccccattggctgagtgtgcagcaatatacctctcctgcatagcggcaaaaggggtaatcagtggtacaagtgacaagtgagagcaagtctcctcactgttgatttagtttgaaatcc

SEQ ID NO: 149713 - DNA, 664 bp, Zea Mays
gtagtggaacgcctgacaatcatagctcgattctcttttggcatactgttcgggtggatcatacaatatgttcaaggaagaaacagacatgctggtttcattgactaatgggtgatgctagcaggtgaccatttatgatcagtgccaagcctgccttgctggatttactattgttttctgcctgcttggagggggggaggggatcttttatgcttgatatcatttaactgttacttcagtcataagatccggagtcatttcttctatgtacgcacctgcctactgatggcctctacctaaaatcattcaatatcaagatccacaatcattgtcggtctgtacaggctccagttaacagatatttgaacacactgttaatctacttgggtgctatttcctaacctgattaacagatggctattatagagtagatatctgaaaatgaattggtctacagtcgctttgcccactagcgcttttgtgttctttaatggatcttgtagtcttttttttttacaaacaatggtccttggtgccatatttcgtactgtctctgcctttgattgaccatgagagcatattgtagagtggacatagtaccctgacgttgataaatagatgctgcaatagttgcagttttctagaaaccacattgtgtgaaata

SEQ ID NO: 149714 - DNA, 500 bp, Zea Mays
cttctacattatgaaccagcagtcaaataacagaaggaacaccatgccaaccacatcatgcaaatctcatatgcagggactaataatctgcttctagaattgagacgtcaatacccagagatggcagaatgatgcaggaaactaatacactacatatgtagcaacaatcaacacaaaaaatagattctaaacagattcctctagtgtatttacctttttctcatgccccggatgagaatactggccaattgtgtggttgtcatgattcatcactcatgccgtcaaatgagctctcacattaccgaaagtcaaaagtcttgcacaagaaataatattactggtcataacctaatcagtaaagacaggagagtgctgacatcaggagtccatccttacaactcaagatttgcagttttcttccaaaccagaatacctacaaaagatttcaacaccgaaacattcctgacaggatagagttgctggtcaagtttaaggcaaag

SEQ ID NO: 149715 - DNA, 570 bp, Zea Mays
ttcggccacccaattcttggtcaaagggtccttcaccaagcggtgtatcatctttgatcgccttcttggcctcttcaaattcattccatttgtccttcgtcagggtaggcttggaggaaaccttatcttcagccgccatcattatcgaaggtgtcaccactgtactaacatgttcaaaccctgggctagtctcatctgtagtgggcggtgtagtgttcttcagcactagtgttgtaccggtagtatctttctcctctgcttaatcttcgtcaacatcgaagaatgaactcattaccggagcaattcactcatcttattccttgctctctggaagcgactccaaaggtgtaaccctttgtgctatcaaggctataacttctccaacttttgcctcttcgactcccataggagggagttcttcaatctcatctgccacattagctttgggtgcagtctaaaattattcaaaacaagaaattaatataataaattcataaccagtataccgaagatcgaaaaagcctatttactagaatttcctcagaggcttaaggagttgattcaacctac

SEQ ID NO: 149716 - DNA, 843 bp, Zea Mays
catcctcaggctgttgttgatctgttttgtttgtgcttgtcttgccttgcactgtggattctttagccaacaaacactggcatgacctcagggcctgtcagagttcagcgtatgcaacataggcaagaagactctctgcggtccatgacacagggcaccatgttgtgcctgcccatctcttgcttgctctatcatttgggaatcatgccgctactactgtaccatcttggtttaaaaggaaggctaaagaatttttgactgggcacacagactgacaggcatgagtttctagcaacatcagtaattcagcatgcatgtatgtttgatcagtaggggttacctgtgatttagatgtggttcctgtttaatcgttgtcctacatgaacttggctttgaagaattgtttagacttgatcctaatgtggaatgtttgtacgttagattttttgtgtaaatataagttattgaagcattaagattgaactgttaggcatttaaatgaagaccctcttgatgtcttatgtatggttatgtttttctgattcattatcagtaagattaacataatttggtgatgagggctaaaagcttcgttttttgattttttttttcagaatctaacgtttcatgtgccaatcatgtctgcttctcccaaaacttacttcagagctgatttcaacttgcccccccctggtttagtttatttctaatttcctccttttagctcttttttatatggtaatcactattgtgtcattgccttgatgccttctatagatcttattgtttttcattgtatttaatcatcacctgttttcagggcaaaggaagagcattttctgc

SEQ ID NO: 149717 - DNA, 579 bp, Zea Mays
tgcgtggagacgtggggaaggaaatgcagcgagcccggcgtcctcgagcctagccaccaattacgccccaacgatcctcggtcgaacgagtggtgtgccccctctcccccaagtgccgggttaacatcggttgcgcacaacgcatcaaggtatgcccaaacttgtagatccagtggcgttctaaatggatttgagtgtagattaatttgtgttgctctatctagttgtgtgaggttgcacggtgttggtaggacgcataggtgtggttgcgttcaatctggcgattttgtgaacactttcaaatcgctatagctatattggggacaaatggcacgcacgacgagtcaaagcgggctcgatatttgtgcaacagttgttcgatttgttagttgcatacagatctgttcaacacatagggaccacaaagatgaatctattgcattgcttaccactatggacgatgctgaaacaaaaaccttgtgcagtcccaaaatgactcagtggcgacccaaataccaatgagacgttcgactcaaatcctgtagctttatccatttttagatgagtcatgacacgtcg

SEQ ID NO: 149718 - DNA, 313 bp, Zea Mays
cgtcaagacggagagcccgggcctcggcgttgcccaggaactggccctcaatggcaagccaaacagcccgagcgtgagggaggttccggaggaggctgtggaggtcaccagagatcgtccccacaatccaggtgagcacgatgctgtcgaggcgcacccacgcggtagtcgacgccacgtcggtgggatcgcagaggacgtggtcatccagagcgtagcggcgaagggtgaggaggagtaagtcccgccagcgtgcgtaggacggcgactctggctccaggacatcaggaaccatgaggcgaatgttttggac

SEQ ID NO: 149719 - DNA, 1159 bp, Zea Mays
ctgagaaccctttaccacgactctgacgagtcggtctcttctttgagcgacaaggagctcgagaggtgtgttgaggacaagcgcaatagactctgcttcatcatcgacaccgctagaggcctttgtaccatgtcccttgcagatgatgcggtgggcggcgacggccaggatctcaatgacgactctgcttctaaggtatcacactccatcgatgatcttgttgctgaggtagaagagttgaatgttgctttggctaatcaggataagttgcttaggcttgctgcttgtgagaggaaaggtttcaagagaaagtacgagagcacacttagggagcttgagtctactagagcttcagttgtggtgtctgacgagactgaatgtggtggatttgctctacacatgtcgaacatcacaactttctagaccaagtactccaccctactagatgagcgcgatgagcttcagtctaggtctagcttgttgggtgcatgttagacttgtcctggtttacagactgagctagtggagagaaatgctagaatagacttgcttgagaatgctagcttagtgagtacacatgcacctacgtagtgtgctctttgtgagggtttgcagtgtgctctagagtcctgcaagcatgacaggataataggcgaggaaaaaacacataccttcgaattgtcttgagctgagcgtcgtccagtgagccccaattgggcatgatggccagtcagttcaagaggggaactggtggatcggggttaagctttgcttctaaggatgggagtgtcgcttgttttggtaaggttggtgagtgtagtggcctgaaacccttcgtgaaaccttcagccaccccgaacttgtcaagctcactcatcccaaatctgtcgcctctattgtgagagatggagtgcctgaggagtttatgagaactccactcaaaaacaagtgtgggttccaaaatctaacaatctcaggaacccacttgacaccccgttagatgcctctagcgttccacctctgaaagcccctcagccacccaaaaagcctgaatcccacaaaccaactccacctaagatagaggtgaaatttcattatgactattgtgagagggagggtcatttagttgccttttgttttaggaggaagagagatgagc

SEQ ID NO: 149720 - DNA, 827 bp, Zea Mays
ctctgcccctagccttacgtgataactgagaatattatattctactattctgaatccatgtgctcttgtatattccattttcttaccaagctccaatctgtcgcttcattctcatgtgtctgttttgcaattgtttgtcaaaaggactctcctttaagatttaattgttcattctcagaacctgggaggctgatggcaaaattctacctgaagtttgatacaatgaagcttatagtcaaagcttctggctattgcagtttggaagatttattgcatgtcatctgtcactctgcagagataacttgtaggtgcatgtccagattttgaattgattattaagtgtcaagcattttattttattttatttttatgttttggtgtatcaagggatccaactacgccgaaatgataagaagattctaaatgacataaacgctgacaaagatggtagacttctatttcatattgtcatgaagaatggaaaaaggaagaagcgtgttcagacaagagaagagaaaatattcttgctagcaaatgattgcttaactggagactctctaatccatgatttatccctcaaccaggttgtttgcttgtttaggttcagacaccccttgattttctcccctactatgttgacttaagtggactcccatgcaggaaacaaatgcaatatgctcaaatggatgtaggattgccaaatgcatgcgagaatattttatatacaaaaagaattacagatctgccattaattctatgatccttgcaaatagtctgcatcaaaagctttgggagagcagtccatttctgctgaaacaactgcctgg

SEQ ID NO: 149721 - DNA, 500 bp, Zea Mays
gtgagaaatcaaaacgtgtatgctgcgttttcgatattttcagcagaatatcgcgaacggttggagaaagccaactattctctctctatctttgttttggcgttattcctaaaaaaaaaaaaacagaacaaaaccccactccctcgcgctccctatccgcacatgaatcgtcctccctcccgtctcccgaaacctcgtccgccggttcccgtcgccatggtggtggtagtgtccacctccctatgctccttcctgcccgcgcacccgttcagcctcgcgcgccctcgccgtccccacccaacgaacccgaccgccaaacccctctcccgtaccctctccatccgctgcatcgccacaaccgcggcgggacccccgccgctcccaccgccgaagctggtccgctgcccagctctcgaccgccaggcggcgcgcgcaagccgactccgctttgcgcgcaagctcctcaccctcctcctctccaagccgcgccatttcctccc

SEQ ID NO: 149722 - DNA, 487 bp, Zea Mays
gaagcatacaaaaaagaatccattagactctccttagctctcagctaaaggtacatctagatggcatagccccttggcaccagcaatctcccattgcatcctttcctcattagcagctctaagactcatggcaacactagggttgcagccatcaaaaacgcatttgtttctatgcttccacaaggtccaggctcctagaatgataagggaatcaagcccttttctagtgagcccagcatcaatattccccaccgattcccaccagcctagatatgagccaacatcaggttgaggagccaaagaatgcagatcaaaattccgtaacaacaggtaccagaattccctggagaaggaacatgtaacaaggagatgatcaatagtttcatcttctagatcacaaaaggggcacttctcaggatgactcagccctcttttagcaactctatccgctgtccaaagacgattttgtgcaaccagccagatgaag

SEQ ID NO: 149723 - DNA, 607 bp, Zea Mays
gttcttctgtgcacatgtgtcatacagatttctgacatttaacagccagcacgccacgctcgctgagtaaactgtgcaaaaaacatgttcagattactgcaaaatggaaggtatgcatcctctttgaaaaatatttactgaacatttgtaatttacaattcaggtttaaaattatatctgaccataagtagttatagtcccattagttgataccaaacagtttagtttctaaggatcttccaaaaatcttatttgccttctattcctagaaaactattgccaaacaaacataagcaattaatgctacatgcctttatctagatatgttgcaacatacaactcatctataaactctcaaaaaacgtaggttcaggactcagactgcatatggcactatcaaaacctgtttacacgatgttatgatgtcaagttctaaatggagcatgttagcctaaataggaaaagaaaactaagtgatctagtaccaacttaattcagaacacgtaaaaaaaggctgaatatcttactccatttctaccttgtgattcgttcattaaatttgtcatgaagatcatactaatgtgtgctaagcccctttgaactacct

SEQ ID NO: 149724 - DNA, 389 bp, Zea Mays
cgcgaacgacacgcgacaacatgtgcgaaacagctgcggcacgcgagacaatgcgcacgacatcgcgcgatacgcgtgagtcaacacgactgcgcgcgcggacaacacgatgacgcgcaaacgatgtcgtgcacgaacaacaacaaacaaataattaattaaaagtatttaagctgttattaatcaagttaattaacatttatatttataaaagcccaagttaaaaactacaacctagttttaattagattgtcgtttttgaataactatagaataccaaaaatatagataattaattaatcaattaaacttgcgacatgactagataaaattactactacaaaatcgatgatatggcgcattctcattggctgtgaagtcgaccacac

SEQ ID NO: 149725 - DNA, 1162 bp, Zea Mays
ggaagccacgccaggatgcacaggcggtagccggtaggacaccaaaaaaaatcgatcaccaaatctcacatgcgagacataggacgcacagacgatttgacgaacaattttcctttgtcgcaattgttttcaggcaccgatgacagatctacttcgatatctttctagttttttatatcaaggaaaagggacagatgaattgtcctcacacaaatgaaaaaacaaggtgagctgttacaattcagtcgcagatgaaaaaacagatgagctgtacacattttttagatcgaggaagagggacagtttgtgtcctggaggcagcaacttttctatcatcacacataaggcctggttcgtttagaccaaaccaagcttggtttggtttggattgggatttagttcagtccacaatccaaacccaaaacaatccagtattgttatattttttctcttcatttaaacctgttcgggtttctagcccaggacttggatttttttacctgtgtagctcctggatcagaaccataccccattcgttctagaaaaattccgactccaaactcacgtcgacgcacacaaccgagaagatgaggtgtgggtgagcggtggtcgcgacggcgacctctactacgctggcagctttctctccggttggtccctctctcttttgttagttagggttcttggatcgagtccttctactcacgcgccgtacgtgcgtgccgctcactcgtagatccggtgacgattcctcccctgcgcgtgggtggtgaaattctccctccgcattccaaatcttccgtctcgccgctgggatttgatttaaggcgaggcgaggtgatgtgagatgagatgcctcgcacgaacgcctgttggactagggagatgagacgattcatgcaagatttgttcctgctgctgtcttcctcctgctaccaagtggcttcttgggggcaggcaaggaattaagcttgtaaatccctggaatttgaagaacaaacatttgaaatcaaaagaaaaaaacagctctcttcgctaccaactttagaagcaggacatcaaattccaaattggctgacggattcttgctttacatacacaataacacaatacatgcgcctgtctgttgtgccttgcacttagtcactggttgttgctgttg

SEQ ID NO: 149726 - DNA, 1149 bp, Zea Mays
acctgaaaactagcaatattctgcagaggaaattcctgggttctatcattttgttccaaatgagacatcttagtattaactggcactggctgggattgattttcttggctaagagtgtcaggatactgaaaagagccagaagcagcagcatcctcactactgattgccttgaagcagttaggtagttctccaacccatgctccaatgtgagaatcaaccattacatcaccagggcagccatacgagtctttcattttcttaacaagtgacatgcaataagcttgtacctgaagagtaaatcagacaaactatgcagcacacataaatattgaatagggtagttatgctacaatccagttatgcaggcatattaattcagtattccctagacaaatataacaagcttgacttcaactcaacttgtttaatatttataaatgaagtgtcacatcctgatagtactaattttcaaggggggcagaaacaaatgagatgcagcccgacagaatattcccgagttccaacttctgacagaagttaggtgcagtaggtgtttgtttggtcattgcgagaagtatgaataagcaattgagaaaaaaattaaactatgtaaaatggcatgaggaactttccttcaggtattagtcgaaatatcgttgcagtgtcaatgttatgtgaaatgtttatagcatatcacaagaagcactccaacactaaaattatcatcaatctaccttgggcaaacaacaaattcccccataactagataactaagtacctcactgttataaagagacttgatatcggaacaatagttctgagataatgaggcatttgaactttccttgaatagccttttgtctctaaaggattgaggccagcataactgagcaaagatggtgacaaaaagaaaaatacaggtcccagccaaaaaagtgaaaaggttgttcaagtaaccctgcataaaataaaatatcatgaagagtttgataaatatttaaatgagtaaattttgaccaggaaggtatcagcttacattgttctttttaatctttgacagatctggattccaataaggatggaatgttttgcctggtaatgtgaattgatcttcaaagtacatgtctagaacgttccctagttccacct

SEQ ID NO: 149727 - DNA, 1056 bp, Zea Mays
caaagttgatacgcaaaacgtgattatctggaatacgcttggatatagagtttgcagcaaatatagaccgccgttcgatttggttgccgatggaggagcgcgattgaagagcaagcagagcgggcacggcgtcgagcacggtggtggagccatcccttccgggagtgggaggagcgtggccgaagaagggagtgcgggatcttggcggcgcgtgcgagttccgcagttgggcgcgtccgcgggagcaacgacgactacaagcacaagcacgacgatggaatccgggcgatctccagtcggttccgtgtggtggaggtaggtggcgctatgctccgcagtcaacgacaccgtcgcctcctccaagttagaggtcgatctccgattccatgtccgcactcgatctcctctcctccccaactctagcctctcggtacaacgctctgaggccgttgctggcggccgaaccaagctagcaccgccgccctcactgtcgtgccgcgattccgtgaaccaaccatagcacaatttcgcgtgaagcacacgatagcggacacacaatgaaccgctaagaatagcgtgcgcgagcatcatccgctattttagcgaacattttatagttcactgctggagcacatagcggacgtttctaccgctaaatttagcgtacatggccatatagcggcccttgctggagccagtttaaagtggcatgaaggctgcagaagagtggttgcgaaattaaagagcaattaggacaagccctaacaataagacatgcttgtgttagggacaagcaaaaattccagatctaatatcctgtgattgagggtgatgcccatatccttcaggttacagttaggaaaaggctacacacttgcaaagtagagtggtgctaatgttgtgatgggcaaaaagtagttgtagatccaaaattcattccacatagatgaatgctttgatacacacacacggtagtgctatttcgcaccacacccgcgcgcagcctcgcagatgcagcaacagccctacccccctcggcatgcaccaggtccccac

SEQ ID NO: 149728 - DNA, 372 bp, Zea Mays
cttttcccttggtcgtatcctcttctttgtcacctgcgagtttttaactctatcctttgttgtgtttttgtttgttatttcctttacccttctcatcactctatcctaccttgtgattacgttatgtccattatctaaaatctccaacctcctatcccaaattgagagcaatgttttacttatcttacccttggcatatcctcttctttaccacgtgtaagccttgacataactccattcttcgttgtagttatgccactgactcttctataccttcatcttttctcttatacccttgtctgttatcgcatttgacccttgcgatatttatgtctacctaaatgcttactttgaacttattctttacaagcc

SEQ ID NO: 149729 - DNA, 457 bp, Zea Mays
cttgaaggcggatataataacttttgtttttgtaagatactttttgggaactatcaattaaacagctcttatctgtatggtgcttgttcttactgtgtgtggttttatcaactcctctcctggtacttggcccccccctgggatgtaggttcgacgtgtcgaggctagataccagcatacctaagaaagagttggtgtcccggcccccaggaggtagcctcgactgggacctggacttgcacacaacttcggctaggaagtgttagtagcacacccattaggacccatcatctggtaccaaccatcctttgattcgtgcaacaggacctgcaggatttggcctgggaagccaagccgtgtgcccggaccccctgaaccacagttccagatactaggacacccatcgcagagtggtggagcgtgtaggcttatggtacgggaccaggctaagtggcta

SEQ ID NO: 149730 - DNA, 504 bp, Zea Mays
atggtagaaaaaggacccatcccaacaacgaagtcgtgataaatcccgtacgttacttttgtgaggcagagaatagatgctctgtttgtttttttcctccaatttttttttctaaggtggcttggaagaacggtgcatgtgatgtagtccagcctagctagcttgtgaaggatagcgtagttaaactatttggaaaacaaaaaaaaggacattgacagaggaaggtgtttagaagcgccataggattacgtacgtacgtgacaaagacgtccctgctgcgcgcacaagctgaaaaggtccagtacaatggcatggtcatggaagcttcaattaattccaagagaaagtacaaaagtgctggtggtgattaatttaattaggatcagagccatgctaggattatgcaatagtaaactgcagcagccggtggaaacatttctttttcataaaaattggtttgcttggtgtattaaccaatgacaatacaaatgataaacaacaagc

SEQ ID NO: 149731 - DNA, 445 bp, Zea Mays
ttcccgaagccggagtcgccgccgtcctcgagatcgtcgaacgagagcgggagaaggcgggtgaggtcgacctcgtgcttaccgaggtcgagagtggaggcggcgacggagacagcaaaggcgcggggctcgtacttgacgacggccttggcgccgcgggagaagtagaccggggagcgcagcgtgagcgcctcctcgaacgcggcggcgccgagggcggccgcgacggggcgggtggaggcggacacggacatccggcggaagtggacggagaccgcggacccatcgagcgcggcggggaggccgtcgacggagtgcacgtgcagcgcgaacgcgcagtcgacgcggcggcggcccaggtgcgagatggcggtcagggacttcttccagaaggaagacgaagatgaggatgaggacgaggaagtggaagcggaggagctggcgg

SEQ ID NO: 149732 - DNA, 526 bp, Zea Mays
gtttacgggaggccataaatagccttaccagtctgagtggccaaatcatgggtggcggacgggaggcatgaaatcgctgtccgacaacgaaaacatgtgtcacgggaggccaaaaatagccttacgggcctccggagactaaaacgtgcactatggtttggacactaaaattctactatgtgtgcaaacttacgggcctccgggtactaaaacgtgtactatggtttggacactaaaattctactatgtctgcaagcttactatggtttggagactcaaacttcattttactatggtttggagactaaaaccttttagtgttggtgtttaaggttagggtttagggataggatttggggtctaggttaccataaaaacgtgtgctatagctcacttgtgtcaaaaaatgtcgtaacggcctccccggtctaaaacataggtggcaggtcggatacatgaaattggctctttggccaaggaaacatgtgctacagctcgtgggaggccaagaacaactttaaggtgc

SEQ ID NO: 149733 - DNA, 391 bp, Zea Mays
tccagggaagaggtccgcatggacctcacggaaacccgaaggtaatttactctttatggcaataccttcttaatttattttgtttcagtattgtattcctttattttactttgtgttacattaacagaacctatgccaactgattacgagaaaataagggctatgaatatgatgaagaacaatcaattgtttcaacggctaggccttggacaactgaaatcactggtgactgctacagctgcaaacaacaaagacgactctcctcagcaatcagagagtttatatgatggtgaaaacactgacaattctaatgaagaggtcactacagtacttattaattcttagtttctcaattatctatctttagttttgggttcgcaatgaatttgat

SEQ ID NO: 149734 - DNA, 478 bp, Zea Mays
atgagaaaagcaggaactatttctagagggtttgatcaggccacttcaataccaactaatgtcccacacattctcgtccttccaaagactgctagacaaagctatagctctggaacacaagagagttgagcttggaggaaaaagaagggctactaaccaaggacatgctagaagtagtacatgtccccgttatgctacacctcaaggcacaccagcccgtggtagttccgggcaatagactcaacggacccaagctactcctcaagcaaacactccagcgggacctattgctcctaatgcgtccacaaataggtcatgcttcaaatgtgggcaggcgatcattatgccatgtactgtcccaacagggctgctttaaccactccagctccgatgaagcaagggtaggcctcaggaggtaagagtcaggccttatctgtcaatcaaggtcaggtcaaccatgtggaagcagaaaccgaac

SEQ ID NO: 149735 - DNA, 404 bp, Zea Mays
catttgtaaagttcaatcttattggtttatgcaactacttgtgggttcagtctattcaattacccacttaatacaaaagtcattgcaaaaaagaagcatttggcaatcaaactctctacacattctcatgctcgacgagtaacatatagactcattattacctccccaagtcgcccaagtgctccagtcatgccaccaaatatcgtagagaagatggcataccaaatttgtgtatccattaaatagacctgcaagaattaaaggcaacactaatgaatattagagttacagtttcaaaacaaaggagaagaataagacaaatattagtagccagataaaatatacaagtcggataagcaaataaaaggctatgaataagatgatattactagacagataatata

SEQ ID NO: 149736 - DNA, 665 bp, Zea Mays
gaaattggaaaatacatcatcaataaaaagacttcattctcaaaggcactcaaactgtttactgtcaacctcacgcttacttaactcagggtgaccactataccctactaacggagcaatcgacttaagtcggcgatgacttaaggcggtgtgacatgctcacgcttacttaactcagggtgaccactataccctactaacggagcaatcgacttaagtcggtgatgacttaaggcggtgtgacatgctcacgcttacttaacttagggtgaccactataccctactaacggagcaatcgacttaagtcggcgatgacttaagatggtgtgacatgatcacgcttacttaactcagggtgaccactataccctactaatggagcaatcgacttaagtcgacgatgatttaaggcggtgtgacatgctcacgcttaactcagggtgaccactataccctactaacagagcagtcggtttaagtcggtagtgacttaaatcgacacggcgtgctcacgtctactcgatccaacacaagcacgcttgcgattactcatattagggcgatctctatgcctcgcgaaatgaaaagaagtttcaaaaccattacactgcacttacttctgcaattgtaactactgttggattctaacaacaggaaaataat

SEQ ID NO: 149737 - DNA, 501 bp, Zea Mays
cacaaaaagctttgacttcttcaaacaatggatcccaaccttcacttctcaaatcattcaaacgaattctcacatcaacaactaaagacatggcctgaacaatattttgatccttcttttgcaacagaagggacaactcatttgtgatgcggaggatttgcaacatcatcttcatgattaacacaaaacaaaataactccatgttagcaaccagacctccagcccttgatggatttcgctgtccttgattcacaattcccagaactgctattattgactcccacattgtttcaatacgaagcaaagtcttgtagtgagatccccatcttgtatctccaggtctagccaatgaagtttcttggttttgtcctcttacagatgaaatctcaccatcattaaatttatccacaagaattttacgatgtttatcaagcaatacatccatcctcttgcaagatccacaaacattgttcacgatcaaggtgacatgttcaaaaaaat

SEQ ID NO: 149738 - DNA, 453 bp, Zea Mays
ctttgataattttttctttattttcctgaattttttttgacaattttatcgagaccaaacatttttttggttggcctcagaatggcgtcaccaagctcctgtaaaaattttagattttttgaacaaccgagcgaaaagttatgcctggtttaaggaaggtacctcaagttatgtttttgggaggcacgactagaaggcggcgcggttagggcaaaacttccctatctgcaatctatctagggctggcgcggcggcggctagcgagggcaagttgattaatggggtggatcgacttgtgatctaggtaatggtggatggaatagcggtgaaggtgcagttgatctacgacgaagatacaccctaaaccagcaacacgactcgaccacggacacaaactgaacaaagccaaactgaaaacaaaattgcaaatgctaaacaagggttctaggacag

SEQ ID NO: 149739 - DNA, 275 bp, Zea Mays
tccttgcctgtgatgaggtgtcgaggtaagctttcttatgatgacgtagttctaggctacaacaacatgtgtgctgggctgctagcacatagctgtgtgctgggctgctgactgatagctgtgagcagcagtagattgcgttttgcgtgctgggttcgggtacacattttcggttgtgctccgccagacgtggagcctaggagggtttcagaagcttgcggagccaggcggccgagcttctagacatcattgctcaaacctagtctatctttttg

SEQ ID NO: 149740 - DNA, 493 bp, Zea Mays
cgaaactttgaaaggcaagggtggagaatgacgaggcgaggcaaaactcgacggtgtggcacttgacgaggacaaagatggcgcaagacggcgatagagcgagacgatgtgtgaactcgtagggattttctgctgcacgcctactatcaacagagcgtcacagtgaattgcaagacggcacagggagaagtttgcagggatccacgactggacccggacctgcttgccggcgtgagggcagatgacgacggtcggtgcggggccactggacaacttggcgagcgaccttaggctaggtccagcgccaggagctcttgactacagtgccgaggtgagggcgagccatgaggcgtgcacgacaaatttcattagaggtcgagagatagatgggaagttcactgagccgaagaacacggcaacacgaagaagaaatgagaaggtttgcaacactttggtttttttttaaactaggaaggagagcagtgtatatgcg

SEQ ID NO: 149741 - DNA, 707 bp, Zea Mays
tcctgcctgctgcccagcctgtttagagcttaccaatttttactaggatctagattctttggaattgatatttgacatatcagtctctaaaagaggcactagcctctacctatgtacagagatatatccttactggttggctaattcttatgggctgtttttttccagtgatctaggtacttgctgtttggggggaattttgtcgcagcttggaggagaccgctcgccattttgcgttttcgatcgtcggtgagtttgtgtgcctatacgcctgatctgttttataatgtgttgtttgttacgagccgatttattcactagtgttatgtgacgttcttccatactatgcgatatatagagctatgcctgattctccatgtgtgcgtgttgcgagatgccacgaagcgaagcgcccgaggcacaatgcaattgcacagggttagtcctcacaagttcgctgctttgtttatgcatgcgatggccggtacccatcctaatttgcgatacttctcttgcgggccaaaaaatacgcagcctctttagattgcccaatctttgagacaactgatgccatcgcatttttcatggtgaagacgaagtagacccatctaacctttcggggacctctaaccagccaatacctgcgctacaggaaacacgtgcgtacacccatgttttttcagccattacttcaacaaaaaacaata

SEQ ID NO: 149742 - DNA, 360 bp, Zea Mays
atataagctaaagagttaaatgcactaaagattcattaacttatgtgtggattttaattagttctatcgaatctaaaaaacttgattttttgggtccataaactttttaagtggttgatcgtaagtctataccctcttgtttggctcttagattaaacttccaaatcaatacacttttaaggtgctctatcctaggtacataatcctatgtttggttcttagatttgatatggcatgtggagtcaacagccaatacgacataacatttgccaagcaaatgcttgtgcctcgaccacactaccctccttttcgccgtttgaagcttgacatatgtgcatctactctagagctcaccaccac

SEQ ID NO: 149743 - DNA, 875 bp, Zea Mays
ataaactccatagcaaccgacgggcagcaaattgcacaggtaataaaattctcttttatacgtattataattacaatcaatctgtattatacttattattgatttgattcaccgcatatgttagatgacacagaacgagtccatcaccattggaccagtgattccgcacacatcatccttatctgacggcgcaaacgccgaaggcgatgccaacatggtactataataaaataaattatattatgacattgtgtgttttattctaaaacatatttttacaacaggttgttgataaagatggaccagttgtgatcgttcctaaagttgggatgtcttttgcttcggagaatgatgcttatgagatgtacaacacctatgctggcattgtcgggttcagcattagaaagagcgttataaagcgtcgtgcagataaaactatatacaacagagttatagtttgtagcagccaaggacatgcaaaaatgggatcgtcaaatgccactacaaggacaggttgcaaagctctggtaaagtttaatgtcagcagagagggaatttggacattgcaaaaggttgaacttgatcacaatcatattttagcgacaccaaaaaagaagcacatgctgaggtcacaacgacatgttatagatgcagacagacatctgattgctcagatacgagaagccggaatgaagccgactcaagtgtatgagttcatgaagcagttttacggcggggctgacaaagttcccttcttgcgaatggattgcaataatgagattggacgcgagcggaagaagtacctagaatccaatgatgcacaaacgttgttggaatacttgaagaacaagcagatagaggatcctgcatttttt

SEQ ID NO: 149744 - DNA, 522 bp, Zea Mays
cacaactaatcaacacataagcacacacccaaatgcccccttgagagcgagcgcacacacactctctctctcttcttcaacctcctccctctctctctctctcttccctgcattcttaggcttacatacatggcatacatggctcagcagctcgtcggccggatcacaatggaggtggcgccatcgaagctgccgtcgacgatggccaggtgtgctaggctcccgaggaacctcgacacgatcgcggaggacgacgacgacaaggaggcagcagccatggagtcgacaagggagctgcctctccgcaatgcgagccgcggcgcgcaggtcgtcgtcgtcgacgcccctgtgcactgcgccgacaagctggcctgctacctcgcccccatggcgaagacgaccgagtgcctcaagatcaaagcctaagtttgtcaggacatagagagagacgagggtgaggcactcgtctcatggagctggatttcttgctctcttgttttattgtgagcatatggcaatccg

SEQ ID NO: 149745 - DNA, 434 bp, Zea Mays
cggcggtagcacgaatcacggcggagggagccgtcggcggtgaggacagccgcgctggcggtctgatccctattgagcactgtaccatggcagtcaccaattcagagcgactgatagagcatattggagcatcattttctttgattttcagatggcaacacacccaacgatctatagcaaagttgtagtgctataatccatctatatctttgctacaatgtgtactcacaaaaggtcactggatccccatccaaatcgagctcaaagttcatctcaaaacactgtcattctgtatttcagacttcaggcagcctgacagtccatctttgatggggttttttctccaaatttctcataagaccatggcttgaacccttaaacaaagttgttctcctatgattggtcttcaactttgatgtggtgacctagggcaa

SEQ ID NO: 149746 - DNA, 423 bp, Zea Mays
gccgccaggtaaaagccatgcgcctaaggataactccggtgactcgccgccgtgcctcccccttgctcaccgaacccgtggataagaattctcaccgccgttaagccatcaccggcgtccgccgcgtggctctaactttccaccgcatcgccgtaagccttagtggctccccgttgatcgccggagcaattgccacgacgctggacaccaagccactgcgccagtactcttcttcctcctccgaccgccgcgcgtccccactaaaattcccggccaccgccgttgatccctataaaattgaagcccccaccagccctgcaaggtcatcacacacccagccaccaaaaatcactagcaatcgttcgtcagagagcttgaattttagttttcccccaaactggtctccgccaccgcaaagcgcac

SEQ ID NO: 149747 - DNA, 455 bp, Zea Mays
ccttttttcgtgttcctgtggatcctttgactgtggtggcgtgccgtgtaagactttttaacagtgcgtctcctccgggagtgacaaaatgtccgaaaagggcgacgtctattttgagaaaactgacggggactttgtgtgagctctgttcatcacctcttttaattggtactcacggctcaaatgttggaatggacgcgttacctttagtgcctgcctgtataccccagtgttctccggtttaggtcccttgaaagaggtacaagtacaatggtagtgatagcaaggctaaattgttgtctgttccatttttgccgacttattagtggtatccacaacttttagtatcctcgatctattccagattctgtcttcctagattgttgtagtagtattgtagtctaaactcagttcttgagaatgctctttatttagcaagagaagtcaggcaagct

SEQ ID NO: 149748 - DNA, 393 bp, Zea Mays
aaaactaaatattgtctgttttaatccctacgggaattaaattgcccacgtacccatctcctaataaggaaactgggatgtcaactcagagccagctttaccattcactctcgtctctgttttggtggcatggattgtacttgtattgagattatgttcaaagactataagagcatctgttgcatacaataccttaaccttgtttttttaaagagcatctgttgcatacaatgcattaactttgtttttttagcagtatagagaaccttgtttgatctgagatgttgaatggtgcatcacaacataaattagggcctatttgatcccacgtactaaactttagcacctcttaaagagctaaatgctaataagtgctaaactttagcacttcac

SEQ ID NO: 149749 - DNA, 607 bp, Zea Mays
tgagctcgtgtgcctggatccgtgagatctgggcatccgcttcccgccccgatgcctcgagatctgtcagtagccggcgccagtgtcgcgtcgccatcggcgcgctgcgatttgagctgcgtttcccataggatcgccttcacggggttgccctttgtctccacttccaatcttaatgataaacgtcactgcggacgacgttcggttcagtgctggtttatctgtaataatatttgtcctcggttggattgctgacgccggtgcacatcatgtgttgcacataatgtactggaagctgataatgatgcgggttattatctgggcatgacaggcttaagttaggacatttaactgcaggatgccatgataaatgtgacaccacgttatttatggtgacgtggaagaaagagaaatggagagagaaggaaagcggattgcccactaagtagccagctgaaagcgggctattcacggactctaatacaatttgtgagagaaagagatggacccatttttaaatgtacaacttatatcattagagagttattatatgagtatgtttttagttgtctatatatgacataacattataaagctcactgttggc

SEQ ID NO: 149750 - DNA, 549 bp, Zea Mays
gcccttttctacctccataggaccaggacgattcaagccagtctcccggccctcaagatcgcgctctaaggtcgacgaggcacgggatgacctcaacccagcatcgggcacgtcagcacaagcctccattgcaccatcatccactggctccgataacaagtcctctgggaccatatcctcaagagtttgatcaaagttagccagagacagttcttgcagaccaatgaggacagacaaagcaggagagggaactccactactttcaccgctggtgatgaactgccgactgtttttcctcgtcaaaggaacttcattctcttcctcctcatcatccacattgacaacacaagcagcacccccattgggatcgacaacacaagcagcacccccattgggatcagcaagaggaggagcacccacatcggaatcagtagcagtttgggtacacccattggggtcaacgtcagtaagtccagtcgcaggcacttcttcagcagcaggaactgaggtgccagcatcctcatcaaagctggatactcgccggaggcg

SEQ ID NO: 149751 - DNA, 641 bp, Zea Mays
atggtggcgacgagaggcgaggacgacaaggtcgacagtggtggcggcggaggcatgagcagtggtggtagcagtggcgacgacggtgacagcggcaagggcaacagcggtaggggcggcagcagcggcaagggcagcaacgccagtggcaaggtgccaccaacttacatattagtatagtgtaatgtagtagtagtagaatgtagtagtacaagtagaaggggtattttgccagggtcggttcataatgaattggctcttcttctgtaatggtacttccgcatatatgaataaagcttgatggtcttatctaccttgagtattgagtttcttttgatctcatcccgcatttgaagtttgattgttggtattgagttcctcgttctgttcattttcttcgtagaagtgcgttttctgtccggttgaacccgtccgacttaactcatctgacttagcgtttactcccttcgatctaaaaatccatttccctctcgttggtcacttgtgataggtctgtagtggacatgtatatacaagcctgttgtatgacagtttctggcaaacaaaccctagctctgtaatttcactgcaattctcctctctgaaattctcgcacctcggtgagtccgcgctcgattccg

SEQ ID NO: 149752 - DNA, 413 bp, Zea Mays
caaccgacgatacggacgagaccaggacacccggaatcgagcagatcgaaagatttctcgccggaacagtggataggatggaaccgtagagccctctgtctctgcgtttccttaagagacagagaacagaggaaggggatccacttaaggagccgagggaaagtccgttaccgagaagagggtagagagctgcggtcgttcaacgaggaagcgaagaaaacggagctacagttgccgccgccgcccacctccgctcagccatctgctcctttccgtctctgcggtttcttaccgaggcaactagtgcccaggccgtgctgtccgctggctgggccgctcggcctccgggccttgtagtggcccggttggctggccacactttttttatataaggggaaaaccccaaattcaac

SEQ ID NO: 149753 - DNA, 484 bp, Zea Mays
gcctgactcgtatatacatcgatttctcgcagtttaactaatgaataatacatgcaagatagctagttatttcattggtcaattcaccgcaagctgtgttaaatattaatttgatgcatactttaatgtacctgcacaaaaggaaacgaagaaaaatccgatgggttttaatttccgatcgccgcataacaataatcaacgatggtgtctgcaagttctcgaaagtactataatattcgacgacttatccgacaactatcagacttaagcgttatgttcgagagctgtcaaaggggccgtcggacattagttgatttacgaaacggctcccacgcgctctctctctctgttttgactttccctcccacatgttctctctctttcgactttccctcccacgcgccgcagctaagctctcgtcgcctcagtcgtccgtgccgccgcccacatacaccgccgcaccctcgcccacgtacatgacgcc

SEQ ID NO: 149754 - DNA, 342 bp, Zea Mays
aggggaaaaacagtctctgaactagcaatttgtgttaatgtgttggcattaggtagctgctggttttcaccgggcaagtcatcaggcagataagctggtaatgcaggctttagaatgtatactattactcattcgttttttcccatctctttctactaaagaaagtttaatgcttaaccacaagcagaaattgaacggcggatacatgtcaaatattcagtttttcaaaccaacaattgttttttctttgcgtttgcctgtatatttgcaaagattcagttagtagctaggcttctatccacctttgcttcggtgcgttttaaattaggatatcatacacag

SEQ ID NO: 149755 - DNA, 614 bp, Zea Mays
gaccgcccgattagagattcacggcccagatcggccccggccgaaggggtatcctatttctaatcgtagccgtccatgcgatgatcaacggtcgcggaagcatcgtctcctacccagcccgagccacccaactggcctcagcgcacggcggcggagtcaccggagtccatgaatccgaccaacccgagcgccagactcaaattcgttcggccctcgcgaaattgacgacgcccagagcctgattcacccatcaattgctactgccatccatcgtaggacctggcccacagtgcaccgcgccagcatcacccgctaccccgaattgacacacgagccatggctaattgagtgcaatacgactgacaaaccaaggaattaacggtgtttctcatacctaattgcgcagcagaggttctccggccccggtggatagttggaggtcgagattccgcgacaacgacgaggaacttcagagagccgcaaccccaatttgtgtgtgcaggggtcttggtttgcttcctgtcgtaccgaagactccaatccgcgacaaaccgaacccacacgatgtgagtgcggtgacggtgccgctcgcaagctctcaatctctctcttcc

SEQ ID NO: 149756 - DNA, 511 bp, Zea Mays
ctcaaatttgtccaaatttccctgtttcagcacaaagcatctgcagccaaacaccttgaaatggctaaccatgggtggccgtccaaatcgcagctcataagaagttttgttcagaaaagcccgaagaaagatgcgattggacacatggcaagcagtgttgatcgcttcggcccaaaagcgcctaggagtcctatgctcatcaagcgtcgtcctggccatctcaacaagggtcggattcttgcgttcaacaatgccattctgctggggcacatacggagaggaaaactgatgctcgagtcccaaagaagcacaaaaggttgcaaactgagtatttttgaattctgtgccattgtcactgcgtatagctctcatggcattcttaggaaactcattttgcaaccgaagaatcaaatctcgagcatgagtaaaggcctcatccttcgccgccataaagaacacccaagagtagcgagagtagtcgtcgacaaccacaagcacataccacttccct

SEQ ID NO: 149757 - DNA, 377 bp, Zea Mays
atttgacctaggtttgctgcagcaggtttgtagaggtatgttttgtgagcaaattttgttaactaaggttagcctgttattactgaaaattgggagaaaatttgctccaaagtgatcctgtcaggttcatgtgttcgggtagctgaaacagaaaattcagggttgggcttctgtaactgaagattttttctctgttggctggacttcactagagtgctcgagttgtaacagagatagagtgtatgaccaaggatttagtgacctcatcactactgcgaaatatttagttttggactgttgtatggcctgtgagcagtaaaaatctcatctgctagctctgtggtggagtgcactggacaacaaaattctgaaagttt

SEQ ID NO: 149758 - DNA, 287 bp, Zea Mays
gcaaagtggtgttggatggaatgaggtcatgggtatgatcattgcggaaccaccaatatgggcaaatataattatcgtaagtttttgacttaaccatgattatttcatttaactaatcattcttatttacttttgattttggttacaatctaattgtagtatattttttatataatgaatagagtaatccaaaggtcaagaaatttcagtcaaggccattccctttgtataatcagttgtcagcactctatgatggcagttgtgccaccggtgatctcaattttaca

SEQ ID NO: 149759 - DNA, 628 bp, Zea Mays
taggtattggtgtgctcgtataccaacttgctgtttatcctttcattgtcaagtattttggaccagttaggccgctacgtccctctgtggtacgtgagaagtacatattaatgggattttcttcagtccaccatttatatgaaaaaagatcaagaacctgaaacaaaaaaataatgttaagtggcgaaatgaatatgcatcagcccagaaaaataaaatcgattgttggatacagagttgaatattagatggggaagattagtggctggtttctttctatgaaaactgtcagggtgtgcctcacaaattaaaagagaagcaaattcttatttcgttaagatggtcttttaattatttccatttatattttcatgtaccatgttcaagtgggtatttgatttgtaggtcttgtctatacttgtcctcgcaatgtatcccttcatggccaaactacaagggctggagctcaagttgctcatcaacatagcttcgcttttagagaatgtgttctctgtgagttagctttttttattagtcagttctccaggaattttttattttgaacagacttatgcatatgcgaacaaaataggctacagttactactgcgtgcaatattttgcaaaac

SEQ ID NO: 149760 - DNA, 471 bp, Zea Mays
tcaccccgaccgaaccattactttcaatctaatcatagccatctacgatcctatcaatggtcatccttcaatgcccaccctacgacggtgacaggcggcggtgccgcgctccacacggcggcgaccatggtcgacgtaggctgacacgctatccaagcgctcaaactcctaaaggaaaggtgctaaacgatgctcaggcaatagcgaaacagagggggattatctcaccggcgattacgcatcggtgatgtttggccacggcaacaggtagcccaccggtaagtcaactgctccgacaagcaattgcgcggggtgctacgtgcgtgattggcatacccagtcatcatccttgaccaccctgcgaatccccaacgacgacaaccatgtggattggccttggcgacctcaccctcactctgagctcgagcttctcacaaggtggtggttctcgggtgttgccttcgatatggt

SEQ ID NO: 149761 - DNA, 672 bp, Zea Mays
cggccgccatgatcagcgagctacaattgcacctattgcgcacgttgtgtggacttatcgtataccccgattaccgagccataattgtgcatgttgcgcttattacgaaggtttgatgtgttgtcgttgccctgatggccgcacacgcgttgacgccatatacgctagagcttgtactagcgtggattgtggtgggttgttcaagcccctgaagtcacattatgtgcaaccttcgtaatttggctttatatcttatttgactgtgttgtgtggcatcatatttatatatcgccaagtggccataacaactatatcaagctctatagtgcttggaaatctgggaaattaaattgaaatacaattaaacacaaataagttaattttctgctctctcctcatgcataaagttttacccgaagtaacccgaagacatataatataatgcatgaaagccattttggcatagaagatatcacacattgggattctattagtaagcaaaagaccttaccaaatgaataaaggctataaatcttagttatatattgctcaaccagatgttggcaaattgctatttgttgctgaatgacatggagcagactttaagataaatgactagtacattagcaacacgaagttgcgagtacatcgaaaggtaattctgagaaattt

SEQ ID NO: 149762 - DNA, 286 bp, Zea Mays
actgcagtattttgtgtgtttatgctttacccaaatgtcttgctcgtgcaattttcttgtacatacagtgggttccatagaccatttctgattctcgagtaacttgtgttgcaacaaacatatcgttcacttcggacctgtgctcttcgttggacaactccatgcgtgcaaactagaaagaaatgcgcatagttttcagtcgagtctcaatctggcaacacgattgcggattttgctctcatacgcgtgatgaactaactgatttggcttgtgcgcaagagcgagc

SEQ ID NO: 149763 - DNA, 286 bp, Zea Mays
tactttttagccgagcagtacattgggccgcaaagctgaaccatttattcttaagagccttaagcgtttcactcagtttcaggttcttctcagcttcgaccttgattgtcatatttaaagcttcggtttcgtgggcgaaccggcttgagttctcttccaaaagtgtttgagtttcctttagctctttgcataatttctcattttgagcccgagcttcagcaagtgagcctttggctgaacgtagcaagatgtctttttatttcaaataatcttcaagttttttgat

SEQ ID NO: 149764 - DNA, 962 bp, Zea Mays
atgaaattcatctccaaattctgatggtgattattgttaggcaaatcaacatgggcctgagggggcacaacctccaaatcctgggcctgatccacttgaggcgccggtccatcaacctcctgaggcccattgaaaggggcagcattgatgtccattccattcccaatcagagcatgaccattcaccgcaaaatgaccattcgtggggggtgcaagctgaccagcaccaatggagctatcagatgacaagccagagtgctgattgctgagttgcagttcttcctgctgaatgtgttgctcctcttgcaaagggggttgttggtcttgctgaatgggctgctcattcacaatccactggtcccactctccatggcccaagtcatcctgctgagccggcagcactccaccctcaggctccggaggaaagtttaagtcaagccctgccggaggcaaaggttgacccaacccgaagaaggccagggggagctgatgtccatcctcgggggccggagggatggggtcctcatcctgagcctgaccgccaagcatgagctactggataatttcacattgcaccgtccaggagtccccagcaaagccctcggcctccgaaaaaacaataaattgggggacctcctccagcgaagtgactcgaacacggagcagggttctagagatattacttcgatcctcctcccacagaatcaacctcccaaacgacccattggcggcctgcagatactctgaagaacgataatccaagggaaaccccagcagcataagccaacattcatggttgaagagaagggcacggtggttccaggcatcattgtgacggaccacagagaaagtagcgtccaaatactgctggggaccaagcagaaccaagttatcccgctccaacacactacggaattgcaccaacacttgtcccaaatgcgagcgctgaatggcacggacacc

SEQ ID NO: 149765 - DNA, 748 bp, Zea Mays
ggggctcaagggctgcatctaacagatgcgctcgcgtgcaccggaagtgccgaacaccaacaaagtacagaatggcaacaaactcgcgcttagagcacgacaaccgtcgtagaaagggtccgtccctaaactgcattttcaccaagtaaacccccaaacaatccacatggattactcgggggctcgggtgctacatctagcagatgcgcttgcgcgcacccgagcgttccgccctcaccaagggaaaatagacccgcgcccagcgggcggcgtcaatcgcagaaagggtctgtccctaaaccgcattatcaccaagtaaacccccaagcaatccacatggattactcttgcgcgcccctaagcgtatagggcaccaagcataagcctccgtgcaactccaaggagtcgcctgaaggctcgggagctgctgtcgaggtacctaggaacggggtacccaaggtaaggcccataacctattttcggcatgttcgatcgagcaagtccgcgaggcggagcggaccaccaagtcgccgcttaccaagtccgcgagacagagcggacgaccaagtccccaccgagcaagtctgggagcggacaaccaagttcccgccgagcaagtctgcgaagcggacgaccaagtctccaccgatcaattctacgaggtgaggtagacgaccaagtccccgccaagcaagtctgcgaggcgaggcggacgaccaaatccccgccgagcaagtctgcaaggtgg

SEQ ID NO: 149766 - DNA, 421 bp, Zea Mays
tcacctattcaccccccccctctaggtgctctcatccttgttgtttgcattactgatttttcgaccaaaccgtcgaaggtcttattctctttggtacacggtggcggccataccacacacatatggtctcacaaaactacaagatcctcagagtataacaacaatgcaagcaagcacctaatagcaagaagtatggaaacatcactaacactaggtctaaacataaagtaagcatatttagcaattgtctaactaacataagcactttgtaaagcccctacattatttagcaagtgttcactaaagcaccatgcatgtggagagctctaaaatgttgtagcaataccctacaacaacttcccaagtccttccacattaaatgagtcaattttgggagggggatatatatatagccccaccc

SEQ ID NO: 149767 - DNA, 963 bp, Zea Mays
gacactagcaaccaaagtcaaaagaattagcaattcgttgctgcccaaaaacatccttgattaaccctgcaatcacacactctgacttctctaggctttggaaggttctgatgttccgctctttccaaatctcccaccagaaaaggatgatcaaaccatcaaactctctccttgagcatttatcgactttggctctgcacttgttccaccaagtgtttattgacgaagattgtgccatccctggcagcaacgcgaggtcaagccaatgagaaagttgcgcccacaccgccctagtgaagatacagttttggaacaagtgggttatagcttctggttcttgtttgcaaagtctgcagatcggatcattactccaacctcttttttggagattttcagctgttaagatcttattatgtagtagagtccacgcgaagaaacgacattttggctccactttcgccttccaaattggtaatagattgcacttggcataccctccaatgaattgggccaaataggcactcctggttgagtaggcaccatcattggtccagcaccagtaaatggcatcctcaatccctggatttaattgcacctcgcgcagagcttcctagagagccacgaactctctaatttccttggccccaacaactggagaaatgtggaatatccatctgttatttgttgtggcttttagaactgaaatattcttccgtgaggacttggcaaagagcgtgggagctatcaatcgtgccgacatgccatcgatccaacacgaatgccaaaaagaggctttaaccccattgcccactatcaccactatagacgcatgaaagagatcccgatcaaccttgctacagggaatgtccaaaccgacccaagctctttcttaatttttccattcaaaccaaagccaacgaagccgtaaagctcttgcaaaacgctccagatcgacgattccca

SEQ ID NO: 149768 - DNA, 296 bp, Zea Mays
gcaccatcgttgcctcaggaagtcataatgattagttgtaccagacaaagacattgctagctttcgatagttcatcagacagcttgaatctaattgctttttatgcccacaaaataataaaaaatggataacaaaatttcatataggtgtaacaggtttggtaacaatgaatggataaagaaacagaaagcaccaaaagttccaaagagactaattaacatattaatttgtaataatgcacaaattgccgaaacaaaagaaaccactaaagataaatacataagtttagtttgaga

SEQ ID NO: 149769 - DNA, 573 bp, Zea Mays
cgcggttgagttgttcttcacggtggcggagataagtttgggggaaatttgaaattccagagctcaggtgaatgatcggggctaattcttggtgattggatacttaactaccttacggagcttgcggcggggtcaatttatactacgggagggcggcggccgggaatttgatcggtgacgcgcggcggtcagagaaagggaaaatttactggcgcaatggcttggtgtccagcgtcgtggcaattgctccagcgatcaacggggagctagaatgagtcacggtgatgtggtagataagcagagacacgcggcggacaacggcgacggcataacggcggtgagaatccttatccgagggcggtgagcaaggggagaggtatcgcggctagccggagtggcttccagctcaccggcggcgatgatcttttaccccgcgacgttatcgactttccccgagtacgaattgggacgccggcggcacgaatcgtggcaaggagatcgtcggcggcgagggactgccgcgctagcgttctgatctgctcagacactgtaccatggcgagctccattcagt

SEQ ID NO: 149770 - DNA, 553 bp, Zea Mays
caagctctatagtatcaaaacccagccagtccatatttattacccggatgttggcaactatggctgactaccttcagctgaatccagcccgcaatcccttcaaccacctaacgatgcccctgaatatacattctctttcacctaacaaccgcaattatcaacagcacaaaatctccaaaagaaccaatgcaacctccagatgtgcaacttaacagtatgctaagcaagatatctctagtacctcaattgacacagtagttccttaaaacacctgggaccacatggtatcagtaatctaattcagtacttcacaccgtggcatctttttctttcttctcatagctaggtaaagtacaagtacattaaactctgcaattggccaatagcgacaaagtaattctaggattgaatatggagtataaacattttgttatagtttcaattagttgcattctaactgtgataacaaactaacctttttcatctaaaacaccaaaacttaattgaaacaacacaacaaagaaaatagaacatgaatacatataaaatagaa

SEQ ID NO: 149771 - DNA, 863 bp, Zea Mays
ggaaacgaagcttggggcaggcaccgggactggcaaccccgtcgccatttgccaccttcactgagaggcctgagtgtggtgtgatttggaggctgagatctcatgtgatgtcctcctggagaaaggaatgcatggactcggaatccacaagtgccaccagagatgcagagctgatgcacaccttcagccacatcgtgacaccaacatcaattccaacgagggcatgtaagatacccaaattagcagccgcaatatcttcttcctcatcgtcgtctagtgctaataagaacacccctgtggatgcgcatttgtgctcgggtgtgaacttctcgttgcagtgatataattcaccactagctcgtttggctgcaagctcctctgctgacatccgtttaaactgtggatggttggtctaggccgactttgctagtactgtttgtgtgccgaacttgaatgttgatatcgttggcttggtgttggcctttgtggctttgtccatcttgttgggtccgcgtcccggcgttcataggctcgtgtcaaactcatggttgtctgtgggagcaatggggactgaagctccatgtctttgcgcaatggttcgcccagccctgcgatgaagagattcacatgctgcaatgtggaaagatcatcgcagcgacacaggagcaccgagaattgtcgtatgtagtcgtccaccaatctcgtacgtcagagatccttcaattcggccaggacgtttgtgcgtagggtggtccgaatctcatattaacgaagttggtcaaacgggaccacgagagaatgccatggtcgtgctccagagtataataccactctacagcaatgccttcaaggtgtaatgccgc

SEQ ID NO: 149772 - DNA, 500 bp, Zea Mays
gaaaggggcagcatgcataggaaaggaaggagtcagcgcaggaaaggaagaagaggtcagtaggaaggttttgattgaataaatcaaatcctccaatcaagggctgagttgttaggaagtttagatttgatatttctgtttccaaatatctaggttaagtaataggaaaggtttggtggctcatcatctataaagccagccgatagtttgtactaggggtctatcgaagaagttattccttagtggacagctcttcggtcaccctggctcatccagccagctgcgacatcagctgcccactacccccatatccactgcgttccaaccctcaagctcgcctccttctctactcacctctgaagagtccccggcgccatatcataatctaacaaatattaatcttcccatggtttagttttgagaagctaaagtaaagcacttatgaaatgggttcaggaacaagcattgttgattcctactttggcaccaaatatgaactt

SEQ ID NO: 149773 - DNA, 505 bp, Zea Mays
atttggactgaccggtgaaacttcacattcattggtgtcaccatcttcttgtgtcacaattgattgcctcgtgtggtgtacctccttgttcagcaatggtgaaagcagtggccatatgaggagaccagtgatcaacaccaatacttgtgatgctgccaaaacatatttctagttcctccatattttgaagttcccacaacttggaatgtcctgtaaaagagcaacatgtggtgcacgaattacaagaaatcagaaatgtacatgacataaatagaaaagaaagcaataactcaacacttataacttcagcttttttccaccacctgccagccatatcgatggttccttttgtagagcacccaccagtacatgtcttcctcatcaacttcttccatgccttgaattctttcaacctgtcccatttgttctttatttgtgtcttggttgccacaatatggaccatgtctttcaatcctttttcaacctcggcataaccaaccaagtc

SEQ ID NO: 149774 - DNA, 291 bp, Zea Mays
accaccacaccgcttgccctccccgatctccgcacgctccggccagcgggacccaacggacagccagccgaacatatcccccctacgctggcgccgtcgcacgcgccgccactaggtgtcacccgtccttgcgccgccgccgcatccttcgactttcgatctgcgagctagcgattctccgctgaggagtggggcccatccctccggagcccaaccccagggcatccgcccgcccccgccgccgtggctcaggccccacgcgtcatccccgcgacggacaacgtagtcacg

SEQ ID NO: 149775 - DNA, 439 bp, Zea Mays
tctgaactacttgctaaagagactcgcctcaaagcattgtcttctgctactggttctaagtctcacaatgtgttggctgctactcagaagtcctatgtggcaaggagatattcctcagtaccttgtgagcattgcaagaagcacactcatcggtctgaaaattgttttgttaaatttccagagaagttggccgatttccgtacacgacaggcaggcagctcgtggtcgtggcaaaggttctgcacctagaggttcagttgctattgcatctacttcaccagctacagcctcgccatcgtcttgggctcttgactcaggggcctcctttcatgtgacatctgatcagacacaattagtctcttctacacctgtcacagaaaatgcctctattcagaccgcagatggtactttatgccatataacccacaagggttctctt

SEQ ID NO: 149776 - DNA, 674 bp, Zea Mays
caaaatgcagggtactagtggtacgctagacgggtggtgtccaaataaattaaccagtcgatgtagtagttgtcgtgcgtgatttattgttagtgagtagtttgaattacgaactatatgaggattatgttagaaactagtgtgtggcctgtgactgtgctcgggtggtaaacaataggtcagtaggtattgtcggtgtcattggcaaatggggatgattcttgttttgcgataaaatttgaaaggcaaagaacatgggtaatgtgtcgatcaagttaatcgataggtttcgtaaacatgcttgtgatgcttttatgtgcatgataaaatcgatgcattgtcgtcgtagtcttaggaaattttctgaaatgcgctagtgctctactgatgggttgaatgtacttgagatgtattacaatagctgggtgtcgcgcaggttatccaaagatggcgaaaggtggcgtatgttggtaattgggaaatagtcacgtcattagccaactcgtgttaaacaggagtcgattgcgttaagcgattgctatatacatattgtgtctcggagtgctatgataatgagttagcagacttgttagatggttttgggttaagttcgtggtcacgatgaattgctagttgtagtctaaatgtgtgtggttatggtcgcgggtaaaaat

SEQ ID NO: 149777 - DNA, 364 bp, Zea Mays
gttgtccactggatgatctatttggatggtatggtggactcgaggatgaggcactgatggttgtctttgaatttgctcttcatcatcatcctcttgttcaagaggcacttcattaacaacaactccaggttcatcttccacaatagttggcagctcttgtggttgatgaacttcttcaaggattggatgccttgaggttgatgggttcgcttgagtggaggatttatcacccaccacctttgcacccacatcaaagacctcatttgtcatccaaaaggttccttcttcatcattcatttcttgtggtctcacttcacctattgcaagcttctttatggcctcacaaggtggttcttcatttcat

SEQ ID NO: 149778 - DNA, 357 bp, Zea Mays
ccgaacgggcactaaaggaaacactcgagcatgcggcagtgtttgcctatgggcattatagtacagaacgggactggacaaagcgacgaaactgtcaggcagcattatggtaggtctcaacacttttagcatggcacagtatgctctcggcgtttcaacataatcaatgacgactccgcccagctcagcgggcgaaaggcccagagaacaaaagctgttcgctgaagttgggtctctcaacagccagttccgtgactacacaaagctcatgctcatgtcgtgccaagataagcattagctaggagttacattcgcatcttgatgaattgcgtgtgggcagacctgcacgttcttttt

SEQ ID NO: 149779 - DNA, 765 bp, Zea Mays
tagccacggcggtccggctaacgattagcgatcgcggattgcattgttcacgcatggctaccacgtagagaagaggcacaataagggaaaaacgaggcatgggtgacaccgcggcggaagcgaccgagccacggcgaccgccggtgggatatctccggccacgcatgactgagttcgcgggatggtgccacgtccgaagttatctctccgcgatcaaatccctttcaccagatcactcgagcacatccgattcaatagtgccttagatcttttatccgcgttcttcagatatttgcagagttttgatcttcagcgttttactgaaccgaccaccttccatcctctctatctcctaattcttgttaagaacagggtgatcttcattaataaaacttgttcaccaaacaacagtctttaagtttactataaggttcatggttcaattctgtacagattttcagatttggtgctctcaattcgactgcatttcattggggccatacctatctgaacccaattttcagatttgcccaacttactcctgacagcacaacttcacccttatttatctccaatttctgttcaacaccagtgatcagtcacttaatcaaacttgttctcctatgatagctctacaaacttgatgtgttaacatagggcaaaatcttcataatttggaagatatagagcttcaaagttgagccaattcaatgaaatttagacatagccattggagcacaaatgtggtctttttgcaaataagcc

SEQ ID NO: 149780 - DNA, 1769 bp, Zea Mays
ggcgacctgggttgatgcttcgaaaaggtatgagccattctcctcctccctacaaccttcatcttctccgaaacttttactgaatgtgacatcgcagcgccagatccatcctaaagagttatagcttcatacgaaaaaacaggttagttcctctttattttttagaacgggcacttacaataccattttttcactgtgaagaaaagggacaaaaagggattctcacctgaacagcagattactagatcagatacggactggtgatgttgactaaattaattactataaagtacgccatcgtcgttgcctggaagctagaaagaaatcagtttatactaactcaaaacgaataatatatataatgcacatttaactaactaaaaaaagatagaaagacttcagctcaccaacatatacggtatctgcatctgtgaataatatatatgatgcacatttaactaactcaaaaaagagagaaagacttcagctcaccatcgtatacggtatctgcatctgtgttctacatatgtaggctgagaagtaaactaaaagtttctacaatatagaacaattattaggaacatagaaaatatggtatgaggaaatatgtgaaacattgtgcacaagaaacgtttattctggtgatgggtgtaattggatcaccacctctattgtcatgcatacattagttgttaatattgatgtttcttatcaataaatctattcaatgtcaaaacatgatttaaccacaactcctaaaattatgaaggtactcctcatgcccgacatgtatgcagggacaatatcatatatgtagctattatttttttatttgcatggctggcaaatggtttgtagctataccaaatttgcatgaaaaagaaaaaaactaaaatttatcatactcataactgtcatacttattatgtatgattagatttgtcattaaacaatttacaaagcatgtctgatcatacatgttaagatcaaagttcaaaatctgttatatatggtataatacctctgagaggataacgactattacaacatctttatattcttaacatgtatgaattcgataattgacatggtactatgtcttttataaaatttgtcactcccagggctgttataatacaatattgttaacatgtaaatttaaaatataatttttcaaagctgttacaagttacataacatctttgacattataacaacttaaaatcttaacatcaaagtcagtagctgactagctggtttattgcccgaggtcctacttcataatcatatgaaatcaacttctatcatgctatgctacttggggcctatttggtttgttgagattcttagaatctagcacaaaaaatcataatatgccaaacatgtctcattttgtatctagattctagacaaaaatctgagtatccaactacaccttgataatataagataatgggcacattatccaaagctaaaatcccatgcctaccaaacgacaccttggaaagatatcgtgcttaagttttgtaatgcagattcaatataacaagccaaaattgtatagtataccaagttaacaactcacaaagaccttaaattgtgataaaccggttcaaattgatgtcttgtgcatgtgttcaatatatgtggtcttttctcaatatatatgtttatgtacattattattcacttactaatttgttatcctaactgattctgattgcctgttatcctaaccgattctacatgcctgctcatctcgctggacg

SEQ ID NO: 149781 - DNA, 459 bp, Zea Mays
ctgcgtccaggtggatggaggtccttgcgctggagggtagcctttccaacctcagggacgctgaggttagctccaatgtcccagcccaaggaagggggctggcgttggaccccatcgtgcttgcggcatcctccagaggtcgcgtgggggcaccagttccggtgatgatgagggggggagcgacactggtggcgttgcgccctcccacatcccaaccgacggatgtaccttgcatggagcctcaagcgtcattgcaaacaccggggctcttcatgtcatcgaggcgtcgtgaggggaggaaaacagaggtggttccctctcacatgccttccgtcgccacgctaaagaaggtgaccacccgaaagtgttatctgtgtttctcttcttgttcccttgccagcatgtatgtgccacacaagacgatgaagggcggagacctcactttcggagaggcggttt

SEQ ID NO: 149782 - DNA, 314 bp, Zea Mays
gtcaggttggtcgcgcccgcggcaccgtagaagcggtaatgacggatctggtcgagatggctacggcaacaacaaatccagccatggaacacagtgatccagctaaagggatgacagatccaacctggagggtcgcaacaatgtgaatccgaccgaaaaggccgtgcagtgacgaatccaatgaaagtgacgatgaaaggggaaggcgatgcggcggttccagacaagcaggagcctgcgttgggcctagcacaaagggtttgacgccgacaactcaagaaacttggaggacgggggacactgttgggcgtctc

SEQ ID NO: 149783 - DNA, 384 bp, Zea Mays
atcttacgcaaattatttatattaactaaatcatcttagaaatatagttttacgcgtttcatcacaaattagtactattcgtatgtcgcgtcgttcgcgcgcattgtttcgcacggtggcgcgtgtattgttttcccatgctgtttcgcgtagggatggcaacgggtttaaaacccgcgggtacagagattacaaactcgtacccgcgagattaatgttaaacccgtatccgcatccgttacccgcgacgggtagcgtatgttatccaaacccgctacccgcgggtttatggcacccgcgggtacaaccgcgggcacagtcataataaatatttattaaactgatagcacataataaaaaatatttattaaactgataaaaaca

SEQ ID NO: 149784 - DNA, 1803 bp, Zea Mays
ggccgtctagatgtctgcgtgccagtctggatgctgcaggtgtggatgtgggagcgctacaagaggctgtgcccgccggagctgaaggcaccgcagttccctgtctccaatgtcagggtattgtattggagccggaggaagaagaagagcacatctgaagaggctctaaagattttgctggacgaagtatgctttgagtggaggccctatcggcacaactccctcaactggatggaacccaagtggttcaacaaggacaccattttggtgacctgtcatggtaaagataagccagagtggttgttggattacattgctgttatcagtcaaacaatgttgaccgggtttcatagtgatgacaccgacaattcagtactgtacaatccacagcttgttgcgagacagtttggttatgatcaggctgctcctgtgtccattgtcagggaaatccactttgagggaatcgagttgtggataccaagtatcggtagatatgggatgcctggtgaagattatgttgcatggtgtagcagcagtgggcagttctacaagcatcaaaatgatgtccaatatggttgctcggtattacgaaatcatgaaaatggggctatttcgtcgcaactgaatgtaaatgagaaatgtgttgtagtgccaacacttgatcaatttatcacccaagtcactaggagagaccacatcaattacattgtagaagggcagccggagaaaatggataatggaagtcatgaggatgaaacagaggtgattgtctgtggccttgaagcttgtgtcaaggatagcagaactacttcagtgaaacagaatgtgcagaaacaaagagataaatttgctgaagatggaggtgatagtaagaagaaaagaaaagtagaaagtaacacgaaaaggagttcgttgcaattggaaggtcagaagtattcttcactccagaaagctctaaattctgattctaagaaatgtgaggagttggctcaagttgacagtgatgatgaatgcattgttctcgaacagcccaagaataaatgtgaagtaataaacctggatgatgatgaggaacagagtgtttctaatcgagaacatcataacatgcaacttgtcctagaactggaagagtttgtccgctctggtcttctctcgcaatgggaggaaagctcagatgaagatgatgtaagtggaagcaagcaagaaacccagaagaaaagcaacaatgacccctatgctgaagcagccatgagggagtaccctctgttctttgagttcattcctcagaaaccacattacagaggcttcgtgaactatgatgaaactttaggagatctaccttacagtggattatggtttttgctaattggcttggctaaggaggtgctcaagacgtcatgtgacacagatgcttctgaaattgcatatctgatgaaaaaagcccagcatttagagcaactgggtttcaacgtgacacatctcattgcccgcttaaaggagccacaaattaggcttaagaagcttcaagattctagagcaaggcttgatcatgcccgtgagaaagaggagggcaacgtagtcgagtctctttcaagccatctgaataaactgaagggcaacataaggatgatggatagtcatctggatggaacgaagcaagcttttatttcaaatatacaagataaattgaatgaaggaattaatcttgccagtttggaaaaggaagtagaaactgctgaaaaatgttgtcaggcaatgaaggatgaagtagctgcaatgagaatgaggtactcggaccgtgga

SEQ ID NO: 149785 - DNA, 326 bp, Zea Mays
gttgttgtctacttcttccctgatacttggcccctctgggatgtagtctcgacttgtcgaggctggatgccagtaaacttaaggagtcggtgacctggacctgcacacagcgtaatattgacctgcagggcctgtgctggggggccgatccgtgtgtctggaccccctgggtcacgacttccctttcgttggagccggacctcgggttttcggaccaacaggattcatagtatcgaatactaagacaaccgccacggggtggtggggcgcgttggcttagggtaccaaacctaagccaggcggccacacggttcctcatgggcgat

SEQ ID NO: 149786 - DNA, 275 bp, Zea Mays
agagggaagaccaggggcggcggccgggtgggagaagaccaggggcggcggccgggtgggagaagaccaaaccctagctggataccatgttggagagaatgattaattgggccaaccctagtgagggtggctgtatatagttcatacatgggcctcatgggcctagccacatgggcctaatccatatactctaacactggccacccgttgaaggttaccacaaccaccatcaagataatttccagcattgtctctagccacaaaaccccaccctc

SEQ ID NO: 149787 - DNA, 544 bp, Zea Mays
cgtaaactactagtctccaactcacaatcaccatgcatttactccccgatcatgaacacatacatgtttatcatacgaacagagcatttcaataattatcctaaaacaattaactccactacccaacttataccacaaacctacttgacttgcttgaagtgtctactcgaatccgtgagcacaatcacacattacatgcgaagcataatttaacgaacacataatacgcatcgactcaattcgacttataaatatcgagaaagcgatgattagtttggcatgtcaccacctctctaattaagcaaaaacaatttctacttatatcgaccgaatattcgtgtcgagcacaccttatgttaccttgtctcgcatacaaccatgttgtggcatgcactcgagacactaccgattaacttaacgcaattaccaccacaatgcacttcgatatacacgttcgacatcacagtgcttcgatagacctcacacttccaatctaattgtcacatccaaacacaccacgtgaccactgcattcttataaccaa

SEQ ID NO: 149788 - DNA, 574 bp, Zea Mays
atgagatttccaggtagcgatcacttcatttatgatcttatcagctgctatctactcctgcttagtttttcactcactcatgcaacactcaggtcaggatggtgcggacgaagaatgtctcagcgtcagggggaggagacgacgaggacccttcaagccccttcaggcaggtcaagggaaagattgtttaccttgagcagcagaagggcaggaagaagcgtcgtatggacagagccgctcatgcagtacttgcagcggtagtagcagcagagcaggcagagcagggaggacaattgcatatcccttttgattagatagcctacagagttcgtcgtctcgcatctcgacctctctccactgctccctccacaccttccgccatagtgtctaagccacctcccacttcaccagctcctgtcactccagagccatccaccacttcctctatacccaccacctccaccactctagctttcactgttccccatcccgctcccatttctgctccgcccattcctccacctctattcagagagcttgacgagactgaggtgcaaccactagctgctgatcc

SEQ ID NO: 149789 - DNA, 457 bp, Zea Mays
gggagctcagcctctagccagagtgcgcgtacagggcgtgaggggtaagccgccataggtgttgtgcaggctacaggagagccacgcccgaccgacctgcacggtagccggtagggacacggtgaggggttgcaggaaggggcttggctacgaccatggtgaggttgcggggagacttcaggcagcacgcggaggggctgctgccgtgcctaggcgtgcgagggacttcagtgatgggcaccggtaggatcaacgaaggaggaggggagaagaagaggactcaccccggtcatgacgatcggtaaccgaaggggcgcctgctttgtctgagagaagtggaggagtgggcgggacatgggcgggcagttggagaagaggaatactaggaggggaaggaactgacgtgcgggaccctctgcgcagccaacagcctggagcagcgtgatgctaggcgcgg

SEQ ID NO: 149790 - DNA, 445 bp, Zea Mays
gatggatactagagcatccaaataaaacctaatcaagatcttgcacgcagtgccgctaccttgcgtcatagtccgcaccagtagatgggtaggctatcggtaggatctttccttggcaccatgacgccatctacgctcactatctcactgggtctcactatgtcgttgcaacgcgacaatggctgccgctgccatgtaccgacgcatcatcgcctgccctcgctaaccctcgcatgttgtcacctcaccattaccgttttgcgttagattcattgacacgtaacacgccacacgccacactgacgcaccaagcggctgctctgccctagcacaccgccaccgtcggcctaccctctttgccctctccaactctcatttaggatgaccaaaaaggtttttttatattcatatcattttagaacacttctcgtattatcacttaatc

SEQ ID NO: 149791 - DNA, 327 bp, Zea Mays
gggctggccgcggtgaagccggtttcacggtggcggaaggtgatttggggcaaaaccaaaattcatgcactcggaggcacgattgctagcgattgttggtggccgagggggtgatggtgttacgcagctaggggagggctcaatttataggcggagtgagcggtggccgcaaattttggacgagcaacgcggcggccggaggtggagaagaacactggcgcagtgaatacgtgttcaacgtcgtggcagctattccggtgagcaacggggagctaaagtgaatcgtggcggtgcagtagcgaggctcggacacgcggcgcaaggccg

SEQ ID NO: 149792 - DNA, 433 bp, Zea Mays
gtttagctacagtaccttccactgtttacaagtcgtccgattaatcgttcaagtcggtttaaaccaatcacaattagtcgtccaagtcggtcagccgccagaatggtagcttctcaatatccactcccgttctatattccaaattgcaattgaaaggaaaacaacacaaaccatgctgagattaaaacagcgtccaccatccattaacctattctctcagagcgaaactacaaaatgacagttttcccccaacagcaaatggagtttacagacatcttcctcccccttcgtttcacttttccccctcactagcttcccatgtctccaaaaaccgagcacaaccgggggggaggggagataagtacgtggaggcagagaacaacataccagaaggatttgatgcagtggcttcaagagacaccaaagagctgct

SEQ ID NO: 149793 - DNA, 378 bp, Zea Mays
tgttttaccttgacacaacctctgtgatgggtccatgtgccacctctgattctgtcagatctatgccctgagttttgaggccaaatctatgaaatcattgttgggtggttttgtggatcgacctccaaactaccgtaggtagcatactccgtacatgttgccacgtcctggacatgtgtctcgccagtcctagaccgcactggtgacacaatccgctctgtcatattcttgaacctgttagagtatgtatgtgtcagccatcacatttagtcagctaacttcttcattccctcatttaagtcctagcgctcatcgttcatcgctcataatccatcggcacgaacccgtatgtccttcaccttcatcatcgaccaccgc

SEQ ID NO: 149794 - DNA, 586 bp, Zea Mays
taaaaaaggaaatgataatatgattgttgatgctttgtatagacgttatactatgttatcccaacttaatcataaaatatttggtttgttgactataaagtgattatatgctgatgatttggacttcaaagatgcttttgcaaattgcagagagggaagaacatggcaaaaatttatgctgcgtgaagaccttctctatcgtgctaacaagttgtgtgttccagctagctccgttcgtcttctactcttataggaagtgcatggcggtggcttgatgggacattttggtgttaaaaagactgaggatgtgctgtccactcacttctattggcctcaaatgcaccgtgatgttgagcgctacgtcttgtgatgcaccacgtgcaacaaagctatgtctcgacttaacccacatggtctttatatgcctcttcttgttcctagtgcaccttgggaggatatttctatggactttgttttagggttgcctagaacaaatagggggagtgatagcgtttttgtggttgtcgatcgtttctccaagatggaacattttataccctgtcacaaaactgataatgcttcgcat

SEQ ID NO: 149795 - DNA, 565 bp, Zea Mays
cggggtaccaccaggtgcaaatgtgggtcgacgatgtccacaagacggctttccgcacccatgacggtctctatgagttcctcgtgatgccgtttgggttgtgcaatggcccggccacgttccaggcactcatgaacgacgtgctccgccccttcctccgacgcttcgtgcttgtgtttttcgatgatattttgatctacggcaaatcttgggcggaccacctcagacatcttcgcaccgtcctcaccgagctccgtcgccacaccttgttcgtcaagcgctccaagtgtgcattcggagttccaacggtcgcctacctcggccacaagatcttggcggcaggcgtggccatggatgcagccaaggtgcgggccatagtggattggccggtgccacgttcaccgcgggcggtacgcgggttcctcggcttggcgggctactaccgcaagttcatccacaactacggcttcatcgctgcaccactcaccgctctgctcaagcgggaaggcttcgcatggagtgtcgaggcggccgcggccttcaccgagctcaaagccgcggtcac

SEQ ID NO: 149796 - DNA, 427 bp, Zea Mays
tggggaattggataggtagggagtggataggctttgtcggtaggtcctttttccggggagaattcgcctgagttccttggaataaaagaagatttgcgatccttaagcctcacgttccttgatctgctggtgtggaagttgatcttgatcatgttcccgttcgtcgtcttcatgggtacgctccagggttccttctctgttttcttgtgttcaccttgatggctactggtgcgaattttgagtttcttaaatgtttcatggttcctttttttaaccactggggccatgtcgcaattggtgtatcatcacggcgtgtattgtgctgaattgggtgcgggtttgctatctaatatttgcgcatggttttgttgttgcgtgaaaagattggtctttgatgtgattgttgtggttagccatcagaatcagg

SEQ ID NO: 149797 - DNA, 438 bp, Zea Mays
gggatgctggtacttcggttcctgctgttgaagaaatgcctgtgactgaatttactgatgctgaccccaatgggtgtacccaatccgctgctgatcccaatgtgggtgctccatctgttgctgatcccaatgggggtgctgcttgtgttgccaatgtggacgacgaggaggaggaagatgaagttcctttgactcggaaaaacagtcgacagttcatcgctagcggtgaaagtagtggagttccctctcctgctttgtctgctctcattggtctgcaagaactgtccctggccaactttgatcagactcttgaggatatggttccagaggacatgttatcagagccggtggatgatggtgtgatggaggtttgcactgatgtgcttgatgctgggttgaggtcatcccgtgcctcgtcgaccttagagcgcgatctcg

SEQ ID NO: 149798 - DNA, 846 bp, Zea Mays
gcaggagtaggcgcagccagatactgaggaaaaccctgcaccggcacgaactgagaagtcccaagcacataaaactgctgcggaggaagtggaactgaaaattgctgctcagcgcttgacatcatgttgacagtgccctgagaagaggaggaagtcactggctcccatctgagcttcccattgggattcctcctacacaccacatccttgtggtcttgactgcagattgaacacctgtcgttccactggcactctgcacggcgatgcatcaccacaacagaaacacaccagccccagcccgggcttaggaacagcccgaaacctctgagtacttcctcccgaagcacccgagtcagaggatttcccacggtagggatggtggcgctgatgctgagacttgcccctcttgtgggctggacctctagtgttgcccctcctcgcgtcctggccacgaggctgatcaacacccgatgacttctgcgactccatggtatactggtgttgcatctccacacccagtgcctgctccactgtagtacggaagtccaccaatggaaaggctcccagggcatgcctgatggaaggtttcaggccctgacggaactggctcgccttctccatctcattataagccacatgagggacaaagcggaccatcttgttgaagcccacttcatactctgtgacagacttcttctcctgcttgtaggactgcaaatcaatcttcattttctccaggaaggtgaccgggtagaatcttctttcaaactgcctgatgaagacatcccaagacaggactcctggtgaggaggagtgcgctgcctgcatgcctctccaccaattttg

SEQ ID NO: 149799 - DNA, 472 bp, Zea Mays
atagatcttatcgaaatttaggaagggtcctttgaccggaactgccttcgacccgatgcctttgccaactggtgttccagtgcctatgtgtttttatggtgattcttgcaaggttgataagtctgaggatcatgatacctatcgatagaggtatcggatgtgtgctaactttgcatttgagccaacgattgttcagcgtcggctgaatttaatggtgagaatagtcttgtaatatgttagcaatttgaagactcagagtggtgaatgttttctttgcctactaataattgcatgttttgtagactcctccaccgctttgtgattttgagcagtggattgacacagaaatatcacagaaagacaagaagtggttggagaatcttaaaaagtgggatgcagaggacaaagagaggatggagaaaagacgagaggagcttgctgccgagcaacaacgggaagacgagcaggaaat

SEQ ID NO: 149800 - DNA, 511 bp, Zea Mays
ccccgacggcgcatcccgctgccagaggactactccggcgacggccaccgagctcgatactacaccataatgcaattacgcggtactacacgcacacactgcaaaggcgattaggtcggaagctcatttaccaggaattaggtgacggttgtggctgcccacgctacgcgcgaccacccagctggaagcgaacgacggcgatgaattgtcgtcgagctgatgatccctcgaacctccggttgctaccatgacgtgcgcaaatccgcggcgaacacccagagcacgacaccgatgcccaagccatgcccaaacccaggatggcagagaggccctccttcctctatcgtgagtgctggtggcgacgaaatttggtttagcggctagggttcggtcgagtgcgcttttatacgcgtggacggggccaacgcacgacgttgattctccgaaaaccccggcgagattagcacggcgcatgcgggcagcgacgacgcgcatcggctccggagatgac

SEQ ID NO: 149801 - DNA, 566 bp, Zea Mays
ggaaactatacaccagatgactgtttcaggaaacggtcacaagcaagcactcgaatattccatactgcaaattagacctgaatcttgaaccttccaggctcaatgcttcgcacaaaatccgcccagcaacaaacattatacgattttcaagttacaaccaagcctgctgaaaaccaaaacctttgccagttgctcaatttgaattctcgtcacttcagccgccaaactgtcatcatcttcattcttcaggaagctcgcctaccatgataaaaattctgtgctaaaacgatgatgcgaagtgtaagctatgtgcatcagtacacgaattggtcgcctttcgtagctcaacatataatatagatatagatcttaactatatatataccagtctggacatctactcgtcaacatgcgcgatctcacccatcatgatacgggtgctctgaaccttgaaccccaaagctgacgtgctcagctttgtacctttcttccccttcttatgaatgtccaatgcagtagaccttgtattgaccacggaactcggaggtgattggagtctcggcctg

SEQ ID NO: 149802 - DNA, 574 bp, Zea Mays
gacaatttccaccattaacatcctccctttccaaagaaacacccatcgaattttgttaatcgatttaactacctacagtcgggccgccacccccttggtggcgctctgcgtcgtgatctggatgcagtgtcaagtgagcaaggatcgggtcgttgcttccttagtgacgcgctacatcggtgcccgggtgtagtgacaatgtgcaagggtcttcgcatctgtctcaacgggtgcgaggggtaaggaagctagttgagccgactacgatccatgtaggtagttggaacatagggtccctttcaggtaagctaagagagttagtcaatgcagtgagtaggaggcgtgttaatatcctatgtgtacagaagacaaaatggaaggggcaaaaagcgaaggaggtggagaacactggttccaactttggtactcaggaacagtggcaaacaaaaatggagtaggtatcctgattgataagaccctcaaggattgagtggtggatgccaaaaggcagggagataggattatcctagtcaaactagttttggaggatgtagtcttgaacattataagtgcg

SEQ ID NO: 149803 - DNA, 520 bp, Zea Mays
actctagcagcaaagtacttatatcaggtgatgagacagacactgctgccccggatgggttataaagaggcaccactcacattcagctctggctacttggtgctttgatttctcactcagagtttgatgtggttgatttccttgcgcgggtgctccaacgaggactaggggagagtgccgactcttcgatacctcgagaaaattagaggagtcttctaaactttgctttacattccgcacttaattcaagtactttaccttgtgcatttgtttagcaagtagttgaagtattgtcttagcattgttgtatttctagtagtattctcttattgctagttgttggggtgaagttgggctcttgcttagggtttaattattgttgatttttagaaaagcccaattcacccccctcttgggcatcgtgatcctttcatcctccctagcccccgagccctcacactagtgtcattgtcaccgttgccaagctccctgagcatgttccatccccaccagagcccta

SEQ ID NO: 149804 - DNA, 382 bp, Zea Mays
gaagcactcaacaagagctttcaagaagcttgtagttgtgtttgctttgttcaatctactgagaaacagcaaaaagacatcaccaagacttattagcaagaaacagttgagaggcatgggagtgatggacgaagcagagccagtgaagaagacgatgctaagagtgagggggtttgacgtggagagggacctccgggctgtggaggagctggagcgtctgtgccaggtcggcctgtctggcgaccaaggctctgaccctgtcgccgaccttgatggcggcgcaaagaagacgaggagcagcaagaagaagaaaggcatgtcgctctacgtcgagcagatcggtgacccgtttgcccgggtgcgccatgcgacggacaacgtg

SEQ ID NO: 149805 - DNA, 749 bp, Zea Mays
ggcatgtgctatgtttttcttttaatacctagatgattgcctctgcttttcttatagcacgattggctctcattgtttcatattgttgtgcgcttgcagtttgcataggtcatggtggttaattttggagaggaaaggaccaaaggtggaaggaccaacatttaactcgacaacactatcatcttcatcgaatatctagggattggtatgtttcttttctttagatatatggtgcctaaacatgagatttgagatgatttggaatttatgtgctataaatttagttagctatttgaatgtgcattcatgaatcatgagatgtgtctgaggctttgtgttgttatctaggtgtgtgtgctcatataaattcaatatttctgtctcaagttcagtcaaagtgcataccaatgcctgaatcgatgcatttcataaagactccagcggcccctctcttgtacaatacttctccaatcctatgactacgtagtgggccttgcattcctccgctggccccgatgcgatactcgggtgttgtatctcctggacaaagatgcctgatggagcttgtgcccggctcaatcctagctttgatagagtatctactgctgcattgcgatctctttctatgtggtggaactctaagccttcgaatttatcttcaatcttcctgactgccgcacagtaattgcccattgaatcggtggagcagtcccaacccttgttgacctgactgatgacaactacggaat

SEQ ID NO: 149806 - DNA, 707 bp, Zea Mays
gctactccattgatcaggttaagtctattgtatattcttaactgacgatacaatttattgggtataggaataacctgcttgatacagaaatccgtttcaatggctctgtatgcctatgtaccgaatacttctaaaaatcaagcaaatctgttcacaagagttttttttgttgctgcaattagttttcctctgtacttctgcacgtctcatggtgttaattgttggcactctgtttgcttttagccaagaaatatgattcataaatgcagtctctgaagtagatgttggcataggcatgctggaacctctcaacatcgggtcttcttgcttgcatataagagatggcctgtctggttggtcttggtcgactagagtttatctgatgaacctggaaaattctagcgattggagtttctatatactgatataagccttattggatgagaactttagattgtctgctcagttcatctgtttgtctcgaagacttgaagagcaattgagtactaagtatcttagaattacgaaaacaacatctagggcattatgtttgaactgattgcctatcataaacataaaaacttcattcggcaggaagaactaatggaatttcttggccattgttcttctagcccagcagcacttttttcttttactttctactcttacctgtatttcaaaatattcccctgactgtattattctct

SEQ ID NO: 149807 - DNA, 496 bp, Zea Mays
ctagcttgagagtttaaactgaatcttagaatgctatagcgatttaattttttattatttctttatttcaaatatgtctgaaacatacaatactgttatttttggaaaccagttggaggatcagtagtgttgtccagtccttccctttagattttacgtgatatatcaatatgaaattgatgggcctaagaaattctgagaattcagagagagtgttgaattgttgccggacacatcactcaaccattgaattgttgtcgtgctgctagctcaaattaatacatcataaacatgccaatagtacgcttgtttttgtatctaaataaggcatgaactttttgtttgacaaggcaacattgccatcaataaacgatcaacccagatgtgagagatgctagatttgttttacaatgtattctggtagactgcttcaattctcaataaaccatgtgagcatgttctttggttatagaccgcgccccagcgagcgggccgc

SEQ ID NO: 149808 - DNA, 374 bp, Zea Mays
tacttccaatcgagacaacatccgtttgaatgcacaaaggaacatggtcagaaaaggatctgttgagacctcgaacaataatattattgtaagcaagatcccactcaggactagccaggaatctatccaacttttcaaaagtagggtccatcctattattagaccatgtgaacaatctgttgttcaaatcaaattccacaagaccattctgctcaattatactgttaaaaaggaagctccacttattaacaccacccggtttgtttttttcatttgcttttctaataatattaaagtcacctccaacaagcaaaggagcacgacttctcgaacaaaaggaagaaagctcactcaagaatctgctcttgttctcc

SEQ ID NO: 149809 - DNA, 444 bp, Zea Mays
cgggctgtgccgtcgcccagccgtcctcccgctgctgccgccgctgcccagcacgccagccgactcgtggaagtggcgcaagagcgtcagtacagtagcctcgccgcgcaggcgcagcccaaccccggcttacagacacaaagcagccactgctgctacgctagcagtaaatgaccgcgccgccgctagtggcctgcgtgcttgaatgcgagagttccatagggattctacatttctacaggacacgaaacagttcatttgctccgacaaaatggtgaagcttcccgcaggattcctacgcgaagatgtggcatgcatgcttgttcgaggccttgatcttttgcaaggatttttcaggtgcacgtgttctcaaaaataaactctggtttacttttcagttcttgtgagtgggacgtacgctctagttttcttttttttcttttg

SEQ ID NO: 149810 - DNA, 444 bp, Zea Mays
tccaagaagacctctcaaaaaagctgcaaggtaaaagatttcttctagtccttgatgatgtatggaatgaggatcctgaaaaatgggacagatatcgttgtgctctacttagcgggggaaagggaagcaggattataattaccacgcgaaacaaaaatgtggggatactaatgggtgggatgactccttaccatctaaagcagctatcaaacgatgattgctggcagttgttcaaaaaacatgcatttgtagatggtgactccagttcacacccagaattagaaataataggcaaggacatcgtgaagaagttgaaaggcctgccactagctgcaaaagcagtcagcagtttactatgtaccagggatgcagaggaagattggaagaacatactaaagagtgaaatatgggaattgccatcagacaagaacaacatattgccag

SEQ ID NO: 149811 - DNA, 507 bp, Zea Mays
gattttcctgagactcagtgtgtaggcacaaaattttagggaggtgtatggcctttatgcaaaattcgcaggtgtaggcgtgactagggcgacgtggccaaagcccattgggtgaggcttgccacaagatgggctacatggctgatgccgcagaggatccgagggatcgggcgggtcaaggtttggggagcgatcgtgtgcagacatgtggttagtcggggatgatcccgcgacaacgcgctcgcgcggaaggcactcgcaactgggcgggcccaccagtcaatgtcaccaacaggggcgtgaggacagtgaatgacacaagggtcccacatggtagggtctgcgcaggcgctagtgtgtgtgaaggggtggcttttctgccggtggggtccaccagacagcggctccatgcacgtgtacatgagggggtggagagattgtaggtgggccctggatgtcggggctttcgtccacctcccgctcatgtgcaatgctgggcacgacgac

SEQ ID NO: 149812 - DNA, 783 bp, Zea Mays
ttgaacaacatgaaacatttgcaaatcctgatgttgagataactaataacattgagcaacttgaagatggtgcaggctatgaaaacgaataaaggaaaattgtaaactaaatgcaaagttaactagctcacacaaatattatgaaactttgcttgataaaatggaaactcttagcaaatcaaattatgagctaacaaacttgatgctatcggtagtgtcgtggctataagtgcgtcaattctatttgtggattttgctaaaaaagacgataatgcatataaaaagctaacatcattcatgaggtttgtagttacaagtgcaaagaaaatataagacccctcaaacttggtgaaagtcgcagaacctcggtacatcttgatagggaatttagtgctaatttgtacttactaattttgctctcatttataggatgccatactatcaagagggataaaaaaactcactacctagaggtgtcaaatatgcttaaagggtttatacttcacaccaagacttattttcttcaacctagaattcctaggctcttgctacttgctagaaaaaattgtgcaatatgtttaacaaaaatatcatgacataattgttggggcgaaggcgaacacactaccctttgctccacgctaccatttgctccacgccttcgactcctcttcactccgacgaaggctacatccacagaatgcatccgaacaagccgaaggcgccgactggacggagaccggcgcagtcccctttgtcctcggttgttgcaagacgaaggcc

SEQ ID NO: 149813 - DNA, 1251 bp, Zea Mays
gtcggaggccagcaatatagccttgatgttgcctatggctttgcagaagaatttgggtgagggaagcggtgatgggaactagatcagctacttcagcaaaaggaggtactagtcccctgtctctactattttgaccactttgtttcttaacactagccttttatttctaatttacatgtactgacgtagttatgtatcctcaatctgctagcccattattttttgtcttgattcaccttgtagagtataattatacctccttttcatgtttcaaaaggcagagatgaaacaatttgccaagagtgatatttttgttctcaagcaacattatgaaaagaaattagatgacttggaacaagaaaataaagctcttcaggtttttactagcttaccttgcggacactatgctcttttttcccctgaattcttgtttgtagaaagaaatagagaatcttcaccatgcattaaccaatgtatgttcttctatggatgagaatgctcaaaaactgaaagaaaactatcttcagaagctgaatgcacttgaatcccaggtttgtacattcagctaaatgcttgttgcattgcatttctcatcatatgctaagaacacaccatttgcaggtccatgagctcaagaaacaaaaaagtgatgaggcagcaaagcgtttacaagaagatattcagcatataaaatctcagaaggtgttttttcctcaaaatgtttcttaatgcgatttaagtttttttcctgacatatattcctttcattccatgtaggatcagcttcaacaaaaggccaagcaagagtctgaaaaatttatgtcttggaaggctgcccctgaaaaggaagtaatacaggtacttgttcttaacatgttgatcatgtttatgaacttctttctcaaagatctcgttgtgatagtgctgtatatccattaattagctcaagaaggaagggagacgaaatgaatatgacatgcacaagctcttggctttaaatcagaggcaaaaaatggtaaattcttcatttttcctctttcagctttaagatagcatgattgtcgcctacaccattctgcttgaaattgtaggtcttacagaggaaaactgaagaagcagcagctgctacaaaaagattcatggagttgctggaagcaaagaactcatcacttgagacatatggtaggaagtgatgtccaatggcttcatatttttaccattaggtttcatgtgtgctcattattcctagct

SEQ ID NO: 149814 - DNA, 732 bp, Zea Mays
gcgctaggctcattaaaagtctataaagatgtgtttaatcagtgagcggatgaaatcatagtcgttctattatattttgtgtgtgtttggctacccacggagaaagggtggagtggcttctggaatctctccgttcgagtattctatgaaagttattaaaacttcaaccccgctcatgcccacatttccggcccaaaacatctactccgtagcctcagaaagccctccaatttttttgcaaaccaacctgcgatcctcgctgcgaccccaagcagattcatttgggcatccctcgcggtcccgagccccatctcgtccgaactccgaaccctagctcctccttgttgtggcctcatcagacctcctgcccagccgtcgctgctcctccgggcgaactcaccatcacccaactcgtgccacagcgttttgctatgcctgcttcaaagaccttgactcgctgccctccccgtcgcctctgcgccaacccgacgtgccgccgacacccggctccaatagacgcgacatgcccccaacgcgccgcctctttactcaacaagcaaacccggccaggcaacccacaacagaggagaaggggaagggcggcaaagacctttacttgctgtttactgatatatatagtgatgatttgataagctggcgtattagatgtttaacttatcagctttacaatatgtttctactgattggttgagattaaagagccaccttttc

SEQ ID NO: 149815 - DNA, 392 bp, Zea Mays
atttatcttctaactaggcagaggattgtctcatttaccctttagctgagagcatgtccatttcaccttcatcgcttggagcatgtccatttcaccttcatcacattagtaatcatgtactatcaggacataatcccttctctacaaaggaaaggcttggcacaccattgttttagttattatgatctgaacaaaccattttatatatggagctcatggcaatggcagccccgcaacacgacgatggagcccgtagtgcactcaggctcgcgcttctttgcaacaatgcattgttctccataagggctcccgtcactattgcgttcacgttgtccatcgcaattggaggctcgttaatttgtgtttcgtcgcaacgcacgggcacataccta

SEQ ID NO: 149816 - DNA, 491 bp, Zea Mays
cacatatattcttgatatttcttgcattgagtccaacatgggtgagagaatggaaagcattcgcaatggcaacagtagttgccttactatgcaggaagaacatttacaggcagaatgtggaggatatcctcatccagattatatatctgttgatatggttgatgaaagatcactgcatgatttgccacatgggttatcacaaaacaatgagcagtatgagatggagcagctcccatagaatatatgtgaaagtggttctatgcagatggtctctccggaccaatattgttcctctccggaccaatattgtgatgatacatctttatcagatttttacatggatgtatcctccccagagtcaatatcctgtgagaagaaccagcctgaagatattttttaagagcgagtctagcactgactcttctccagtaccctctagcagaaattccaccacagaggatgctgataaatacttaggtcaaccatcaaaa

SEQ ID NO: 149817 - DNA, 893 bp, Zea Mays
ttggatcaacacaccctcgctgccaacttccaaattgtcactctcagcagtcgcctcaacaagagtggcattttgatactggtgcctccagtcacatgacatccggcgctggtataatatctcatccctcttcttcccagcatcttcctacccatattatcgttggcaatggtcatctcatccctgtcacctccactggcaccacccaccttccctataatctttctcttcacaatgttttagttccccctccctcattaaggatctgatttatgtccgtcaatttaccactgataataattgctctgttgaatttgatccttttggttattctgtgaatgatctacccactcggcgcgagatcttcagatgtaacagctctggtccgttgtaccccctgcgattcccggcttctgctctccttgcatctaccttatggcaccaatgacttggacatcccggtcatgtcgttttatctcatttagcgcagtcatctgcaatttcttgtaataaaaatactagtactcatccatgtcatgcttgtcaactcggacgccatgttcgtataccatttcctacctcttcctcccgcgccacatgtaactttcaattaattcactgcgatctctggacatcacccatcaccagtgtatctggccacaaatactaccttgttattttggatgactgctcccaatatttatggatatttcctttacgcctcaaatctgacaccctctccaccctaaccaatttctttgcctacgttcgtacgcagttcggtgtcactatccagagcatccagtgcgacaatggtcgcgaatttgacaaccttcaagcccgcaccttcttctcctcccatggagtccatctgcgtatgtcttgcccctata

SEQ ID NO: 149818 - DNA, 416 bp, Zea Mays
ggcggcctaactaatctacgcgcagcaagctaccaccgaatgaattaacaagcgcataattagtagtgataaacaaaagaagctcgatcgatttgtttgttcggtacaccaatccgatcgttctggtatgtaatactgttcgaagttcaaacactgagggacagatcaatttgttagtgataattgatgtgcacgaatgaaagatgcgttcgacagcgacaattttatcagattattctgtatgtacgttggctgatgacgaagttgcaacgcccaggttgccgagtacggcgaggaggcggagatggtcgggctcatcaaggcctgcgttagggtggtgggcagaggcggcggcaagaaacagaaacgttcttcctccccgaacccgaagcaggagcaggagcagcagccgtcgc

SEQ ID NO: 149819 - DNA, 403 bp, Zea Mays
ccttttcaggtccataatattgtacttctgtcatacccatttcatagctgtatgtgattaagaagctatatattcagagtcaagtacataatttataggtacaaaattttaaatcttttttcagtatttgtaatgaaaaaacagaaatactctgtatcaattttttgtgccttttcttctgttgattactcaagatcctttttgctgcagaaatcatattgatagataattaatctactgaaacatttatatggagcgtaccgttttttatcactaaccacatgccttttgtttttagtcaggaaatagtttagaacgataggagtttttgtgttccttcccaattcaaaacaccaacacgatctctaatatagaattactttcacgatgacacagatcaaac

SEQ ID NO: 149820 - DNA, 652 bp, Zea Mays
ccccaattttttttggtgccatgttttcagatcatgaatataggtttcaaattttagttgttttttattaggatggtcgaatataaaagtaactgattttattgtatgtacctgattaatctaaaagcattgaaataattctgctcttggctcgagtaggtatctgaagtatacagagaaatggaacgtgctggatgtgctccagatagaaaggctagagaaatgttacatgatgcaactgtagttctagaacaaagaggatgtaagtatttcatttcatatgacttgtgctttaagggcgagtagaatggatgagtgatgatgtatgcaatatgctttgacaggtctctattgaattttgaatcattgctgttgtaattggtccattgtcaatgcatgtaacttcagggagcccaccccctttttgcttacacatgcatgatgcagagcaaacacagggtaggcgattagttttacaccttgatttatacattgccgcttctccagtttacctgttctgataacactacaatatggattatcgtttttgcattaaattgttccaagtttcaagtaggcattttagtttcttttacttatttttatactgctgaatttgatgcaaaaagtagctggagataacggttttgat

SEQ ID NO: 149821 - DNA, 730 bp, Zea Mays
cctgggctgaaacaccaccgtcggcccactctaccacactttctcccctgcggcccaccttctttttccacatgcgccagccgcgatcatcctgcacgtgactctggctatgggccatagccgtcagccccttgccacgctcgtcctcaacagcacgactcgcgtcctccgccgagctttgcgccggtggggcggcatggtctgtgcgccgcgcgagatcctcgcgaaccacgatttcacaccgcccggtcatccactcgctccgtcgcaagccccaaggctcttgctgtcgcgtgggacccttctgtcgggatgttcttcccgggacctggccaccaaagttgcgcggcgaaatcggagcacctacaaccaaccaagcgccgcgcgcggtcgatctagccattaaataccgcctccacctgtgaactaccgctataccgagatggataaaaccctaatcgccattggcattgacgccgtgtgagttgagggtgggtcgccgtcatggccgttctctaccactgatggcaattgaagcgcggatccctggccagaaggttcgccggtggtcaccaaaagcttctgcgacacaattgggcgctcggggcaagcaggactcctcatcgacgaccgggatttgccttccttcgcagcgtaccgtgggtggatgcttctgcgtcttggtcagcggtgagacttcatctaccttacttacctctgtcggttcttc

SEQ ID NO: 149822 - DNA, 341 bp, Zea Mays
tgtcccttgctgcatggaattctattgagtcggctacatgcctttttaagtccctggagatgaagttacaaggagctacaaaaagtttgcaggcctggagcgaaagcaggtcgagcacgtgagatcccaacttgctcttgctaaagaaatcctccatatgctggaaatagcgcaggatggtagagtgctcagccctgctgaacgctggctcaaattcagactcaagaaacagacattattattatcatcttgcaagagaactattgcaaggctgagagcaaggatttcatggctcaaagatggggatgctaatacaaagttattccaccttcacgcccgtc

SEQ ID NO: 149823 - DNA, 2112 bp, Zea Mays
tgataagccaagggcaattcatttacaaagtattaatggggacattaagttccatgatgttacatttagatatgttgatgacatgcctccagtagcagatggtgtgaatcttcatattagaccgggagaaataattgctttagttggaccttctggtggaggcaaaactactcttgccaaattactcctccgtctttatcatccacaaaaaggtattgaactaaacagcagtaaaatactgagcaggttttgtatatatccttgtatatgtcttcgtcttttaccttaagttcaagatctcatatttccttttcttggtcatttaaactgtatagtttcttatagcatggatttaattatgtttccttgtagggtatatacttctggacaaccatgatattcaggacattcaatcgcaatgcctgagaacacatatcgcttttgtttcacaggacactgtaagtctggtgcatgcatgatctcccattctattgatgtctcctcaaatgctgttatcttcccagattagatcttttgtaaatataatgcaagttgcatttttaagatttgtagtttgtttgctactggtgaaacagtattgtcctgcggttttatcattgtatcatgtgaatagtagagatggaaagcaagtcatattttcatgtcaactgatggatgaatctaatatactaagtggttcaagttcttgatcagaaattatatgttcaagtatgaaactcttagctcattttggtgattgttgttctgcggtctgccgcatcacattctgtgtttgaaatgatattttgtcaacctttcatctgcacttctaatgaaaaactagctcagtagtgctaaatcatcaacacaagatacaattctaggcatctttctgttttgcatgtagagctatgcatgtttttcattatcatcgtgtttgtgcatcactcgtttcttgtttatttcatagatgctattttctgggacaattgctgaaaacattgcttatagagaccctgtgggagatattgacatgaatagggttgagtacgctgctaagattgccaatgctgaggagttcattaagatgttgccagaagggtacaattcaaatgtgggacagagaggttctagtttgagcggtggacagaagcaaaggtaaaatgctcactttccagtttccagactaccttgtatcacaaggtaaacatgttgaccatacactatccagtagcatcttttttgtaccggaacaggtccatttaatttgtacggtgtgtttttatccgcaggttatctattgccagggcaatctatcaaaattcctccatattgataatggatgaagcaacttctgctttggatatcagatctgagctgctactgaaagaagcgcttagtaatctaattgcaaaacactcagtaactgtaagttcttgtatgtgtggtcaggccattcctgcatcggcgtgctttccgatatcaattattgctaagtaacttcttcccttgctgtgactgaatacaggttatcatcattgctcatcgacaggaaatggtcctaatggctgacaggattatttcactagagcgcggtgaattgcgagagatgtcgaaacaggcatttttgtctcaagatggtcacttcagcttaccaaggatcaggagtccaaattagggtgtccaaactagggtgagacttggcatgggtaatggtagtttctctcgtgaagatttgttcatatatttggccatggaagaaaacgattgatagaatcacatttcttgcctgagccctgctcagaactttggcttcttggaaccttgtttcatcccaacagcaacaaatctgtcaacattatcgaaggtcgtctgccggagagaatagcaggctcctcagcggcattggctcctacctgctgcaagattctcctcaagacctcaacaggaaggtcaaagcaaggtatagggttttaccaatttttgtacacatgaaaaagcacaggttccttacatcccccgcccccgcccctgcatacatgcaggatgcagtagttgagctgtatatatgccaaaataaagttattcgttttagatttttttattgccaaa

SEQ ID NO: 149824 - DNA, 411 bp, Zea Mays
ggcggcggccatgaccggccagcgcgctatagccctatggtcccccaaacgtttccccgaagtttgcaacacgatcctgctttcctattgattacgagtaggggtatcatacctcaatccgaggcatggaatccgccgaccacggtgcacggcggacaggcggagaagcgtgcgttccggcgacgaattccgaggtcatcggccgccaaaccaccgccacgatgccatcgatgaccctagcgagcgccagcgatcacccgtgacgagcccgagtgcttcacccctctcgtcggtggtaattacgtcgatggcggaactcaaatcccaatttcaatcctggttctcctcaatcctccccctcggctctctctctctcttggctttgcccgagcatggcggcgattggtgagc

SEQ ID NO: 149825 - DNA, 653 bp, Zea Mays
gggagacgacgtcagcggcagacggggaaggggtgaaccggccgatccgcggggaaaacctggccgccggctggttcaacggcgtttcaccgtcggtgacccggtttctggggattgggtaggtgccatagcacgaggagaggctggcgagcttaagggtgggcccaatttttccagaggtgactgggagggagctgaccacggtggggtggcggagctccgcggcgggagtcgtcgtcggtgaagtttgggtggtgatcgggggcaggggagcgttgttcagagtttgcggtgatgtggtgaagttactgatcctagtgaattgctcgctgaataaccagaggggggggggaaggagaaagagctcacctgagcggagggaggggcggcggagctggagcagttgagctcgggaattggggagaagagttgcgaggctggtgcagggcatggaggagcttggggcggcccttttataggcgcccgaagggaggggagcagcggtgttaggtggaggtgaggtgcacaacaatcggtgtaaatggtgcacagcggcgacgacgggaccgctcggcggggcagtgccgtgcaaggacgcgaccacggcaagcgaggacgaagcggtgtcgaacttctctgtgcggcgagtgcag

SEQ ID NO: 149826 - DNA, 640 bp, Zea Mays
caaaaacccacatgacaaatcaagcaaaagatcgtaaaaaccagtgttgcatttaattcaagttatatatcaaaacacgatataaattcaaagaaaaaataaatgaacaaaagaagtaaacataatagcctaataaaaattgggtgtaccttgtcgaatattgatctcttcgatgggcaggtgtgccgagaaagtggtgggtcaagggacgtctctagttgagagatggggctcgttggttcgacaagctctgacctccaaggacgggtcacatcatcgcgacgaacgaaatctgacctatcgagcaagctcgctcatgaggatgacgagcgaggcgggggcaccgggaaggggtggggttgtgtagtgtcgcgacataaggaacgagacatcgaagcggactggatcaggcggtgtcgataagaatgggactgggtcatagtcaaaatgttcctagatcgattggattgagaagcggggtcatgggtcgtgggtcgacactttaaaaggagaagtatacatctatgagacgagaatattatgaatttgatatgttgagtctaatgggccgatgatcttgggtcgattctatgggtcaagggtcgtgttctaaaatttcaataacaacctaacaccagtc

SEQ ID NO: 149827 - DNA, 522 bp, Zea Mays
aaatccacagttacggcagaagattcggttttaataaataaattaggatattttggagaaaatgatgacaaactggttcggtttgatgggaaagaagtggttctagaaccaagaaatgacgaagtcgttgtttttaagagcttcttcagagcaggacttcggttccctatatatgagatgattggtgaagttttaaagaagttcgaaatctaccttcatgaactaaccctgaatgctatagtcatacagtgtatatataggctttacgaagtcaaggaaaaactgctaatggcgaaggattttgcagagtacacgaactccattaccagactatggctagggctgatggaatgcataagaacttcgtgtgttacaattttgcacaccaaaaggatattaaggctcctatgattggatatcgtaccaagtggctgcctggctggacaagtgaatggttttatgtgaaagctgacatatagaaaagggagaaacttatgactatggtgatgagtcccctgagac

SEQ ID NO: 149828 - DNA, 684 bp, Zea Mays
gaaatagaaatggtgggacgacaatttacttgggcaaatggcttggttccacccacttttgaaaagcttgatagggttttaatgagcccagagtgggaacttaaattccctaatgtcacagtccaggtgcttgatagatctcggtctgatcatacgcctttattactgaatggcaaagcccccacgagcctgaaaaatttctctgagtttaaatttgaattaggatggttaactagagagggattctttgatttggtttcttctttttggcaacaagaacgtagaggagaaactgccatacagatatggcagaacaagatgaggtcccttcggcagtatttaaggggatgggcaaagaactcgacggggttaattaaaaaggagaaacaacaacttttagaattgattgatgaactcaataaaaaggcagagtttacttgcttatcgcctatcgagttgaactctaaagcttttgccaatgataggcttgccagtatcttgagagaggaagaagtacgtctcttccagagggccaaggtcaaacatctcctcgaaggtgacgataacacaaaatatttccatttagtggctaacggcaagcaccggaggcaatggattttttcgttggaggatgaggatggtgcatgcatagcggataaggaagaacttaaatcacatataacg

SEQ ID NO: 149829 - DNA, 515 bp, Zea Mays
gagagtaagaactcaaaattccatggtgagctcttcaaggtggaggttgttgtgcgcctgcaaaaaagaaaggaaggggcatcgacgataaagatgaagcacgataacttcaaaacaactgttgagactatagaggacattgaggacgaggctgtggttggagactggctcgccgaggtcacaaagggcgtcaaccatgcctttgagcttatggcagtagttggtgattgtgaggtccccttgggtgaaggtgcgatgggcgacattgaggaagacgacacgagttttgcgattggccaattgctgaataattgactcgaggtcaagcgaggcggcgtgagtggaggtgccacgcccaatgacaacattgacaagatcattggagatggtgttgacgatccacgttcacacgacgcaatccatgtggacctaggggagtcgggtagaaacggtctagaggacatggccctcaagggactatcgaccaatggcgaggtggaacgcctcttgccagc

SEQ ID NO: 149830 - DNA, 367 bp, Zea Mays
accgaggatgtcgcttcgcccgatatgtctaccaatacactaaagcgtaaacatcatgttcctcgtggggaaagacaagctatattagctcgtcgaaaccagatatttgaatcagccatatcaaggaaggtgggtacttcgattgaggatactagcggtgacgttgttgaaggggacgattggacacaacgccatacgcctatgaagatcaccaacaatggtaattactatccaagtttatatggatcttgcaagacatcgatagtatgtagtctgactaaacatgtgcttacatcatcttggaaccatttaggtgatgacgatgagggtgtcatattcgaagacgatgatgatgagaacgagggat

SEQ ID NO: 149831 - DNA, 679 bp, Zea Mays
aacaagcagtagaaggacttgagctcacctaaaccgagctggccacggtgaggccttctttgcggtggcagaaagctgatttgggggaaaacggcgattctccggctaggggggctaatcgagggggagagtgggtgctatggcttcgtggtaacttggcgcaacagccccggccatcaatttataggagggtaaagcggtggccagtgaatttggggaggacgcgcggcggccggaaatgaagaagaaggcgggcgcggtgaattcgtgtccagtggcgtggcagttgttccggcgatcaacggagagcaggggtaagttgtggcgatgcagtggaaaggggtaaacacgcggcaccaggccagagggcggcggtcaccggcgttcttatcggttttagccgcagggcagaggggaagtacggggaggtcactgaagtggcgtccaacgcacaggcggtgaagatctttctacccagagcgttatccccgagtccggtgcacgaatccaaacgccggcgacacaaatcgtggcagagggattcgtcggcggtgaggatggctctgctggtgatctgatccagtcgggctactgtaccatggcgagaccccatcagaacacctgacagagcatcttggagctcctttttctcccaaatttctatggcaacatccctgag

SEQ ID NO: 149832 - DNA, 487 bp, Zea Mays
tgccacaatgatccttggcatagggaactaactcagtcaccgcctccctggtcttcctagttttcattgtgaatgtgcaactcccaaactgttgcacatacttgttaacgattttcttttgctagtgcaaatagtaatgcgtagtgaagacatctatggactttacacctccgtaagtggttactgcccacacaaatttacttagagccgccatagtgttcggagttagctggtgaatttgaactccatacctccccaacatttcgaccacgaaatcatggcacgacaagtgaaagccagcaacaaaaaagcataaaaaactatgacttcgtctcgcggtcatggtagagtctctgacctaagagtcctccccaaccccgcagtgaagtaaccaagtccccaccactagttgccccctgactttcactcacgtcatccactaacgactggatggcaacgctggaacccacagaaggcgaactgccca

SEQ ID NO: 149833 - DNA, 663 bp, Zea Mays
gactagacaccgtggccatgagctcttggatcttttttgctccagcgctgcaccagagactactttcatccctaacagccctgagaacttcctgaacattgggcctatgttgctcaaacaagcaagcattacgatgcttccacagttcccaagcgaccaaaatgataaaagaatttagacccttccgcatttccttaggagcagttgagattactgtccaccaccattttgaaaaacggaagcatctggcgccaaggcagtaaggcccaactgaagaaagatgcttgctcatacttgtctagcaaaaacacagctggccaagagatggtgaatgtcttcatcatcttgatcacagagcgggcacacatcagggtggggcaagcctctcttagcaaggcgatcaaccgtccaacaccggttatggaacaccagccaaatgaaaaacttacagcgaggaggtgcccagctcttccatattcttctccaaggtccaaatgtgatggtgccaatgaaataagcactatatgctgacttactcttgtgaatgccggattgtgttaatctccacacaaattggtccggcacatgttgctgcaaaaatagaccatctaccatgtgccaaacctttaggtactcgaatataacctggactgtgagcgctcc

SEQ ID NO: 149834 - DNA, 375 bp, Zea Mays
ggcgtacataacttggtatccagatctagcatagtgcaacttgtgcactgtctggaaaggaaaacagtaccagctgccatttatgcattttagtttttgtgactgataaattgacttcattgctcccaagtgtacccaggcttttaccatgtgcataagacccaggtgctctctacctgtaactaagacatggcctctacacgcttatagattgccattttactatggttttaatttccatctcagtgcatctagaaagttcagcgcataatattaagcaggaattgcactgcaggctcctgaagttgcctggtcttctcaactaacctctcaggcttttagagccccttgaacttgcacgagtctcaccaaaac

SEQ ID NO: 149835 - DNA, 693 bp, Zea Mays
tcgtattaatttatccagaacttttagaaagtcatgctaacatcaacatatgatatcagttagatatggcacaatcacagaacttaccatagctgaaagagattgcagggctgccgctcgtagggcacttgctcgctcatcttctcctacttcttgtgctatttcacacagtcttgggaccagcccttccaaattgaactgatatgtaccgtccacctggaatagacagactcaatatcaccaataatgggacatatctatatataaactgagtcctgctaatggacaatggcatctactccaataggaatacctgattgacagcaaaatcaaacaaggtttcgcatccaacgatacataaatcatcctgcctcttttggtctaaaagggtgtggacaatgcttaataggctacttgcaaacagaggcctgaattaagaaaacaacaattacatttttaacaagcaaaagcaataacaaagtgtaagaagtatccatcgcaaaccaaataaaaatatcaacttcacagaatccagggccatatgagcaagagaaacttgaaaagaagactcacatctgttctttacaggaaactgacagtctgcggtatatcaacatcacaacttttgcaaagccgtattgctcacttcttaagtcccgataaatatgttgctccaagtaaactgtgatctgc

SEQ ID NO: 149836 - DNA, 588 bp, Zea Mays
gatgaagaaaagatctctttgccctactgtaatccacttttgtgctcaagccaggacgtgcatgagatggcaacaagggttctcgaagtccagttttgctgtagaaaatatcatgtcttggcttgtactcatttaatgcacccttatctatttaaattcttgtctgcaaaaataggacaaaatgggtgtttattctgaaattgtgaaacctgtgtggagttgtagttgtgtgacacgtgtggggacctatgcagtgctggcaccctggagaatactctccactgcttaatattgggctcacggatgtctgtccctggatgcagtcaccttagggcttagttttgtggagtctttcccctgcccttgaactcgagctcgtgtccatcgcgtgagaggaggagttctggttttcaggtctgagtaacccctttccatcaccaagtccggtctgccccggagctgtgtgccatctctgcagtttggtgaccacgcccagctgaccctccccctcaccgcggcccaggttcctcgagagctttctcagtcgtgtggtgagtgtcccatgctctccttggaccagtgaagctc

SEQ ID NO: 149837 - DNA, 739 bp, Zea Mays
tgaagctatccatcagcttatggtcgtaaagaagagagttcttctcgctcacctcccttataagattgaagtctcccccaagaataacaggaaggacctcattcctgcagatgtctgagagttcatctaggaactccttagagaactggtggttagcaggaccatacactgtaatcacacaccacctaaattttgaaactctatctcttatcacagctttgatagcataagtgaaacactcctagtcttccacctctaaggagtctcccttgactcccattagaatgccactagagtgccctttagctggcagccatttccaaagaaatttgttgtctccatcaagagatctcaactccttgttagagaaatcttgttttatagtttcctgaaccccaattatatctattttttcatgagatatatacccccttagttgattgattctctctttgttccccatacctctaatgttccagctaagaaacctcatttatgatttttgaaggttttgacggtctccctttcctcttacctttttgggttacaggtaccacaggtccatcctgggccccctcccattcacaattcctatcagagtttgtaattgcctccatggcatattcctgaatctcctcttccgtctgaggagcattcctattgttaatcttttctacgtgtgctttatagttggcttctgcaatagctgccctcaacttctcctcctctttaaaagcat

SEQ ID NO: 149838 - DNA, 333 bp, Zea Mays
aagagaccctctagtgtctcaaaatccgaagtttcttggggcttgccggatattatctgtgtttcgtgccaaatttttccagcattactaagccattgactagactcttggaaaagggtgttcctttcgtctggtccaacgattgcgaggtcagttatcaggcattgaagaacaagttggtgaatgctcctatcttagccttgcctgagagtggtaagcgtttcacagtttatacggatgcttctcgtattggcattggttgtgtgttgatgcaggaaggcagagtgattgcttatggctcgaggcagttgaagaagcattaggggaattatc

SEQ ID NO: 149839 - DNA, 783 bp, Zea Mays
tagcgggcagcggcagcgggagtctgggaaaggtgagatggagtgggcggcggcggtaggagtggccgagtgggagaggacagaggaggagagaatgagagatggaggccgactggccgagcgagggcttcgctggattgctggaagcctggagaacgcttgtggcgatgtggcccgtgggcctatgggatgggtgtaattttaacggatattcgggtatttgggtatggatattgatttttcgtatccgttttaaaaatatccgcggatatcaagtgctatccgtatccgtatccatgggtacagactcgtacccaaaaccgtgcccaacgggttttttatccgcgggtacgcggataaatgacatccattgccatccctaatgactttcatttgcattgaaaccattcaacagcctttttttacagcacaataaatctttggtattttgtatttgaaacgcttgtatatcgaatatgtccattgtttagccaggcaagtatgcattcttgagaatttgctactccgttcttgtcccggcaagtagcgcctggttcaagccctcggctcctgcagcatgggcaactgaagttgcttcacagtcgcagtcctgatcgcccgccgccgcctgcagagcggccatctgcgcgtgccgtctgtccgcggggtaagtccagtacagcgcggtgtaggtgaggcaacagacggcaactggcacggcgatctctgcgaataccgccttgccgagagcagcggcgttctccctgtcagcctccacgctcg

SEQ ID NO: 149840 - DNA, 405 bp, Zea Mays
aaaggctacttatgacaaagctatgaactgatacgtgcagctcgactgcttgtaaagaaatccacggttattgtccctgaggatattgccatggtcattcctttaatggtagaccttgatacaggagcttctgcccaagataggtcggggtctgctcctgttctaaaggatggcactgcttgactacttgccctctgcgtattgtgtttgttttagtgttgttgaatacttgccctctacgtaatgcgagcatatgaatttccttcttttgaaacaaggagcttaggattttgctttgttctatgtgggagagcatgtagtcgcggcttgagttgggcgcccacttaatccaattgctctattggtagaaacttttgatttaactggtgggtacatgcaacttaa

SEQ ID NO: 149841 - DNA, 791 bp, Zea Mays
tttagatctgtctagactgcgcaccaattaaccagaaacataggggctagcgctagcgtgtaaacgtccctagacctagcgcacatttactagggatggcgggttcaattcctagaaaagcaggggttctttaataaaatcacctatccgaaggggtattgatctgctctgaccattggattagatcaggacggcccagattgacctatcttcatcccgaaccggtacgcaatatgcaccatccgatctgattttgacgacgcgtattttaaacactaaatattcagtactgtccgctcgatctagatcggacgccccagatcgactcccacgaaggggtaagtctcaatctaatcctagccctgcaatccaaatcggacagcacagatcccatcttctaccccgaggccggtgacgacggtggccgtgaccccacggtggcgccttctccagtgtgcaattgtcgctgccccgacgccccatcaagactctagttcgacccaacacattgagaggaaacctatgaacacgtgtgcggaatctttaccggagtcgaagcgcaacgacgttttcccacacatcgaagcggatccacgacggcgcacagcttcgatgagcaattcaaccagcgcagcaatgccaatggcggaattagttgtcgccgaagcttctaggagacacgacgcgactctggtatgccctacgggtgccctagtgcccccctgttgccttgcccgacggcggcggcccgttttcccccctcggcggcacgaagttcccgtggtggaggc

SEQ ID NO: 149842 - DNA, 714 bp, Zea Mays
tctccgtgtccaggcgttgagccttgcatatgaggtcttctagcattggtttgacttctaggctgtcgttgttccccagacatgcgttcagctgagctgattccttcttccaatcttctaaaaagttggtccccttcatcccgaaaggttttcggctaagggcgtctgctaccacgttggccttcccggggtggtagtggatttcaaggtcataatctttgatcaattccagccatcttcgctgatggaggttgaggtctggctgagtgaagatatactttagactcttgtgatcggtaaagatgtgacatttgttcccgattaggtagtgcctccatatcttcagggcatgcactatggccgccaattccaaatcgtgggtgggataattctgctcatgcggcttgagtaagcgtgatgcataagtaatgactttctcattttgcatcagaacacaccctaagccttgccttgaagcatcacagaagacgacgaaatcctgatggatgtctggcagtgttaaaacaggcgcggtcgtgagcttcttatttatgatctggaaactttcctcacacttcagggtccacacaaacttattgtctttcttgaggagctcggtcataggtcttgctatgctggagaatcccttgataaagcggcgtaatatcctgccattcccagaaagcttcaaacttcactgacgttggatggctg

SEQ ID NO: 149843 - DNA, 329 bp, Zea Mays
gcctacgggtgcagccggactagcacaataagtgcgcaaaatcaaagtcttctccaaaagactccccgtgcaaaagtcgcctacgggtgcagccggactagcataataagtacgcaaaatcgaagtattttccaaaaggttccccgcgcacaagtcgcctacgggcacgaccggatcaacgaaggcacgcagcttcacataaattacggttacatacatacagcgagggcatcgcactttacattggctcaaccttcgggatgatacccatctccctgtagttgaacagcattatcctcagctcctcaccctcaaaaagatttcgcaac

SEQ ID NO: 149844 - DNA, 521 bp, Zea Mays
agctccccacatcactcacaatcttctttctgttcgtcgattcaccactgacaactcttgttcccttgagtttgacccctctggtttttctgtgaaggatctggccaccaggacccttctcgcccgctgtgacagctcggggccgctctacacgctccagccctccaccgccggcgtgtctccacccctgtcctggtctccaccacctcctccaccacatggcatcgtcgtctcggccatcctggacccgacgtcatgaccaagattaccagtagtttagatccttcatgtagtaggggacattttgagggcctctgtcatgcttgtcagttaggccgacatactcgtctccgatttactacttcttctcgggctgagcaggcttttgacctggttcactgtgatctttggacctcccctgtactcagtctttctggttataaatactatttggtgattttggatgatttttcccactttctctggaccttcccgcttcggttgaagtcggacacattcac

SEQ ID NO: 149845 - DNA, 371 bp, Zea Mays
aagaagattgtagaatcttctatgaactcacacacggcacaacaacaaaaccttttaggagctcatttatgaaaatatagcattagctgtcaaaaatatacaaaccaagacagctactagtcctctccgccaactatgtgagtagtagtgttgaactttgtttgaagagaataatagataacagaaagagtatgagccggtgggtgggtagaatgtagaaaaggtgggcaatcatcactgcttttcaataaaaattgtccactcacatgtcaggcatctgtttcatggtctgcaacttgggattggagatattaatcatcacaagatgaagcatcgatccacatctttgctcgtgatggaatgaaaagctt

SEQ ID NO: 149846 - DNA, 382 bp, Zea Mays
tatgtcggcaccgctagtgaggagactcgtatgcttattcaatcttccctcatggagagagtgcgtgcggctcagcagcaggatcatttattgcaggaagctcgaaagatggttggcgatggtaaaccccaggagttctccatcgatgagaatgatttggttcatttcaggggttgcctttgtgtgcctcagaaatcagaggtgaagatggatatattgagagaagctcataaaacgccttacaccgttcaccctggcgaaaccaagatgtaccgagatctgaagcaaaacttctgatggaagcggatgaaggttgacgtttctaagtacgtggctgcctgtgaagtatgtcagcgcgtgaagaccgagcataagaggcctg

SEQ ID NO: 149847 - DNA, 886 bp, Zea Mays
ttatctcctagctctagccaaacaaactcctctggggatccgagcgagtcaatgcttccacaaccgtcgccgtgcttttctccatttcaattggtagcgctttaccgtggagccgcctactgggatatataaatccccgaccgcccccttctccatccttccattgagccgagcaatttccgcgtcgggagctccggcgtcgggaggaagggagtgtgtgtcgtgccgttgcgctaggggccaggccacgagtgccttcgtcatcgggttctccggccaccgctgcttgcgatagagaaggattggcgggtgtaattggttggagccgatagaattcctcgccgggcatcgacccatgctgcgaatctgctgtccgccgtgggcactcgtctgtgggtcatctctcgctctggtaagtcctttcttagattcgcggagtccgtagcgtcgtgtagccagcttgggttagggaagtactgtgcccaggcatcgattcgagtttcccagtgattgcgccgctgggcatgcgtgcgccgtcgttttggaccaccaaggttgggggagatgtgttggggtcgtgtgtccgtggatcgacggtggtgatcgagcggtcgtagtgttttggccgaaccaagaaatagtcattgattctcgatccatggggtaggattgaaggctggatatcgcttcaccctgatggattatgaccaaggatcctcgtgtggacggacccgatgcaatcttgtgctaatgaaattggaaccgaagattcccaatcgtgcggtcatcatctcctactggttcgggcttgtgccagatctaatctgggtcgtagcttttaaatccaacgactctcgttcatccataccccttcggcctgaacgtt

SEQ ID NO: 149848 - DNA, 390 bp, Zea Mays
ctcgccaaggacggcggactcctgttcttctcccaggcgcgcggccagcccccgtccctttcgcgaggaggtcgccaccaagacgaagacggcgaagacgatggctgctcccggtgcacgagttgcttcagctttggtaggtccggcgacgcatgcctggcaaatcgtggaatccaggaaatcgaagcgacgacgtctgaagttggaacgacagtggagatagctccctcggcacctgcttggtagatgcttcaactgcctttcccaagaccacttcgtctcccaatgtgctcagaagacgaggtgcttccgttgccgtgagcaggggcatcggtcttttgactgcccactgattaaagagtcggtctggcataggatttctcctactgc

SEQ ID NO: 149849 - DNA, 342 bp, Zea Mays
cgattctttcctgtgcgaccactgatggcatcctttatttgcgtcaaggatttccctcaagatttatgcatgcatgtgtggcacaaatttctttgctctcctaagtggtgtaattatcgtgttccattgctctcaaacccgatcatctatctatgtcagttgatgttccaaatgtcacccctattgagatgttttttatctatgccagttggtgctgcaacaatcacacgtgtagagacatctggcggtcgatggtttagtggcttatccatgaaaaaggaaagtggaagagggagccacgaatataaatagggtagtgagactggtcactggtgcttcaga

SEQ ID NO: 149850 - DNA, 737 bp, Zea Mays
tattgttatttaggttactagtccttgttcatacctgttcttgtattgttattgattggttactagtccttgttcatacatgttcttgtattgtttgtttggtactagtccttgttcatatgtgttgttgcatctagcgaatggcatgcattactttgtattgccttctttgcttctagtcgttgttagtcgactattatcattaaaacaaaatctaacgacctaactcacaattagacgaattcgcctctgaaagaagctgataaagccattggcttaatgcaagacacttccaacaggattcttgctttagcaagggaaaaactctgccccggatgtggtctaacttcttttaaagttagccagcttcgcattgcattggatgaactagctgaaatcctagactaggactctttgagtgtcaatacgctttggactgcatcaaccctgaaaacaaacctgaacccgacgacgactatgtgttgtcagacttgtcttggcctgagtcatcgacggaacccgaatttgatgagccattcgacttcgttgcgcattttgaaaaaatgtggggagtcgaatatgactctgatcagatatcgtcgtttagtgacaacgaactgtgaatgatgtgcactatgcctaccagtagtttgtagggatttgggtttggtacttcttttggctaaggtttatgtgtaagttgttcacaatttactaccatcgggtatgttgtaatg

SEQ ID NO: 149851 - DNA, 335 bp, Zea Mays
tcatctaggcccctttggtaatgttttggtaattaatgacaacttcttgtggtctaataattcctggagaaataagaatgcaggttgaaccacagtgaactgagaagtcttgaagacttatgagcattggttgtggatcaggtgaaggcaaaggtataacataggttttgtttttgccggtcaccaggtgtgtagagaagaaagtgaccggattggtaggctagatagccgtactattaagaggggttaatgactttgttctgtgtaagacttagtgcctcatagagcatctagtggttgcatttgcatgaggactagcagcgcttccgtttcgg

SEQ ID NO: 149852 - DNA, 321 bp, Zea Mays
attctatccatttagtgaatttgtcgattgctactagtacatgagtgtatcctctttgagctttcttgaagggtccaatcatatccagtccccagcacgcaaatggccaagtcactggtatggtctgcagttgctgtgctggtagatgttgttgctttgacaagtactggcaagcttcgcacctctgaactaactcggctgcatcactcttcgctgttggccaatagaatcctgacctgaaaaccttcccgactagtgtcttggacgccgcatgtattccacattgcccggcatggacctcctccagaagtcgcttcccag

SEQ ID NO: 149853 - DNA, 337 bp, Zea Mays
tacttcagttagatcttgtgcaagccttaatttatctttccatttaacgccttacaattgcttcatatgattaaacactggtaaatgtgattacaaaactaggtacaaagaaatgtttagggagctgccctatatgctttaactagctgatttcgtttcattcacttttcatttatggcagctgtttaaattccagtaaagcaaatgttcatgtcacatttggttactgttgtaccatgcttatactactgctatggccagttttgacatgagaagattacttatgtcaatgttcttttgttacagggtaaacgaaggttcctttatagcttacttg

SEQ ID NO: 149854 - DNA, 407 bp, Zea Mays
ggagtaatcggggaaaacatacagggaggagcggtggcggaaatgttgggatagcatcgtcggtcgaaaacatagtgatgagtatatatgagggtggggatccgaagatagcacgatgggatgtgaagttaagtgtcttagtcggtagaatattgaggagcgtaacagtgctaagcgcctcgacccaatatgcgagaaggacactatcctgaatcaacaaggagtgaacgacattattgatggtgagaagcatgtgttcggctttactgttttgaggcaaagtttaggggcaagacatacgaagttgaatgttgtgggagtggaagatagtgtgggtgatgtgtttgtcgaatctgtgaccattattgcacttgatgccctaaatggaaacgtcgaactgtgtggca

SEQ ID NO: 149855 - DNA, 743 bp, Zea Mays
gtatggccgagcatgcccttgtagtagttatttggtagcatgccttatatgaccaagtagtaggtgtacatgtagttgtacaaaacttcttgtaatagtgtaaaccatatatgcaagcatatggagcagctgcatccttagatcaagcagcatcactagtgttcatgtgtgtgctctctgatctcccctttacttttacccccagctgtgttagtgggtaaattaacaaagctggtactaaagccacagttgggcggtcatcggcattgttaggccaacaccctctcccccgtcaaccaccgcaacgataaccgtttgtggtgcataggacggtaatggaggttggaggaggaagtgcccagtaccccacgcttacccgcatcaactatggtgaccagtcggtgttcatgaaggtgatactccaagatgaccgcccaaccgcaccaaggttgtggcacatggtgaacactggcaaaataaggacacaataaagcttgcctaggacagtctgaagtgcatttgtgtgggctccgaccacgtgcgccgagcaaggacgcatgcagctcgtgtgagagtatgaggctatgccattctaggaaggtgaggccgtggacttggcactgcgcctgtagtcactggtgagtcagctcatggtactcgccaaaaccattgtcaaacaacaaatcattgccatgcacctgcacgtggttctgaccaaattcacacagattgcgcttgtcgat

SEQ ID NO: 149856 - DNA, 405 bp, Zea Mays
ctcgtggtttgtgggaaggacaacaacagtcttttggtctttgctacaggacagcagtcctgcagtctgttggtccttgctacaggacagcagtccttgctgcagtgtggtgtggacagtccttttggtctttgctgcagtatggacagcagcagtggtgtggacagtccttttggtctttgctgcagtatggacagcagcagtccttgctgcagtgtggtgcaggcggttagcatctgcttttgtaaagcagtccttgctgcagtgtggtgtggacatcagttagcatctgcttttgtaaaggtgtaggacagcatctagtgtagccatagtgtaggacagcacctcaggagcatatgctcggcacctcggcagctccttgggctataagtatgtatcccaacc

SEQ ID NO: 149857 - DNA, 352 bp, Zea Mays
ctgttgtgcttgtgagctgcgatgcatggttcgatccaatcaaatgagtctctgtcagcctgcaacactttgcatgagccatagctatcgaacttttttgcagtagtccacgatggcacgggcatcgacatatcgaggtggtactttgttgttgcacctgcagctttagcgttgatgctataggtttactcctacatgaatgctcacacccccttatgtaatgtactccgtatagtaatatctggtcgagcctgctctgcctacatagctagccgccgctgccccgcttcgcaggaagaacaatcgaaatcatataactaaacattaagggcgtgttttggatcatttggac

SEQ ID NO: 149858 - DNA, 362 bp, Zea Mays
ggcgtctgctcgtggccgtagaacgggcggacgcgctgacctcgtcgggcgtgaccttggcagggtatgattagatcattctatcgccgaccgatttagcgtttataatgaatatcctgtgaaataagttgttaagaaggagatctgtcaatgcatgcttgtgacttagttctgattagcgctcgtctaattagtctttttgctggttagtttatctcgtctatgatgcaccttttaactgtttccagttcctctgatggacacacccctgattgttttcagatagcatttactgttctgattagtacatgtaagaagtaagatacacctgtctcatgatgtcttgatagccgtgtcttaat

SEQ ID NO: 149859 - DNA, 563 bp, Zea Mays
tctagctatacgcgcagactgtccgagtatgccggaccgttagacaaagagtacacagaacatagtactgcgtgtcaggcacaattctcatactccaccccacccgcagcgcactgtagtcatagcatgccaccacccgcgcatgaggccgaatatttcggtccctacgaagcaagaaagattcaccccataccacacgacaatgggatgcaatactggtatgccttaggggcctttaccgaaagccacctttgaccatcctggtgcaaaagaccgacataaggataaccggccacctgagcccatgtcccgaagaccgatgggttacatggatgaagttcgggaggaaataactgaactattccaagacaaattaggagtcagtgtgtctagcccatggcagtcccattagaggccatatgacccttgatgagacaccgttccgtgccccctaggaccagtttgctagatttctccaaattctcgggcaagggcagtagaagtactcgcgaacacatgggccaattcttggcacaattggtagaattggccgacaacgaagt

SEQ ID NO: 149860 - DNA, 349 bp, Zea Mays
gagccttcttgcagtttatctattttatatgaaccatggtcggtgttactatttatctttaccttaattattgttaacaatcgaatactacatttgtgtggatttggaagcaagtgtattttacagaaaagttttttgagagtcgtttatatgaaccatggtcgatgttactattttcatatagcttaaaaagttcttgtattcatctttttattttgatgatgactgcaacataaccacttgtatttatagtttgggatcatgcgtggcctccatatcaggtgcgacccggccattggctaatccacgctgccgttccgcgtcgggacctctatcaccctcgatggcg

SEQ ID NO: 149861 - DNA, 326 bp, Zea Mays
aataaatcggtccatctgcctttttttcatcgaggagcatcttcttgacagctgtgaagattttcccgttggcacgctccacgaccccgttggactgcggatgatagactgaagcgaaggcaagcttggtgccgatggagaaacaaaaatccttgaaatcttgactgtcgaactgcttgccgttgtcaactgttagctcggacggtactccgaagcggcaaacaatgttctgccagaagaatttttgggtagtctttgatgtgattgtggaaacagccctcgctttaatccatttagtgaagtattcgacggctacgaaggcgaac

SEQ ID NO: 149862 - DNA, 458 bp, Zea Mays
agtcacttccaattccaccagatgacagaaagagcactggtatgccacagaattcagtcactgctgatcggatgtctaatctttatgcctaccgcaaagccaagggcctatgctacaaatgtggggtgcagtttactcggggtcacaagtgtgcagatacagtccagctccaatttgtggaggaactatggcaaacctgggacctgccagcttccgagggtacggatgaaaattcccatgctgaattacataatctgctgttgtctcaagctgcaaggggtggttcgccagcaaccaaaaccatgaaattctatggttccattcagggtatcaacatcctcattttactggattcgggcagctcccatacttttattagttcttcagttgcagctcaacttcaaggctgtaccacagtaaacaccagcttgccagtccaaatagctaatggatcacgc

SEQ ID NO: 149863 - DNA, 425 bp, Zea Mays
gttgttctaactcaaaccttggagctcacatcagcatctcttaaaatgaacttgtgcttgcagctgccaagtcgcagagggagtcatggaaccttgctgatcgctcaagttcaggatcttctgaaggagttgctgctgctagcagacccgcagacgctcccactgctcagagtgctctgcccatgacacgtagcgtggatgcggtcccaggtgcgcctattgttatttctggatactggactggccccggtgtagatgatggctgtggtagtgttgaggccgtgctccagaggattgcataatgttttcgcttgcggttaactagggcaattgtaacctgtgtcaaagcaacaactggaccatataaggttatatttttctttattcagagctctattttcccttggggttagttcttttcttcg

SEQ ID NO: 149864 - DNA, 474 bp, Zea Mays
tttgtcacgagcttctgtgagtgcccttcaaggtgcattgctgtcaggtttgttaccagcgtcatacaagtcgagcatttatgaggagagggtaatgaggaatttggtgcagcttgaaaatgcatactactccatgaggtcctctctggacacctgtgaaactaatgtaatcaaacagccagatatctcatgtagaagtggcagttcttgaagtcttgcctctttcttccctagatcttcaagtcttgttgcaatcagtccttgctgttatatcatgaatatcacaatcttttcgatccaataagaaaaattacatgagatcatctgatgggcgtgtaatatattcatttattaactaaaatgactatatggaattgttggtgggaggattgtggaatatagctcgtcatcaagaaggcttgagaacttgaaaacatgttggtcgtcgccttcttgggtctgctccgagtattc

SEQ ID NO: 149865 - DNA, 291 bp, Zea Mays
aagagtttgaaacttggagttcttttaattaatttgtgcaataacttggaccatataaatgaatccacgatgtctgggaagcctgcttggaccatataaatgaaaccatgatgtctggaacctgctaacaaccacatgcgctctgtaggtggctcatttaggctcctgtacataacacaactaagctaagtcgtactgcacactactattgctactagctttcaagtggcaaaaaaggtgatgtttaatcatgcatgcttattctattttttgtccatgtgtagtgttctt

SEQ ID NO: 149866 - DNA, 539 bp, Zea Mays
aaccatgcaaacaatctaggatgagcaaaggatcgcagaagagcgaccacaaaggaaatacttacccacccaaaggggtcgaagtcctcgaccaccgatgcccgagcaatcaagatcgcatccccgaaaccattaagcatgcactcaatggtttctagggctacatcagctcggagtggggtcgacttgagtcgttgctattcctctatctccacttcgtcaccctccataagccacacgagaaatacggccccaccaccgaccacggccagcgttgttttcccctgaagccgacagacttggggggctgactgccccacccttaagttgtcaccggcccatgtgatggcggtcggcggaggtgcaagggcaggaagaggcggggtagagcaaacggtcgccctggtgagtacacaccaggggcaactacatcgacctctaggagttcccttagggaaaacgtggacgacggcgagtcaatgagaatcacctccatgatggccgcgctcgccgcccttggaacgacctaggacgataac

SEQ ID NO: 149867 - DNA, 664 bp, Zea Mays
gtgttctgttgcttgtgaaactcatttttggaagtacacagttaattccgttctgtattcaacctccatagaaaaggatccgacttacaaatcacaaacactattatctgcatactgcaattgttttttttcagttatgagttcagttcatagaatgggaatgtgttgttttgtttgtgtactatcgcatgtttttatctcagtacagatcgagtggactatgatgtggcttcaaatgcatcagaggggtggatatcaatatatcatcatatcttaatgcctcaacaaactctatatttgtgattgcacctttgatcatctgtgttggcaatttactctagaaaaatcagatacacgatctttgttttcttttttcatctggcattcctatctgggaattgggattatcatgtagaagcttatatacttagtctgataggacaggatacatcaataacatggttagttgtcaaaaaatcaacaaatttgcgctctctcctccccttctatcgggcgatcacctcatgtgacgtctcggatggccgggccaccgcgttctggctcgacgagcgacttcgccatctgcttccctgccttgttgtctcactgcgtcgacgccggtgctagcgtccacaacgtcctgtacgccggcatcgataacttc

SEQ ID NO: 149868 - DNA, 272 bp, Zea Mays
caaggctttccataaaaagtataaaactattaaggttttatatagaaggtttttgtgccacctgagtacaatcaagaggataacgatcagtaataaatttgttcagagttgcaagaaagctactaagaaccggaagatatgcagtacaaggcagtgagaaaaggtcaaccataacaaagacaaagtgacgttaattccttgaccaaatgcaattttgttcaaggctgttcaaatgttggttattccattatctgaggaccacgaaatcaacc

SEQ ID NO: 149869 - DNA, 711 bp, Zea Mays
gcatgcagtggtgaaaacttttgtcttgctcagtcaaacaacggctcatggttgactgtactggcatcaacctttgtccacagtccaccccaccatccaccattagcagggcatcaatcagcatgcatctttcttcctggtggcctctgcaagctctgttccgacttcatcgcctttcacctactcccattgctccgccattaattttttaccggatcaagagcaccttccttcctgtcctgtgcatcgaggaggagagagaaagagtatgtgcgtgtgagagggagcagagtcaagaacagcaagcagcccagaacccaacatacatttaagagggggatccaaaaaaattgcagtctttacctgcaccacccctccctaccacaaatttccctctctgctggaactggaagcagccgtggcatccgccgtttcttgcgtgcttcctttcttggttctcctactagctgtcatcgctggtactgaaccagcggagaagagagaggtgaaccacggtgatccccgtgctggacaccatggccgtgtcctggtaggggataagcaacccaggaaagcagcaaccttccgctgtgcggatcacaggagggggactgcgtggggaccagaccaagcatggaggcactggcggccgcattcgccaccggccttgtccttgccctcgcggcggcgccagcgggagccgaaaccgac

SEQ ID NO: 149870 - DNA, 719 bp, Zea Mays
gtcagatccactcgtcaacacaggctgctgatgcatatgctgctctgtcttcagaggagaccaccgtttcagaagaacgtactccagtttctcatggcaaccaaacgcacccgttccatacttcagagccaacagaaggtacttcttgtgctccttgccccagtcacgaatttgaaccagacgtaagcctaagctgtggccaagaaactgaaagcccagtgtctgttcttgcaggtacgttgttggacttggacccaagagttgtccattcaaatgacgctgacgcttcaaccggcatcgctgccgtagaacaagaaagcggcttcgacggcctccaagtagacccaaggcacgagaccgagttccgctacgtgaaggagatattcagaaagtcgagcttcagcaccgagacgctgttcgacgaatggtgctcacagaacatcagtgtcctccaggaagcggattgccagcactacgaggccgccgcggcgtcgtacgacctgtcggcggacatgtcggccgagcagctgctcctgttcgacctgacgaacgaaggcctgctggacatctacaggaggcactccgtctccaggtctaggctctcctggttctcgtctttcgaccggccgagacctgtggggagccgtgcgctcggggagctgtggtctgggctgagcctccgtctggacggacggcggccacgggccagcgtccacgtc

SEQ ID NO: 149871 - DNA, 651 bp, Zea Mays
gtcgtcggccatggttagggggtggggctgagacagtggctggctgtgatggataggtaagcggaagtgaaacctaggtcttgtgataccatgatagaggatatactgccatatgttttgtgtgtcattgattgaggagaacaatacacatatataggcagagcgccttgaggtgtcgggaaccccttccctatggttggccagtgcaactacggctgggaaggtgataggtgcatcttaggctgggccttagacacacaggaatggcccagcccacaccagcggacagaacagacatattgtaacagattcaaccagtccctccgaaggagtaccagccaacgtagccttaggcttcctggttctcgaccgatgacgacaatgtttgctcctcgtctcagaagcagaagtcaccattgctgccattgttgaatgagaaacttgttccgtgggagggctgagccgctgccaaaatgccaattgacgtggtgcggtctgaagaggtccactggcaacgagatcctagatggaggcacgcccaataggctccttaaccaacttcctagcctttacatcaccgccggcgaggcgatcccagattgaaacacccatcttacaccttaaccagcgtcttggtaccaccctttctcg

SEQ ID NO: 149872 - DNA, 552 bp, Zea Mays
ctgctcatcagctttcaggaatggctttagcatggtgggacaccttcagtgaggccgtcagagatgctacctgggaagaattcaaaacagccttccgtgagcaccatgtaccccaggggatagtccaactcaaggaggatgaattccgggagctaactcaaggcgggagaacagtcagtgagtatgtgcacaagttcacagagttggcccgttacgcgtctgacgatgtcagcaccgagtccagaaagatggcccgttttctgaaaggactaagacccgagcttaagaccatcctcgccagccaagacttcctcaacttttctcacctctccaacaaagccattcaagtggaaagggcaaaagaggaagaaaaagggcacctcaagaggaaattccaagttctccaagctcaacagcaagaacgtcaccagagagctcgaccctttgggcttccacccaggggaccaagcttcaataaaccatctggacccactccatcgcgctacagtcagcagagtcagagctcccttcaggcaccctccgttgcaagca

SEQ ID NO: 149873 - DNA, 964 bp, Zea Mays
gtccacgctggccaaatcatgctgctgcataccaatctcactaagatttaaagttagggggcgactttcagctgttcccaaggccttttcataaaatttcagcactgctgcctgcttttcttcttgtgtgatagccatagaggtttctgtatgcagcttagcaataaaattctttttctttctgaaacgggcttgatggtgaaaaaagaaggtatttgcatctccttccttgagataaaggattctagaatgcagtctagcaatggtacgttccaaagaagcaagaccaagcagatgtagtttaagcttcttttttagccattcttccctgtttgaaagatccctggaatctcttgcaatctccagtctatgtattatttccttagccatctcaatatgtaatttaatgttaccaacctttctttgcccccacttctgtaaatctttactgagccgttgcaacttgagaaaaaggcgctctactgcacttgtggactgtacatgagcttcccagttccgttgaacgacctcaaggaatcctggcacttttgcccaaaagctttcaaaatgaaatctcctcttgcctttagtttggagttttaaaccaagaatcaaagggcaatgatcggatacattagacgccgaactttggaggactgaatcaggaaatatattctcccattccaaacagcaaaaggccctatccagccttaccaaagtaggtgaactcctctcgttggaccaagtatatttacggcccaggagagggatttctttcaaatcaaatttatttaaaaatctccaaaaccttcccatcatgtccctgtccagattatcattatttttgtctgaagcctgataaatcatgttgaaatctccagctgtcagccacggctcattacataacatcctgatatctttcaattcctgtaaaaacgtaatcttttcttcctcacatcctgag

SEQ ID NO: 149874 - DNA, 735 bp, Zea Mays
ttagggatgaaaacggacggaaacggacggaaaaacccctctcccgtttccgtatccgcattttatcatcggaaacgggttcgggtccggaatagtcgggaacggaaacgggagcgggataaacggaattgcgaaaacgaacggaaacggaaatactaacggaaactcataatttaatacaaatagaaatgttatcgatgtttgattagtgattgattgacagaacgataatataaaacaaatagatatagagaggcaacattctattgttgtttggttgctaaatgtgtacatttagctacatccaatgttgtttaagacttcagatcacttatcatttgaaaagagccgatggttacaatgaccaattgtgctataatttgtcacctaaatacacgaggatttagtttatatactaatgcatattaggctcgtcccatatttgtcaaatacggaataaatacgggttcaatccggaaaaaaatgggatcccgcaaaaacggacggaataagccctctcccgtttccgtcccgtttccatatttttccgtaaatacggaaacggtcgggtcaaatgtagaaaacggtacgggtcggtacgggattttttccgtccgttttcaaccctagaagggatcgaaggccaggcgtccgtgtcccccctcctcacgcacgtacgtgcaggtccatgccagcttccacgcatgatgcccgcccgtcgcccgacgatgcccg

SEQ ID NO: 149875 - DNA, 469 bp, Zea Mays
ggatcttcccatggtacagtaaccggtaactgaagaagatctcccccgtgctcatcaccggtagccgtcgccgtcgatcgtcgtcgctgtgattcgtgctcggcggtcactggataagtccgtcgcggtaaggtcctcgtcaccggtgagctggaagtcaccccgctcggccacggtacatctcctctagctcaccgcccgcggtaaagcgctcgccgtcgaccgccgcctctcggccgggtgccgcgtggctctacactttcaccgtgtcgccatgaccttctctgaaccctccgtggctcaccggagttactgccacgtcgttggccacgtacccgcgaagccagtgcttcttcctcctctccggccgtcgacgcatcgcggtcaaattgagagccaccgctctcggagcctataaattgagggcagggctagttacgccatgaaattgtgaagctctagcacccgt

SEQ ID NO: 149876 - DNA, 359 bp, Zea Mays
ctgatcatcccactcagttggtgataagggtgaatacccttcatcatacacttctttgaaaacatttctctttttagaaaaaccactattgcctcgacccacgtttttgtacccaaaagatattctttaatgcagactatcactcgtctcacaatgcatagattccaacccgtattcctggcttaggcagtggtagaaagagtaggtaatttatgcatcaagggaagaataaacttgccttcgtcgaagttctcttggcacgaaaagatctatttccgggaggtcgggctcctgcccttcttccggagctacaatttccggagggtcggacccttctccgccttgcaaaaacaggcaat

SEQ ID NO: 149877 - DNA, 540 bp, Zea Mays
tgggtggttctcatcataacctctactatttccactacagagacaggtgatggagacaggcggaggggaccggacgttaagctctggggacgagcactctcgagtccacctaagttaatctacacccacagcaatacaactcacactggagtacgggcggtaatctaaacctctgtgtgttcttgtgttcatcgaacttatcagataaatcgtaggctgctctctggtcttaggattagacaggtgcatcccaccaacccgctgtagtttactcgcacaactaacacatagtactcctacattagacatcaatatcccatcgtgccgatcggtccattgtccagtagtcttccttcctccttccctccctcacacacgcgccacaatcacaggaaagagattgatcgaggacgcgtacaatacagtaggttacatgcacattcacaaaattcaagtagcagcagcccacatgtctctatctcgcccgggaacctcggccacgtccatcccgtccctgcatgtatgtgtttcacgatcagc

SEQ ID NO: 149878 - DNA, 644 bp, Zea Mays
gagaaatatggcgattgagatgtcaaacgacgcgaaaacgatgtttgaacgaggaatagtgccataggaggtttggaattcgaattgaggcacaaaatgacgtggaatggagccgatacttcatgaataggtttatatgggtgaatatgagtgaagtgtgtgcttggtttgaatttaggcgaagaaaatgagatttgggaactcggctcggaaacgatcgctcgaaacggggattttggtgaaattaaagcctggaatatcggatgggcgtgaaatttggtgaatatgttactggagatgttgtgaaggtgcctgaaaaatttgggttcaattggagcatttttggctggtttgggcatttcaccgaacacgtgacgtgcggagttctagggttttggagaaatggctattagaggctgtgaaaccctccctaaggagctagaaacctgcagggatacacaatgggcatagagcaacatttctcaccacatggattcacagaattggataagaaattgagttgggcacaaaggggtggaaagggtgttcactgtccaaagaaatggagagagagaggggacatagtgaagggaggtgctcaccagagaagaggaggcagaggagcctacgcaggagagggtcat

SEQ ID NO: 149879 - DNA, 626 bp, Zea Mays
ggcaactaacaaggtaatcaccatttacttgctatctatggtagctaattgtcctcgatagtgggtaaaatgtctcctttgggcccaattcttctacaacaattcttaccacttggcgcttgacatgatgttatgtgtgtgagtttgctcgtatgaatcaggcaagctatgtgtcgtctcggcaccccatgccatgcagaagtgtgccgagttcctcgttgacatccacagttgtcttgagcatgcttagcagattgccaagtgtagttatgatcatggccatcgtataacatcctttgctgccaggaattggttgtcgctccgcctttgtcatcacacacctgtagcggtggcaacaactacacgtctatcacaagagagtgcatgaagggaaggtgctagcaattgacagagtcaagacgtgtgtgtgtccatctacgttttgagggtatctaagtggggcctatggatagtgtaaaaaccaactatatggctaggtacttataagaggcaagacaagctataacagataaaactcaaattgggctaaaggaaacttccttctccccaaattatctgtgtttgatccttgggcgattgctcacgtggacgacaaatcactggtg

SEQ ID NO: 149880 - DNA, 479 bp, Zea Mays
atagacccacttgcacgtgataggagtagcagcggaaggaagtgggacaaaatcccaagtgtcgacgcgctgaagagcagcaatctcctcagccatagctaattaacactcaggatgggaaagcacatcatggtaggaagtaggctcagagaaaatagaagcagaagcgacaaaatcaagacgagtcgcacgataaagtgtatttcgatcgcgaaggtcatatcgcggaggaggtgcaccaagcacaggagacgatctagatgatgccggaggggatggtggaggacgtggacgtcgagtgtagtggaaaagaattggaggacgcgacggaggggatggtggaggtaggggaggcaatggtggaggtggagaaggcgatagtggtggaggtgagggaggtgaaggtggcgatgatgaaatatgaataagggagggtagcgaagataaggtggtaggaagaggtggaaccaagcgaagga

SEQ ID NO: 149881 - DNA, 338 bp, Zea Mays
gtgaaaaagtacagtgttttccgttgtgctaccattcctcatcagcgctactaaggcctcacatcttgtttttccccaactcaaatgtccatttctagatttaccctatcagcttcttcttgcatgtcaatacctacaaggctacaacctctttttaatcacgcatgtgcattttgtacaattaccaaatattgtttgttttaaggtatctccggggtgatgatttatggtggacccagccggaaaaatataggatggacaattgcaatttaaatgaaccacttttacctctagattttatcttcttcatgccaagataagagggacaccacgacctt

SEQ ID NO: 149882 - DNA, 403 bp, Zea Mays
catgacatcaagggagcactcactgtccaggtgctggttgagtatctgcagatttgggagatggtggatggtgtcgttctacgccaaaacgtggctgatcagtacaaatgggaattaacgcaacatggttcctatagcagtaaatctgcctatgaagctttcttccttggatccatcaggtttggccatggagaaaattttggaaaacctgggctcctgcttgctgcaaattcttcatttggttagttttccattgtcgtgtgtggactgctgatcgtctggccaaaaggaacctgcctcatccggaggcttgttctcagtgaccaggagatggaaactataaaccatctgttggttgggtgtgcctttgctcgcgaggtttggcaggggcctccaaactcaa

SEQ ID NO: 149883 - DNA, 364 bp, Zea Mays
tccttctccgaccttgtctgctctcattggtctgcaagaattgtctctagcaaactttgatcagactcttgaagacatggtcctagaagatctgttgtcggagccgacagatggtggaatggtggatatttgtgctgatgtgcctgatgtcgggctagagttatcttgagcagcgtcccgtgcctcatcgaccttaaagcgtggtcttaagggtcaggaggctagtctggattgttctgctcacatggaagtgggtgaaggtccttcagccttagaggtggctgttacggagagctcggccctcaaggatggcactagcgtttacccagcccccgagggtgttgccggggatgatccggctcgg

SEQ ID NO: 149884 - DNA, 352 bp, Zea Mays
tcttttattgtctcttcctatgccatcttcgacatttcgatgcctctcttccctatagcatcgtgtcttagaatcctactacgctactacgcattggtgcatctgaaggtctctgtttaacatatccaaaccatcatcgttcagaaatcagaaccttattggatggcgacaagtagaacacaataatcgtattttggcaacattatctactgaccatgtagtttaatcgtcgtcatataaaacttgtgttttcgcttgtgagatgcttagcaccacttactccactgtccactctgttttgattttatagctaatatcttcattagtgtcctatctctctgtagcatactgc

SEQ ID NO: 149885 - DNA, 677 bp, Zea Mays
gggaggagtgtccagcggcaacccatgcagacagtctaaaatcctaaccctaaattcctggtataaatagccttcgagttatgaaaaaatcactcaactccttcactggccgccgctccatcttctcccacccgaccgctgtgcactagcctcccatctccctgctccatgaccccatggtgagcaccgccccctccccccagtgcctcctctcctcgatccatacaaacaccgcggacgcagtggattggggcaagcagcgagcggcactaggcctttgccccctcctgttgcctcgtcgggcggagctccgctgcagtggcgtggacacccgtggcctggtgccttcgtctacaaccgcaggctccctcactgtacacacgccatagcgccgtcatccccataccgccatagccgctgctgctcctcaacgctggcacctagtcgagcggagtagctcgcactcaagccggagccgtcttcctactttagccaggatgccgagctcctctcttggagcagcaagcctcggatctgtgcagccccgcctccactgtccagggcactcagcgcagctccctcgagccctgtaacatccgatctatgttagagatcgcacaggccagtactagtatgtatgtatttgaattttattgggtcagtggactatatccatg

SEQ ID NO: 149886 - DNA, 997 bp, Zea Mays
gaaagtgtattttggcttcaaactttagtgttgttttcattcaaatgtatggccataccaattagatagacctggggcaaagaaaggtcgtttgcttgtagcctattctttgtttttcgtctgttctgtcacagaactatgtatggaaatccatcttctgtgtccctaattcctaacgtcaattggattatctaattagataaatagatataatagtattatgtgctatcctcctttctcacatatcgaggacacactttcctatatatgttgaagagcttgaataactgatggcttagattattgaacattttctggtcctgttcacttaaaattgacatttagatcaatttgagcataataggtctcgggcaagtcaacgctaaagctagccattctaatggagatgaaattcgaaagaaatctgttggagcgtaaccctcttagctagcaccatatcggaatccggatatggtgttaaatgggcaagggtcggattgacaccccactagtgatgtgccatgtcatgatctgggcacgatgtcaagcgagcaaggatcaggacactacttccttagtggcacgctacatcagtgtccaggtgtagtaaaaaatgtgcaaggattttcagatcatcatcgatgggtgtgaagggtaaggaagctagtcgagccaactagaatccgtttaggtagttggaatataaggttgctcataggtaagttaacagttagttaagatagtgactaggaggcgtgtaaatatcttgtacgtccaagagactaaatgaaatggtcagaaggtaaaggaggtggacaatacatgctacaagctttggtacacaagataactacaagcctgcaaacagaaataggataggagttttgattggcaagagctttaagaatggggtggtggatgtgagaaggcaaggagatatgattattaattatcttagtcaagcttgttgtgggtgattggtcttgaacgtaatttt

SEQ ID NO: 149887 - DNA, 393 bp, Zea Mays
tgttgctagggttgggcctcaatcccgacccacgccgccccctcctctccagttaaatcaattcatcttcaagggtatggaacgtcgtactaacagagagatgtttgtgcattgtcgcctacagatttgcgtatcgagttgttcgtcttcggttccaagatcaagtgcatccaaggtactttcatacacaatttcttgcgcaatttactgtccacatggccacaaccaatttatatatgtgctgtcatttgtgcatattacttggagatacgagagctgggatggtcatatgtttattgttacctagggataccattgttcttttgtataagtatgatatgtgcagtgattacttctacctttgtttgtcacaacctgtatgttcacggttca

SEQ ID NO: 149888 - DNA, 378 bp, Zea Mays
ggaaagggcgagggtccaccgagaagttagccatgagcaagaaaggcgaagacaacaagtagaaactgcaacattgttggtggcgagaggtgagaaacgagagggttttcccactacaaagagagtggagcaaccagtgtccgaatctaaaaggcgtttggaatcgggtataacaggcagaccagtaactatagccagtgaaaaggttcgacagagagggcgaggagatggcaatacacttagggaggaactaaatagttgcctcgtcagaatgcagaaagtcgcctttactagaagaatgtgtgggcccagtaaccgaaggcaaaggagccttaacaaagttaccgggagcaacttccgacgcaacttgagtacctt

SEQ ID NO: 149889 - DNA, 327 bp, Zea Mays
cttcagtatagattgttggagttatgtgggtcttcactggaatcatgacctcgatttcttccctatgattcacgaggctaagggtgcctggtcatagtttcttcatggaaattctggcactggtgctatggtgcatttggaagcagaggaacaactacatctttaggaatgaggccccttcgttttctttttggcgacgctgtttcaacgacatgttgaagttacagatgctgagatttaacccctcttctagagctaggcttaaactctcgatagcttcttgctcgtcttctttatttccccttctaatcactatttcattccaaa

SEQ ID NO: 149890 - DNA, 501 bp, Zea Mays
gaagagcttaccctatgctgagttctcttataataatagctatcaggccagtctaaagatgtcaccattcgaggctttatatggcaggaagtgcaggactccactgtactaggatcaaactggagaaagacagttctttggacctgagcttattcaagaggcagaagaacacgttcgaatgataagagaaaatttgagaattgcacaatcaaggcaaaagagctatgctgataataggagaagattactggagtttaaggagggtgatcatgtctatttgaaggtgtcacctctctggggtatgaggagatttaaagttaatggaaagttgtcccctcgcttcattggacccttcttgatcttaaagcgagtggaagttgcatatcaactggagttacccgatcacctgtccgatgtacatgatgtatttcatgtatcctagctgaagaagtgcctcagggtacctgaggagcaactaccaatagaagaccttagtgttca

SEQ ID NO: 149891 - DNA, 424 bp, Zea Mays
ctcatatatggggttttagtcaagtttttccaaacatgctatttgcataggactcacgttttttgctttcagaacatggactttgtgcctaatatttgccttatgcataatatttagtggattttgttattgccatacatgagctaaacaagcacaggtaagaagcaagagcacttcatgttcctatcagtttatttagaaatgatttttctagctataccggtttgttggtacaggatggctgaccctgactttccttggatagctgcgacagtgggaggtatcatcatttagcaagacaatttaatgacgtcagcatcaaagtgtacgggatagaccagactggtgagaatctttttcccttttttagttgtcatgcttgaactcttatattatcacaaatgcatttttacctgtttttcat

SEQ ID NO: 149892 - DNA, 812 bp, Zea Mays
acagcatagccttttgtccaaaacaattttgggtaggtttggaatttctaaacattagatcctttttggattttttatgcaccatgtaaattaagttgtcctttgacccttgaggcaaagtcacttcggtttgcagcttatgttcacttatccgaggaccatgttgactttaaaaacctacatctgagcttatttcttctatttactattttaattccctttgttctgtttggtgtcttgatttgcgccacacattactgatttagttatcatggaatttattgtcattctattgttttctttcgtttgtccatgggatggttcacagttttttttataagttttccgcatcttttacacaagggaatgtatcaggtgcaaaccaaccacttggtgtaaaccgtgcaaattaacacgttggtggagttgggagggtgtatttgaaaatatcattgttttcaggtagggcgaacagctggtcgttccagaggaccgaccaggcgcctaatcgtgattagggcgacaattaggacgcctaatcggttctggtcgacctctggtcatcccctaactgtcctatatatttctggacatatgtatatacaagaaatattgcgatatgcgttatataagtctgaaagtctgaaattgaaactgagtaacagactgaaaggcaatataggcatatagcactacatcagaactgaaattgaaatattgaatacaaggctacaagcagtaatgcagtacctactacctagagcagatcatcatccaatcaaaaagcatcagcagcagcttctcctccacca

SEQ ID NO: 149893 - DNA, 478 bp, Zea Mays
ttgccctggagagcaagttccaagaattgttgtcttcgccgaatggggcgggcataggcgaaggggatcttcgggagctctttgagggtgaggagttgaggataatgctgtttaattacagggagatgggtatcattccgaaggttgagccgatgtgttaggcgatgccctcgccgtgtgtatgtaattgtaatggtggtgtggcctgttggtcgtattcgtacgcttgtattgttccggctacgtatatgggcggctttgtgcagagtgtctttgtaatgatagactttgattaacgttattctggctgcgcccttaggtaattgttgcgctgtcttttgaataaaagactttgtttgacgcttctgttgtgctgttccggctgcacccttaggcgacttttgctcggaatgtcttgtaaagaaaagacttcgaataacgctcttgttgagctattccggctgcacccttaggcgac

SEQ ID NO: 149894 - DNA, 451 bp, Zea Mays
ttgatgatcaacataacttgtggactaatgtgtttgctagtgtttgtatttagggtttagggttagggtttagatgaattaccaaggaacaacgtagaggattattagttttattattagtttatttcttgcagttggatggtagtctttatgcattatgggaagttattgtactgtcatttggcctagatattttttatttggttttgagtatgtgtagcaatagcttgatgatttatgtttttagatgcgagtaaaatccttcttgtagagtaaactactataaacaattctgtttggtatgaagtacacaccaacatcatagcttttgtttgaaagcaagttggattaggttggggatcaaataaataagaaacaaagatattgaaaaattaaggaaagagtagaagacaatgagttaaaattatttgttactcctataaaacatgta

SEQ ID NO: 149895 - DNA, 377 bp, Zea Mays
gatatggctgaaatttgttgctgaactgaactaacaactgttggatgatgcttgtaagatgtccacaactgttggatgatgcttgtaagaggtcttggtcatggattcaaaaacatctatcatatcataaatgcttgtgtggcctggtcagttgcaagttgcaacctactgcatagaacttttgactttgcctggataacaattagttgtctggtgcatgaacctggttcaacatttgcttagctgtgaatctgcatatctaggttagacgatatacatgaagcaggacaattgaagtcagaccaggttgaatgaaacaataaaagaactgcaataaggcaaaaatccaatatttatcatgttattttacttcttgc

SEQ ID NO: 149896 - DNA, 740 bp, Zea Mays
gtcaaggctcagcctgctctcttcctgcccccccgtccgatctctacccggcggaattccgtagacctcgccgtcggccaccgcccgtgcaatttggagttgagggaagttcaccggaaggcagcacgatggttcagaagaagaagaaagcggccgcggcgcccaaactccgcaagcttccgaagcgcgacgcggtagctagctacgctccatttccgcaacctccgcgcttggattggatcctctccgggggaaggagtgtctaacttcctttttctcggtctcggttctctcgcaggataagaagctcgggaagaagggtgacatggcagagttcagggcgcagctggactcccttgggctgaagatagtccaagtcacggcagatgggaactgcttcttcaggttcaggactggcttcttttggcttctaatgtgcatgtccttgtcgatgagaagaagaaacatttgattttgaacaaaatgagttttgtttttcccgaaagcaattctcaggagcttatgccttttcaaatttttaagcaggagagaagtgttaaaaaacgttttaagagtttttgaacaaaacgctagggcgccttttgagttatatgactactcattgtagtatgcagggcaatgggtgaccagcttgagggcgatgaggaagagcacatgaagtaccgagatatggttgtggattacattgtggtatgtgggataactttttgtaattggtg

SEQ ID NO: 149897 - DNA, 755 bp, Zea Mays
ctaacagcgttcatgaatcatgacgaagacgaacaccatgagaagccaccaccatggatacagccaccgccactgccacctactcgtacagtcttcaatcctgcttttcctcggaacttttgccgccgcacaagctgcatccgacatcctcagcaagggcagtaaccttactaacggcgagaccctggtctccgctaacgggtcgttcacattagggttcttcactcgcggcgtgccggcaaggaggtacctgggcatctggttcacggtggccaactccagcagcgacgctgtatgctgggtggcgaaccgggacctccctctcggcgacacctccggcgtgctggtgatcagcgacacgggaagccttgtcctgctcgacggttctggccggacggcgtggtcttcgaacacgactgcaggcgccgcttccccgacggtgaagctactcgagtccggcaacctcgtcctgctcgacgggaacggcggccgcgacgactacgacgtggtgaagctgtggcagtcgttcgatcacccgacgaacaccttgctcccgggcgccaagatcggcatgaacctgtggagcggcggcgggtggtcactcacgtcgtggcgggacgccgacgacccctcgacgggggaattccggtacgcgatggtcaggcgaggagggttgctgcccgagatcgtgatgctggactcgagcgatgccatcaagtaccgcacgggagtgtggaacgggcggtggttcagcg

SEQ ID NO: 149898 - DNA, 525 bp, Zea Mays
ggccaggcatctcatggcaacccagaccatccgattcacgacagttgattggggaagagaagggaaggaacaagaggacagattggagagaagacgcacgtacctgcgaggagggactggggcgattgcttgctctccggtggcagtggagtcgaatgagcggcgcctgtggagcttgggcagcaccgaccccgccgaagaggaagagacagccaaacgatgcagggattgggaaaggggatgaaattctgtggtggggtctcgggtgcgatggtggcggactgagaacccgggctccttggaagccgacctacccaggcgtcctcgtcgtgcttcggatgttgcctcctctccgctcgcgatacacgggccgaacgggagggacgacaacgccatcatatcgacccccttccatggagagcggattcctcgatttgccgaggttaccacgacgatttggggtcgcgccagcgtgggtttccttccaaggagatcgtgggtttccttccagcgagagccgagagc

SEQ ID NO: 149899 - DNA, 750 bp, Zea Mays
atcccaatatgatttgaagataatttggcaagatttgaatttaaatctggatttaaaatggaatttggaaataaaagaaaaaggaaaagaaaatagaaaatgaaaagaaaataaaaagaaaaggttatacctgcgcccgggccaaatttcgctgtggcggcccacttgggatatcggccttgtcgtcccctgggcgtgcctcaactgtgactagcgcagcgaaagcatgggggcccatttgtctgtcgcttggcgagggacgaagtgtcgctgccgatggggccatctcgtcagctccttcctcttgtgcgggggcacaacagaacgcgcgggcgccggtggtcctgttgccggaatgcacggaggaaaacccggggccgttgcaaccatcgcgaccttgcccttgtgtattaataccgatcacctcttccagctggccatcggcgaggacaatcgagacatcaccattgctgcagccgagtgcggagcgggagcagagagagaacgtagagagagaacgtgagggctgtcgccaagcgggtgttcgacactgccgcgctcggggcattccggtgcttgccagtgcgcgcggcgtggcggacgcgtccctggaagcggaaggaagaagaggcctgcggtgatcccgagatttcttgtcggagtcaagctgttccgccgaaccaacatcatagcgtgaccaccaaaacctaggtaacaatccgaggtatgtgttcccccacctgcttcgcc

SEQ ID NO: 149900 - DNA, 443 bp, Zea Mays
aaattctccatgcatcccggcagtaacaagatgtatcatgatctcagatctttgtactggtggaccagaatgaaaagggaaattgctaagtatatatctgagtgcgacacttgctaaagagtcaaggccagtcatttgaaggtagcaggcaccttacagccccatcccataccatcttggaaatgggaggacatttgcatggattttatcgtgggattgccaaatacctcccggcaccacgattcaatttgggtcatcgtggatagattgaccaagacagctcatttcttgctagtacataccacccacaagatggagaaatatgcagaaatctatgttgatcaaatagtgtgtttgcatggaattccgaagacgattgtatctgacagaggagcactgtttgtggcacgcttttgggagcagctccagaagtcacttgggac

SEQ ID NO: 149901 - DNA, 688 bp, Zea Mays
gtcggggcgaatgaggagtatgattaatcctgttaaagtcacttgtgcggttgatgtcttgtgcgtaatatggggacacgtgtgtgcgcgtgtgccgtggtgcattatagtgatggtggcgtaaggtaattgattgaggtgtgagggtatatgccgtaatatggttatactcacaacgaagaaagatgtatgtctggtgtaacacaacgtttagattgctgtcgtgtaaccgtgtgaaggatgctcctgatggtcatgtgactaaagggtgttgtagtggcaaggcgagaagtaagtctaatatttttaaaacgattagttgatagcacctatcggcttcgtcatgatttttgtcgtatggtgaatcgatgccttgtcgtcgtagtctcggggaattttcggaaatgttctgatgccttactgatggggttgaatgtacttgtgatgtattacaatagttgtgtgtcgtgcatgtatccaaaaatggtaaaatgtggtgtatgttggtaattagaaaatagtcacgtcattagccaactcgtgttcagcaggagtcgattgcgttaagtgattgctatatacatattgtgtctcggagtgctataataatgagttagcagacttgttagatggttttgggttaagttcgtggtcacgatgaattgcttgttgtagtctaaatgcgtgt

SEQ ID NO: 149902 - DNA, 277 bp, Zea Mays
gttgtcttcaaccttgagtgaaagggagggatttggtcgcggtgagacgagggacggcgttgggcgcggatggtgcagcgaccaacggacggcgtaactccggcggcgatgcgtttggacgacgggtaaacaacagcagggaccggcgtcgctgtgtgagcagcagaggttcgacgacgatggtgtgcagcagcggcacgactacagagcctgtgcgcagagcagttcgggcaggagagcgcaggatcgagcacgaaaagagagaagagggagctcg

SEQ ID NO: 149903 - DNA, 404 bp, Zea Mays
tctcgcctgagcgcttgcaccggtagcaacaatggtggagaggggagaagggaagtgaggtgggagggagggagacgatgggagtggacagtagtgttgtcaggagggggcggggcggcgcggcgtgggtcggttttgacttgtgattgtgcaggcactcagccgtgggtggcccgagttttctttgtcgaattgattgtctttttcaacttgctgaaagaatccatggtcggacgtcttttgacctctgttcaaaattggcctaaccgtcgttctcaagcctccctttctctccatttggcttccatgaaacgcatgagtattataactctcaagaaagcagaccattctgaggatagaacctgcataccgaatagtagatattaatgaatattgtcccagcc

SEQ ID NO: 149904 - DNA, 854 bp, Zea Mays
tgagcgagcaggagtgcgtctgtgtccgaaccaccgtgccgtcttagtcgcccccacacacgcgtttgacccagatgtgatcgcgttcgcaaccacccctgcataaagccccatcccactatccatccccgtacaacaaccccactcctccagccgctcacacaacctcattctcatctacctcatcgcgtgcatgctccattaggcgtgcctttccctctcctttccctggccacaccatcccacaaggaccgacaccaagcaacagcgccgccagcaagcaccccatgccctgaaccaccccacaccatatctgcagtacaggtacaacagtccctgccgccggggacgttagacccaccctgctcgcgcgcgcagtctgatggctaattcgccacgtcatcggtcctgctccggtgagctgtcgacgctgtctcctgactggcgaagccagtgacgcacccgccgtgcccttgctcctgcgccgttctcgtgcacaacatcacaggtgagaatcctctgcccttccctctctccgtctccattttgcgacgtcacacagcgttgcgccgctggccgccggcgtgcgtcacaggccggcgaggtcgcgaccctgcgcaagggtcgtcccccacccagccatggcacagtccttatgcccccctcgcctagccttgggcacgaccgcctagttccggccggccagtcgcccccgtcccctgccggacgacccttcctctcctgtgcggccaatcggccatggccggttccccacgaagaagaaacgaatccaaagccagcaaccgtccgtccatgcatgaaggaaggagacgatggagataagaaagagaaaa

SEQ ID NO: 149905 - DNA, 482 bp, Zea Mays
gtgtgccctcatcgcgctgaatctacatgaaccatagctaggcacccgcctctaggttgtatgatgccatccatacttgttcctcttctgtgatgcattattagtgaaagtatgacttgcaccgattaatgaatgctactagatcggatttcccatcaaacttgggaaaatccatcttctggaaatgcggctcttgattgttgtggtgcttgctgccatgcagccctctagcgcccgatggggaggagtcgatagtgcattacttgagcatgtcgaacttggtctgcatgatctcaatggtcgtggtcaacttggtgatgagggccacgatatcggttgttgtcagtttggccattggtgtggatccagacgggtttgggggcgttgacacggcggaagtgggcagggagaccgacggtgtagtggatgacgattgactggatcgtgataccaagccactcggcgctaccaggttgttaagg

SEQ ID NO: 149906 - DNA, 385 bp, Zea Mays
gctcacacaacctcattctcatctacctcatcgcgtgcatgctccattaggcgtgcctttccctctcctttccctggccacaccatgccacaaggaccgacaccaagcaacagcgcagccagcgagcaccccatgccccgaaccaccccacaccatatctgcagtacaggtacaacagtcccagccgccggggacgttaggcccaccctgctcgcgcgcgcagtctgatggctaattcgccacatcgtcggtcctgctccggtgagttgtcgacgctgtctcctgaccggcgaagccagtgacgcacccgccgtgcccttgctcctgcgccgttctcgtgcacagcatcacaggtgagaatcctctgcccttccctctctctgtc

SEQ ID NO: 149907 - DNA, 617 bp, Zea Mays
gactgaaccgtgacagagtgggtccagctggtctaatgaagcttggtcccttgggtggaaacccaaaggatcgagttctctggtgccggtcttgctgctgagctcggaggacttggaatttcctcttgaggtgacctttttcttcttcccttgccctttccacttgtatggctttgtttgagaggtgcgagaagctgaggaaatcttggctggctaggatggtcttgagttctggtctgagccccttcaaaaagcgggtcatcttcttgacttcggtgctgacgtcatctggcgcgtagcgggccaattctgtgaatttgtgcacgtattcactgaccgatcttccatcttgagttagttcccggaattcatcttccttgagctgaacgatcccttggggtacatggtgctctcggaaagcagtttcaaactctgtccaggtagcatctctgatggcagcgttgaaggtatcccaccaagctaaggccattccggaaagttgatgagcagccaattgaacacactgattctccgggcattcgatggcttccaacttccttttaatcgtgcgtagccaatcatcagcatcgagaggattgctagatccagcgaatgtg

SEQ ID NO: 149908 - DNA, 274 bp, Zea Mays
gagcaacttgtcgatgaggtgatgatgaaattccgctttagaatgattcagcttatgtcagggtttgcatttgtgctaatgctaattgttgttgggttgtggttatgatggtgatacagctgcaagttaggctttcaaagaatgtggaggagtgtgtggactttgcgccagagggaggtaaggtggtggtgagtgctactccaaaaggccactccgatggaagtcatggtgttgagcttcctgttgctctgcaggcattggaggttagttttac

SEQ ID NO: 149909 - DNA, 317 bp, Zea Mays
tctacagaaaacatactttacttaactagattaatcgcacaaccaaaactgtacacccataaatttcagtttactagcacaagagcacttaactaaatcaccaagcaaactcatagagagatactatcaccaatttcttaaattcaaatcattatgacctagttgtaaagtttcaatttatatcaaggcacttaagtatttcaagaaacatgcatgcccttgtttacttctaatttttcactaattgttcttataattataaaatgggtgttattttagtaccatatgaaactatctaatttggggctagaattttt

SEQ ID NO: 149910 - DNA, 925 bp, Zea Mays
gggttttcttttataaatgatggagtatacgatgtaaactcataacacttaaggtcaatttgttagtcaatttggcacagctccacgagtgaaaaagtaaacctagataccagattaacatagatccaagggtggaggcccagaatcatgtgtttaatgcaggaaggaggcgtaccgtgaactgcttgggggaggacaggaagaaagcgatgccgccactgccgggcacgacgtgctgcctcaccccgagctgtctcgctatggtttagccgtcgtcgccgccatgcatacctcgccgcagtgcaggtcccctctggcgcctcctgatggtggcggcggagaggaggaacggtggtggtgccctgagtggaggaggcagcgatgccgatgcggccatggcttggctgcatccatcagtaatgcagcggagaaaatccagagagggtaggggaagccatggatgtggcagggggctgcctcggcggccatcgcggggaggaggcatgtgcgcgcggtgaaggcattggtaggcattgcgagggaagaggcagacaagggtgtgggtgatgtccccgatggaaggcgattgtgggcttactttgaaggcgcgggcgcgacgatggcgatgagaatggcgggagacatggtctcgacggtcgcgaggggaggggtctcgtacaagggtggaggcgcgacaatggcggaggagtcgcagacggggtcgggggcgcgaggatagcggcgagaatggtagaggcgcgtgctaggtttgtgggagtcggaagtgcgggctcgacgatcgtggggtcggcgtcgtgggggcggctcgtacggggtgggggcaggggcatggatgcggcggcgagattaggggggacgaagacaggggcgtgcgcggcgagattagcgcggcggtggagggcgg

SEQ ID NO: 149911 - DNA, 308 bp, Zea Mays
ctacctagggttgcctcccttaggtcgtggaattagaacagggtgcacaccctgtcaatttcctcgatccagtgcgggagccatgagatccagaggtggctcacaagtttttcgtggtcgaggtggatctagaggatgtcgtggaggtcgaggaagggccatagttactcgtggtggatgttctggtgtcaacccaaccactgaccatgcccttgttcaagatctagaatatgaagaagaaaatgaattggacgctcgatctccagtggtaaggaaatgcatattaatttttgtgtttactaactgcc

SEQ ID NO: 149912 - DNA, 348 bp, Zea Mays
agttagtcccgcctgagctgaagaaaggaagttgttatcagatggctgttgatagcagtgaagcagacccaattgagattatcaaggttgtgtctgagttcccagatgtgtttccaaaggacttaccaggtatgccaccagagcggaaagttgagtttgccatagagcttcttcctagaaccgcccccatctttaagagagcttatagaatatctggaccagagttggttgagcttaagaagcagattgacgagctgtcagagaaaggttacatccggccaagaacctcgccttgggtcgcccctgtcctatttgtggagaagaaagatggcaccagaaggatgtgta

SEQ ID NO: 149913 - DNA, 413 bp, Zea Mays
actactatccttttttaggaaacaatagattccccaacttgccttattcccaaaatatgaacactagcctaatgcaagtcaccgacccttgtgatcagacaatatagctatttaataggactctaaggcacattggccatttatgattgcatcctcttcagtcatggctatgtaatcaatatgtcaaaaggtaaaaacttgtggtgccccctagcccgactaagcaaatagactcaacaagtaatacaaattcatcatcgtactatctcacacttgactaggacaacatatcaacaatgagtagactggaaagtaccacgacgtccttggagtcagatgagcaggcgacaccagttgctccacttttcagatcggttggatcaacctttgcgtttgcacagatcgcctctttg

SEQ ID NO: 149914 - DNA, 522 bp, Zea Mays
gcaagagcccgaagttcagcttcagcactagaacgagatatggccgtttgcttcttggatttccaggcaataggagaggatccaagaagaatacagtaacatgtagtagaacaacggtcaatagggtcacttgcccaagtggcatcagaatacgcatgtagctgaagtggactatcagaagcatagagtaaacatatggatcgtgtcccgcgtaagtatcgaagcacacgaagcaaatgaccataatgaactgaggttggtgtggatacaaattggctcaacatatgaatagcatgagcaatatcaggtctggtgatggtgagataaacaagactacccacaatatgacgatagtggggtctgctagaggtgtcccatcctgcggacgaagttttaaatgaatatccattggtgttgcaactgtccgtgtatcagtaattccagagcgatcaagaagatcttgtatatacttggactgagacagatataaaccttttgaagtctgctgaacttcaataccca

SEQ ID NO: 149915 - DNA, 1732 bp, Zea Mays
ttctcctcctccctacaaccttcatcttctccgaaacttttactgaatgtgacatcgcagcgccagatccatcctaaagagttatagcttcatacgaaaaaacaggttagttcctctttattttttagaacgggcacttacaataccattttttcactgtgaagaaaagggacaaaaagggattctcacctgaacagcagattactagatcagatacggactggtgatgttgactaaattaattactataaagtacgccatcgtcgttgcctggaagctagaaagaaatcagtttatactaactcaaaacgaataatatatataatgcacatttaactaactaaaaaaagatagaaagacttcagctcaccaacatatacggtatctgcatctgtgaataatatatatgatgcacatttaactaactcaaaaaagagagaaagacttcagctcaccatcgtatacggtatctgcatctgtgttctacatatgtaggctgagaagtaaactaaaagtttctacaatatagaacaattattaggaacatagaaaatatggtatgaggaaatatgtgaaacattgtgcacaagaaacgtttattctggtgatgggtgtaattggatcaccacctctattgtcatgcatacattagttgttaatattgatgtttcttatcaataaatctattcaatgtcaaaacatgatttaaccacaactcctaaaattatgaaggtactcctcatgcccgacatgtatgcagggacaatatcatatatgtagctattatttttttatttgcatggctggcaaatggtttgtagctataccaaatttgcatgaaaaagaaaaaaactaaaatttatcatactcataactgtcatacttattatgtatgattagatttgtcattaaacaatttacaaagcatgtctgatcatacatgttaagatcaaagttcaaaatctgttatatatggtataatacctctgagaggataacgactattacaacatctttatattcttaacatgtatgaattcgataattgacatggtactatgtcttttataaaatttgtcactcccagggctgttataatacaatattgttaacatgtaaatttaaaatataatttttcaaagctgttacaagttacataacatctttgacattataacaacttaaaatcttaacatcaaagtcagtagctgactagctggtttattgcccgaggtcctacttcataatcatatgaaatcaacttctatcatgctatgctacttggggcctatttggtttgttgagattcttagaatctagcacaaaaaatcataatatgccaaacatgtctcattttgtatctagattctagacaaaaatctgagtatccaactacaccttgataatataagataatgggcacattatccaaagctaaaatcccatgcctaccaaacgacaccttggaaagatatcgtgcttaagttttgtaatgcagattcaatataacaagccaaaattgtatagtataccaagttaacaactcacaaagaccttaaattgtgataaaccggttcaaattgatgtcttgtgcatgtgttcaatatatgtggtcttttctcaatatatatgtttatgtacattattattcacttactaatttgttatcctaactgattctgattgcctgttatcctaaccgattctacatgcctgctcatctcgctggacg

SEQ ID NO: 149916 - DNA, 456 bp, Zea Mays
ctttttcatctcatttcattttgaaccaagaatcagtctgctaatataattgtactgcttttttgttttataaaacataatattagatgacacatcttaaccaatccattctgattgagttgttaaatttctattaccaaaaacttattgcttatgatcatttaaaatgtgatcctggtttaggtggtggtacaaactccccaatataatatttgtagacatcatgaacatggtatgtggttgcgtcgataaaacattctctgacaggtatgcatcacattaactgagataatgttgtgtcacactttcgcacaagtactaacatgagtacagagcatggtcacctttgttcttttaaaatgctaatgcagtagagagcatggccgttgggtgagtcaatgactactaggatgtctcaccgcaaatctgaaacaggtagccttcaatactgcccct

SEQ ID NO: 149917 - DNA, 287 bp, Zea Mays
gctgttttgacaggtactggcaggcttcgcacctctgtactaactcgattgcgtcactcttcgctgttggccagtagaaacctgacctgaaaaccttcccaactagggtcctggatgctgcgtgtactccacattgcccagcatggacctcatccagaagttgctttccagtagctgagagaatgcatttcatgagaactcctgatgcaccccttctgtatagtgtttccccaatgagtgtatagtgagctgattgtcttgcgatgcgctcggctgtattcttgtca

SEQ ID NO: 149918 - DNA, 301 bp, Zea Mays
gcctgaggccttctcaccgctgttctaccctctctgcccgtggattcatggcctcttccccgccattgagttcgtcgtggtgccctctccctctctgcccaactccggcgaccccgaagccaccctagcccgcgccagcctcaactccggtgacctcaccattgcggagaggagcagcgccgcccggagccgtctgtttccccctggtctgatcccctccgtccgattcagatagaacggctcagatcacggataacgcttcgcgcacgcgcgccctgacgccctggcccgcctgtcagcg

SEQ ID NO: 149919 - DNA, 293 bp, Zea Mays
ctttggcctcgaagggatgtcgaattggttgatccaccaacaccgtcgtcgtttcatccccaaccatctcggcctcctcaaactttagtacctttacatccatcatcacctccataatcttcccatgctgctcctcatcctctttctaatccaccgtctccaccacaagcatcaacatttatgacaccaccaccttctccacagccatcaagggattcacgacaatcaaagaaatctaaattccctctaccaaaattggtgtccacattcgagaaaaagaagagtaaagctac

SEQ ID NO: 149920 - DNA, 810 bp, Zea Mays
gtcgatcatcactctaaagtctaaactcaaaggcagcatatccagtgcgcctggctacctcgtgctcccatgcgcataagccagaaagagcttgcaaatcactcatgagcagatggtgcaatataaacataatgctcgttttttcaggttacatgacaacttttcttcgtgagaatcctagtggattgtctgacactgacatggtactttgttgtagattgatttgtaaatgcccttttttattgttgcatatatctatcatattggctaaagtaattttgtttaccttaccatgtagacatctatgtcggcttctcagaatgcagttgttgaaaagcactgatttactcttttatattgttggtccattctaaaggatgagcccagatggatggatcacaacactgatcgacaagcatagaccgctgaagctgctcaacttgggtcaaacactatcaagctatacctcgaagaatagatcaagctataccactaccagttcatcagaagagtatctcatcaagctagagatctatctttgcaaagactttccgtttaccaaatagttgtgtcgtttgagcaacaaaaagtggagatggcgggtcaatttcgcagacaacagctcaggattgagcgtaaaagttgtccattgaacacgagcgtttgtaacgatagaaacaaattgaagggaaacataccttgccaattgacttgtcgacttgcaatcttcttcagcgtgaatattacaaaacgatacaataacaaatcatgttcaaaattaaaggcagtgtaccgagacgtgattgagtt

SEQ ID NO: 149921 - DNA, 310 bp, Zea Mays
atctccgcttactaataccaactgaaatcatgagaattccacgacgtttctccacagaaattagtcaactactgaagtccacccgaccaactccacagaaattcagctacacagctagtgctagaggcaggaatccaaacctgggccagcagccactccagggttgggcgcgtccatcgtcgcggtcgtatcctccaagtcagacgcccgaaaattggctagcgacacaagcagcagcagcaacaacaggtgggcagtcctggcaatccgctggtgcacaagtgcagtactatccgtgctgcgggcgtat

SEQ ID NO: 149922 - DNA, 565 bp, Zea Mays
atgccttcaacatgaaaattcaatgacattattctacaagttaaacatgctaagatgggtatcttataatctcatgcaatttgatatccataacctcttgtgtttgtttgagtcatgttatggcatggcatcacatcgagaactgctcaggcaagaacacattgttttcagatcgtccgactaatcgcgattagtcgggctgatcgtttctttgtgctcgattagggtgttcgactcgattagtgttactgatcgtccatatcgtccgattaagcgacgatatggaacgattaatcgcctaggagccgatcagtcgcgattaatagaggtagtccaacagtctagactggccccaacagtccagtctgtgctcgggtagtccaacagtctgtttgactggactggcccatgattaatagaggtagccgcccccagctctacctgtcttttcaggttccctgacacggctgggagaaaatcagaaaacacccttctctctcacagctcccttccctctccctttttcacccttctctctccctacaaggctccaacacagcaacat

SEQ ID NO: 149923 - DNA, 620 bp, Zea Mays
gcctaaatggtgagttatgtgtgaactgtgttagagcacttccgagataaatagatttaacctatgctatgttgtcatgcaaataaccttgaaaggtggtatatgttaataattggaaggatagtcgttcaaattggtcagtccaattaagaatgattttgcgtgtgaggtgagatggtgacatgccaaagtagtcatcgcttccctatgtttataagttgagtcaatacccattaggcgttcattaaatttcacgtcgcacatagtgtatggttgtattcgtgacaaggaggtgtaggttttactcaattagaagtttggttgatgtggctaggaaatttgtttcggtttgggtaatgaagtggtgacgtgaccaagtagtccccccggttatgagtcgagtctagatgtgttatgccttcaccgtgatacccatcgcatatgctaattggatgtatataaaaaatgaaataggcgcatcatatgatttagtggtactgggattgtgatctaagtgcattatatatgtgtgatgagtgttgggcttgaggattgtcattcgggcgaagaaggtgtaatatacttatatgcgtagtatgattaagctagtaatacaaaat

SEQ ID NO: 149924 - DNA, 504 bp, Zea Mays
cttttcttttgcgctcttgtcgtcgtccgtagctgctccactttgcactcccggcgtcaactgctactatggccccttctttgacctcttcgcctggtgctttttaattgcactaattaccatgatgaggtaccatgcatgcgtatgcacatgcgtggtttgcacctttgggagttcctcactggtgatctaccatgtccttcttgttctactgctcctacatcgcatataatactagggaaggctactaatgaggagttgcttccatactatgaggtgttgccgataagtttccattagcgtccccacgatgtctctctcagggcagcaactatggtcatggcgtcagtgacggcaccaactttcggcggacaccactactactgtgagccatggtcgccatccgtgccatttggagctcaaatttcctcgttgtgatgagaagtctgatcgcttgccttggctcaacatctgtggctaatggcaacttctttcggggtcacc

SEQ ID NO: 149925 - DNA, 286 bp, Zea Mays
tattggaattgcagagattactctgtgggtgtgattctgccgcttctttctacaaatggtacactgctactttttggactcaatgagtattttcgagatattagctttattatttcataaaggaggaaacgtgagattagagatggtttggatgttaggtagtagaacaacgaattgtcattaggtgctttgtctgatagactagattttgcgatggtctagctaggttgcagataaaaaatgtcaaaactgttttgttgttaatctgcatagtcttcatatgctt

SEQ ID NO: 149926 - DNA, 1907 bp, Zea Mays
cttttggttcctgttcgttacttaagttcctctgatctatatctatcatttgagttgctctttgtagcccttcaacatgtcaggcaatgctattgttgtcaatgttgtgctaaatagtcagaactaccccgagtgggccttttgtgttcagactgcattgagagatcatggtttactattccatctagctgaagatccactagttctcgctgtgtatctcccatttgtgggggcaagtggtggcattttgattgcttggaggagacacattggtcacacaggacaacaaaaagttaacaaccacagcatttcagttcagttttgtaaggcagaggagcaggcctggtggctaacttgtgtgtatggcccacagggagagggagaaaaaatacagttcctccaggaacttagagatattagaaatgcatatgatggtccttggatggtggctggagatttcaatctcatctatagctctgctgataagaacaattccaatattaatagggcaatgatgggccgttttcgaaaagtaatcaatgaccttgctcttaaggagattccattacatgggcgcaagtatacgtggtccaatcaacaagtaaatcctgttttagttaaactgttctgctctgtgacttgggagcaatggttcccaaatgttctcctccagagcactgcatctcacgattctgaccattgtcctctccttttgggcctcacaggaaacaaacctgggaagaaacgctttcattttgaggctttttggccaaaactggaaggtttccttgaggttgtccatgcagcttgggattcggttcaaaatatcaggtgtccattccaaaccctggatataaagctaggggtaacagcaagaaatcttcaaagctggagtgacaaacaggtgggccatgtaagaacgcagctagctttggcaaaagaactacttcacaggcttgagatggcacaagatgaaagagccatctccccagctgaaaattggttcaagaaccgtcttaaaaaacactcattgctgctgtcatccttcaaacgcactatggcaaggctgagatcaaggatcacatggctgggagaaggtgatgctaatacaaagttttttcacatccatgctaggcaccgcaagaggagaaactttgttgccaagttgattgatggagaccatattctaactgagcatggtgaaaaagcagcagcagtggacctcttctacaaaaatctcattgggcaggatggacagagggatgcaacaattgacctggaagctcttggccttcctagacacaacctggcggtcttggactccccctttgcagaacaggaggtcctggaaaccatcagaggtttaccctctgataaggcccctgggccggatggcttcactggccttttttataaagtgtgttggaacattataaagggtgatgttatggcagctgtttggagcaggagattcatcaatttctggaagcttaacactgcctacattactatggtgccgaaaaaagaaggggctgagcaagttaaggacttcaggccaattagcctcgtccacagctttgcaaaactgattacaaaaatcctcgcgaaccgattggcaccaaggttgaatgaattggtttccccgaatcaaagtgcattcattaaggggaggttcatccaagacaacttcatgttagtgcaacagacatcaagactgtttcaccaacaaagaatgtcccggctgctcctcaaacttgatatcaccaaggcctttgactcaatctcctggacctttttaattgaagtcatgcagcagcttgggtttggacagatctggagagacatggtttgtggtctccttgcttcctccactacacaagttatgctaaatgggtttcctggagaac

SEQ ID NO: 149927 - DNA, 489 bp, Zea Mays
gaagtatttgtttaattggctgcatgagaattattctactctacagggttgcttggagctagatgcagctgtaaaatctggtctaccaccagccttcggaatgaggctcagtgctattcttgactctatctgagagtgggtggtctagctaattatcatcatatcataggttttatcatagaaatttaagattaacacagtggatgtcacgaatctgtgttcaaaaccattagctacttgcttcggtccgttatcttgagccttgaactgtgattggccaattgtttggtagtcatgaattctgaccataaaatgtaatatatagttggttagagctataagggttgtagttgtcatagacattgttatctgacacttttaagatttgcacagtatatggttacttcataaattagctatgaaacttaattatgcagaggctggctagaccaatgctactcatatattctacacatagcttaatattct

SEQ ID NO: 149928 - DNA, 546 bp, Zea Mays
gcaggttgtagaactctttggctgccaatagtaatatgggaacaaaaaccaacagcaagtttctgcaacaaagtaaacaatgtagttaataaaacaaacatgccagcataacagcaattttctaaaacaaaattaacaatgtagtttttgcaatattcgacaattatgttgtgaacactttcattggaaagcaataaactaggaacaagaaggcgccagcagccaccagtatctaattctgggccatagttatctgttaggggagctgctactgcaagttaggatctggagagtaagaatagggggattggtcagagtaagaatagggggactgggcagcagtttgttagtagacagccagcattaggcgatataactaagggccgcctgattgtgaggggcatgcagaagtagaggactgtcgatcatagccttttgaccctaactctaataatgttagtttgagtatcccaactttcaattcagtttagttttggcccctaaggccagttaaagtggttctggctgatgtggcagcggtttttg

SEQ ID NO: 149929 - DNA, 561 bp, Zea Mays
ggacttctttagcggctgaagttttatccacgacggtggtctccaagtgttatccacacggtccgcacgaatcgtagcacgagatcgaccaccggcggcgacacgaatcgcggcggcgagtcaccgacggtgatatgcacggcaccgcagatcttttgtcactgtaccatggtaaagatcatcagccgacctgacagcgtgatttgcagggttatttactcctaattttgtgtagtaatcgagcaagctttctgtaccaaagttatagggctacataccagctacaaatcaactatagtgactgagctcatttgataactagatcatggttgaattcaaccccaaagatggctttattacactgtaagtctgaatttcagaataaaccagcctgacagccaaactttgagcttaattatctctggatttttcttaacaagtgagctcacaaccttaagcaaagttgttcccctatgattgagctacaaacttgatgtggtagcctagggcaaaatctcctttgtttagaagttacaaggtcacaaagatgagcacaataca

SEQ ID NO: 149930 - DNA, 366 bp, Zea Mays
ataaagaatgggagaatcatgatggataaggaagacaccattagtaattaggttgctattgatctctattaggataattgtttggaatttaaacccattctacttttggttgtaagctcttgtatctaaaggagcgatgtcaattggaaaaggcaagcaaataattattcctaatttccttcccatctttgtgagctcttgctcctttatttaagaggaagcaatgcaaggatatggccttcccatcgagaacattcaccggccactctcacgatagacaagcaccccaagaacgaatttctcagcgttttctatataatgaatatgccatcctttgatctgcactgtatatagcaacatgtggac

SEQ ID NO: 149931 - DNA, 607 bp, Zea Mays
ttctaaaatatcattagtggtaaaaaatggagttgtagcctgtaaatagtgttccctttcctaaatttaaaactacatgagccacaatattgcatcaggagaccacattctaaaaggtaggcagtttaatatccgaccattccaagaatagaaagaaaaaataataatataagccactggaatgccagagcctatgtaattaatctaccagtgtacccttggagaaacaaaatagatcctcaaaaatggcttgaatttactgaacactcagcatacctctgttatcatagttgcaataccaatcccaatggttcatgtgaaatgtgtataggaaaacggtaaccaattcacatgatttgcttataacgtaagattctgcaacaactgacattaccattatgggagggtaaatgggaacacaaaatgccaaatactttaccagtgtcacatgggacacatgctagtgcgggtatttgtgtccggtacgggtgcaggtgtccagtttgacaaaaaaaaattggggggggggggggtacaccacttggaaaccgacaagttttctggctccgcaaaaaaaaggaacgcagatgtctgggtaacactggtt

SEQ ID NO: 149932 - DNA, 354 bp, Zea Mays
gaaggattcttctagatattggcgcccatcctttcgagcgatcaaaaacctcctttgccatccctttgattagctggcttccttcctccatcattcttctttccttccttttctgcaaaattgcccaggaatccaaccagtgacaagagaggaaaacaacatcagaagggtcaataatccgtttattgttgaaacatacatcatttctagtcttccagatccaccagagcacagatcctaatcctacaatcaaaaggttcctaattctcttatcagagcctaaaagccaattaccaaaagtatcttcatgtttctttgggactgtccttagattaagaacaatctgaacaatcc

SEQ ID NO: 149933 - DNA, 489 bp, Zea Mays
accggaattataagcgattaactgttagaacaaatgcagttctgaaaaatagcaaaaatattccaccaaattccgaacccttacgaattgcattagaaaaaagacccagaggaagcacacgcgaaaagcagcaaatgtttcgcaggaagaggtcaaatcgttgggagatgtcctgtatgtgggggagtatcttttaggaagatgtacagatagggagaagaagtatgaagggaatggttggagatggccttccaaagcccgcaaattccaacccaaactgtccaaaattcagaaccacatcaacccgttgcatcccaggctcgcgcattcagtcagcccccatctcccccaaaccctagccctgaaaggccgaaaccagtcaaaacggcgtcgcatcgccgactgggcacccacagaaaggcaagccgcaagcgccaactccgtgcccgcaacctcccaaccacaaccacaaaacccgcctaaaacccc

SEQ ID NO: 149934 - DNA, 659 bp, Zea Mays
gctgtaactggttccaaggggtgctacacggatgcaaagatgtgtgaagtcgtgacgaggccctgcgtcaggggagggatgcatagtgacgctgtcagggtgttcggtgaaatgaccggcgcctgggtcaagcccgacgaacacgtttatgccaccacaatcacatgtttgggcaggctacatgatgcagatcatgcacttcaggtactggaaaagatgagggaggcatgggtcgagctgtgggagttaacatgcaattctatggtgggtgtgcttgtgaaggtgggaaggatggatgagatattgcatctaaaggatcagatgatgctggctaaggagaagatggatgtggttctcgcgagaatgttgatgcacgtgtactatttgagtggagaagttgggaaaacattagaattgtttgatgtggttgccagtgatggtgtgacactgtccaatgtggcatatggggtgatgaacaaaggttgtgaagaagaggggatgacagatgagatatataagctatgcacatatgagttcaatttggtgatcagaggcctcttgagaaacaaacagtggaaagttgacattgacttacttgaacttatggttgatacttgggtaccacatttcttcacttacagttgtctaattcattggct

SEQ ID NO: 149935 - DNA, 431 bp, Zea Mays
aattaatccgctccgaaccatgtttcgagttgcaatgtctaaaatggtttgctaagttttatactgcgttagccaactcatgtaagtaggagtcgattgcgtaagtgattgtgatatatatgttgtgtcttggattgcgataataataggcaaaccgatgtgtatggtgcatagcggcctaggttgttgcttgggttaaccaacttgttagatgtctttagttaagctcgtggtcacgatgaattgcttgttgtagtcgcggataaaaagtattagtgctcatgtgatgtctaagttgaaatgcaaattattaggtgaaaagcgctttgatatacatatatgccggatttgatgattgtggtgaatgcgttgttaattgcgtatggtggttctagtgctcgaaatgacatgtataaaaatttagtaagtct

SEQ ID NO: 149936 - DNA, 308 bp, Zea Mays
ggcttgacgagtcatgtgactagtttgttggagatgctctaaacactaaaattaaccaactcggtaatttcaacgaagtgtatatatactgagtgtctgagttgcctggccgatgtataccactatggaactatacacgaacttagatctgaatctattctcgtcatcatgcagtgctttcactgtaacgcgcgctgccgttctttttgtcgtgtatccgtttcacgtgcaaacttccatttggtttctgcactgcacgtcacaagctctccatccgtgcagacctatataatgccgcgtgatccaac

SEQ ID NO: 149937 - DNA, 573 bp, Zea Mays
gtgagaccgaataccagaaggatctctaatctaatcagttacgccagatgcgagattctcgggcaaacttcgtaggagttcagcggatcaagccatgactcctgggcatataagaaaaccatacccttggccatagacgcatgcagacgcgagccgagaacccagccaccaccaacaggaaccgtagagaggagagagaagtacgccgccaacgctgttcttcgcttaccaaggtcgctcggcgtctgcggataattcgtggggtttgggcgcatcgtcaaggcgtgttgaagctgcggctaccagcgaatcagcgtggttggctactgaaccttggcgatttctcgccggtcgccatggagccgccgtgtcacatgggtggcatcgcggtcaccccgatacgtggtatgatgccttctctgaggtttgcgcttgtatgaatcacgttttgctcgattcctagtcatgattacctcaccaatgcggctctcaaagttttctggtggtcctccgccgcatgctggggcggcgccgctcggcctggctcaaggatggaggaagacgggtccctgg

SEQ ID NO: 149938 - DNA, 478 bp, Zea Mays
cgttctcccctcgcccgctaattgaggaggatgcatctgcattattgtgatggtcacgtctcctacttgccaaggcatatgctgatttaacagagaaatttcctttaggatctccatgccacgcaagtgtatcctccattccttcttggattgggatagctagaatacaatctgcatcttcttgtaggaaagtatcacggacaagacggcaatcccagctacctgtgatggggtcaattagctcagccatcttatgtaagagtgagccatttcttggagtaatgacccttctagtttcccctctaggaatccatgggtcaacccatatattcacctggttcccatttccaatcctccaaattaatccttcttttaataaatgtagtcctttcaggacactgcgccaagtgtaagatatgcctttttttgctcttgcttcaagaacatttgatgaggggaagtatttagctcttaggac

SEQ ID NO: 149939 - DNA, 1206 bp, Zea Mays
acccccttgagaatctcaatgccctccaaacttgataaaaggttgtccctcagatacacaaactagaaataaaatgctagtcagtagacattccaggttattgcacattggcaacttatgcaggttctggttctctacttcatggcttcatgcataggacttcctaggctttgcgactttgcaaggtaaaatcagcagccatgtgttgttcagttataaccaaagaccacaaagcagaaagaactaggaaacataagagaggaaaggagggtggataaagattacctcaagagcatgtgataacctcagctgcttgagactacgaactcgatgacctcttgaatccagcctctgcagtacagaaaaaaaggtgttgagcagataaaacccaccaaatcatgttgttacctggaatgttaaaagaaatgaaaacgaatcgcactaaccacttcatcgctagccttcaaatccacctgtggcagcatcatgaatctcgaatcacggctatctgcggttgagctcttccgccgattagacgcagcagatgatgcttgagtacccagtttccttgctgcattgcttgtgacggaacgtggcgatggcacagaagcattggaggacactctcctggtgctgccactgctgccattggagctctctgtctttgactggaccttcttcagtgttgaagttggggatgccttaacagcaggcttcctggccaaatcggcacctgtcctctcgaccaaggatgttttcttctccactgctggttttgagccagcagcgggagctgacaccagtttagtcttcctcgcgccatccgacagcgtaggactagacttcttagcagcagctgagctcccattgtcctgttgcttcccagcagtccccgtgctgcttcttctcgtcgccgaactggcgttcagcgacgaggtagacttcatcaaggaagaccggggcacacccacctccgccggagccgaaccatcagctcgctttttaatggacgaagcagtccccaaggcgaacctgcccgtgggcgccactggccgtggcttcgccggtttagcctccgccggcttcaaggcctctgatggagtttccattcccctccagcaacaatatgaacctcaagatattcgctcaaatccgtcctggtcaagcccggagtctctcggtcatagaagcatgggcgttggtgac

SEQ ID NO: 149940 - DNA, 1042 bp, Zea Mays
gtggactgacatcaacatcaagcccaagtttatgcctgatctactggccttttgtgacaacaccatatagcaaagatgtagttggtataatgctctccaagtttgctgcaatgcttgacttgtgttgtcacaatgaattaagagaaaatctcgctccaagttgggctgtcaggcgactgaatcaagttttagccatggtacagtgctctgttgaagatcagaccgccagcgtcaaaaatctcaccgccgatgacctcttcgccgggattcgtgccgcgggcgtgtggagttcgctcaccatgaaaagatctagtcacggatgtgtatgaactactgtggcctcgctgttccctgcccttcgcgccggcgacgtggccgtatggccgtcatcggagttgtcgtgcttcaccacggttgtgccacgctccgagcttttcaccacgtcgtcactagccgcaccagctcaccggtaaccgccgtagctcctcaaccggtgatcaccggaggaagcgccacggtgaaagccacccatcccttgctccagtgtccatattccctccgcacgccagcacgacccttgcgaaattggacaccaccgtcgatgggatctataaattgagcccccctcagtttcgccatgtattctaccagctattgcacccacctgcatcccaaaccccccaccagagaactcgaatttgggattttccccaaaacggttgaagaacaccatgaacccaacctcaccgtgggaagctctcctcaggtccgatcctgttgtctttagtcttgttctagcatcctcatgtgcccttgatgctcaccaaaccgtccaattaaactagaagcccaccaatcgctgggaacacgaactaatatccatggttttcgctgtcctcgtgggcagaacgaaataggtcaccaatcatgcaattgacttaggggaaatactccttaggggtagaatcaggtgtgaaccaaagattagcgtcggtcttcgccctctccggccggtatagctcaccggatttcggcttcccgt

SEQ ID NO: 149941 - DNA, 1636 bp, Zea Mays
taaggtccaaacccagctgataaccgcagcatgtgaattcagagccatagtgctaaacgagctagcaagagtctactgatcccagctgccgggccatggaatccagcttagtagactgggggcctatgctaggataggaatgctagagcctacaagggttcgaagctgaggatgctatgttgctcaaacaatccagacatcaccatcatggcctagcctagcgctattgttgctgctgtccatgaggagcagggctaggccacatggtgatgttgcccatccatgggttgtagaagattgcattgcccgaccatgccctttcttcttgccagatgctgaggtgagagtgggttgcctttaattttcggaggagcgtgccaaagtagaggaagaagttggggcaaatggcatgagggtgatcggtgaaggagtggcgatgaaggtcgtcggagcaacaacagggcagtggcaatcatgttgagctcctctagaacaagatcatctgggtcgaccttgaggaaggacgggaagggagagtagcgtcggatgatagccctgatgtgctcaaacttcttatttaggccttgaggacaaggatctagtcgttgacagagtgcccaggtcaaccaaggagtcagtcgtccccttcaacttgcaacagtagtcatcgacgggtaggtcaccctggacgaggtgcagaaggtagcgtcgaactagagggtgcgagtctcatgattctcgactgattctcaaaaacgagtcagaggtggcgtgtcatgccattgcagctccctagcaattcagcggagatggtgccgaagatccagcagatgacgatgttgtccattcgatcccagaatgaaccgttgtctgagggacaaataagatgtggtcgacaaggcgtacagcttgagcacaagcaacacttgatcacaccaacaggagtaattgtcagaggacgcgagaacgaccatcaccaacgatacgaagtcgggaccaacagctgcctagacatggttggcgacgatggcaacctcataagatgcagtagggtcgtcctgtggggaatgccctagggtgggggccgacggctgtggagtgctatagcccaaaccctaccaggcagcgacggccttctcctgttcgagaagggtggctgtctggagatgaggatgtgtgttggtagcctccttgttcgtagcttgagccatggtgagcatgtcgtcaatcttcttgcgaaaggccacaacctcctcgatgtggccacgctccacggcagtcgatgaggtacctgccatggtaaaggagatgtgtgcgttgttgcggcaacgcagcacaagggaggtggtggccctagattggcggcaaccagggaaggagcaaaagtgagattacactcgtgataccttgttagagaaggcattaccacttagaaattccttaaatctcatactagaggtggacattgacatctttagcatgacaggcatcatggttcttaaggcgtcgcctaggcgtccaggcgccaaaaaatctatggtgtcggttgtcgccttgccaaaaccacagcaaaatgggagagggaagggaagaagaaagagggtaaggcagatccggcgccggtggagcgtcggcg

SEQ ID NO: 149942 - DNA, 344 bp, Zea Mays
cccgatatccaaaagactcagagtccagcgaacgccagcctggctgtaggggatgaggctctacggctgggggaatgccttgccgccacagggatttctcaccggagtcacatactcacggcggggccgccattcgtcgtggggggaagtcttcgtagcttgattacaggtatggcacaccccgtagagttcgccttactctcctctctgttctgctccgtcagccttaggatttactcgcgtgggcgctgactcagccctctccggcgtggggtcgccgccatgacaggcgggcggtgccgctcgggctagcgcgaggaaggggataagtgctatggccgtcg

SEQ ID NO: 149943 - DNA, 544 bp, Zea Mays
gtcggttttagctggagctttcatttttttttggacaaaccaactactctccatcaaggccatgagccatgttccaacaagaagtgtacttgctcctgcggccttgcccaaaggcaattattgtcttagctattatctcatgggcctaaaggagagaataaagagattgattaaaggaggatttaagtgcgagatccatgaagtgatagcttactcgcaaagcccattgctccagggccggctctacgattttaggggcccctaggcgaactaaacagcacagatgggtcatttgtgatatatatatttttaaaaaacctaccccatgattaaaaggataatagtactaatgatatatgtatatataatttgtttaaaataatgcctacagtagaaactaaaagagccatgaaacaaaacaaacatgaacacctgatcattttgttttctctcttttttgtctaagcatccgacaaatgcttctgagcaacattataaaatcaaaattatacatgaaagtaaaaatagttagtgatcaccggaa

SEQ ID NO: 149944 - DNA, 409 bp, Zea Mays
acctcgatgggcttagggcctgtttggtacaacttataagctgcctatggccaaaataggttgaaaccaacagctaatcgaaatgcttttttgcagattattctggactggattattcccacccactctcatttgtactaaaaacagaagctggatcagagcagcttattttgacagtgcttttactctaattgtgcagcttatctaagaagcacttcccagataaacctatatttacaattaaatcttaagaggaagtagattatagagttttcaatcacagtccttttactctatgtgtgcagcttatataagaagcgcttcctagataaaacctatatttacaattggagtttaataagaagtacattatagagttttcaatcatagtgtttgccggtattatcac

SEQ ID NO: 149945 - DNA, 347 bp, Zea Mays
agggggatagtgtttctcgctaacctcatagtaacgggtactcatggaatagatgtcatcctagggatgaattggctagataagtatcaggcagttatcagttgtgacaagaggacaatcaagttgatgtccccactaggagaggaagtggtgaccgagttagtcccgcctgagccaaagaaaggaagttgttatcagatggctgttgatagcaatgaagcagatccactagagatcatcaaggttgtgtccgagttcccagatgtgttcccaaaggacctaccaggtatgccacctgagcgaaaagttgagtttgctatagagcttcttcctagaaccgctcccat

SEQ ID NO: 149946 - DNA, 500 bp, Zea Mays
gacctagctagtatatcataacataacaccaattaaatattgaatgcaaaaacacaaaaaagctgttttgtatgtgatgcaataatggagtaatggtatatagttcataaaaaatatctaagaaaataagtagactctccactaaagaaggtatatatagctgtgttttggactggaaccagcagagaggactccactaattggcaacgatcttttctctgtaagatgatatcatataagattatatcagtgcttaatggtagttctttttctgagaataactaatggtttgatattatttgtttctaataacctcatactgttcaatcctcttacttggccatatttactgtacaaaattaaagtgccacagtcaatgcctccataacatgcatggtcctgtaccggagtatttttcatattgtagctagattctacattaaataatatgcacacttcatttgacccgagaatttggtaccatatagtctataaatgat

SEQ ID NO: 149947 - DNA, 403 bp, Zea Mays
caagacctgaccagccgcgagtcgccgtttcctgcggtagggaaaatatacgcttttgttcttgccactaaatttcagcatgacctattagtttctgcaatgttactgtgaaacaacgacaataagatatttttgtgcttgtggttctcgagcaactgtaatttagactttggctgtgtgattggagcaagctcatctgtcttgtagctgtacctgagttgttggggcaatgttaatgtgtatgattttttcatggcttcttaaactgtatgaccctagaaatctaaacttttggggctattcaggtgcatgtacatctactaacagtcatttaaaaactataatattttagtcagattagattacatatgctctactaattctagctgcattaattgtttac

SEQ ID NO: 149948 - DNA, 814 bp, Zea Mays
aagctgaggacatggactgacatgtggagggctggccacggtgaggttagcttcacggtgtatttgaaccgagttggggagaatgcaaaatttgagctcgctggtgatcgactgggagcaatactgggtgtggtggtgcgtgatgatgttgcgaagctagccgcatgctcaatttatagcgctcgcaagcggtggccggtgaatcgagcgataacgcgcggcggccgggaaagaaaaaggcactggcgcaagcgctaggtggcttctactgtggcggtctctccggcggtcacgggacgcccctagcgtgactatccgcgacgtggtaaagtgcccggacacgcggggcaagaccgagcgacggcggttcaccggcgaagttatccgcagtggccgtggcaacttggtacggtggtcgaacttgtttatggccggagttatcaacgacggtgatatttgtgtgaccctgagcgctatccaaaccatctgaacaccaatcgcggcgacgacggcacgaatcacggcggagggtcgtcggtggtgaggattccctgcgctggcgatctgatccatatggggtactgtaccatggcgatctccattcagtcgacctgacagagcctagtttagggccgattttctcacaagtctatacggtaacatactccatgctctacaacaaagttggagaactataaatcatctacaagtttgtcatagtagccatgggcagattcttgctggatcatagttgaatccatgctcaaagtctcagtgattgcactgtttgtctgaaaattcagacccagtaacc

SEQ ID NO: 149949 - DNA, 563 bp, Zea Mays
aggagttttggtcgtcgccgccgtggaaaagccaaccacaacgtcgtctggtgaccggagttaggccagtgaggcgtgtgtagctctgcggaactatccatggcatcaattgcgtgcgagaggcagcgaggcaaagttaatcgctcaacggagttcggaaacgccgtgataatctccctacgcgtgggctatacctctgcgcacaccaaatcctagtgagtacccgaccttctgatccatcatgttccccgcgttgctaaatcggctaagtagcgtagaatcgcgcagttaagcaccgatttggtgaggcgccggcaaactccgcggcggcgccgccatcgcgaggtaggagggagagggtgtgtcgctcagccattagatggccaacgggtggctatgattagaacgtggatgtagcgattcatggggttgatcgggtacgtctgttttggatcgaatgcttgtgcttcgatcgggattcataaaacacttgccactaatctttgatctagcggttgcaagcgcttaccggttgtcacgagttggacccaatccgcgccatc

SEQ ID NO: 149950 - DNA, 784 bp, Zea Mays
caaatgccgagccaatctgttggccatcatttttgttactaacttcgcgaagctatggacaaggctgattggacgaaaatctttcacttgggctgcaccctcaaccttaggcaaaagagtgataaacgctgaattgagcagccccatgtttctaaattttcgagcccaaacacaagagatcgctggcattacatcagctttgattgttaccgaacaagccttgtagaaacgaccggtgaaaccatccgggcccggagctttatccgacggcatagattttacagtgccccaaacttcttcctctgagaaaggcacatccaactcatttagattgaaagaaggcatcccacaaatcatggcgtccacacagactgacgctgagctggttcccaatcctgcctatgagcaatggtacaataccgatcaacatctcttgagcgggctcctctcatcaatgattgaagagatgcttcacgacgtcctggatgccaagacgtcaaaggaagtctgggattccatccggatgaaattttcctcctcgacccgtgctcacacagtgcagctacgtgtcgagcttgccaacgtcaagaaaggtgatctgtcggcggcagataactttcgcaaagtcaagaaccttgcctcggaggttgctgccgcggatgccgctcttcgcgatgaggatgtgctggcatatcttctaaccgggcttccctcgaactacgactccttcgttacatctataacgaccaaggactccgtctccctcgacgacgtctacacccac

SEQ ID NO: 149951 - DNA, 337 bp, Zea Mays
tgaaggtggggggaatgttagcagcaaccagaggaggcacgctgtggacgccaaaaagagaagtgttgaggagaagaagcatggcgggaggccggaaatgctgaagcgccaaaggaagccaaactccagagtaattgggccacagtgggtcaagtgatccggccttgtaatcgaatggtagcccaagtaagaacgagaggaagcagtcgacgtatataaacacctggatacggtgcctggaaaacctaagaagaaattaaacaaacaccttacctgccgtatctctctgttcttcctcttccgtttgcccctctctgcttcttccccacgccagctg

SEQ ID NO: 149952 - DNA, 522 bp, Zea Mays
aattcaacagttgaatgctaagtctagaggactgggacacctaaaggtgattagtgctgggaaaggatatgctgaagtatttgatcacctcccaaagcaagaaaggcatattgtacatctgtctgcatgggagtgctcttgtcttgagtggcagcatacaggtagaccatgtcagcatgcacttgttgtcattaccagctttagaaatgagaaaattgagaattatgtgcattcttattactctgtggacatgtttagaaaggcttattcaaacattatttaccctctaagagataagtcacaatggcctcaggttgagttggaccatgaggttagggcacctttgggaaagaggggagttggtagacaaagaaaattgaggatcaaaagttgccttgagggtgggaggaaatcaaaatcaactagtaaagaaggggatcaacctgcaaaaacagtaaaaagagggcctacaaaatgcaagagatgtggtgaacttggacataggcaaactagctacaagtg

SEQ ID NO: 149953 - DNA, 309 bp, Zea Mays
cgcccgaagaagccgccgccgcagcggacgctcacgctcacgctcttgtggtctctgtacatgctctggcaggcatcaggacgtaccaaactatgctcctgcccgtgacgatcaagggcgagcgcctcctcgccctcctggacaccggctccacccacacgttcttccagggcgcggccatgcggcgccttggactcgctcctcaggggggcgactagcttcgcgttacggtggccaacggcgagcgcgtgccatgtgaaggccttgcacgcaacgtgcccatcgacatcttcggggcgcccttctcca

SEQ ID NO: 149954 - DNA, 558 bp, Zea Mays
aggatccgcggaagcccgggggaattcgatgagcggcgacagctgtgacccggcttgcaaccaagaaccatccgacctggccaattaaaaaaattgcggaagacaacaacgaaaccagccgcagcgcagaattgctgagacgaggcgaagcgggttggccgaggtcgaggccgggaatggtggcgggtggcggcgtggcaaaagctactgctctgctctgctcgctgcccgctcccagagtctgatccaaacgcctcgctggtgtcatgctgatgcgccctcccctcagttaactattctactcttctgctctgtcagcagaccacgagacgcgcgcgcgaaactcttctctctcctttgcgcacctctttcgtcgtcgtcgtcgtcgatcttcctccggtcagttttcaccgcttttactttacagtccactcgtacccgcgccagccatttctctgtttgactgccgccttccttgcgcccccacccgtttctcttttgtttcgcacccctccatccttcactcctcgctggtccagccattaatgccaccacctg

SEQ ID NO: 149955 - DNA, 391 bp, Zea Mays
aaaagtcacgcaacgaagttcactttattactttaggaaagcagcaccgaggcacgatacatcgcgatcaacgtgcgtcacgcacgatgtaatgagctgacaccctaatcacaacatgactggccacctcgttgtgaccttccagcgggtcttctcgcccttcatccaaaagcaaatctccctcatcagcagcgccaccacagctcccatgtgaacgccgaaatcgatgatatcctagatgcggcacgaagcagcttgatctcgacctcggtggccgcttgcgctgcgcgggaaacatcgcaactccccgaagacgcctgaaggaaagggagaggagacaaagagctcgatcgaagcagcctaacaggtggcaatgtgatcgcctcatcgg

SEQ ID NO: 149956 - DNA, 726 bp, Zea Mays
gtcgtgataaactaatgttactaacatgtagtcatcattattatagagttaatgtggcgaaacaggtttacgacgcaaattatatttatagaaacattgcgtagaacatgtaatttaaataatcatgttttaaaagacacgacatacgtgaattactggattgtcatcgtgtttacactaagcgagtattaaataaaaagcatttacatgggcattattcatggtaacatttatttatagaagttcaaattataactacaaacgatttttatttagattgttatttcaataatcattgaataaacaaataaacaaacaaatgaataaatgaataaaacatgcgtcatgagaaaatattattttttaacatgttcatggtattactacgaagcaaatgcgacataaatgaaataaatcgaacatctaacacaaaggttaatacatatttaataaatcatggactaagcgatgtgctgctatttcgttggccaggaatttgccacatgcaaggtcacaagggcaggccaaagaagataccaggatatgttgtggaggggaggggttacttttcctgcgcgattcacgtacctggttaggagcatttggtggggccctggcagtttctctccaaagcagagcatgggatcgggaaacgacatgcgacatgcaacatgcatgtggcgcacgacttcccttttttactggaaagaaccaagcggttccgtc

SEQ ID NO: 149957 - DNA, 398 bp, Zea Mays
tgattcttggagctgctcccaaaagcgtgccacaaacagtgctcccctgtcagacacaatggtcttcggaattccatgcaaacgcactatttgatcaatatagatttctgcatacttctctgtcttgtgggtggtatgcactggcaagaaatgcgctgttttggtcaacctatccacaatgacctagatggaatcatggtgtcgggcggtattgggcaatcccacgataaaatccatgcaaatatcctcccatttccaagatggtatgggaaggggctgtaaagtgcctgctaccttcaaatgactggccttgactctctggcaggtgtcacattcagatatatacttagcaatttccctcttcattatggtccaccagtacaaagatctgaggtcat

SEQ ID NO: 149958 - DNA, 322 bp, Zea Mays
acgctctccggcagacttcaccacagcagcaaagtttctatatcagcttatgagacggacacttctgccgtggatggggtacagggaggctaccacacatatccagctctggctccttggtgccctggtctctcactcagagtttgacgttgtggatttccttatttgtgagatcgaggacaccgtattggatggtctgcgtgcacgtcgacagctgccatatgctcactatctatgtcacatttttgctcagctgattcggcctccacagttccagggcacacttgaggcctcacgcctcgtctttgggtcctaccgtcca

SEQ ID NO: 149959 - DNA, 874 bp, Zea Mays
gtcagttcttgggccacagatttattcttccttctgaccagcttgaagaggtgaggtgccaggttgcgtggagcctccccatccagccagctatggtgctagaactttgctttgatgccgttaccaatcaccacagtggtggacgcctgaaacagcagacgatctagcttgttgcaagggacctggagcccctcccaaggttttgagctgtctgtccattcttgccaaagccaacggagccggagggcacgactgaatttctcaagatcgagtacccctagaccccctaggtcctttggtctagccaccgtttgccaattaacaaggcagtgcaccccatgcacgttatcctcgcctttccataggaaagaacgtcgaatcttatcaatttgctttctagcccatttcgcaagagggaatacggttagatggtagatcggcatggaggagagcactgaagatactagggtgaggcgtcctgcacggttaagcagtcgacctttccatccagcaagtcgctgtccgatcttctccactagtggttggacatgaattttttggagcgggcgggtgtggagttgaaggccaaggtatgacaagggaaggttttgcaacatcctgggaacggctggaggatgttggacaaatccacattttcacaacggatggggtggatggagcttttctcaaaatttgttgttagacccatggcagctccgaacgcattgaggatttatttgaccgcttgcaggtcattacgtgttggattgatgaagatagccgcatcgtcagcatagagcgaggttctgagcttagctgtagcaagagggagaggtgtcaggacgccatgctttgaagcaaggtctaaaatcct

SEQ ID NO: 149960 - DNA, 555 bp, Zea Mays
cgcttactggctagtcagggccgggcagcgcgctagttgacgtctagagagagaaagagtgccgggaggtcgcgccgccgtagcgtgtgagcgtgaggttaaagaagtgcgggtgtccgtggattagggaatcgacggtcgcgattgggcatgagcgtaccatttcacggagtaatccaagccgctgatcccataacgaccgtattggattagatcctggcagatttgatgttgagcgtcggatcagttttgggcggcgaggattagttgggggatattacttcgcccggacgcgatctggagcattgatccaccatcggacggctgtgaaaaccctgatcgtggatctcaatatcaacggtcagtaatgtttaccgattcatttaatagttaatctaatctgagccctaggtcttagatccagcgacccacaatcagtcatacctcttcgccatgtacatttcttaaagagaccctcagttcttagggaattaacccgtagtcctggcgccagtcattctgggtctttggaagttttacaccagagacccctgc

SEQ ID NO: 149961 - DNA, 485 bp, Zea Mays
ccggaacagagcggagctagggataaagaacatcaaaagcagtgcggagactggacaccggaggcatgaggcatctttctcatatcacaggtcacaacagtccatttcagtctcagcgctgtcgctcaactgctcaaggaggcacggggctggaaagggcaagaggaggagaagctgaaccatggcgagagtagaagcggtggtcatctgcctcctggtcctcgccatggacgtcgccgccggcgtgctcggtgtctacgcggagaaggctcagaaccaggcaagtttccgtgtagtcgggaagctcttttcttttcattgtagggtatccgggaaccagggggcaggggcttcgtccgtattcaggaatcaggctggctggccgtggccgccgctcacccggtgcggctggcgattgcagggcaggcacctgcggatcctgttcgtggagtgccggcagccggtccggcgggcctacgagctcg

SEQ ID NO: 149962 - DNA, 457 bp, Zea Mays
ctccgagctaacggctctcgcaattctccgcagctcctattggtccatgaaaccaacaggaacctacggacgcctttccacgaacagattaaacgcgcgcgagaagcagcgccgccatggcaccaataagtagtcgcgaaacacgcagcaaacggcctaaaaggtttcctctttctcctctggaactgacctgatcggtttcccacgacgacggcgactccagcagccgcaaatccggtaggtttcggaatcgagggtcggagactctggggttctggaaggaggagctggtgaggaacgaaacgggaatgaatgaatgcgaatggaaagaaactgactggggatccgcgaagcgagggagagcaaatgcaaggtgttttccgttaaattgcggtccgtggcgggctttgcctgaatgtccgggtggcgggtagtagttgttgaaaacttccgccgc

SEQ ID NO: 149963 - DNA, 537 bp, Zea Mays
gttgtcacttccactggcaccactcaccttccacataatctatcccttaataatgtccttgtctcaccgttcctcattaaggatttgatttctgttcaccaccgataacaattgttctgttgaatttgacccgcttggttgctctgtgaaggttcttcctactcggcgcgagatcctcgaatgtgatagctctgggcccctatacccccttcggctcccggctaccacccttcatgcatcaacaacacctactacgtccctgtggcaccaacgtctttggcaccctggtcacgctgtcttatcacatctagcccagtcgtcagtcatttcctgtaataagagtgtcaccgctcctttatgtcatgcttgtcaattaggacatcatgttcgtcttccttttcatacatctacctgcaaggctactaaaaattttcagttaatacgttgtgatttgtagacccccctttgactagtgtctatggtcataaatactatcttgccattttagatgattactcccatttctgtggacattcc

SEQ ID NO: 149964 - DNA, 591 bp, Zea Mays
gacaaccagtactaccggaacgtcatcagccacaaggtgctcttcgcgtcggatgccgcactcctcaagtcaagcgacacgcttgggctggtctatgtagccgccttctctcagaagctgtggcaggacaagtttggagaagccatggtgaagatgggtggcgtccaggtgaagacggccgccaatggggagatcagacggatgtgtggctacgtcaacaaaccctaatccggttaacgaccgaccgacgatggtggtcagtttgagcttgcattgagcatatcctcccgggtgtctcttcaaacctaagctagatccacactcctgtttcttgctctattcgagttcttttatatcggttttcaacccctttatttctgttactcgatttttttgttctaattttggctgtatcaccgtattcattccagcaaaatgtattcattccagcaaaatgtattcatcagacgatattgaaatatggttttcgtcagctagcactttccagtccagaatgcatatttgtctaattgtcttgtgttctgcacttgtgcgaccctacgtctcttgtgaactatgcgcaagctagat

SEQ ID NO: 149965 - DNA, 785 bp, Zea Mays
taaaggctggcatcctcattggtgcattccagggataaaggctggcatgtttgttagagatgctaaagctcggtgccctcacctaatgatcgttccttataactttgatgcatatgaggaggtatatattttttaagaattctagatagtccatttgatggctaactcaacttttacttttgttgagtaattgagtttgagaatctgagtgactgaaattcttgtaggttgctgatcagttctatggtactttgcacaaacattgcagtaaggttcaggtaagattatccatgctggagacatcatatcttcattggtgatacatccccatagtttgattattagagatctacatctacagtactgacaatgttatcaacaattcaggctttgagttgtgatgaagcttttttggatatgactgaatgcttacatgacaatcctgaggaagtaacacagagaataagaagtgagatttttcatgcaacaaagtgtactgctagtgcaggaattgctgaaaacatgctcctagctcgattggctactagatctgcaaagccgaatggacaatgctttattccatccgaaaaggtatatgtatgctgttgctaatggacatgctcctaactgtgtgtgtgcccactgcaatttcaatacatttatacaaacagctccatgttctaggtgattttgaatgaggaccgcaatatttatttcatgtaggattttcataggattctttttgaggaaaatattcagctcaaaccatgtcaccttgaaggcac

SEQ ID NO: 149966 - DNA, 765 bp, Zea Mays
tcgggatgcagtgctgcagtaccatagtgaagcttcttttatacaactctccctctatgatcatgaacaacttgacgtgtcatgtgagtcgcttggccttggttttgtccaccgaaagtgtgtcacattcgaggtaatccaggtacgttatcctccaatcatctaggaggtcatgcatattggtcgggtcgttgttaacttctagaacttttgtattacgtgtgctcgagggtcaggcaactttagggcctccttcgattttagtgtcgggagaggtcgagcgtctaggagtcgggtcatcatttatcaatcaatggtttcattaggtcgctggcaaagatcccgatcaggataggatccctacatgacgccatcttctctaaagcatctattgcctcactgaagtgcattgggatatggtttaattcaagaccgtcaaatttatcctcgatcttgcacacttctttgcaatatgtctccatttttagtaaaggcaattgagttcctttatgacctgaaccactacaagttgagaatcacctcgaatatctagccgctaaatctcgagctcactggcgatttgtagtctgttaacaagcgcatacctcatacataccccgagcggggagacaaaaactagattgaccctaatgccctgcttcatcaccgacccatcaaagaacatcatccaatactcctgcttcattagcagttgtgtgatgttgcaacatcaagccatgatcaaaaaaagcgtgctgacagaga

SEQ ID NO: 149967 - DNA, 602 bp, Zea Mays
cactggacaagtctagaaacaaaatatgcatacacagcagcaacaagtccagctgccttcactattaacatgcgcctctcatcatcatcatccatctctagacgcaaaggaacagagccaagtatcacataaaagctcaccagcagtaacatgatgcagtactagatcataggcatggcaacaaaataagctcagatctagggaccaaatcataggcatggcaacaataagctcagactaaatgctataaaatcacaggcatggcaacttaagctcagatcattcaagaaatgaagggggaaaggggaggggaaggaatggcgtctgttataccgaacaacaacaggaagaaggacgaagcgccgagaggaagcagctacaaggcgtgaggaagcagcaatccggatgccctgtcaagaaattaaaaggggattagaaaccctaggtcgcgaaatagaacaaaaaacgaagctccaaacctacaaagcacgaatccaccacagatctgaaaagagaagaagaaatagggggaggatgggaggaactcggcaccagtcaccggcggcgacagtagagcagggcgcgcagaggaaggggaagga

SEQ ID NO: 149968 - DNA, 457 bp, Zea Mays
actgatctcagggggtttcttggtctaacgggttactatcatcgatttgtgcagaattatggggtgatagcccgtccattgacgaatttgcttcagaagggagcttttcacttgtcagaggaggctgaaatggcgtttgaacacttgaaacaggccatggtcactaccccagtgctagcactaccaaattttcacttgccttttgttgttgagaccgacgcttgtgaaaaaggagtcggagcagtattaatgcagcaaggtcggcctattgcatatctgagcaagtcgttggggatcaagactcaaaagctatccatctatgaaaaagagtttcttgccttaattatggcagttgatcgttggagacattatcttcaaatgggagaatttgagattcggacagaccataaggctctcagcttcctggggactcaggaccttcagtccaacttacaac

SEQ ID NO: 149969 - DNA, 401 bp, Zea Mays
gaggaagtgagcgccaatgtgtgagtgtagatcgatagggaagggacagagcacgccaagcccctcgcgagagggtaggacccactagctccactcactaggcccaaatatgggaagtgaggagctaaaagctcgacacagagggcagcggtgttgggtaaggagaacgtgggggcgccgccggctcattgagcaagggcggtgggatgaggctactgttgagggccatgtgctggagggaggtggtcgcgctagacattgtggcgttgctggctagagtgggcgcatctgcatcgagaggaggaggggcagcgacaggcagtggccaagctggcgcgaccatggagaatctgaggggctgtgggcgacgcgactgcgccagcagaagcaagcgggtccgc

SEQ ID NO: 149970 - DNA, 680 bp, Zea Mays
cattacaccaccattctactgcaggtaccatagaatcactcaccgactccttaccattagccacctttaccttgacagcaggacaactgatagatggtaaccccacttgctgcacaaaagcagaattaatgaaagtagtagaactgcatgtgtccaccaataacaaaaatgcttgatccttcaccaatgcttgcaaacgaatattctgcatacttttagtaccagaaatagctagcatcgacggtttacaagactcatcccctagttgatcttcctgatccaactgctgtaaaacttcctcactgagctccaaggacaaatcctcaacagaaagtgtattcaactgcataggaccttttattttacacttagcagcatgacctgcatcatacttctccccacaaacaaaacatagaccatgaatccttctataatccttgagtttcctttttttggagagatcaacacccccatttatctgcttatggtcaggtctatactgcccaccttgtctgatgacagcccccctcgtagaagtcgacctctacctttctccaaaacttcagagtgcaactttgccaatagcacaacacgattcaccgtagttggtacttgacacaacactgagccccgaatatcaggtttgaggcccttcacaaattgttgcccaaagaaaattt

SEQ ID NO: 149971 - DNA, 452 bp, Zea Mays
tatcgttctaccgaaggtgtttttgtttagaggacctttggcggagaagacccccaacaggaggcttctatgtgtggttatgcgtttgatggtttaggattctattacatcccgcatgggcctacccagaagaaaaaaaatctgattctaaattggccataatcagtgtgactggtggctcactctctgtgcctcaagtgatttctgagcttgagagattagtgtctagctcatggaagtgggaggtggaacatactaagaaggatatgttcaaggttcaatttccttctagggtagaaatagatcacatgatagagtgaggagttgttttgattaaatttaaagcttacatgataatagaggaaacagtactgccaatggaagttaaatctgctttgcctaaagttttggattcaattttctggtatcccaaaggagctaagggagtttta

SEQ ID NO: 149972 - DNA, 366 bp, Zea Mays
ggagaaagttgtcctgatccgcagaagattacttgaagctcagagtcagcagaagagttatgcggacaacaggcggagagaactcagatttgaggaaggagactttgtctacctcaaggtctccccgatgcgtggtgtcagaaggttccaagtaaaaggaaagctagcaccgcgattcgtcggtccctatcccatcattggcagagtgggacccacagcataccgtcttgaactaccagaatccatgtctgacatccacaatgtgtttcacgtatcccagctccgcaaatgcctgcaagcaccagaaagtcacatcgaagaagaggtagtgcagattcagaaagatcttcagtaccgtgagaagcc

SEQ ID NO: 149973 - DNA, 624 bp, Zea Mays
gcaaacaccacatctttgatctcttccaaagaaaaagggctggtgagaagatttctatcaccctcctcaagctgtttcatgtccaaattaaccaaggaaatattcgatccacgggaaggaccaaagagatctttgtaaaaggaagtcgccaactgattgatgccatgatcgtcatgagccacaatatcaccgtgagaaagagtcaagattttcagtttcctttttttgtgcctgaccatcaaatgaaaatacttggaattctcatcaccctctaataagaatttatctctagctttttgtctaaggctaatgttttcctcattaacaatcttcctgagattagattccaaatctaatttcaaatatctgtctgcatcagataagccagaagtctcactggctttatccagaatatcaattttttcaatcaagtttttcttcaactttttgtaatgacctacaatattgctgttccaacctttaagcttctgacgcagacgtttcaattttaatttccaaacatcaagactattggacacaccaaccggaagagtccaaacattttccactaatttgtgaaaatcaggcctaaccttccaacacagctcataacgaaaatcctta

SEQ ID NO: 149974 - DNA, 314 bp, Zea Mays
tacatttgcagattgagtcttcagtgtttgggtaagcctttcatattctggtcgttaaatgcattgttactttcaattgtataattcacaaccagtttcatgttttttagttgatgttagatttgtatgattcacaatcagtttcataattttgaggcaatgttagagtcggttttctatgcgtgcggggggcgcaaccaagtacaacaataaattgtaactgacattgttgaacacattacacatggctggtgcctggtgctgaaccgttgatgcacggttgttagcggtggcagacaaaaggaatttagaag

SEQ ID NO: 149975 - DNA, 392 bp, Zea Mays
tggagaaccgagctccgacgaactcataccggccatgatacttaatgaccggtgctctagacctaattcaacacttaacaagcgtttcccctcaatcaatttcactagcggagctctaaatcgtccggtccatggagacagcgcagacaatggatgaacagaagtgttcccggtgatctagggcagtctagctcaattgaatgggtcgaggagcatcaggagaaccaaaggacactgaaacgggagagcagagagcacgaacagacctggaacaagctagccacgacgagggttctttcacggtggcggaaacagatttggggagaaagaaaaattagagagctatggtggctaatcggaggcaggagcgggtgctctggctttgtgattac

SEQ ID NO: 149976 - DNA, 305 bp, Zea Mays
tacaatatgcactatgctggcaacaagaatggaagagaaggaggttgcagtgatgcttttgcattgtagattagggcatctttcttttgataagatatgtaaagcttttcctgatgtaatgtgtggggtgaataaaagcaagctattgtgtgatgcctgtgagtttgcaaaacacacaaggacatcttatattagtcgaggtatcaggagtatatctccttttatgctagttcattctgatgtttggacatgtcctgtgacttctattaatgggatgaagtactttgttacttttatcgattgtt

SEQ ID NO: 149977 - DNA, 294 bp, Zea Mays
cattggaccataagtgatagacctcctagcatgcagtcagtgcctcaatcaggttgacataactgctacaaggaccaccgcctttgcaattagcagacgacgtgcaatagaaggatccattgcgagagtaatgaattagaagaaggatggagtggcgcatcaaggcttgaattcctcgatcatccttggggcatggtctttgacaaaaaggcctaaaattgatgatgctcttagataggctaatcaggaaagggagttgtgggaagtagctagagcaaaaaaaagttgtccctg

SEQ ID NO: 149978 - DNA, 396 bp, Zea Mays
ctaaaatctgaaaacatatagagtgattggatagctctaaataaaatgaaatcaagactaagccgatacaggaacactgttcaaacaaaaaccaaaaaacttcacaggacagtccagtatgatctgtccagtttcacaattgatgcagacagcccaagtcatatacagatcaaacaaaaatcaaacactgcagtgctaacaggaccatatacagaaaataccaaattgtacaaccagtacctcaacagatatgaggtcaactacagccaatggacagattttatgtcatctacttgctaacagacatgaagtaatgaattatcaattcaaagcaaagcaagatatggcaaagcagataacacttaccaggttatttatctgtgttgaagatgtcgt

SEQ ID NO: 149979 - DNA, 542 bp, Zea Mays
aaggggtagggggcgatcacagccgttggatcagaattcagccgacctgattagactggcagcgcgcataaaccagcacagggccctagccgtccgatcttagatctacggtgcagatttgctgactccgaaatgtttcctacttctaatctgagccatcgatcattcgatcaacgggccacgatcaactccccaaacccaggctgtcccgacggcgacgtcacacaggggcgcggtggcgccatcgccggccatccggaaccctcggttctagcgccctaaacacgattctgttggctgctacactttagtaagggacgagcgaacatggtgtggtggttgctcaccggaatcgagaaccgaacgaagccacccgcgacgcacggcggagatgcagcaacgacgagaaatccagggcgcttgggcggtcgaccgagcgtaatacttcacaccaacaatccccaggcatcgatgaacgaacgcgacacctcactggccaccaatcggtgatacagggctgggtcaacggtggcggatctctc

SEQ ID NO: 149980 - DNA, 391 bp, Zea Mays
ctttattatgtgtacacagtttgggacactgaaccctgacaatcccttgttcagtgttcccactctttacatttgggctgcttctgttttcaacctttgcatcttacgttcttactaccataattctttgaattactgttttagtactttctgtttgctgccactgttattatagttaagccaatgtctttatagcctatttatgttatcatcagcagaaaaccatacttaattttcataggaagctccttatttttgtcatggagtatgcatcctgtttgttgctgagatgttatttacctcctacttcactgtttcagtagataatgtaatcaaacatttcgtttatcatttctaactttgcaaaattatccctagaacttgtgtgctg

SEQ ID NO: 149981 - DNA, 463 bp, Zea Mays
ccaggaaacagcgcggaccggtgcggccattacgacaaaaatattcttgctagtaaataaatttctaaattacccacgtatacactgtaaccacgtaggaacaagctaaggtagaccaaaaatgaacacgcgccattggactgaggttctcaagtactcaagaatctttattagagagcatttttagttttgtacccacgcgtctacgtacgctggcacacccaccagtccaccacaacaacatatccggtaatcctataccatatgatcctggtcaaaaatgtcgccacaagtcgttagcttgccctgcatactgttgcccatgacccgttgtagccagagtagggtaggttaggccgttagatatggataatggacaactggatatactgctccccttcgggtttttttttcgcacttggaactttggaaagtgtacctccaatccaattttggatgtcta

SEQ ID NO: 149982 - DNA, 451 bp, Zea Mays
gccagaggcaaggacttgccctccgacgtgttctaccacgtcataggcacgccagccgtccgcagtccagagagcctacaaataaccaacgacactgagggccatcgcatagtcaacctcatcatgaccgaagattggcgggcaccaatcaccctgttcttgcagggatattaccatccaagtgatatcaacgaggccaaccgcctcaagcaccaaagctgggacttcacactcattgatggccagctttacaagaagggggttagtcaacccatgcttaaatgcgtcaccgaaaccgaaggcatccagatcctgcgcgaagtccacagtggaacttgtggctctcactcagggcccagagccctcgctgccaaggtgatccgtcaagggttctactagcccgctataatctgcgccgcaaatcgagtcacgaggtcgtgcgaagcctgcc

SEQ ID NO: 149983 - DNA, 730 bp, Zea Mays
gatacaactgttgctttgtctggaatttattatcctacttcagcattaatgcttcatcatatacttaaaattgctagacatctaaatgcttttgaaaatgatgctttgcttagagatgctattgttcctatgaaaacaaaatatttgaaatattggaggaagatacctgttctatattgctttgcttttgtattggatcctagagcaaaaatgagggggtttaataagcttcttatgaggttctctgggcttaatggaactgattattcaaggtatcctacatccattcggtctaaactaactaagatttttcagatatatgaattgaaatttggtgaagtacgcttgagtgcacaacaacataagagtgctggtacggcaggtaaggcttcagaggcatgggatgacatatatggggatgatatcctcatgccatcccaatctactatacctactcctactcctacatctgtatcatctactgctgctgctatatctgagttatcatcatatcttgatagtgatactgtgacccaatttgactctgattttaatcttctaaactggtggcaacggcacaagttgacatatcctgttctttctatacttgctaaagatgttctaactgtgcctgcttccactgtaccatcagagtccactttcagtttagctggcagggtgcttgaagaccggcggcggcgcctaactcctgatatggttgaagttttgt

SEQ ID NO: 149984 - DNA, 380 bp, Zea Mays
acgtcatcaacagtggcttgaggcctccttagagaaggaggattggggagacgtcgccgagcgtggcctcacctaggcgcgaggagattgttgggcgacgaataggaggacaccggatctagatcttcaacacgacggggacgtcgccgtgcagccctcgatgactcacgtcgaagtttcgccgacaggatcgaggctgccccgtcgttgattttcgcgtcgcctatgggagaaccttctggagaaagtcgtgaatgggagcagatcgttgtcgtgcgtgagcgaacacgagtagtgtccccttcagatgggagagagagaccgtcaacgagatggaaggctacgtcggagacaccgatgttgtgtttcgcatgatcatg

SEQ ID NO: 149985 - DNA, 1019 bp, Zea Mays
attttggtctgctagcgaaaccattatcttcattactcaaaaaaggggtgatattcatttagacgttggatcatgaggtagtttttcaggctctgaagcaggcattggtttcggctccggtcttagggactttactcaaccattttgcttggagaccgatgcaagtaattgtggcattggagcagtatcgttgcagtctggccacactattgcatatttaagtaaggcattaggtccaaggtctcaaggattatccacttactagaaggaatatttggctattatcactgccgtggaccactggcgtcactacttgcagctgtgggagtttcacatttatacagatcatcgtagtcttgcgcagctggatgagcacaggctacacaccccatggcagaagaagatgttcacaagattgttggggctgcagtaccgcattattttcaagaagggagtggatatcagtgcggctgatgcgctgtcccgacaccaagctgtgacttcttcgtgcttagctatatcttcttgcactcccaagtggatatctgatgtagcagcatcatatgaacaggattctgaagcatctgctcttattgcaaagctcgccattgattcaatagtagtgcaacattttacctggtaggatggccttcttcgctacaaacaccgcatctgggtgggtcagtcacctgacttgcatactcgtttgattgcagccatgcattcgtctacaattggaggtcattcgggaattccggtaacatacgctcgtgtgaagcaactgtttgcctagaagggtttaaaagctgatgttaagacgtttgtcacaaactgtctgacctgtcagcaagccaaggcagatcgtgctcgtttaccgggcttgttacaaccattgcctgttcccacatcgttatggcaaatgattactatggatttcattgaagctcttccttgttcccagtcatatacctgcatcatggtctttgtggatgccttcaccaagtatactcattttctgc

SEQ ID NO: 149986 - DNA, 462 bp, Zea Mays
ttgggaaagacggaagggcgaagatggtacttccgcggtcgacggcaatgggggctgtgcgctgtggtggtggtcgtggagtcaggaggtggaagaggtagtacaagttagcgcggagccatgaggttttaattgcaatcggcgcacttgtctctttaatggccactgcttccaacgcctctgtcccggcttccacgcgttcgcagtgagggctagggtttccccgcgtcccgtcgccgtcgccgtcgctctgcaaggtggagagggtgctgcactgctgctgccgtcggtggcggttggaggctggagctcgttcgtcgctgtcgcttccccggtgagtccgttccccttcgcggcctctggtttccggttattcgagggcgggacgcgatttcgcccgctcgtattgggagctgaagaaattggacggttttgtctccccccgttttcgcacttggtact

SEQ ID NO: 149987 - DNA, 625 bp, Zea Mays
tgcctacatggtgtaccgaagaagatcattttggataaaggatcacagtttacctccagatcttggaaaagttttcatgagaatttgattacaaagttgaattttagttcagcctaccatcctcagactgatgggcagacagagaggactaatcaagtgctggaggatatgttaagagcgtgtgctcttaagcatggtggaagttgggataagagcatgccatatgcggagttctcttataataatcgctaccaggccagtttgaagatgtcatcgttcgagactctgtatggcaggaaatgcaagactcctctatattgggatcagactggagaaagacagttctttggacctgaacttatacaagaggcagaagaacaagtgcgaatcataagagagaatttgagaattgcgcaatcaaggcagaagagctatgctgatacccggagaagactactggagtttaaggagggtgatcatgtgtatctgaaggtgtcaccgatccggggtatgaggaggtttaaagttaaaggaaaattgtcccctcgcttcattggacctttcttgatcttaaagcgagtgggagaagttgcatatcaattagagctacccaatcatcttgcgg

SEQ ID NO: 149988 - DNA, 1446 bp, Zea Mays
aaagtacagttgtctaagaagaaaacaaacagggaggagacaagaaaacagttggaccccacttatgcaaatgccaatttcgacatactcatgccagaagcatttgtactcaaagtacgttctacctgcatgattttcctttgtgtaaatatatgagacaagaagtcataagaactataatcaccaactaaaattagataaatataacaattcggagcatccaaagggcatggtttttggcaagtaccttttaccagtacttgaatacttgatcacagaagtctaccgagcataaaagcagaggcggtcctgctacacttcacagatagtgcccaaaatgccaaaaaacaccgaaggaagatttggtttcaaagatcactcaatccaatctttgagtcttcagaaccaaaaaattgcaggcaggaacaggttattctgttggtcccaaacgaaggcccttgaaattgccgtgtctcctcggtttatacgagatgccgatgccgagtcggaaacaaatgaaactctgaagcggcaggaagggatatctcagaaggatcagaacacgcaaaagaaaggaagcggaacttttttttcttccttttactccagctagttgtcttcaccaaaacaaacgcgcagagcacacaaacctccacatcttcattctccagcaagacagacccctgcctcagaacaatctcagaattcagtaccccaaaaccaaggaaaaccggcgagaaaaccacctttttatcttcctctggttcttcacagcaacccctcgaggcctcgaaacactgagaccagcgccaagatcgaattttcggcctccaaaactgagaatgaataaataaacagcaaaccggcggatactcacaggtcacagccaaaaaaaaactgccttttttacagaaccgtatgaatgcaaccgaatcgcagttgtcttttccgatcctcccttccttgaaatccttcaagacgcggaagcagaagcatgccaacccggcaacagcgcatgcagcggtcctcgccgacgacggaggctttgccactgtggccgcgcgcgccaaccgctgccgctaccttgtctctctcattctcggcattctctatcctctctctaatggcggatggagaaggtaggatttggagggtgacccagcccgtacttttggtttttgtagatcacattgcggggaggggagtccgatttgtcttttgtctctattttggccaccaccacctctttttctacgtcaacaggtgcgcgatcaagatcaagctcagcacgtagtggctgccaacaaaaaatgggagatgagaacaagaacggacagcgctacgggcaaatcggcatatagagccttgagttttacagttaattaatgcttgtgccagttaggtggcctgaattggaaatacagattaaagcgacctcttggtttt

SEQ ID NO: 149989 - DNA, 454 bp, Zea Mays
gttgacaatttggtatatttggtttacctgaatcaacatggagctgttcttctatttgttcttgtagttattcttccattgttactttgttaatgcttggaaagtagtttgcatttgtctaggatctgctatggttttctatctaatcctttgttttgtgttttgtcaaactgtatgtgtattttcaaaaatatggttttactcattatgcggttactaatggcattgacatagctgcctttgtagagacaaatccaattggaccagtagctgtttatgagcatgctctctgttatgtttcatttgtttttattttgcattgccatccttttgcacttatccacaaatagcaaattacactgaatttgattgcgtttcctgtttagttgtgtgtcattacactttaagtcatttgccagatcattgagctttgctataatgagtgaatttctgc

SEQ ID NO: 149990 - DNA, 520 bp, Zea Mays
gcgagagccaatcgacgtgaatgcgagaagcgagaggttggctggggcgtctcgtgcggagggtgcgggaggcgacacgggtgttggcgagcgtgcacaggcctgggggagagtggagtcatggtctgcttgtgtacggtaggggagagttggtgtgcgttttggtgtgagtgtgtgcgtacatgaacagatactacaactgtacttgtaagtgagaggcaataaaaaatccattgcactgctcgggagacttgccgccagctacacactactggggttgggttgtttttgcacttaaactcaactgccacttctacgtgtatgtcgttgttgctaattgttgtcgggctgtcgagctaccaagtgtaccgaactgaagctagttgtgttgggcttgggcctccgatgaaaggccgccatgcttgggcctcgagaccggaatggccaatagaggccgcgacgggccgcatatctgccggtggggtctgggaagggtgaagtcatgttagtgtcgtggtct

SEQ ID NO: 149991 - DNA, 535 bp, Zea Mays
ttccatcatgctgtagctgacagccccctgatgtaccatacccaagcattgttgtccaatgcatcctgcaccattgttcttttgattgctctctttgccacatgtgtgaacgacagattttccctgaaaccatttatcacaccaaaaaagttttcggctgtcatcacctaacacagaataagctgaaatgcagaacatggacatagaattagagtgaacctgtaaatctagagcagcccatggctgatcaggttagatcttttttaaccatagccacctcattcttagagcccaacccaaaatttccaggtccaaaattcctaaaccaccaagatcaagtggcctttggacccgaccccagtgtttcattcaactaaatatggcaactgatccgtgaatacagactacttcagagttcagagtaacctgtatcaagcatgatgcatatgtgtgctttgaaccttgtagatagtattccttatgtttccatcctgttcaactcagtaccatactaagttagtagtatgtgacaaga

SEQ ID NO: 149992 - DNA, 800 bp, Zea Mays
gtaccagaaggtgtacttaagataaaccaagccaccctgactggagccagcggcagtttccttcagcatttctcattcattcgcaagaggccatactttgaaagcgatgtgttcttgaactaaatctctggtaccgatgtaggtacgtatggtgttgaaagccattaggcacgcttgcacttcattcccaattgtgattgatggcctcctaatgccgaaacgcgaccatatgggatgttgaatgatgccctcacatcctccctctgattcagatcattctttacgtaaaaccattgcttcatccaagagcctagccacttctttcaaaatgtaggcacatgataatttgcctcagagcggggcatgaagctgtagtagccaaagttgttatggtattgttcttttccggttgccttcgtctgttaagataactcgtgaatattgcagaagcacctagcatctggctccagcccctgactcttcatagcccatttaaaaaacccccactttgataaaagcttcaggggtaagttgatgaaggtatatttcgaatgtcttcagaacttcaaccaacatcttgtgtagtggaaagcgaagcccagctttcatgaagctcttaaagaccaccacctcatcagcttcgagaaggtaaacagtgctttcccctctggccctcactatagaaacatcatgaaaatatttgcccttcatcgctttgatttgcccttgtttgacagttgacttcccaaaaacaacatggctcggcctccatggccgatcttcgacatcttcattcccgc

SEQ ID NO: 149993 - DNA, 335 bp, Zea Mays
atcgaggggagcaaacaacgaggccagttcagcaagagtgttatgttacatgggaaggatatgtcaagccacgacatccgctcataccatggatgctacgatgcactatcgtatccactgttcttccctaaaggtgaacttggatggcatgcaaatatcccaaaggttggtgtatccatggatgaagtggatgcataccgtgcgacacatagggcaaataattcaaacgatgaagatgcaggttagttgtttgtttgtactttgggatttttgcacattattaactattctttcaacatcactcacttttcaatccttgcgtatgcagaatctcc

SEQ ID NO: 149994 - DNA, 467 bp, Zea Mays
tgtgtcgttgttgccagtaccacatataataggtagaaggcctcaaccaagtgtgagcgtctaaagggaccaacagagaagacctccacgacgattgtggtgtggtatggcgagagtgccgtcatagctcagggttgtcagagaagagtagacgaagtagtcgaggatgagatggtgacgctggcaacaaggttgtgctggacgaaggcgaagaggtaggcggtggtgacacatcgaggttcctagagtttcaagggtgggagagccacgatgcataggaagaaggtcctcgataatgccactttagcgctacggcggcgcttgaagttggataagaacttgaagagccaaataataccatgcatgagagacgtgcaccggcaagagtcgacatcgtatagatgtaacgacgaggactatgataggtgacgatgcagcgacagtcctcttgtttggcgaagcatcgc

SEQ ID NO: 149995 - DNA, 788 bp, Zea Mays
gagagaggatgctgtatcgggcgggcagcagcggtctccaagggcagaaggaggggagaattgccgccacaaagaagaatctggcgcaccctcgtctgagccctggcctgtgcgtgccgatgttcactggaggttaagtatgttgtgtgtggcatcttcggtcaagaaaggtgactacggagctggcaatttctcgacgggctttggggaaccgagcgccgtcatgaccgttgcgcaacaacgaacttcatcactagtgagtgccctaattgagtttgcaggattcttggctgggtattaggcgttgtgggtgtgagattggagcactggggtaccgtgacacggtgctccggcaagccctcaaccgtgcggggcggaggagcggctattgccggcggctatgggtggaagatgacctgtgtgttgtgggatcatggacgaacggtggtgattaaatctttccttacctcttcgtctcatatagattcagccgttgcggggtgatcgggtggtggagattggattacgccaaaattaaatctggatcatagatctgaaatccgatgcccctggttgcctaccgatttacatataatctgggcacttgatgagtgatccaacggctcagatcatccaataccccttcgaccgtgcgtaatttgttaaagactccatggatttttatggaaccaacccgtgctccaccgcactagaagaaccatcgccaataggtcctaaactttatgttttaaaccttgaacttggttaaaatagtgtctgcagtccac

SEQ ID NO: 149996 - DNA, 325 bp, Zea Mays
atgagcccactcctggttttggttcttcgaaatggggaggcttgactcagacctcgaagggtctgccgattcctacatatacgctcgagaggggatccctcctggttcttactttgcatctgccttcagccctagccacctccatttccctcagccacaaccaagagttcgtgtgtagagacaggggagaggaaatgagttcatacctttctccatcgcctccctccactacagtggctgaaaagattagcgtccttgctcctcgcgatccatggcccatctcctctgtgaccaatgaggatctgcaggccctggtggatggggg

SEQ ID NO: 149997 - DNA, 366 bp, Zea Mays
atatgtattagtcacgatggttctcttgttcatagcgtcagtgtgttgtgtgacgatttctagatctgtagccgtagttttgtgctaatttcatatgtgtgtagtatgggagagatattcgaggtgtttaataacttgggggcatagtcctagcgtgacgctcctcatgtgttcggtgatacacgtaaaccagacagtgtcgttgatttcatcatctcaagtcaaatttagttttggtgtgccatgaagtaatctcctgatctataagggtttcctgtgtactgatcctccacaacctttagggaagtatgggtcgaaagtgactaaattggttctatatgttataaatggtctatcggtgatgtg

SEQ ID NO: 149998 - DNA, 409 bp, Zea Mays
agtatgtggtgccctcgctgagtctatgtaactgtaacttgtattgtaatgtggcctgttggccgttttcgcatacttgtgctaatctggctgcacccttaggcgacttttgcgtggagtgtcgattggcgtacttatcgcgcttatccggttgcatcctcgggcgacttttgcgcggagtgtctttttagtaaaagactttgattgacgcacttattgtgcttgtccggctgcacccttaggcgacttttgcatggagtgtctttttaataaaagacttcgattgacgcacttgttgtgctattccggctacacccttgggcgacttttgcatggagtgtctttttaataaaagactttgactgacgcatgcacttgttgtgctattccggctgcacccttgggcgac

SEQ ID NO: 149999 - DNA, 485 bp, Zea Mays
aactacatcctatggagtagacaccaactggtacatggactctggcgccacagacagcattactagcaacctggagaaactgtcagttcatgacaggtacaagggccatgatcagatacacacggcgagtgggccaggtatggaaattagttgcattggtcgttctattgttacaacccctagtcgtgatattcatctaaaaaatgtcctctatgttcctaaagccaacaaaaatcttgtctctgttcatcgcctcacctctgacaattcagcttttatagaatttcaccatgatttctttttaattaaggatcaggcaacgaagaaacttctgcttagaggacggtgtgatcatgggctctatcctcttcctgctgggtgccaaataaagcaagcctatagtgctgcaaaagtttcctttgatagatggcatcatcgtttaggtcatccggccactccgatcgtggagaaagtcattagacaat

SEQ ID NO: 150000 - DNA, 387 bp, Zea Mays
catgtctatcaataatgtaggctatttatatatatggattctgatataaattggacaaagggagtgttgtaataatgaaaagatacatgttcaagaaaaaaaacctagaactctgcaaaactgcgccatttcactaacaggagtctaattttctatatatgtttagggtttagacgtaatagtcagtgtctgcatttgagaatgctcggagtcaaattttggaataaaggaggattgactgtgaggctatagccagctgagatcactccatttttgccttttgaattatgtcacgactatatctaccaattttttaataggggcttggattattttcatgtattcactgttccttagtatatttgggttatttttgtagtgaaagct

SEQ ID NO: 150001 - DNA, 603 bp, Zea Mays
caagccattatagattagaaaggaaaaccaaacttctcagattgtggaggtgaaagaaaaaaaaaataccaataaggacctacagtacactgatgtggctatgtatgcatgcaagattattacattgaaatagctgggacctaggagtggctttggaacacgaaagaattgcacaaggccattgttaatttgaaaactgtgtgggtcagactagcttttcgtcacctttctttgcccgtcctccaatggcagccgtgactcagactagcttattttgatagtgtactagacaggacctttgaaaattgtgtgtcctccgaactttttcatcacctttctttgctcctctaatccaatggcggccgcaagaaccgaaaaggtagcatatgtatgtgcccctacactacaccaacacacgaagagaactacgtagcctacccagcatgtcttcctcgtgcttttcgttccctcagtgctcgtcaaagaatcaccatgcccatgtgaaagggaaaccgatcgaaaccgcaacagatatagctgctgacctgtcacgtaaacttgggcgacggttactcctcggatgccatgccagtgttcacgttc

SEQ ID NO: 150002 - DNA, 347 bp, Zea Mays
ttttccaataatcggcttcaatctccagctgggattacgaatcttgttccacgactgggaaccttgaggattctctttctgattccaccgatcccagttagggtttcttcccttcggatccatcttttgcaacggcaccgcacgcgacagcgccggccactcctcgtccacaagcgggggacgaatcggagattcaatccacccaccgcggaagcttacacggaacgacgacggaagcgaccaaagacgcgagagcgaggaagcaaggtgcgggaaggagtgcgagccaataaagtccgaaggaaaccctaagacagaataagaagacttcacctcgccacgaagag

SEQ ID NO: 150003 - DNA, 613 bp, Zea Mays
agttggataagctagtttaattcatacaaactcttatactaatcattatttattttagtttttgttaattatttgagtaagaggaggaggatcgggaaggagtgaatgaggaaagataatctaaataatatagtctattatatttaagtggagataattttaacaatctaaactgtttggttttaaaagtgttacatgcgtgtgggttgcaattaatttattagattagcgtagtatactagtagatcagagcaaagcccgacccgacagatcatttcagacgtcacgacagtttttgggcaccacccgatgtcacctcgtacgacgaggaacacaacgccgcgttacgacagcgcctagaaggacgtctcgaacagcagcagcacatgtcacatgaattccgtgtctagtaggaaactgaaacagtgccacttctgtctccaaaataaatatcatgcgccggtttattttgtttacaaaaaaaattaagtagatttataaaaaaatcattaacgatatttatatctttaagtaagtttggtagtataatatattcagcaatctattttgcgagaaggctccaaacgcacggggtttcttgcgcgcgcacggc

SEQ ID NO: 150004 - DNA, 300 bp, Zea Mays
gatggtatacaggtatgtaatgttttaatatgtattttgtaacatattattcatcataatatattgatgaggtatgaaacactaaaatttcaggacgatgatgaagacaatagagacatcgaaagatatggtgaattggatgaaaggaataacaaggttttgatcatattgttgtgaatgtttatttgtaaatgatgtatactgagctttcaaccaatttttcaggaaattcaagacgtatctaatatacttgaacggggtgtggacaatgttcaaatacctataccgatacgtccatta

SEQ ID NO: 150005 - DNA, 339 bp, Zea Mays
atgatttgctagctttacggaaagaagaactagaagcttacaaggagctaacaaaaatgcaacttcatttaaagagtaaacaaatagagcaatctaatccaatcaatgatccgttcagcatgtccaaatgtatgttgaaattgaagagtttgcctctaactcaaactgaactactcaaggcaatcaattttctgaaaggggacaaagaagctagagagatatttatttgctgtgaagagcagtctcttgcagaagcttacatcattgggtctatttctgactaatgcaaggtaatcggtttactgctactagttgtttgcaacatgttctagataatct

SEQ ID NO: 150006 - DNA, 405 bp, Zea Mays
gcttggcctcgactctatacaggaagtcagcaggcacaaatctactacacagtacgttgtcacgtagatgccatgcagctcttcttcgaatacaagacccggcttccctaaagacgctccctttggtgtataaatagggtcgtggtccctccatggatgggggatcgatcgacatcgacgacatcaacatgcacacgacactcatagacgaacactcgctctcccattctgtcttagatattggcacttgcctcaatcatctctagggacttgaggacttcccctctcctattgtgcttgtaacccccctactataggcaccacggtgcgagtaatataagcctcatcctctctgctagaagtagggccttgagtagcccaaaccaggataattgcttgtgtctc

SEQ ID NO: 150007 - DNA, 641 bp, Zea Mays
gtcaagttcctgctgcagcttctgcagcttcgcctcagccgcagcctgctcgtcctgttgtttctccagcatcatattgtaggctttcagctttttatggaacgccgtgataacctcctccctttggtccaagtgctccttcttctcgaccagccctatctcctcctgggtcacctcctgctctcggtcagacacctttcggaggtcctccttcaagccctcgcgctcccgctcaagctcggtccgctctgaggcgaattggcaggacaccgccttagtgcgctcctccagttgggtgcaccagtcgccaaggcgctggtgctcggtgttgagcgcctcccactctcacaggatcgccgtctcggtttccaggagagcctgatgagcgtgggatcgcacctgagggaggggagtcggtgttgctcctgactcgatgccagaccagagcggtcgcccaagaataacctccggttccttcggagttggcggcgggacggagctggacgcgcccccacgcctaccgccgacggtatattcgacggtattgccaccgttggatctgcagtggctgttggcggcactaccgcctctgggcccccagctggaacttgggaacccgaaggcattgcctcgacggtggc

SEQ ID NO: 150008 - DNA, 300 bp, Zea Mays
tgcctcacaagataataattagtactattacgaagaatgaacccttgatgcatcgcctcatcttggatatagtggctcctcaaaccaaacaaactacatgttcgttgctgaagaggctgaaccatctgttgtggttgtttacctttattttttatttggttgtctaattatcaaagtgtccaaattaatctaatcgagtgtacttgtggggggcttgaggactggcatggagcagctctcacttcgcttggctctagtttccaccactgagatgtagcctgccattatgttcagtatgcc

SEQ ID NO: 150009 - DNA, 444 bp, Zea Mays
cttaataatcaactaaacattgtaactttctagctctcttaccacttggttgtagtgagagttctagtctatcgatctctagttcacctatacctactcttagatgttgcactctcttagatcatatgaagtgatgtggcctttatcatagtcttttaggttaaaagttaaagagagattgtgcgttcgtgagagactgacaaagtccccataaacgttactctgttcccctttataggccaaaggaagagcagtcgtaccacgaatttggtcaactaagacccaataatcataaatcttatcctagtcgtgtggtcttacgtagaaccatgccttcggtcgtggcataggttgtgtcctactttagtggtagtcatactgttgtaggtgtagatatgttatgttcttttatcgaatagtagagtccacgccatcaaatacgac

SEQ ID NO: 150010 - DNA, 467 bp, Zea Mays
cccgccgctcatctctcttcctcctaaagaaaaaagaagctagatgcccatccctctcacaatattcacaatggtacctcacccctctcttgggtggattttgtttgtggaagagtattttctttttggatggctgaggggctctaggaaggggatcgctagagatgtcgggaaaggtgtcaagtgtgttcctaagatggttaggttttggaagccacacttgtttctgaggaggatctctcataggttcatcaatcacaccatctctcacaggggtgacaggcttagcaaaggtggttttgataagcttgggagtggatgaaggtttctctgaaggtgtcaaaccactgcactcaccaaccttaccaaagcgagcgacactcccatccttagtagcaaagcctaaccccggtccgccagttcccctcttgaactgactgaccatcatgcccaactggggctcactg

SEQ ID NO: 150011 - DNA, 310 bp, Zea Mays
aagggtctcaaaagacaggaaggtcatgaacatgtaaatgaaatgtttaagtaggtagtagaaatttagaggcaagtatttgaaacaagagtatggaagggatacgagcatgtcaataccaaaggactagagttcgccagatggtagcaacttaatgacgaaaaaggaaagaatcccaaaaagacaagaatattatggtcagtgggcatctacaaggatgtcgcaagcacaagagtgagatcagatctaatagattaagagaagtatagaccatactagaataaaatacttttggcaagggggcatatag

SEQ ID NO: 150012 - DNA, 304 bp, Zea Mays
gagaatttgagggtagctcagaccagacaaaagagctatgctgataatagaagaccactggaatttgaggaatgtgatcatgtgtacctcaagaatgtcaccacttcgtggaatggggagatttaaagtcaagggcaaattgttccctcactttattggaccattcagagtttttaggcgagttggagaaatggtctatcaaatggagctacttgataatctatctgatgtgcacaatgtattccatgtgtctcaaattaagaagtgtctccgtgtccctgaggaacagttaccaatggaagag

SEQ ID NO: 150013 - DNA, 756 bp, Zea Mays
gccgtgggcctcaccgttgtgttgtgtccgtgcgtgggcatgcgagccaccgcccatgctacacgaccattgctgcggtcggtctcttggccgggatgactcacggggtccccatggtacacgagtcattccaatttctcgctgtctttcctcaccaccgcggagccgtcgggtggcgtcgctggacctctacgttgttcaatcgtcggtaaggggttattacatatattcaccatcccctagggaacattgatcgcggataggattaatggatggggtgttgtggcacggaacggccgttgtcggccatggcctccactgtggggttgcccgccgccgctcggtcagctggtggatgaagatggtgtggagatcgttggatctagatgaacgatagagattagaaggttggggaggaaactgtataatcgttgatcgtggaacggacgccctggattagattcatgtatacctgtttggccagatctgacgtgggccgtttgatctagatctggcgctcgaaaatcgatttgggcgttataaaatttgatgcatcggtgatagatcttgcgactgtcattatatgtcggttcaatgatttaatcctggccgctagcgggtgatcgggtcgtccatattcgcacgtaccccttcggcgaggcttttttgcgtatgagccctcatgtttctttcaaacccgtcatcctaacgcagttgtagaaaatttaatatatgcccctgaaacttgcagtttgg

SEQ ID NO: 150014 - DNA, 497 bp, Zea Mays
cgagcatgttgcaccgtcttaagtcgttgccgacttaagccgattgctccgtttagcagggcatagtggtcaccccgagttaagtaagaatgcaggtcgatcatgaacaaactgagtattcttgaagcctttttattgatgatatatttcccattttacagagtacattgtcgtcccgatagcttttgaaatacagctagggataaaacttcctgagatgttctatattccatgagttcccaatttccgtgccgtccatctgagtgagacgatatgatcccggccgagtgacttcttctactatgaatggtccttcccataggggtgacaacttgtgacgtccctcccccgttagaattcggcggaggacgagatctcccactgcaaaggatcgacatcgcatggccttgtcgtgatagcgtctcagagtttgctggtaccgtgctgattgaattactgtgttcagccgttcttcttcgagtacatcaacatcctcc

SEQ ID NO: 150015 - DNA, 502 bp, Zea Mays
aaaatcgttggctcgggatggttaaatcgcagtttctagtcaggtaaataataggtctatagttggtaaaatcgaaggtcccgtccaggaataatctaaaattcctagtggtaaaatctgggctccgtgccaaaacggatcaattctgtgccagccaaaatgggccaaaacggaccagctttgcccgccaaaacagacaagctctgctctccaccgccacaatgttgaaggttggtaaaatcaaggttcagctaggcgctaggcggaatctaggcggtgacccattgcctagcgcctagtcgggagtactcggtcttaggcgcttttctaggcgttttggcaatatagccataaattatatatatatatatatatattatgtatataactatatatacgtatataactactatataaattagaaacaaaagcattttcagttctgaaatttaatcatagtactgctgaaatgattaatagataggtactaaccccttcaaac

SEQ ID NO: 150016 - DNA, 442 bp, Zea Mays
ggaacctcgtcttcttggcgctcggcaactggctcatggcgttcctaggtgagccggcgctgcacacgcacgcacccatgccaatgccgccggcggtggcgcgcggcggtttgattggtttgcgcgcacacgcaccgcgtgctgactgacaatcgttgtgtcgtcgtcgctgtcgctggcatacacgcagaggggtactgctgggcgcgcacggcggagcggcaggcgtcgcggatgcgggagcggtacctgcgggcggtgctccggcaggacgtggagtacttcgacctcaaggtggggtcgacgtcggaggtgatcaccagcgtctccaacgacagcctggtggtgcaggacgtgctgagcgagaaggtgcccaacttcgtgatgaactgctccatgttcctgggcagctacgccgtcgggttcgcgctgctgtggcacc

SEQ ID NO: 150017 - DNA, 287 bp, Zea Mays
gcaacttgggccgggaagatggggaatggcttgccgaagcaacagaagtcgtaggttgttgattgcctacatattctaggatgtatggggaataacatgaagcagtgtggaggacttgcttcggttgactctgtcgtgcctcagcttcggcaatttccttctgcttctagattgtgacctggcatgttcttgttgtgtggcccttgtcctcgccacaaaaaagacagtacaactttctgggttgattgtcaaaccttcctccactgaaacttcttcctcctctgccc

SEQ ID NO: 150018 - DNA, 280 bp, Zea Mays
gccgcatgggcatacaaatcgaaacaaagctgatcaggaaacttatctgcaaccggccgtttgagatttttccccaatttgtcgacttgctagtataaagatattaaattaatagatgataagatttactatacaataactataattttgtatgaaaagcaaataatgatgtaaaacaaataaactggaaattaaaagtctcatcggcccgaagccctgaagcacacaacagcccagtgtggtcaagctaattattttgtatttgctagcatgtttttta

SEQ ID NO: 150019 - DNA, 511 bp, Zea Mays
cctcgacaggatctcgctcggctacttcctcggcccgccgccgcacgccaaggtggcgccgctgcgcgaggccgtgccgcccggccgggcccccgcgtaccgcgccgtcacgtggcccgagtacatgggcgtccgcaagaaggccttcaccaccggcgcctccgcgctcaagatggtcgccctcgccgccgccgccgacctcgacgacgacggcgacgccgccgtcgtccatcagcagcagcagctagtcgtctcgtcgtagccgagaccgatcgccggagactgatgctgatgatgatgcatatatacatgagagaaatcgtcgagtagactagccgattgcaaaagcaaccccagctgccgaaacctggcatatcgatcccattctctgctgcgcacatgtatgcatgcatgcgcttcgtccgttcgactcgtgtgtgcttgcttgcttgcgcgtgcagcagaactaattccgttccgcagctagctgctctgctctgctctgctggaa

SEQ ID NO: 150020 - DNA, 450 bp, Zea Mays
tgcctgcaaaatggaagaacgcttgccaagggctactagtgaaaatacagcccctgtctgagataatggtttggggcatcccttgaagcttaagaccttcaacatgtttgagcaagagtcataactataaatagatgtcagtgataaaaacttggcaactttagaaaatttgttgactaccaccaagatccattgtaactacttgccaagaatgttcaggtattggcaacggtaacagaaaccctggatacttcacatgctttggtttagcttgttgacagacctggcaccatgtgatgaagtcatggactgactgcttcatttgtagcgaagcaaacattgcctttaaattggaagtttttcctgtcaaatacttgggcttacctcttgtaacaccctgaattttgggtataaaaatttctttgctctatactcaaaatttaggtatta

SEQ ID NO: 150021 - DNA, 353 bp, Zea Mays
ctccaaggtggatagtcatcccactcctttcttcgccctgttcggcaccacccctcctatacgcacatccgcgtctatggtcgtgcctcctatcctaacacctttgccagtgctccccacaaacgtgcacactgacccactcgtatttttcacgggtactcttctgatcacaaggggtatcggtgcctcgatctcctcacccaccgtgtcatcacctctcttcatgtagttttttatggtcttaaaataggcgccacaagcctgatacagtcgcatcgcctcctaggcaaagtcagacatgtcgttgttaatccttcaacgcgacgacgacactgtttacctcttgctctacg

SEQ ID NO: 150022 - DNA, 894 bp, Zea Mays
gggaatcccgtgactactatgactttgtggtcgtcgaagtagtgccagagtttacgagtagttagaagtactgagtatagtaacttttgaacttgaggataccttatctttgagggcccgaggacttcattgatgaagtagacaagatgctgtattgggtatgtgcgcccttcctcggcccgctcgactaccaatgcagtgcttactacgtgagtcgtgcaggagatatacagcagcaggtcttcagctgactagctggctgtggcctggcgcggtggcttgagtaccggcggtgtggtcaggaatttctggagtgcttccagggcttctgcggttcactagaatttgtccaccttcttgagtagcttatagaatggcattcccctttcaccgagccttgagatgaaacggcttagtgctgccatgtacccattgagcctctacacctttttctgtgaccacggtggtcccatccacattatggcttcaattttttctgggttagcctcgcttccttggtggctaacgatgaacccaagttgcttcccggttgataccgcgaacttacatttttttggatttaacttccagcggtagcgcgtcaagctgttgaagacctattgtaaatctttgatgaagttttctaggttttctgttttgattaccacatcgtcgacataagcttctacatacttaccccagtggtcggctaagcatgtttggtgtaacaccccattgctcccacacaacgagtgttaccaaagaccctccccacaaactcaaacaacataagaaaagaaatggagacagaaaacaaagaaaaatccggcagcacctcccttgaaagtagcataacgagaggcacatatagtttatacatgatgtaaaagaaag

SEQ ID NO: 150023 - DNA, 362 bp, Zea Mays
gaatgcacctccgctttttcatccccagtgcttcttgtgaaaaagtctgatggttcctggaggttttgtgtggattatcgcgcccttaatgacaaaacagtaaaggacaaatttccaattctagtggtcgatgaattattggatgaactccgtggtgctgtattctttaccaagttagatttaagaagtggctaccatcaagtacgcatgtacccagcagatgtggaaaaaaacagcgttccgcacccatcgtggccattttgagttcctagtcatgccctttgggctcactaacgccccatctacatttcagagcttgatgaatgacatattgaaaccatttatcagaaagttcgtgctgg

SEQ ID NO: 150024 - DNA, 289 bp, Zea Mays
ttaggaaccagtggtgaatgactgaagggatataaaagaaagttcaatatatgccaaatatagaattcaccacttcaatgttatctcttgcaaacaatacaagacaagatttagcagaaccaaatatttattccactacgaaatgatgtctccattataactgtcaaatactaggtcagttttttatcaccatagagcataaaccccaaaatgtgcttgtagaagatgaactgttgcacatgagaatcaaatttattgctataactcagcctccaacacagaaaacaca

SEQ ID NO: 150025 - DNA, 863 bp, Zea Mays
ggtgcacagaattcatgctgaaagaacaaatgcatcctggtagattcttctattccagtctaactgctttgcaaggaaaatgttccatgtggtcacggtgaaggggtgaaaaggaagaaaatcaatctggatttgcctgctttctacaagctgtcgagttgcttcagttgttcgatctgactcttgcccgggctgaacttgtcagctttcatcctctctctgaacccatagggtgtaacctgggcactggcataagctgcaagtaacaaattatagggcagagttcttgcagggaagttggtctgctttaccctatcaaatatcttctccgcgttatggatatcgcccttttctgcgtatgcctttagtaagattacatatgagctgaaaaggggatgtctgtcaggattatcttctgtgacattcatcagaaacgagtcggcctttgacaactcgcctaaattcacataaagcttgacaactgcatcccaggtaagagggccgattgtacacccatccaaacacatcctttctataaactttttgcttttgtccagaagtttattttccgcatacacctccaacatagcattaaagtacttggaagtgagtttcggaaacgtctttaccaacacgtcaaagatctcttccgctctttcgatatgtccaagtttactccatgccttaattgcagccaaaaagtcctccaactttggttcagcgcacaagttccatactctctctacatcaactggccttccaagaatagcatagaggtcaagaagagacctgacggcatgacgattagcctttacatgtacctccatagcattgataacctcttctgctttctctgtaaagca

SEQ ID NO: 150026 - DNA, 3222 bp, Zea Mays
aaaatactgtatctccaaacaggtgttggattggacgatgtaaaatatagcacagttatgtcatagcatataataaactatagttgtgggtttgagaaacagagtttccaaacagacccttattatgtgtccaaatggtgaataacaattattttttcttgaacagcgcaggagagctgtgtgtcatttcattaagaaagaaagataacagttcatcatgaggggaggcatgtgtactgcccctccccacaccaacagtttagagtgcgccacacgcaatgacaaacaaacggccctacatgacaaacttacgtgtccagtccagccttcgtgccccaccgagtagctccttgagtgtcgtgttaccagcaagacaatagagctcggtctccttaccaacttcttggcagactaaagggacactaggattaagaccctcaaacacacacgcattcctatgcttccaaagagtccaggccacaaggatgactagggaattaaaccctttcctcttctcctttggcaaactgctggctgcccaacaccaccaggcagagaaagttcgcacatcaggttggggagcaactgcctgcagaccaacacacataatgattttggtccaaacctcccgggagtagacacaagaatgtgatgtatattctccacatcctgatcacaaaggaggcaaaggcagtggtgcggcagcccatgttttgacaggtgatctgctgtccaaaacctgttcttgattgctaaccaaatgaaaaacttgcatcgaagaggggcccatgttttccaagtcattttccaaggtgcaaacttaactgaacccaaaaagaaggcgttgtaagcagatttagaagtgtacagccctgaatttgttagcttccgtatgtgttgatctgaaacagcaggctgcaaggtaaaatcatcaactacttcccagagcttcaggtattcgacaagcacctgtacagtgagggcaccctggatatcagcagtccaagacctgcagcccaacgcttgagaaacagtgcgttgtctccttgcccgtttaggaattacctgaaagagattaggggccagctcacctacagtgcaaccgtgtagccaacgatctgtccagtatttagtggcctgaccatccccaaccttggtctccagggcaacatcaaagaaagcatgggcattacggggtacctgaaaaggcagcccttcccaaggtcgagaagaatccgtttttttagccacgaccaacggatgcacaaggcccaacccattgattcaaggttgagtatcccaagaccaccatactgtaacggcctctgaaacttttcccaagagacaaggcaattacctccattagcattttggcggcctgctcataagaatccccgccgaagtttatcaatgctctaatgacccacttagggagatccatagccatcatatggtggataggagtggcagtgaagacaacgcagaccacaaccagatgcccagctcggctcaacagagaagcctttcaaattgggaggctagctgctattttatctatcaatggcagcagatcagcctttgtcggtttctgaattgtgggaggtatttcaaggtatttgcatgtaaagcccttgatctcgcaatccatgagcccagaaaggagcagcaaatcagcatcagtacagttaaggggagttaccgagtttttactgaaattaatccatagtccagaggcatgaccaaaagcatctagaagctgagatatgagagataaattatttcgagttggactgaggaacgaaatcacatcatcagcatataaagaaatccggtgctttgcttgaagaacatccaatggttctaagaaattttcatgggcagctttggtaactaaagcatttaagactttcatggctagcagaaataacattggtgacaaagggtctccctgcctcaacccccgttgatgcaagattggactacccggctcaccattaaccaggacatgagtggaggaggtggagaggagaaggcataagaggttacaccatttacgaccgaagcccaaatattgtaagacctcgaacaaaaaaagcccaagacaccgaatcaaacgctttagtaatatccaacttgaggaggatgtgaggttccttcttcctgtataagcatctagccatttgttgcacaaacaaaaaattatcttgtatgcttcttcccttgacaaaggcactttgattgattgacaccatatctggtagctggggcgccaaacaattggctaatagctttgtgaccaacttggcaaaactgtggacaagactgatgggtcggtagtctttaacttcacaagcatcagctttcctaggcagtaatgagatgaaggctgaattaagaagtttaaacttggacacacatagcttaaagagtcgccaaaacatcgccttggatgatctgccaacaagacatgtaaaaacggccagtaaaaccatcagggtctggagctttgtcaagtggcatgtccttaattgtgagccaaacttcttcctcagataaagcttcctccatggaactcagatcatgctgctgcagctgcaatgcagcgagattcagcgtgaactccctttgttctgctgttccaatgagtttctcatagaaataaaaaacagcagcatgtttttcttcttgcgtggtgacacatcgaccctcaacctggaatttaggaatgaaattctttttcttgtggtatcttgcgtgctggtggaaaaaggaagtattggcatcaccctcccgaaggtgaagtatctgtgatcgaaggcgggcaatagtgcgctgaagggaggcaagtccaagacaatgcactttgagttttttcctctgccactccttgccactagagaggtgttactgatgcatttgtaggctgccagtaccagaggcgtaggcgccaggatccagcaaaaggagcagcagaatcaaacaaggaaagtgatcagaaaagtggctagcaatcgggttagtaggcaagcttttattacagggagatatgcattagtttgtttccagagtaaaggatatgcattagtttacttccagtttcagttatttagttccttttgaagaggtcgcctcatactataaaggcagacccgtagtttgtattaggatcatcgaggaataaagtctccctgcagttgggcgggactatctcggtcatcgtgg

SEQ ID NO: 150027 - DNA, 863 bp, Zea Mays
ctgaaccagaggttttcctccacggtgaggttcccatggacgatgtcgtcttgcggcacgaagccaatgatcttcttgtaagagcggatgttgacgtcctttccattaacgaggacagagcccgtcatcttgtagccgttgagcttcccggtgacggcgttgaggaacgtggtcttgccggcgcctgacgggcccatgacagcagtcacacgccccggccggagctcgccgttgatggacctcagcagcttcttcttcttattattcccgagcatcaacgtcaggtccctgaactcgaccttgatcaacggcctcgttatctccctctgctgatccttggccatggcaaccaccccggtgaaggtcaggttcctgctctcctgctgctgctggaacttctccttctcgatctcgccgtacgcgtacttgaacacctgtgtatgggtggacctgtgctttcccttgggcgcaggcttgtcctccttcgtgtccaccacgacgacctctccgccgtcgctgacgtcgacaacaaccgacggcatcaccacctccgtgatctcgctcctgctctcggacgcaaacacggcagagtctgacatctcctgcgtcatcagcggcgcctcctgcaccctgcggctggagctgtgcgggtccaccggctgccgaaacgacacccgtctcgagaacgtgcgcgagagatggccctgcatgccgctcacatgcctcctcgcaaactgtttcgccgccctccacccctcctgcgccttcagctgctgccgggccagctggatggcgttctccctcgacctcgctttcctccgctcgcggatgctgaggaacttgtccgagcagttgtatatgac

SEQ ID NO: 150028 - DNA, 622 bp, Zea Mays
gtttcgctggcgacgcagctgttcgggcagaaggtgttcggcccctcctccaatacccccgccgccgcgcagccgcagccgcaggcggacgcggcgggcgacaccgtcagtgcggcggccgtgatcgcgtccgacccgaacttccccgcggtgctcgctgcggctatcaagtcgtacataggcggcagcggcggtgccggcgtgatcagcgggacgatcgtgctgccgcctgcgccgtcgagcagcgccggcgatagcaccagagaggacagggtgggcgagcaggggagatgacgtgatcgcctttcacctagcgatacgatcgtttgtttgcttgcttgcttttcctcgattccaattttgatagttaatttgcttctgttgggtttttgtctcttgcgtaggatacgaaaattttgcctacttttccctccagaatccaatctcctcagctcgaggtaggatacgaaaactttgctgtaaattttgttttcctagaatttttatttacagttttccatagaagaaaaagtaggtgctgccaggcagtaacaattttgttctttcggtgcaagcagcgttatttctttgaatgaaccaatgcaatgaggtagagttcctg

SEQ ID NO: 150029 - DNA, 286 bp, Zea Mays
tcaatgttctgatttgccaaatggttacagtctaattggtcatgcacctttccttagtttgctttgctatattgtgacaaataatatgtcttatcgtgtttaggattttggtgtatcttatatgattatgatttgctgtttaggattttggtggatcaaatgtgatctaatcttgctgtatcatgcatgatgcggaaaattgtgcgaagctttagttgtaacatatctgtggaacattgttactgagatgggcaaaatggctgcattgctgtatcttttgcttggc

SEQ ID NO: 150030 - DNA, 1617 bp, Zea Mays
gccaactcttcgacctcgggggcctcgtcgcgtgatcttcgtcgtgggtctgcccctacggcgggttctcccaggcctaacgagtgcaggaatgggcgcggatgtcggggctgtgatgattgctccctttcaaattcaaagtcaatctcaaattcaactgttgggcggcattggcctcgtaggttgcagtggcggcccattctgcgtaacgggcccctcaggcctgggcttgggcctggagggatggatttgtcgggctcggttacttcagccttgctctgtcttttttgtaaagccagggggcatttgaaattgttctgcaaacgtaaaaaatcagaatttggtttccctctctcctcgttcccttccttcgaaagtttctgccctttggaagggtctccccgtcccttggacttcgggtcctggttccgctcgtcctcccggtctctgacgggtgggactccaccttcatttgcctccttccgtgaattcgccgaagcggtttccttattaaaaaaatccgaacaggcgccagaaacgtccttggagctcgcgttgggtgtcacttcaacaaaaccccaacctgcttctccaccctttgctctccggcgatcgtctgagaatctgtcaatggcgtaccggctcgtagacccggggccgttcctccctccaggattcagcgccgcggtggtccagcatcgtgggattatggtcaggtcagtttcgcagcgtttgccgccatttcacgaggactgggcgattataaatatccatcctttaccggagcacgaggtcttgttccctgcggttagggatgtggtcagagaataccttgttgagcatcagagggttggtgtccgcgccattcagcgctcacattttggacaagtgttggtgcaattccgtagtgtgctggagcgggataacttggttcttcttggtccccagcagtatttggacgctactttcaccgcggtccgtcacaatgatgcatggaaccaccgtgcccttctcttcaaccatgaatgttggcttatgcttctggggtttcccttggattatcgttcttcagagtatctgcaggccgccattgggtcgtttgggaggttgattctgtgggaggaggaccgaagcaatatatctagaaccctgctccgtgttcgggtcacttcgcttgaggaggttccccaatttattgttttctcggaggccgagggttttgctggagattcctggacggtgcaatgcgaaattatccagcagcttatgcttggcggtcaggctcaggatgaggaccccatccctccgccacctgaggatggtcatcagctccccctggccttcttcgggctgggccaacctttgcccccggctgggcttgaccttaactttcctccggagcctgagggtggagtgttgccggctcagcaggatgacttggggcatggagagtgggatcagtggattgtgaatgagcagcccattcagcaagaccctcaaccccccttgccagatgagcagcacattcagcaggaagagctgcaacacagcaatcagcattctggcttgtcgtctgatagctccattggtgctggtcagcttgcaccccccgcgaat

SEQ ID NO: 150031 - DNA, 593 bp, Zea Mays
cgcctatgatagaaaatggatatggctatagcaaaatttgaccttattccgctacaagttagattctaggagaacaaattggcatgagtactgagtacatattctgtccatccagtacattattatataactgattgattaagggaaaatgacactgagatataacttaccctctcacactggattagttgtactctttaatgctagagaaaaaaatatgtgtgttaaaaaataatagacacattttagcttttgcacatgagcgatatctgcggtcgataagatcgaaactcgatagagattgtggagtcatgacaaaatttgatgcatgtttctttagctgaaactacaggtcacccaagcaaattactgggatgctgtgctgaaagagccattgtgtaaaccgtgagctgtatgacctgtctctgttgtctttgttgtcatcctgaattttgttattacaatctgaattttgttgttttgtgtgcactggtagtgtagggcgacttcttttaaaatttggggatcagtctaggaagagggctttaagtttcattcatgtgcttttctctgtaaacttaccacacctttta

SEQ ID NO: 150032 - DNA, 798 bp, Zea Mays
cttggaggcggccgcgcgggcgagggcgagcaactcgtcgtcgtcaggctcaggcaggctcgacgcggagaaggtgtggatggaggagatgtaccgggtggggcactgggggttcggccgcctgtccgtctccgtctccgtctccgtcacccctcccccgcccgtctggcccggacgcagccccgacggcgacggcggcggcggcgggagaaaggacgtggacctgcggtgcgagtcgtgacaggggaagccgcgcgaccgttcgtccttctgccggacagctccgtggcaatgccggaagttgtcctctgactttgcacggtgaaatgagagtgcatggtccgtgcatcggagctccgaggagaatctgcttgggggaagaagcgctaagctatgattggacccgggcgtggggattgctgcttgattcgccgccttggcggcaggtcgtcgtgtcgcgcagccccagcccagccagaacgattcatcagacttccagtgcacagcggcaaacccggagggccttctgcagttgcccttccaagtggccgtgtcgtagtcgtagcttccatttgtttttcctcctcttggttctggaaccccggccctgtatttttacaagctgtacatattcgagcggccgagttcttccatgctgctgtaatttttttgggcgatctctgactctctgtatatactcgcctttctttttatttcccggaaataatgtgcatccgtggctcgaatcgaatcggatcacttcccggaaatgctcttcatacgaaattattgccttcg

SEQ ID NO: 150033 - DNA, 882 bp, Zea Mays
attcgtcttcgagattgcgtcgttttcgtaggacgaatagagtatgtgttggtttatcgttcaatttcaatggtggcgaaattgcagattaactcttcatacggtcaccatcgtccacgggttgcatctgctaatctgtatggtgtgacggccttctctttactgctgagatataggtacgaccctacctgactatttgcctcaattaagataataatgacgcgtggctacaaacgtgggttacatatgtgcatggtttttaagtcgtctgattagttggtcgagtaggaggggcgatcagtcgactaatcatgattaggatgacgatttggatgattagtcggtcctggtcgcccctgatcgtccaggtcttctagggtacacttgtgcacatttattacatataatatgcaacttacctcctatcatatatagagagactctatttgtcagcacacgtgattggtggaacgaaccaccttaggtgatgaaccgagcgagcagcgcgtgtgattagtggaacgaacgatcagaccgcgtgaacggatcatgttatttttgttgggctcctgcatagcggggttctattggggcgacgttttttcgcgtccagtcatcccacctatttttgttacaattttagtcattccgtcacagtttcatccattttgttacattttcagttttactcatttcattacccttttcatttattctgttacagattcagccattcagttactgattcagtcattttgttacaattttacttatgtatgttacaattttagtcattccgacatagtttcagtcattctgtcacaattttagtcatctcgtcacaatttcagtcattctattacagattcagtcattcagttt

SEQ ID NO: 150034 - DNA, 336 bp, Zea Mays
agggtcgctgcttggccttgatgcgtcccaaatagcgaacggtttacaccgcgcgattcagccgtgtgaacggtgactactgaaacagctacggaagtcatcgcgtttcctttctgcaccatccgcggttcagagactagacacatgcagtgcagcgattggttcctgattctgtcattctgtgaatggaaggaggaatggtaccgtcttcccttcttcgcaggagacccgagaaactggacgatttcactgactgaccagcagaggaccgagagcgaagaacaccaaatctcatgaaaaacggagcgtcgatttggtgaccagtgatcacagaag

SEQ ID NO: 150035 - DNA, 310 bp, Zea Mays
agtacaaaggaaggggagaaggatgtctataagatgactaggatttgggaaaggaagacgagggacctcaaccaagttaaatgcattaaggatgagatagatcaactcttgaagagaggacaagacatcaaaccgaggtgacagaggtattttgacaatctttttaatggtgagaatgagactatggacacccaattggatgactcctttgatgatttaaatagatgctttgttcgcaggatccaagagtaagaggtcaaagaagctttaaagaggatgaaagggggcaaggcaatgggaccagacagtg

SEQ ID NO: 150036 - DNA, 318 bp, Zea Mays
gcgaattacatggagaagtccttaccgtgcgccacgcgagcaggagcactgaccacggcggagggcggaattgcggtggttcctctacttcggcgagaaattgccgcgcgactgcccaagttctggggggtaaggtcatgacaccattgggacacctctacgaccctcccaagccatctatcgaggacagagcgactctggacacaagccgtcgacggcgctcttccgcttttctctcttcctgccgctcccgagctccgactgcgtcactcccctcccgatctctctctcacgctcggtcgcgggtagcatgcgttg

SEQ ID NO: 150037 - DNA, 498 bp, Zea Mays
caaaattattattatttaaccacacgcctagataagcatgatttcaattcaacttgcccatattttaaatctcggcataagcttggctattggctaacgaagtgaccattttctaattaccaacatgcaccacctttcaccatttgtggatactggcacgacacacgactattgtaatacatcacaagtacatataaccccatcagtaaagcaccatcacatttccaaaaattccccgagactacgacgacaaggcatcgatccgccatacaacaaaaatcatgacgacgacgataggtgctatcaactaatcgtttaaaaatattagacttacttctcgctttgccactacaacaccctttaggcatatgaacatcggaagcatccttcacacggttatacgacaacaatctaaacgttgtgttacacaagacatacatctttctttgttgcgagtataaccatattacggcatatacccgcacacctcaataaaat

SEQ ID NO: 150038 - DNA, 806 bp, Zea Mays
taaaacaaagggtcttattcgcaaggtggcgcgaccgatggggtatgcaagcgcgccagccgttggatctcaacctgatggttgtgattagatcggtccatataatgaaccggtatgcgatcgcggccacaggattctaaatctacggtcaacatttaatgggacgcgattcaataaggaccatccgatccgcccaacggctcggatcaaatcaccgaaagggtacactctgctcttaatcggagccactacttccccgatcaacggctcaaaatccaccatggaaccatctactcttagccctccgataatgatcctatggcacagaagccatcttctacttccagcgcgaggacatggcggcggccattgttcccgcgacggaccctcgccgtcgctcaaccagtgttccccgaacacgcgccacagattccccaatctgaatcccataatcgatggcacactacgaatctgttgaaggattcataccgagggtgcggatgacggcaaggctggccacgcagatggcggactggcgacggagaacccgcttcgatgagcaattcccggcaccacagcgactttcctcttgattaatcctttctacacctccgtcagggtctggactaccaccgaatagctttgttggcgatcgattgatattgtcagcgcacttccgcagtggcggcccttcctagcccgcgcacccacactctggttcgtcccccccgacggctggggtggtttgggatgatttacgatgcatcggctcggcgcgccacaacttttatgggggaaggggagat

SEQ ID NO: 150039 - DNA, 714 bp, Zea Mays
gtcgtagagtaggtcgtctgcgtgccgaagaaaatggatcccgccattgccctccatgcgttcgtgcatccggtcaaagcgagtgacacaaataaaaaaacatcagctctatctccgcacaccacccctcctcctgcatggctacatgcaacggccatgcatgcctgctcggcagtgtttaaaatagcgggctaacccatttatccccgaccttctccagcggctacaaaaggatatatcgggatatatctgtagctaaatgttgtagcggttttcactagacagtacacagtagacacttagacagatcctcccatgatcccaattcccagacctcacactagccgctgattgcaacaagcaaagcagcccaaaatacatttatctcacaactagccgctgattccacaaacatccaagtcattgatctcgcaactcacattctcacctacaatttaaaatgcacctcgaacaaaaatagctagccgctgattgcaacaagcaaagcagcccaaaatacatttaccattcacaaatgtaaacagctagcaaaacattcaccagaaaataatatgcacattcagtcagccattcagcaagcaaaacagctagccgctgattgcaacaagcaaagcagctagccatgcacctacctcacctgttcacaaacaaagcagctagccgctgattgcaacaagcaaaacattcacccaa

SEQ ID NO: 150040 - DNA, 425 bp, Zea Mays
gcacggaatgcatagaatcacaaaatcaaatagcaacattagccgcagagaaacaaaaaagacactaaaatagctgatgtaatgatataaagccattaaaatattgtagtagcaccgtcaaaagtattcacaagaaaatcatgtagttcgatctacgataaacaacaacctagaagcagcaaaattagcaagtacactccaaagtctgttcgggacagctttaactcagggtggtttcagatagaacactttaaggctgtggtttcagagagaacactttaaggcaaataggtatccagagttccagaccaacataaatatgccctctaaattcccactcaatattcccatttttttattatatcactaaaagacaaaggccactacatgctagttccctgaattgcaccacatataaaggaatc

SEQ ID NO: 150041 - DNA, 280 bp, Zea Mays
ccaccggtgcccacatccgtgcgtaaacaccgtagccgccatcgccgcaagctcgaaggaacggtggccgctgcctttcgaccctgtcaattctcctgactggccactggaaagtactcgtggagtgtcgctggagtgtgggagttgtcgcggcattattgggcgagtcggggtctccgtcggcaagtaattcctcaccggaattggtgttgcgcggcggatcttcctcgcgtcgtcaccggggtcttgcggcttcgaaatcaacggtgagaaccccctt

SEQ ID NO: 150042 - DNA, 504 bp, Zea Mays
gtcctctgtcggaacagtgaccccacgccagatccgccaagaacagagttcttttggcggctaaaccctagtctcaacaaggtgaaaaagatcagattcagagatgatggacatatgattaccagcgaacagaagctggttgttgggatcgataggtgggatggtcggagcaacgacgctctgtctcttccgcttaggagccattgcaatctctcgggcgggacgagcgggttcaggaattcagaaaagcagagaagcggcagaggaaaaagtgaagttagggcttggaaatcaaaacggcacgtcagcacgattataaatgggctccttagctcggacattatctctaaagtgctagattacctctggagcaacttcatccttgattcataatagaggagtaacacaaactcgaagccgactcattatgagtcaacttcttctacccttgtcactacataacattacattaccttactacttacactacactacgctactaac

SEQ ID NO: 150043 - DNA, 687 bp, Zea Mays
ggtacttgcattatcaacctaccaagaaataaagtttgttctgttttttctgctcctttgatctctttgctaaaattcatgcggtgatttgtgttccaggccaatcaagaggctgaacagagctgtgcaggtgagcatgcattcattatattcccacggttgatattctttgcggtactacatctatggtagatttagtcgctgctgccatacaccagatacccagatcttctttaggcccttcgtcggcgaggagtatcacaaggtacgccaatcgcttggtcttatcttcctgctctacgaaaacaagcacacaaacccaatttactatgttacacccttggcttccgacgaggtggacgaggcgtgaggctgacggtggcgctggtagtccgcaaggaaccggatttggacgcgctctccctcgtcgctaggtaagagacccaggtaaggaacatataagtggttgttctgattttggatattagccaatttccccctccaatctgttactgatttatatgcccttctagggatcagcagatcccacacctattacatgatttgtccttctagaatagaatccgctttctatcttctgaaccggcactgccttcttcaatatcggccaccggtcggtccacctcttcaataatcgtccttcacttcagttgtgagttgtgacat

SEQ ID NO: 150044 - DNA, 380 bp, Zea Mays
gccatgatgaatggtataacctttctattcccacctaacaacaaacaaacttttaacctacatcttgtagtctatctcacccatatatatctctcatcttgacagattctatcttacccttggatattcaccttatacgactggttaccccaatctggacataaaacaaagattaagccctactaaagaatcttcagattataaccagctactagcttattcattccgcttattgaataaattcctttgcaaaactattaccatatgcttctaactttcatggtcaataccaggaaaggaaagattaccacacaacagcaaacaaaaatgaatcctccaaatcctccacctgtcgaaatcgatcaagtggttgctaccca

SEQ ID NO: 150045 - DNA, 285 bp, Zea Mays
gtaccccttttcccctccggccgccagcacatcctcgtgaaattggacgccaccaccgttggaggctataaattgccgcccccgtccgctccgctaggtaattgcgcaaccagtgaagcaacccgtgcctcaaatcctcccctagaactccccaatttgggatttcccccaaatccctcaagaacaacgagcagtttgacctcgatgtggccagcacgtctcaggtccgctcataccttctgccctcccgttttagcgttcttgtgtgcccctgatactccccaa

SEQ ID NO: 150046 - DNA, 738 bp, Zea Mays
gcagtttgcagtacagcgtgttcgctatcgggttaattttctggcatctccttcactctccaatataaatcaccaatgatttatgtcgggatatctgaagaacttttgttcatcactggccacagaaaaaacgagtggacttcttccactactactgatgtactacacctcgcctgtcatgttcaccggaagaaacgacagtaatacaccaacccatttgctggacttaactgaggtcagaaggtgaccatcgtgacactgctcctccatgtacatttggaaagagacttcaagtggttcttgaaacgaagtgacagtcagcggagaatttgtatcgagccaaaggatgcttcaaaccaagcataccagacacgccactcagattttgtctctagcattaccgtgtgctaatgcgggtcaagcagccagtcagcacttttacatggtcaaacgagcaaactgtttcctcttgatgccatgccagtgttgtattctgcacacatcagccgtcccgtttgaacggtgatctggttggtacagtataaaagaacaccacctctctcgccccctcctgggccttggcacctttgcagctgcacgcgcgcatgatgctgagccagaagagtctttttagaggcagagtatttgttgcagttcctgaggaaccgagggatgggaaatccatactgtcttgggttattgaccgtgtatctgacagcgcagagatcatcatcgtcc

SEQ ID NO: 150047 - DNA, 325 bp, Zea Mays
ggggcacccgtggtccggtgcaaaaaaagatatgtgtagtccggtcctataactgttaacgggttgtcaccacgatctttgttgcaaagcaataaattcagtgttgacttgacgatatgtctacgtaacaccgaacgccactagctgtccctgcagtagcaccttgcctttagcattaacgaaaaacaaaatccgtaaataatgaaataaagacagttttggtgaccatagttacacagcagatatactcatatccatgtcctatttatagagctaacggacgtatcaggcaggactgctgttgtcgcagcaaaacacaatgaca

SEQ ID NO: 150048 - DNA, 547 bp, Zea Mays
tgttccaaggtatgagaaaacaaaaggcaacatttttatttccagagaaagcaaagtgcaaagcgaagaaactcgcacatgtcctgaagcatatagcatcgaagccagattttctttagtgaacataacccagctagaaggtaaacagaacgtcatgttcaccaaaaaggcaaagaaaaagagccactagagatcctgccccaccgcaaaaaaaacacgcacatactctcagaatcaccaattgtgactgagtatagtcatggattaagtaacacaaattcagcaatgttgtgaaaagatgccaaacattacataaacatatataacaagttatactttttgacaaacaaaaaatgaacttggaggcatgtgaatgcatatattaaaatatctcaagagctatttttccatatcacctttcaggattaggtaatcgtaagctataccaaacaaaatgccactaaaaaggtgtgaatagcatgtatagctacatcagatactaagtgaaggaacagaacatatcttcattgacaatagcataatatgt

SEQ ID NO: 150049 - DNA, 408 bp, Zea Mays
catttgatcaccacttggtagagcaacaaagtttgatggatcaatattatctggctgatgatctaaccattcctcatcaccatgaagtgatcgaattagattgtggaagatggcagcagctataggtatctttacttggttttccagcgtgtggaacgtggcaactttgagaatggggaagcactttttaagcacccccaaagccctttccacatggttcctcataagtgtgtggcgatggttgaagagctccttcgggttctgtggtcttcgatgtccagccccaaattccttcaaggggtaccgaactcctcattatggagcaagaaaagatggagtatttgcatacccaccatcaactagatagaattttcctggaggtacttgaaaacccttgctcatagctaa

SEQ ID NO: 150050 - DNA, 357 bp, Zea Mays
gatggtatcccaatagaggtgtggaaatgccttggggatattgttatagtttggctaaccaagttgttcaaccatatttttcgatcaaacaagatgcccgatgagtggaggagtacattagtaccaattttcaagaacaagggagatattcgaagttgtaccaactatctagggattaagctcatgattcacactacataccaactattaagctcatgagccacactattaagcacaagatgcccgatgagaggaatgacacatatcaccgtgaaccaatttggattcatgcccataaggccataaggtcaaccatggaagcaattttcttaataagacaagtcatggagtagtata

SEQ ID NO: 150051 - DNA, 838 bp, Zea Mays
tttcttcgtctactttcacatggatccaaaatcaataagggatcacacccgaggcgtataggaacgaccaagacaacttcatgactccaccaggggatttcgtgactataagcactagattaaatggagcatatctttcgactcacaaggttgtttaacgcaaataaatactttttgaaaaaaagatgatacatccagcccagggttggccgatgtctaacaaattagggttgtctggaatcctacagtttattaagcacacccaactaagcaaaatgtccaatcacccccaaaaaaactagtctgatgggtggctctctcttttaagttggcttgctattttcaagttaaacaaggtgagatagttttgagacacacgtcgttacatacaccagcactctaagcgcttcatattaccttcccaggaaaaagcaaaaaactacatctctgcacattattctgcaaatttgcacctcgatttctccctaccgattggacaaatggaggcggatttacatgccagactacacggccaaacttaaatcaagacgcgctcagccttagcgactcgaaggagtgctcgagcagagcagtcccgccggccacctgccggatcaggtccttcaccgcctccacccagtcccgcctctgtgccctgctttcgcactggaactcgagcaggccatgcgccgtcctcagcccgaagtggcacgtctccggcgccgagctttgcgcggcgacgccctcgcgcgccggccacgccgggatgtcgtcgtagacgccgtagacgacgcctttcttcttcttggagaaggcgccgccgatgtgcttgctcttc

SEQ ID NO: 150052 - DNA, 433 bp, Zea Mays
ctgatgccgagaagaagaaggcagaagaagctgagaataagagaaaggctaaggccgaagaagctgagattaagagaaaggctgtagctgaagaagatgtgaagaagaaggctgatgccgagaagaaggttgaagcggaggagaaaatgatacaggttgcaatccagaaacagctgaaggacaacatcaaagctttgaaaaagccggtgctcgctgccaaggtaaagaagatgttccagttacaaatgtcaaaagaatatgctcagtagcgccaacagtacgaggataggttgaacatgcttcgtcaggaggccaaagctgagattgacagtttggagaagagcattgatggccaggcaggatccagctcatcatttgatgatatccagttccctgcggagtccgatgatgatatcaacaatttgacccaatc

SEQ ID NO: 150053 - DNA, 361 bp, Zea Mays
tctggagagaccattagccgaaaatttgaggaggtattgcattgtgtggtgggtatgtgtgaggaatatataaggccaattgatccaaacttttgtactacacaccctagaattaccaaggatcgtaggatgatgcctttttttcaaagattgcattggtgcaatagatggcactcacgttgcagcagtaccaccctcacatgaccaaattagatacattggtagaagtggaagggcaacccaaaatgtgcttgctgttgttgattttgacctacggttcacatattcatctattggacaacttggatcaatgcatgacacaagtgtattgtttaatgcattggagcgtgatgcagacttg

SEQ ID NO: 150054 - DNA, 699 bp, Zea Mays
gccgccggccactctcgccgccgctgggaatgcctactctagcacgtatgccacaaccttcaacgacaccgcctccatggccggcggcccagagacagtcgtgggaggcgcggacacgcaatcgtcccctgcaccggtgaccaagaagaaagaaccggtgcaggagccggcggtgcatgtcttcaactccatcccaacacagtccagcaccgggtcactgatattcccgccaccgccgccgccgtccatgccaccgcccaccggagccgcaaaggccaccaagaaggcggcgcctggcaccgccggcgacgccaaggcggcggagtatctcatggttgataagctggagttcctgtacgtcaacgtagtgcgcgccaggggcctctccggcactgacctcacgctcggaactgatccgtacgtggaggtccgagtgggcaactactctgcggtgacacgtcatctcgtcaggaatcatgaaccagagtggaaccaggtgttcgccttctccaaggatcagctgcaggcggacaacgtggagttgatcgtcaaggacaagaacctcatcgtgtgggacagcatcgtgggcaaagctgacctgagcatcgccgaggtcccaagcttggctcttcctaatcgtcctctggcccctcaatggtacaggctcaagggtgccaagggacaatggacaggcggcga

SEQ ID NO: 150055 - DNA, 518 bp, Zea Mays
gtgctccaagtgatgggaaaagtgggtgatggcagcggttgctgctccctttgctgctgccgtagggaggaaaaagaatgaaagaaaagagaagggattggtagctaaaaaccctaattatttaggatccaaaggcccagattagacaacacattctagacttgtccgtacctcaaatcatgtgtatgagtaataaaaaaatgcatctcgacgagatctacacaaccacggctcccgatcggtcatcagagcaatgaatcaaaaagtcattttttggtcaactccaagcattttagaaaacaaaacacagttaatgtttttatttggggtgttacactctacccctcaaaagaattcgtcatcgaattgtgtcgcttctacaaatcaaaacattcaccaattgtaaaacttagtcaaactctaaataggctcatataatagactagttgtcttgacgtgatcttctttcatgagaaaacctctaactcagattattttatcatagaaaacgacacacc

SEQ ID NO: 150056 - DNA, 421 bp, Zea Mays
cacactcttctactggcatttctccttttgaagcattatatggaacccgaccgcgacactttggcattactgactccactatggtcagttcttctaatcttgcttcttggctgagcagcaagcatctcatgtctgagttggttcgacaacatttagaacgtgccaagttgcgcatgaaaaggcaagctgacaagggacgttctgagcgcacgtttgtggtgggagattgggtttatttgaagctatagccatatgttcaagcttcagttgcattgcgttcacattagaaattatcattcaagttttttgggccctttcagattactcagaaggtgggtgaggttgcttacaagttgaagttaccagattccgcaaagatccatcctgtggtgcatgtgtctgagttcaagcgtgctctcgg

SEQ ID NO: 150057 - DNA, 434 bp, Zea Mays
cgggggcgcgcgtgcgggcgtgctctgggcgcgttcccgagtgcctgcccacgtcgaacatgtggtggtttggttctgccggtgttcaaaggcctgtttggtcgccttagcgtgtagatctcggcaaaaatcccgtgtaaggtctcttctcttcaccatatcctatcttttccatgtgagttccaagcaaagatatggtcggggttgagagatattgtggtgtgaagatggctctgtctgagttgtccagcccgagacaaaaactgtgtcaagtcgtgtcaaacgacttagggtagggttcaaatttttccaaggtgttctaggggtctttaggcgccattttgttatttgggccctatggttttgaggtttggaaaaaggtgaacatgttggatctttgaaagaggtctggttttgaaattgaggaaaatctg

SEQ ID NO: 150058 - DNA, 499 bp, Zea Mays
ctggtgttagtgtgttacgggcttacggccgtgttcatcttgctgctcgcctgctctccccgttccgtcctgcgaggaggagatccgcattccggagggaaacggcgaagggtctcactcgatttatactcgtgccgtactgctgctgctatcttctctatccccattactcgtgcaatggcgaggaggccgtagtgctaagtggagcagcggcaggcagcgcagcgcaggccaacgcggaattgctcgctgctgcggtccagtggcgtggcggcacgcgtgtcgcgttccatgcggcactagcgcggcccctgagatccatccgcagcagcaggcatgtcgcgcgcgttgtacaggggcgtgtcggggatcggcggcaagctggcggcggcggacgaggcgtacgcgtactacgaccccaaggagcccagcgagaacagcattggcggcggcttcggccggggcggcgcgcggaagcggcacctcgcggacgcggcgg

SEQ ID NO: 150059 - DNA, 1152 bp, Zea Mays
tttgttagatgctcaagagtaggttgaggtcttggatttatgcctttctgcaactacttccggtgtcttgcagagcatgtcacttattgacttcgtgtgcttctgtgtttgtggtttcacaagagcagaaaccataaaggaactattagcagcatgagcaattttcttccttgcttgctttccttttgcccagaacttagtgctgggtttgcctcttgtgcatcttcttgctgcccttactcctcttcttcaccttcctcttcattttccaattgtatcttcgtcaagtaggctgctatctctttcttaactacctcaggtgcttttgggcacttttccacatcaccaaaacccccagcaatgtgttgtttgaaccttttgattcctgcaggggcaatcttcttgcaaaaatgcattgaatggctagaatccaaacttccatcctaggtctgaagattgagcctttctcttaggattcttagccatatctgccatttccgtcggcagtgtagctatggtcttctctgctatggaagactcatctgcaagattagatgaagtcatggcattagctatgccaccactacaaggctcaagaatcaatacttgtaccacatcatgctgttgtcgttgatccacatcatgcaacatcatgagggccaattggccaagcactaatagtaataaatgctagactgctagacaattagaggctagagcagcaggctagaaacactgctgcaggtcaacattcaagtgaatcaacacaacgttgcttatcccaaagagagaacagagcagattagcagaggcgtaccatctgacgaggaactcatctctagggctctaggcgtcgtcggttgcgggctggggcccggcggcagtccctggcgacgacattctaggcgatagtccctgacggcgatgatctgaagacggtggtccaggcggtgcgacggtttggcagctggcggtgcggagacaagatgaaagaggaaagaggcactcatgtatcgatgagaatgagagaagagagataagagaagagtattctgaaccctagtgggccaaaaattctcaagagacggcctcaaagcccatgttattaccatcatccattcatcaacccatctgattgtgggctagttggca

SEQ ID NO: 150060 - DNA, 299 bp, Zea Mays
cggccatcctgtccacttgccgcgcggccggccgagtttatcctcaccggagctcgccgtttcactcaaccgtgccacgcctcaaagcattctccacgtcgtagggatcgtggaggatagtcagttacccctcctgcaccgttttctcctcgctcgccacgatacgcagagcacggtgaaatatccaagtcgtcgtgagctgatctccaacccaaattccctggccgccgctcacgatcactataaattgagtgcacccgtggctccatagggtaatcacacatctattgcaccaatcc

SEQ ID NO: 150061 - DNA, 619 bp, Zea Mays
tgcaggcacaatttaacaggagttcagggtttagtttgtaaatctgagggcttctgtataatgatcttaacactgactcgggtggcgggttgatttgagaaaagccgagggggtctttagaataaatgccaaggcgaaggggtatcctcacatgaaagccgcccgatcgccatccggcggcctagattagattcgcgaaagggtatgctctattctaatctggtccctacacccgagatccgatggtcgagattcctataatgcctgatctaatactggccttgcgatcacgatccaagggctatcctaccatctaatccacatcgtccaacagaatatcaacggcacacaaccatcctccacctctcgaccgcccagagcatggcgccgccgcccaggcaccacgacggacctcgccgtcgccggttcttcttccgctgcggcccacaatttaccaccccgactaatgcaacacgatgccaagattaaaacaaatcgagtttgtaagcttctaccagccgtgacgtcgaggtgagggcggtccacggagagacgcaatccgcggcggccttccttctccgatgagcaattgatgccgccacagtggtcgatccacccc

SEQ ID NO: 150062 - DNA, 765 bp, Zea Mays
tttgaatttcctaagggttgtggactgcagacacaaaactccagaagtccagggtctaaactgcgaaaaacagggcctgctggtattgattttataactttaggggacggcgggttctaattcataaaagtacggggacgttttagcaaagttgtcagccgaaggggtatggtccatcatgagccattggatcatgatccgatggccccggttttaaaacgctgcgatctattctggtgcgcacgatcgtgaatcaacggtcagatccaatcccaccaagcggtagtcccagtttaatccaagccgcccactagagaaccaacggcagaatccctatcttctctaccaacgctggcggcgcggcggcgaactgcgcacggagtaacgccgacaagcgactacaaggtgacctcgtccaagaaatcgagaacgggatgtggatgcacggagcgggtaccggcgaggtctgaccccgacgctccaagcttggcttctatcttgagtgggcgcaaaacaaagccaaggatacaacgaaccaactcaaggtgactcaccagcggtcgatgcaatttagcagacatctcgtcgtcgtgcggcttggcggcaacaatgaactccggcaaaccattccccctgccagtgcgcgagctcccatagcccccagcattcacccgtgaccaagaattccaggcggattcatagggagatgagcatggcgcgcagcagattccaaggctccctgcacccgcgtctctttctctgtat

SEQ ID NO: 150063 - DNA, 401 bp, Zea Mays
gaataagtctgcgaggttgtcacaagacttagtttgcatgaccttaatctcaccactctgttgaagttgatgagggtagaataacttgggggagatatgtttggtaacattgctcttgatataaccttgttgcatctgagcaacacaagcagcattatcttcatagataatagtgggtgattcaatggaatgaatcccacatgatgattgaatgtgattaatcacccttcgaagccggacacattcacgtgaagcttcatacaaggcaataatctctgaatgattagtggatgttgttactagagtttgcttggatgacttccaagaaatagcagttccaccattcagaaatacaaatccagtttgagaccttccattatgggggtctgaaagataaccag

SEQ ID NO: 150064 - DNA, 408 bp, Zea Mays
gcactggtacatgggatattgttcctttaccctcacatgttgttcctatcacatgtaaatgggtcttcaaagttaagacaaaatccgatggttccattgagaggtataaagttcgtcttgtggctcgtggtttccaacagactcaaggacttgattatgatgagacctatgcacctgttgcgcatatgactactgttcgaaccttgattgcaattgcagcctcatcttcttggactatctcccagatggatattaagaatgcttttctcaatggtgatctacatgaagaagtttatatgcatcctcctccgggggttgatactccatcagggcacgtttgtcatctccgttgcgcattgtatgggctgaaacaagctcctcgtgcttggtttgagagattcatctctg

SEQ ID NO: 150065 - DNA, 1757 bp, Zea Mays
ccagggaagaacagggtccaatgatgccttgaacctttacatcctttgaacagttaatttcaagaataccactgcagaggcaatttaaccatattaaaactcaccattccacaaaggtctgaatgcaaatgttagttgtttcgggatatgtgttggtcaaagtttcaaaaaattgaccaccaatatgcagtctgagaacatagaaatagtattacaagattctgcatcaaaaatattttcacaatatgccttctaggtaacataatttcatgaaaattactaggtaaagtatcatactggacagtgtcaatgtcctaagaaccttacatttgcatccatagggagtaggatgctaggatttaaactaagaagtcccaggtttaattatctattatgtgcatatgcaacatgggccagctgccttaggttggtccatccccctggcacaaccgtgacccaaattggtttctcaatgatattgtccacccatgaagagtactagttgttggagttgaacaggtttggggccggtttttttctatttcttatgcctcattttgaaccatggctggttatgttacatatatagcagtggtgaatccaccaggggtgccggaataggcctggcacccccaacggcccaaacacgttatactgaaagttcgttatactgaaatttcttcccgaagcctggtactggtagcttgcagccagtatattactccctccgttcatttttgagcaacgtatttgctcggaaaaagtattcgtaaatgatgtacgtatttgctctgactcttcacgcgaggcgctacacgcagtgcacgtccgttgagatgccccgtgaattaatgtgttgcttgtaacggccgtctgttgtgttgctctctgttctctcttccttttactactagttcaacattcatgcatgtgtgtacaaaagaaacaagaagctaccagatcatattcgtatatgtgtgcgtgcatgctactagtactatcacgaaaaagaaacaagaagctagcagaactagaagaagctaacagatcaatatctcaagggcaaaaactgcatgtgaacgtgcatttcctagaataagctaacggatcaatatctcaattctcaatgtgcagaactagcaggtcaaaccttacccgcatgcccagcagattgtaccccttctgaagctacagatccttctgatcttgcagaagccccttcatctccatcatgccatacaaggttgcagtcgggcttgtgggcaggaccatcccactcctcaataccatcccaatcgatgggagcgtttaggtccaaatcatctaatggtggctcaagattcaggttgagttctcgtcctgccatgaattcccttctacacatatgtcggggtatatatagagccatggaacgaagagcaatgagcaggtcgcgggcttttgaaatttaatcggtttggatcgagctggcacgggacgaaggattttatgatgaattttttgacctgtctcagatggaaatggcgccatagctggaaagatgatatttttggcacggcaatgggagcagaaacgacgcgccggattttgctgaggggtcgcaccctccgttggctaccaaacgggaaaaaataacggagtttgtttttggtaccccgcgctgacgagaagcccaaacgagcggcgttgttttaatgcagcggtacatatttgcatttggttccttggtctctgtgaagtgagcaaatatgttgctc

SEQ ID NO: 150066 - DNA, 796 bp, Zea Mays
gtgcccttggcaagcagcgcctcctgcgaccacaggctgataccgctcgacaacgtttcttacttcagttacaccacgttccagtcatcagccaccccgggcatctcccaggctctctgcctgcgttcttgcctactggactgctcctgcagagtcgttctttttcagaggagcctgagcttcggcgaagatggaatgagcttcggtggagacgctggtaactgcttgcttctatcagagcagaagctgatcatgtttgcagaaggctcggcaaacaatgtttcggcgctgttcagcatacaagacggacactcggcggaaaggaggaacattgttattattacttcaacagttgcaggtatttcagttgcatcagttttgggtttcgctgtcttatggaagaagtggagggaagaggaggagccgctgtttgacggcataccggggacaccgagccgtttcaccttccacgagctgaaggctgccacgggcaacttctccaccaagcttggagcgggcggcttcgggtcggtcttcagaggcaccataggcaagcaaaccgtcgctgtgaagcgcctagagggcgtcaatcagggaatggaggagttcttggcagaggtgaagacgatcggcaggatccatcagctgaacctggtcaggctggtaggattctgcgccgagaaatcgcacaggctcctcgtctacgagtacctgtccaacggctcgctggacacatggatcttcggcgcgagtttagtcttcagcctctcctggaaaaccaggcgcggtatcatgc

SEQ ID NO: 150067 - DNA, 725 bp, Zea Mays
gttcgcgttcggcgtcgtgctgctggaggccgtgaccgggcgcgagcccacggagggggagggcggcgtggacctggaggcctgggtgcgccgcgcgttcaaggaggagcggccgctgtcggaggtggtcgaccccacgctgctcggcgaggtgcacgccaagaagcaggtcctggccgtcttccacgtcgcgctcgggtgcacggagcccgaccccgagatgcgcccgcgcatgcgcgccgtcgccgagagcctcgaccggatcggctgacttccagcgcgacggcgtccggccggccgccggttactgatcatcaactacgtaggtgcaatccaacgcataaaagagactcgcagtcctgttcatgtagattagcgcagttaagcattgtggatttcagagacggtaaacgcaggtaaaaacaatcatcatccgctccatctgtgaatgacgaaggtgaatcactcgacgtagcaggctataggctagcagccgtgctaatattttgtggcaccccttgatccattccaaagcgaactctgttgggagttttctatcgttttgccactgcctacaactgtgcggcgctttgcccaaaagcttgcgatgcgttccttggggacctgggactctgggaggcagagagagcagacaggcttttggccctaggctgtgcggttcacctttggcttggtcgaattgactctgaaaagatgcgacaatg

SEQ ID NO: 150068 - DNA, 390 bp, Zea Mays
tgtgcaacctctgattgataagattcaggccatgctgtcaggatggaaggggaagttgatgtctaaagcagggcacgagatccttgtcaaaacaacgctctcctcgcaaccactttaccacctcatgttttcccagcccaaaaatacttgatcaagaaaatcgataaattacgccgtagtttccttttgaaaggggaggaaccgggaaacacttatggcaggctttgcctaataaattggaattccacttctaggcctaaatcccttgggggcctaggcattcttgacctcgagcattttgcatgggcactccatttacgatggttatggttttaatggaagaacaaagatcacgtctaggcagggctagatatcccttgttcaaaggtt

SEQ ID NO: 150069 - DNA, 585 bp, Zea Mays
catataaacagaacttagacttaatagaaaacagggaatcaacaagcacagttagtgcaccctcttaatacaccagggcataaactgctacatgtgactaaacattcatagcatcaaagacaagttcaatgaaacgaatggactccattcgattgtgtttttatataaatataaaaagacaaaggtatagtaatgatatactccatttagctgcaaataagtgatgttttacacattgatatcagtgacccaaatttttaattataatatatagttatgtaataaaaatgaactattatgacactaccttactattttaatgtgcttgtgtagttttcaaaccctcgaactcaacacataaaatgtaagttgttatcaaagaatagaatgaatgagttcagacaacccaaaaacgtcgttcaagtatttgtaaccgaaggagtaacagctaaccataaacaaatgaagcaactcagcactgaatacagaatgctaaatgtaaattgagtagtatttaatagcaattagtataactgcttgtaatagtaaaaattacaaacctaccttcctaaacatgacttagaa

SEQ ID NO: 150070 - DNA, 886 bp, Zea Mays
gaatttattgatgtactccctccactcaatttttttgatgtttgttagctcaaaattatttgagtgaccaacctgaaaaaaaaatagggacggagtactatgttactagaaatatcctgttgccatgtgccatcgcttgttaatcaagcccttgtatgaaaataattttacactaggtaaaattagagactggattgtttgaaaacatgaacaaacaatgttctgctctttatttatattcacattagaactttcgaggctgcaaacagtcatcattttgtagtaattttttaaaatgtacaatgtgaacactttgggtggaatagttaatttgtacattgcattttgggtttctttcatcatttgatcattatgttttcatactgtcggtgtttcgagtaagcaccggctagtaaacttgtgatgtgcgttttgggactcggatggtgtgcaagttggacacaagccactctagtcttctgtggcttgtgctaccggcactagattgctcgtattaggggttacaagttgaacgagtgaagaaagagttcccaagtctctggttcgttgtgcgtgtagtgtgtgttctcgatgtcctttttgtcggtccccactcctcccttttataccttaatggtagggctagttacaattgttcccttcccgatggagtaccacgaagaaaaataaaaaaaggaaggataggaagtaggaacgtcctatgtcgactagtgacgccttctttccccgtcgtttgttagtattgtagtttcatgcttttcgactcgtcctagtcaaggcgaccccatacgcgtgcgtgcgggtgcagtggttcgtgtcgtagtatgtccttggttctgatggggtccctactggagttggcagc

SEQ ID NO: 150071 - DNA, 762 bp, Zea Mays
agcatcatgtcatagaaaagaggtgtcgtgtactgattgtcctaccatgaataagtgccctgtatttgatttttaggtgaaaggatcttctcgtcatgtttttatgtgttggcttatatgtgcagcttttgtatcccatttgatggttctgcccaaactcaaagtcaaccactttgtctcctttcgtattggtcttctccatagcaatcagttatcagtatatgtgatgtgtaggctaattgctaatgtattgtaaaaaaatatagagtttagtctgacaaagtacctgtaattttaaattggcagtggtttgattcctatatttcacatgggttccctaagcttgtgaggtcggtgtgtttgttatagtgctagcaatattagccttgcttaataataccagactgtctgatttccatgtctaggtttgcttggtactggccgatttttgggctgttctttattttccttccctttgttctgcctccatctcctatagtatggttatctcgtttcatactttgcaaatatcagtattactgacactatccaaaccggatgattccttcttttctttcattgacatgtttttcatagtacagtactacatggtagatctagagggtatgttgttggataggtagttagaaaagaggaaaatctgtatgtataatattgtgtatcatgttcctttcaatttctttgatataaacctcaagttaagcatcgtttgttttcagtgctgaaatgagaaattgcaac

SEQ ID NO: 150072 - DNA, 622 bp, Zea Mays
ggagttttgcgagattgacaggcgttacagccaactgattaaccgagacaggagcggggcagatatagagagagagagagacgcccaccaccaaaccatgcacgatgatgacaagtgttgtgtgaccgaacgaacgcccagggcccagggagcagcgccagcaagcacccgtcgcgttcaatgatggctagctagctaccgctaccgctgctctggtggtccgcgcgctgccatggctgctggtggtgttatcgtcgtgctagtgctacaccacagcgcctatatagagccacaccgccaccgggagcgggagccctgctgacctgcctgtgcctcgcacgacaaggcacggcaccaacagaacggagcgtgcgagcgtgcgtgcatgccctccaggccacttggcatcgcggtgtgcacccgtgggagagcgacggcgaccccgaccgactttcccgaggccgtacgtggctggtccaagactccaaccaagtccaaaggatgatgcccctgccatgccgctacctcgagtggaaggaagggaagtgtggaacgaccgatgcatccatccaccaaagctctcgcacccacccacacccacccatcgacgacctcctgtcgg

SEQ ID NO: 150073 - DNA, 1054 bp, Zea Mays
tattcttgaagagttgaagttctgggtcggtctcttcgtataaggtggcagtgggcacagaagattgatgaagaacgtctttgggctggactgccagttcaggctccatgcaatgctcaggctttatttaaagttgctgtgcaaaccatggtgggcaatagtgcttcaactaagttgtgcttggaccgttggctccatggcaaggcaatagctgaatatgctcccaacatgattcagatcattccaagagagcagtgaagcaatgaacgaaggctcaagttttgcataacataagatgggtgtcggacatcaaggggctccaacagtagaggtcctggtggagtaccttataagttggtctaacccaccctcaacaaccaaggtagagctaaactcctgacaatctcacattaatatacacatgggccaaattcagaccgggtcagatgtcttccgcttttaataagctcacaacaggtgcacacaattttctcatttgagccaaatcaatttctcatacggaattaatcctttattgcacgtgtagacaatggattttatttggtttgattaaaataaggttgagccaagcccaattaaatacaacaaagatggctagctcattatcattggtatgggtgggcccatgtgcatgtgcaagttgtacattccatgcaactagttataaaaagagttgtcaacacaacccaagtatgtttctaaacagaggcaacatcatctagaattgctgcggtgagattaaagatttcccttgcccttatttggaactccctctctcaattcggaagcctactaatgctgagttgctgcccttaattgacaaagtagctgataaattgccggggtggaaagccacgctcatggcagagttggtcgtcttatgatggttaaggttgttctttcctctatcccagtctatcttatgctcaccatggacctccccaaatgggtaatcaacgcgatcgataaaaggagaagtttcctttggaaaggatacgaacatgcaaatgggtgcaactcgtctcctgggaca

SEQ ID NO: 150074 - DNA, 601 bp, Zea Mays
cgccgcgctcggcgtcgccgacgtccggacctacgggctcgacggaggcggcggcgccgccggcgagaatctcacgaagctgttcgacgacttcgaggcgctgcttgggacggtgaccgtgggggagctgctgccgtggctggcgtgggtcgacacgctgacgggcctacacgccaaagcggcgcgcacgtccgcggagatggacgccttcctcgagcgggtcattgcggaccaccgccagaggcgccgtgccggacgacaccgtgaaggtggtgatggcgatgatcaccgggacttcgtcgacgtgctcttggacgtgaacgaggcggagcacgatggcgacgacgctcgtggagtcctgtttgacgacgactccatcaagggcattatcttggtacacgacgcatatgcgcgcatacatgttcatgttcttaacaaccaacgactgctacgaatctgaagatggactgcgcgcgtgtacatacagaacatgttttccgccgccacggacacgacgtacacgacgctggtatgggccatggcggagctcatcaaccacccggacgagattcgcaggctccaggacgagatccgagcggcc

SEQ ID NO: 150075 - DNA, 1371 bp, Zea Mays
cgcggaaaccggactgaccacggtgccggtacgaccgtacgagtttcgaaggtttgtctcgtcctgctgcgggctgcgcggactagagaccgccaatttgcttccctccccgccgcgctactgtacatactctgcaagccaccgcagtccgcagcgcgccaccgcctggggcacgccacggtgccacggacggtgtcgccgtgctcgaacccgcgtcacggaatagcagcgtcctcacggctcacgctcccggacttcactcgcccgttctccgtgatatcgcgatctgatctcgcccagcgcagcagccagatccgccccatccagccaccagtttcgcggcggagggtggaggtggaggatgtcggcgacggtggaggagcagatggtggtgaaggcgatccgggaggagtgcccctgggagtcgctccccaagcgcctccagtccacgctccagaccaaggacgagtggcaccgcaggtactcacttctttgctcttgccctctatggatttgctctgctgcatttctgatgtaatcagctacgcttagttttgagctctgatagtcctagtactagtagacgccaacgctgtgtgaaatggctgctcttgtggcacttatttggatctcgttctcaactactccctatctaaaaaagtcaaaacgtctaataatccggaaccgagggagtagctgttttgaggtcctcaattttggccgggacagttgtagtcgtcgtctagcaggtcatacggtgattcattggctcgtttgattactaggtctcttggtgttactctttcctaacaaggacactgttggagtagccgaattgaactatgagcgccttgattggataattctgcgacttgaagtgacttaatgtttcctaacaagtgacttgaaagcaaagtttggttaattgtgcaaccttagttcttactgttttgttacatacattgcttgctagcctgctgggtgctggctactagtgatgttttactgcttgaaacataggtggcacaacatttcttaacaggaaagtagttctatagcgccaaacgatttccacctcggggaaatacaattaaagattcactgtttcataaaataccactgaaaatcaatccattctcgaaaataccactccgctaccttttgcagttaactggaaatcttcctctctattgtctaagtgaattgtcatttctacctacatcttccactcattctccatgcagcagcagcattgttggccacacgggtatgcttgtggtgcactctcactgccggccacggtcacgttgctttaccaggtattggcactcacatagggatcaaaacagttggtgaaatcccctcacccgg

SEQ ID NO: 150076 - DNA, 640 bp, Zea Mays
ctgggtgcttgcctggtagggtgctaaatcacagcggtcgtggttttgggagggttttgttgcttctgtgactgaggacgaataccggcgacacgggaggtgggggcgcgacggcggcgacttgctgccggtcgagcacggggctggcctcctgtaggcgaaccttctagtgtttccgtattctagccgttgagtgacgatgcccgaggtggtcgcccaaccggcggcatgcggccggcggcggcgtggcggtgccgtgaggtcaaggtggcggccgcggaggagacaggacggcgcgatcggcggtgctagtgcatttagcgttttcagggtcggggatatggggccgatcgacggtgagcgtggaaggggaatacagcagccagacgtagcagcagccatctgtggagggtgcgccgtggtagcaggtagtggtggcagaggccggaggccagtcatcggctgcagtgtcggagcgtgacgtgaaatcaagagggggcgacgaacgatttggcttctggatgtagaatcggagatagatcgaagcgcgtggcggcgtgtttccgtttgtgaaaatataggagtgctgtatggtcgatggcgtgcgcgacggtggagcagcacggcgtagtggcgggag

SEQ ID NO: 150077 - DNA, 307 bp, Zea Mays
gagtttttggatgtgcttgctatctgaacctcgctgccaccgcaccgcataagcttgctccccgctctactaggtgtctttttctggggtattctactgagcataagggttatcgctgtcttgatctatccacaaatcgggtcttaacatctcatcatgttgtctttgatgaggcttgcttccctttcgcagcctcgcccctcgaactaatgattttgattttttgtctgagatggatctgatgccttcacccatcgaaacacgtcttctacctgtaggtactcgttctgttgcccccgtggttgca

SEQ ID NO: 150078 - DNA, 847 bp, Zea Mays
ctgtggtcgttaaacatagaatccaactttgccttcacgacgaccacagtgattggcgtgaatacctacctctccccgcgcgtaaacagaaaagcaattgacacgatctacaacaaccccgcatgaatcgaagctcactcgatctccttcaagatttcctctcgttccctgtcaatagatcaatctacggggcaggggcggccacaatgtcttcctcctcccctcggtaattcctaaccagccaccacgtcttcctcctcccctctgtaattcctaggtcaaagggagcaggagcggccatcccccatcccttcccttccaggtcgcgaccatcttctcaccttgggaaccacattcacctccctaaaacaacatccccctcatcccaagtaaccctaatttatattttggaaccacacaaggcagttcgtccaagcaaaagggtgttcctgctgtaatctttagagaatatatgttaattagtaagattccacaagtttatatgttaattgtgaggcatagtggctgatctgtgagaagtgtatataaaaattacttgtatcaaatgggaattcagacaattgtggttgtggttgagatcaaaatatactacaatatttagtttaattagcgatgctgctagaacctcaccacatgtgcccctaatttatattttggaaccacacaaggtagttcgtccaagcaaaagggtgttcctactgtaatcttcagagaatatatgttaattagttagattccacaagtttatatgctaattgtgaggcatagtggctgatctgtgagaagtgtatacataaattacttgtatcaaatgagaattcagacc

SEQ ID NO: 150079 - DNA, 851 bp, Zea Mays
tgaagatgacgcgccacggaggtatcgtatgctggaaagtatgttgggaacagataatgtcccaaagcaagctgaaatgcttgctgttgaagaattgttgacagccatcggtgaggagccatattcagtgactgaggctctgaaggtcactgattggagaaaggcaatgttagaggagatggcatcaattgaagggaacaagacatggccactggttgatttacaaaaaggacatcgtgccagaggtctgaaatgggtgtataagctgaagcgtaacgaatcaggagctgtgatcaagcccaaagctagactggtagctaagggatatgtgcaacaacaaggtattgattttgaagaagtttttgctctagtggcaagaatggagactgtcagggtactattggcagtcgtagcacatcatgggtggccaatccatcacatggatgtgaaatcagtgttcttgaatggtgatttggctgaggaggtatatgtcacacaacctcctgggttcactgcaaaaggggaggaaggcaaggttctaaaattgcacaaagctctgtacggactgcgacaggctcctcgagcttggaatgtgaagctagacaaaagtttaggcaaacttggtttcacaagatgcaagactgatcatgcactatatactagaaagaaaggtggtcagagagttgttgttggagtatatgtagatgatttgttaattataggggaatcagacgcacagatcactaaattcaaggagatgaagaaggagtttgaaatgacagatttaggatcactgtcatattatcttgggattgaggtacgccaaacagctgaaggactggaattaaaat

SEQ ID NO: 150080 - DNA, 809 bp, Zea Mays
atggtgtgcaacctgacaggattatgtaatgtattgacaaatttaaaaataacaaaaactaaactttacacgagtggttaatacatggaacaaaaactgaaaatactaaccttaaaagaaaagctcactcttgtttctctagagtattttccatgaactgaggcaaatggggagtaggctcctgcttgtaaaaactggagaatgatacatgcgggtgtttgcagataagatggtccaaaatggccaataactgcacagaatatggtcaacacatgataggcaagttctaaattccatatctcccagacctgctgggctaaaatcatgaaatttcataatagcaaagatgtctagacccctataatttttgtattaccaagtttaggagaaaaagtgtctaccccaactttcttgggactaataggttttgctgttgttgttgcaagtttaggagaaaaagtcgtttcatagacgaaattgtcacccgattcagaactgggcaaactgaaatttcagcatccaagctaaatgttctctgtttttctttatcgattttcccaaccacacgacactttaatgctacccaatgtgtttagtgaggaggaaacttcacaagaaaaatcatacctatggattcatgccaacctctaggttattatttctcagaatttattcaggcttcattatcataatgcaaacaccccaggaagttatttttagacatattttctacatacaagcctcttttctcatacagtgtgcaaccatacaactttaaccaaattgactcccttgatcaatgagctcat

SEQ ID NO: 150081 - DNA, 311 bp, Zea Mays
ggaagattgcattcggtggatatggaccgagaatggagtgtactcttccaaatcagcttatcttgcacaattcaagggctcttacagtgctttcaaagcaaaaactatctggaaggcgcatgccgaagggaaacataagttctttgtgtggctgctcattcaagcaaagatcctcacagcagataaactaattcaaagaaattggccatgcaatcctgtgtgtgtcctttgcgatcaagagccggagactgcgactcacctttgcctcaagtgcccatttgctttggaagtgtgggagttagtcaggtcgt

SEQ ID NO: 150082 - DNA, 758 bp, Zea Mays
gcgaaagggtatctcccggatgtaatcagagccgcacgattccgatctaatggctacgacttaatgggacgcgatctgctttgagccataggatgccaatccaacgataccaatccaaacaccccaagtggtaagctaatcctggccacccattaatggatccgctgccccacgttgttcttcttcgacccgatcatcagagcggcggtgcgcgcacaacagacagtggagccgccccggcaaacaccgacccaggcgagcccgtgcacggaaacgagcacaaagagttgctacacaatgcgacatcatagagaaaacagatccagggattcctaccgggtcttgatgcagcggtggatctggccacagtgcaaggtggattcatgacgctccttaactccgatgagcaattctaattgcccctggccgtgatctcccccgaatacgcgacacgcggcactcacggttgtcgatgaagcccccaatccaaacaccaggaacgaaacgatgtcgaagatgaagcaccccaacggcggcaattcttcctccctcggcctctctgtaccccagatggatcgtgattctctctctcctcacgctgatgtcttcatggctcccataccaggtgcccgtacaaggtggatgagggcacgaccggttttatataaggctggagcagggcggtgtcgaagattgaatcacaatcgattccaagcgcagtttgcggaacagaatccccaagcggactccaatgttcg

SEQ ID NO: 150083 - DNA, 596 bp, Zea Mays
ggcccggtacggggaagcgcatagcctcggcttcggctcccgacccgacactccgtctcctctctcactcagtcactctctcgcgctcgcggtttcgctctcgccctcggcctctccgtctctcctcctgctctgctggctgctgctcaccgcctcaccgtcggccgtcgccgtagtctctgtcggatctacgtcgccgtagtctctgctctgcggcgcccctctccagactccggctctgcatcggttgatcggtgaaatccctaaccctaatcacaaatccctaaccctaatctccgctccggactctccctcccaccgtcccccgtcatcgtctccggctccgggctgcggcttggcagagataagtccctctccggctctccctctccagttggccatcccaatccctaaccctaaccctaatctcctcttctccggctgaccgactctccctctcgcgtcgtccgtcgtcgaccgtcgtgcactttaccctcgtctccggctccgggctccggcttggcaggtatgtcactcttcctcgcttcctcaccagttgaccattccaatccctaaccctaaccctcgctgcttgc

SEQ ID NO: 150084 - DNA, 466 bp, Zea Mays
tttagttcggcgaggtcacaagcctgtggtacaagttcaggtggcctggtcagagctaccagatgatgctactacttgtgaagatattgatgtgttgaagactcggtttccagaggctcttgattggggacaatcaattcatggcggcggggaagatgtcatggccggtccagcgacaggaggcgacatcgattggtttttgaattttcaacattctgtaaggtgttgggccgtgtgggccggatgatgtgtaagggcgtgaggcccatgtaagcgactgcttaaataattctgtgtgagagaccagggagctaacgaagaagagaaacagaactccacaaaccgtggcaaaccttgcgtcttctgtatctctgagaatcactggtgatcctcacgtcgacggcgacgcgacgtcggccacgggcatcacactaacccagcataatttgaatcagctgacatctga

SEQ ID NO: 150085 - DNA, 436 bp, Zea Mays
acccctctttaatcgttgtgtttcatccatgtccctcatttcagctcaagttccatgttaagccaacatgcatatatcactgaatttgacgttccacgatacattgttccattcagtagacaatatggtttcaaatgattctgtgtatacatgtgcgacgtgtaggcgatgagacgcgcgagcatgttctgcgtatacagtaatttagcatcttattcttgtcaaatggaacctgctatctcaattcttcgatcgcatctggatgttggaaccctgttggtaatagcttttgaagttgtgtttctctgtgtatctgaaactgctctacatgtctttttcattatatgaggaggatgctcgtcagattttgaagttgtgtttctctgtgtatctgaaactgctctacatgtcttttcattatatgaggaggatgctc

SEQ ID NO: 150086 - DNA, 298 bp, Zea Mays
gttccggaaagaacaagggatttggtggtgagaagtctaatcagggccaggcaaaaaggcaacggtttattctccgaccttctaatcagactcctccacgtgcaccatccttccctttcaagcagccgataattattcgtcctaataaagcccccactgccccaagtcagccgggtgccccaggcactcgattccctgctttgcccagctcttcaaccggatgtttcaattgtggcaagtctgggcatttcatcaaggactgcccatatcccaagcaaaatcaagctaataatcagca

SEQ ID NO: 150087 - DNA, 571 bp, Zea Mays
ataaacatcaaggtaagatatagaggtgataagggtaaatgtgataatgatgaaaagcataatccatggacagagtcaaggcaagactcaccaaatggcaaggcggagaaaacaatcaaggataagataagtgaggttccgacagaagagttgaagtaaaaattcattattgaaggaagttataaggaaacaacgagattaccacaggtgtgcaaaatgaaatgatcactcgtggatcattaataaacaagggtggtcaagaacatgtaagttgaaatgtcttaaacaaatactgggagtatgaagataagcatacataaagatataagagtatgcaatattccaaggatacaggcatgctaagacaagggaattgaaaaggccaaaggataacgacttaacgatggaataggaaggggtctcagaagacaagaagttcatggacatataaactggagtgtttaagtaggcacgagaaattcagatgtgggtatttaaaacaagagtattgaagaatctagggttacgagcatgccaataccaagagacaagaaattgccgaaagatagcg

SEQ ID NO: 150088 - DNA, 1234 bp, Zea Mays
acaacagatcacaaagttaatatggcaacatccttcactgtgaatgagattagcagtcagcagagaacatccggaaatagagtaaagtaggtcagaaacaataatgcccatttcaatcacttcctttttttccgtgtagttactcacgcttggataacacaatcagctatacacgccacgctttcacaatcgtccaaaaccccccaaatacattagctacactacacacaagaaaaagaaaaggttagaattcacggtttagcacatgccgcgtcgctgcacataggggactcgaggtttatggggactttacgagtaggtgctcatacagtttggtagggttgttgtgtataattgacgggttcgcgtcttccaggcgctcggcaagggatctgagcatggagaccagatggcgcgtgttcttcgtgcatcggcacactaggtctaagtattgcatggcctcctgaggaaggagaccagtcatgaagaaggggaagagcttcgagtgtgtcatctccattgtagatactgcctccgaagcccatgcagaactggacctgccagaaaccttcccctcctcccgctgcatccgtcttacttgttctagccgtgggagaaggtcgctctcttcttctttgaagtgctctttggtgcgatcctgccaatgttttgataatatcagagatacaccgaacgctaacagatagaggtataaatttacaagctcactgcctaggagttacaatggctcattgagtttattttataggacgcgtccagatatggagtgtttggtattatcagcagacctctttactaaatagctagtaggatattctatagacaaggttctcattatccatgtaagtatgcaccagtctacaatactatattaacaaaaaatatcaaaacaaacttcaaaggccgttaagagcctaaagtttcttagctggttcagagataaattgctggctaattttgcctgaccatttgttaacccatgctatcagtaaccagctcaaatcaacataagcccacacactgaatgcaatcaccaaatttacagtttgcaacaaggactgtctggtgaccacagagatgaagcatccatggaatgagagtgctcgctacgattgcaccatttatggtaaatggcctccggacctacgtcaaattcttttcaaaagcttggtaagaacatgtgagatagggccagctgtaatgagcacaaaat

SEQ ID NO: 150089 - DNA, 279 bp, Zea Mays
atgttgtcgtttcatccatggggggaactgtctcatcgttcgtagtattattcatattacgctgcacaaacaatggatgctaattgggtgctcggctctagtacactgcacagacaatgctaaatgggtgctaaatctggtgaatggcaggggcgacgctaacaatatgctacacagtccgctaagatgggcggctagtgaactgcagaggctcacttaccagagctgggcatgctggatccggtgaacgaacgccgctgagcacagatctgggaatgg

SEQ ID NO: 150090 - DNA, 277 bp, Zea Mays
tggagataactttctcagaacatatctattcatgtgtttttgctacaaggttttgggtcatacctttgtgggagcacaatgtgatcctgatatcctctgcgtctctaattggtcatagcatgctaacttatgggaggtataagaattaaggccatggaattgtgtgtcttgtgcaaactcatgcatatgagtgcattatatgtttttcgttatgattctctttgctgcagtgtcttgcttctctgaatttctagcttggttaaaagaatcacctcgt

SEQ ID NO: 150091 - DNA, 644 bp, Zea Mays
taatatcatgaaatggcattgctttgatcttttgcttatcagttggttgttcagttccctagattaaagacaaaagggtgtctactaggtggtgtttatgtggtaggttgtagtacacaagatgaattggttgactgtatcatattagaatctgatggatttgctcttattttaagtttgacgtttgccattagtattgaacatagttctactgtgcaagtacttcgcctgcattgcactattttatgcccattttcgggaacattgggatggctagaaaccaaggacacttcaattttgaatgtatgtgtgaattagaagttctgtattatgataggctactggctattgctatattttgtgaatggtatcgcgtttttaacaaatatttttttcacccattgcaggttcagtttctcaactttgttctttgcccacaataagtgaaatccatcatgattgatcttgggacaagtgggtggatggagttggtcttactatggagggtgctggccgcgggggagcgatgttgcttagctttgactttgcgatggcgcgctgatatgtttttagagctatggatcaatttgttggctttgaaggacaagatcagattattggctgataacttggctttgaatttg

SEQ ID NO: 150092 - DNA, 296 bp, Zea Mays
gtgtccctagccgtggcgggctcatcggcgatgatgggacggcagtagggaattacggcggtgccgtggaaaggctcggacacgcggcgggcacagagatggcacgacggcggcgagtggctttatctacggcggtgagcaaaggggaggggtgccgtggccgatcggggtggcttccagttcagcggtgacgacgatcttttgacgccgcgaagttatccacatacccgagcgcgaatcgtgacgccggcgacgtgaatcacggcggaaagccaccggcggtgggtttgctggcg

SEQ ID NO: 150093 - DNA, 698 bp, Zea Mays
atcaacattcaacagtaataaggcacaatattgccgtaaaaggcgcacatagtccctgggtaccgcgcaaggaaggaagaggacatattccaattgggattccccatatatgatcctactaagacttctcccttgtaatcctactagaacttctaacttgtaaccctattaggtctcctgtattgtaactgactagaaaacttgtccatatgtaatcgtactagaacttctaacttgtaatcttgttaggtctcctatattgtaactgattagaaaacttgtccatgtgtaatcctactaagacttctaccttgtaatctactagaacttctaacttgtaatcctattaggtgtcctacattgtaaccgactagaaaacgtgccccttggactatataaaggaggacatggctttctagataggcaacgggacacacaacaaaccttacatctcataatccaatgaacccagccatgaaccctgttcttcgtgactgcgtcgagctccacccccaggccggccatcacgtgcccatcacgtgcccggaccccttgtcttccctcaggctgtgatcacctccctggcaatcgagccccccaattttccctcccctcctattggccctgttggagcaccttccctagccctttccgcgcacccagtggcttcaccaccctctccctctctaccgactggg

SEQ ID NO: 150094 - DNA, 440 bp, Zea Mays
cgcagtgcgctgctatctggatggtaagctcatcaactctcgacctttctttgctttttggatgcttgtgtgctgggggccttaatttaaggcgaggtgcctgccatttggaaatttgatatgattatcgctcccttttggtggaactcgaggtgccttgtgtccccaaatcccataaaactctcgcctggttcttggcaattgacgagtgtcaaggctttagtgggagcattcggcccagctttacaaattagaacaggtgtcgtttcgctactcactggagagggatctggtttggtgttctgttccacccatcagctatttcacaggagacaggccaatcacatggtttctatttgcccggcactggatttttaatgccttaatttgtagtaagcctaggctacgttgtagtagtattgcatgacaaggacctcttg

SEQ ID NO: 150095 - DNA, 592 bp, Zea Mays
gaaaaaattaatgaatcaacaacacttacccacaacaaaaagtttcggatatttctgccgcatcagctcctcaagttcccacgtagcctcgcgctcagactgattagtccataagaccttgacatacttaattgatctctttctcaaaacacgctccgaggattccaagatacgcatcggacgacactccaaggccagatcctgctgcaccgcaattggttccatctcaatctgatggtctggatcccgcaagaacttcctcagcatagagacatgaaaaactgggtgtacccctgccatggaatccggcaattgcaagcgataagccaagctgcccacccgggccaagatagtgaacgatccaatatatctcgggctaagctttccaaagacaccgaaccgaacaactcctttagtgggtgataccctgagaaggacttggtcacccactgcaaattccaaatcccgcctcctcacatctgcataactcttcttacggctctgaggggccaaaatattctgacgaatttcccaaaccttttcagaagtctgctgtacccaatcaggaccaaccagggatctctctcccaag

SEQ ID NO: 150096 - DNA, 437 bp, Zea Mays
cagtttgaactgggctagatgaggcgggctcttggatccgtagggctctatgttggtcgaagatgaccaagtaggcctcaatcaacttctagatgtgctcatccttagcttgctttagagcttcaacacaatgacttcacgactttccaaggcagctgcacagacctaagctatggtgatatccacttggagttgatggttgcgcctttcttcatattctgctcaggcaatcatctaaaagtggtaccgagccaagagatcatactacacatctagggtaaactagtatgctgtgaggtacacggatgtagggttgtcgtctagcagtagctgcccttctaaggcacgcaccctggccatctaaatgagacaatctctttgaaagggcgcaaagaatctgagcggggtgtcagccacttcctcttcataaatttgac

SEQ ID NO: 150097 - DNA, 315 bp, Zea Mays
ctttcacgctgaatttagaagaagctctatcatcaaacaattttttattgagaaatatttttccaaactttttcgagcagttctctaaaataaaccatggagctgagagttaaaaaagcagcttcttctcatttagttgatgcatggaatcctatatgtgtcactgagtttactttaaagagttacagagaatcaatctcttatgatcaatgaatcaccatacacaaagaacacaagcaggaagagctcaaccaatctgtctcttgctagctgctagggctattgtttccattttgcagactttgtgattcgtaa

SEQ ID NO: 150098 - DNA, 585 bp, Zea Mays
ttgagagcaatctaatgcatatcagttagaaagtttgcgttgtgtgacactaggtggtctttgtgaccaaggaattcttgtcactcttggtgattgttgtcacctagctcgcttgatgcttgtgtaagaccatgaaaaatattttgttgattgtcgtggtcttcggtcattggctactgtgaggggctttgtactcatccccacaagagatttgcgaagagcaactatagtgaaatcatttgtgttttagagaggttcgtggtgttgtgccatctcctatgtaaagtattgctcctaggatccaccttaatgcggtcgtaggttgccggcaaataattgaacctcaagggaaaatgctttgtgttactcactctcattggttcactttctcaacacttgtgcttgtagtgttgcttgcttagtactagcttgtgttgctttgtttgcttacttcgtagcttagttttagtgaatagtgtagcttgattgttctctttactagttcactagtttttaggtggtaactctagttgcttgtgtggttgtatgctgaactacttgttctttcaactagacttgtatagg

SEQ ID NO: 150099 - DNA, 384 bp, Zea Mays
cagaaaggcccagtgcaattgtatgaacatggatgcgagagttaccaccctgtgtgatgaattgtgcaagctaaacctggaagttgtttcttcaggtgttttaaattatatctcggtggagcccacactgcaagagcaaatagtcaaagcacagattgaagacaagggtgttcaggttatcaaggaaatgatcaagcagaaggcagagaaatacaagtgcttccgtcaggacagcaagggaattctatggtttggagatcgattggttgttcctaaggaccccgagctcagaaagaagatattggatgaagctcacctttcaaagttctccatgcaccctggcagcaacaagatgtaccatgatctcagatcattatactggtg

SEQ ID NO: 150100 - DNA, 698 bp, Zea Mays
cgcggccgcggaggcgacgtccccatctccgcccccctcgctgccaacgcaaacgccttcctctaaaccaggacccccggctttgggcggcatcgcgaacacgaggtcttggtcgcagtactacggcagcggcttctccatccgcgtgcctccgtccttcgacgacatcctcgagcccgatgtaattaccgacctgaactgtttcttcactcctacattccatcgtcctcctgcggttagggttgctgggcgtcgcgggggtgcggaggagctcagtgtttggtttcgaatttagtgaatgctgactcattcagtccttccgcgtctcaggactacaacgccgggatgacatactacggtgacaaggccaagccccgggcgtacgcggcccgctttgcatctccagataggtaggtaggtaaggcctcactctactccatcaactgcggccattccagttctgtactgtacatcaatttgtgattacatttgtctcactttcacaaggatgctgtaggaaatgaattttggtggtgacgtgttgcacatgctaaatgcggagtgctctgctcctttgtttgatgtagggatgagctcatcagtgtggtgattaagccgtcaaatcagctcaaaatcacattcctagaggttataagagacttgccattttattgtttttgccagacatatgtaatccc

SEQ ID NO: 150101 - DNA, 491 bp, Zea Mays
tgtcagtgcgccaggttttctgcgcagtcagtcgtcgttttctgcgcatttactgtgcggttcggttgaaccggttgaaccagttttagtcagtttgaccagccgccgcctccccttttctctcctctccttccctctttctctctttactctttcatttgttacagtcgtcgatgccttcacccttctctctccctctctcaaaacccacactccaaatccctcccaagccatcaaatctttgtggagtttgttggagacttgttcccctcggactcctccatcatctcctcactcttcgttgggattttcgtggtcgattcgtcagatcgaggtattgactcgttttccccattttagactcgattcaacaccgttcttgattatcttaagtaccttttcaaggatattgtgtagtttaggtgcttggcacacttaaactgttttcattgtctcgaacattgtttgagttaagtagtttggtattgttc

SEQ ID NO: 150102 - DNA, 488 bp, Zea Mays
ctctggctggctcgactgctcggtgatctcctcgggagagacactggagcgatggaactcagggtggacagccagtctgctctagtattggccaagaaccccgtgttccatgaacggagcaagcacatccggctgagataccacttcatctgagactgcttggcagaagggagcatcaaggcgcgctacatcagcaccaatgatcagcttgcagacctgctcaccaagccccttaggaagatcaagtttgttgagctttgctctaggtctgggatggtccaactttcccacaagacgacgcccaagacttagggggagaatgatggaataagtcttaagcatctagaggacaacagtcgtttttgattgtcctctatagtcctttagcatctagaggacagccaaattgtcctctgtagtctctttagcatctagaggacaacagtcgctttttgactgtcctctgtagtccctttagcatctagagg

SEQ ID NO: 150103 - DNA, 418 bp, Zea Mays
tgccgtcaaaaacatcaccttctctacaaagttcttgctctgggttgttctctcgggtacagtctcatctacagccaagtagtacttctgagttttcctagtgtgataaaaccatttctcatcaatgtgcacaatgttgtacattccattaaaacttggttcatgtggcacactagatggttcgagcattgagagacaaaaccttactctagcctttttgttttcttcattcaatgtaggcttgattgcatttgagtgacgtctaaactccccctctttgaatctcctatgaagtgttgacagtgacatatcgagcgcattggataaatccttgaaagttgttctgttttccagtgctattgttttgattatttctgggtcaaatgacttttttaggaccacattttttggttttttg

SEQ ID NO: 150104 - DNA, 482 bp, Zea Mays
cggaatccaccaagatacaacctttggaggtcgaaaaaatgtcaaaggcaagtttagaaactgaaaaagcaaaaataacagagccgattctgactgaggaaattggcactgccacccccgaagcatcttccaaaatacatgattatattgtgcgacatgcttcgggggaagaaactatctgaagaagagatttttgaagccaatcactatgcccgagaactgaagtatccgaggggggctgtagtgttcaatgggacatacgaagatgatttcctgtactgcctcccagacaataaagaattactcgtgtgccgggaaatggctagaagcatggggtttccgaaactcgaagctggcctttgcgccatgacgaaggacgatcttgcggatagcctggcatacaatagtctaaaggtacaaaaattgtgaattttgaagtttatgaattttgaattagttttttgctcttatgttaactcatt

SEQ ID NO: 150105 - DNA, 1186 bp, Zea Mays
gggccattgacttcagcttatccttcctccccagccgccaccgtgttcgtggacctcgcaccatgtgatcccttgcaccactggtacgttcagatccccaccatccccaacgaccacttgtcctccttcgtcgtgtcataccaagacgatgttgatctggagcatttcctcgcgccggatcccggagaggcgaaggacgagtcaacgtccagatgatttgtagtgcacggtcgtggtacggcgtcgtgttctttgtcttctcctcggccacctggaactggtctcgtgtcgccttcgttagctcccactctgcctagagatcaaagatcccaaggcgactcctacggctgcttctgctaggtgaacgcttgggaccgccacatgctcgtgcttgacccgcgtagcatggagctgtcgctggtggagctcgtgcttatccagaccactcgacacagagagctagccgttgtcgatgcaggggagcacatgctttgtgtggtagctctcggtattgttatctttaatgcacaggagcacatagttagatatattccattgttgcctttaaagtgagagcatctatgatatctgaaagtgccacaattttagcactaatatttaactattcatgattcgtgatttacctccacttggttttgtaggtgttgcacatagttgataaactcatctaaagtccagggctttccagtaacctgtctaaataggcatatttgttccttctcaaagttactacttaaatgacctacgacatgatggatgcttatgttggttaaaatgagtattaacatgatggcctagagtgacctgatgttggttaaaacatgatggatgctggtgtgtttgaatgttatagttcaccctgcttgtcaatgagtcaccatcactgtttctagctgaattatttttattcaaccatcgatttatgttgcatttggttggttcttgcaggccaaatgtgaattgtctatcaagaagggttaacataacatagaaatgtaattagctggatcttcacgacgcgttactaggtccggtaagtcctccaatgtccctcccgagctaggagcgtgtatcattgtcatgtgcccatgctgttaagtaatcatatctttactatcattagctcgcagagacaagttactagattgggtggctatgatcggta

SEQ ID NO: 150106 - DNA, 797 bp, Zea Mays
tcctaacaagcatccacttccatccttactaaatgttatggcacgacagtacgagtgttagctggaacctactaaaaaaacttgctcaaactcctacctatatatttagctttgaagatagattgacaacatgttttcaatgactctgatgtagacctgcactcctgcagatacacagtgttgatactgctactggtaattgctgcagtccttgagggcctccagggatttatgagaactaacttgtttgacttaaaaaaaagggttccactgacatccatgcctcatgcacattagttgagatgaagttgcccagcgtacattaggcaggaactgaaggataaggctcaattatatttctgaaaaaaaagaagtgactgcatgccacaattggtgttcagttaattgcatctgttgctgattactgtgaagcacacaataatttatatgctcatgcttcttttgactcttgagaatggaaatgccatgtgtttgctgttgtaattgccaattaaaaaaacatttgctagatgtacgctttgaacatttatctctcttacatatactaatctattcatctattgatgcgacttctgtccactaaaaatgcatgtactttgattaactgttaatcaaaacttacaaaatttgatccttccaaatcttaattagatagtacttttagctgctgttgagaaagaatgtgaagactgaagagagaatcagtatttgcaccccattttccttcatgtctgatcatataactgtataagtgacccctctagtagttttttatg

SEQ ID NO: 150107 - DNA, 285 bp, Zea Mays
ccatttggcgctaacaattgcttcctgaactgtcctgcaattgattacccgcttcggaattgcgccaatcagccttggaaacagatctgcaattctttttccattaagccatttatccttccagaatttggtattgtttccattccccacttcagtggtcactacttcagaaaagaaagctctagccttttttgggacttgtatttgaagtccagaccaggggcgagagtggtcagtcttttgtaaccaaagccaccttagtcgaagtgcccaacataattctgg

SEQ ID NO: 150108 - DNA, 505 bp, Zea Mays
aaacgctgacgtggctcgatgtgatttggctattgtttttaaaacactaacgtcacccctaatcactcggtcgttgcctctaagacgccgacatggcttgaagtgactcggctgttacctctataacgccaacgtcgccaaaaaccgttcggctattacccccgaaggcaccagcaacaagccagacagttctttttccacgaaaatgcagacagaattaaagtgcaacacatcaatggcaagtcattgctcaagagttatttctaagaacaacggccgcattggatacaaacacaaattgtcggtcagctataaagaagcaaggcaaatacaaaggatgtgcacaagatcaagcccgaagttcactacattatataaggggggaatttcttacacaaagcaaaaggccgactcattatgagccgggtttcttcccccttttcgacaaattacattactacattacactactactacactacttacactacactatactactaac

SEQ ID NO: 150109 - DNA, 1104 bp, Zea Mays
gccagtctccccgcgcgtgctcgttactctgcagacgggacccagttctcagcttcttcctcaacagaacaccgcgaagaccgccgcgtgctcacccgcgattaccggggatttctgctggtcggattccccttcttcaatctagctcgcgcgcaccccgaacagactccgcatcgcaggcccaggcgattggatcagccgttttcccccctggtcggacttcatctccttctctgtgttcgcgagcatcggctggaatcccaacaaattcctccgacatctccctgaatttagccgccatgctcggaatcgacaacagcagcgcctgcccatatatatccggttgctgcggatcccttgaacccgaagttccagccatgaatacctgcacgcgcgccgctcccctggccatataaactccgttcctcgttggagtcttcgtcgccgtgacccctgcctctccacccctggacatcaacgtcgaaccaagcaccaaagccgtgatggcagtactgccatgggcaccaccaagagagcagcgagagagataaggagaggtctgtcgtaatcgtctcgcaccaatgctgtcaatgggatcaccaagtgcagcctgttgtgttcgcgtttgtacgtggaggagttctgcagcacaatcaaaccatgggggatcggagatgacggaattgctcatcgtagctaaatcgccaccgccaagccgctatccatcgccgccagcaatccatgtcgtctctagacaccggtaagcattccctctggttttgccatgctgcccgcttcatgcagcactgtccggagttttgggtagagcactagagaaactggtatgctctgcgcaggcgatggacctccatgggggagcctcggcgcatgcccctgctagcgtgtcgttcccagcccctgcacctgtagaggcccggccgtcctttcctagatcaatgagactctctacgatgcctccctccccatggatgttttgtgcgttgtggcttagtgcccaggatggaagcaatagataagccacatttgatccaagctctccatcctctacgactgcaatgtgtgtgaccatccatatatcgagtc

SEQ ID NO: 150110 - DNA, 1096 bp, Zea Mays
gaggtattcctcctaaggatgataacaaggaactctagacttaaaacacaagaaaatgactagaaatgaggctagtgctcaagtgaataagatgcatttattttcaaactgttaagtaaaactgtttcttgtagcacggtagtacctttacattcccagttgtcacacaagacatcaaagcctgcaccattctttcaagccacacaggatctccataaaaaactgaatcactgttactaaaatcttaaaattgtgagttagagtaaccagtaataagaatagtcatagtcactgatccatacagaatgttctgctaccttgggtcatttattgtgccggcgtggtaattgaatctgataaatcttgaaagataaccaagagctctaacagcgtttgattttacctgaatgaaaatcaaacaacttttttcaccacacatacaagcaggtttgcttagtttacttgtttcacaatgaacatcgttctccaactatctctgtatctgtattccttgtggataaaaccaacagtctgctatggatgacggcgaacaaacaaaaacaagataaataaaggcaacatatctagtgtaaaataatgatgctaacatcaaatcttatctatcggatccaccgttgagtgcaatcccacctgaggacagtatccttttctgcgaaaatgtagggggggggtctttagaaaatagtctgaaaggaggtaggattgcactcacccgattctgttagcatgttaacacactaatcctttttacactatatatgttgccatacataaattggctaaagcaagcttactttttcactatctttggccagacgcaaagcaacttcaaccaaaagagatatgcttgatttgctcaatacacctacacctgacaaaaagataataaatacataagcatgctctattggaatatacactggcactgtaaccatcaacatgaaatatgtacctgcatagggatctgtatgcacttccagtgctctaaaacgaatacaagaacagagatttgccaaagcccatgcagcggtgacacgaacctaatattaacatttacaggtaagtactacctccg

SEQ ID NO: 150111 - DNA, 464 bp, Zea Mays
gtatttcgggtttagagctttgggctcgggttttaactgagcgcagaaacggactggcttcgacgtggagacgcgagccatctttcttgcaggtcgcgtgtttccgtagtgggccacataaatgaatactttcaaaggaggccaaatgctgctggcgtgcctgagttcagcactatacagaaggtaatcattgctctacacatgcttgcctatggtgggactgtcgataggttggacgagtatttcacatgagccagagcacaatacttgagacattaagtgagatcacccgaatagtggttagtgtgtacgagtctgcttacctctgagcaccaaatgcagacgatatagcaaagctactagctaaggctaacgagtggaggttctcgagtatgttaggaagcattgactgtatgcattgggagtgggagaagtgtcccaccgcttggcatggccaatacaga

SEQ ID NO: 150112 - DNA, 373 bp, Zea Mays
catgctcatcttgcttgttgcggaatacctatttggtactgtcggtaccctgaatcaggggtaccccttactacagtatgaagacgcggtgcccgtgtggcgatctctagccgcgcggtgaacagcacccgaccccaccatgtggacggctcaaggggcgccacgtgaccagaaaagatgatatatctcaggatgcaatcagttggaccggacctccacgaggatgtgccggacccctgtacgcacaacccggacccccgaatacgatccgggacccccaagtagcgtgatgggtcccttggatggagtccagatccccccgagtaaggtccagaccacccataacgaggtcctgggacagggatacccaggc

SEQ ID NO: 150113 - DNA, 752 bp, Zea Mays
cccaggagatccgctcgtagcatgccaaacggaagggagcgattccttcgtgctgggaaatcgcaactgacccgagcgccagctaggagttagttgaagccgacgccggagtataagaccccgagccatccttgcgcacctcgtttggcgccgttcaccgtgcctattgccatacacgtcggaacaggagcttgtgtcgccctagttttcttccttctactcttctcgatgtccgcaaagaagaatttgagattcgccgacgtgtggtggctgcgtacgctcgtactccgacactcgtgggtcgccggagtttggtgaatttctcaccgaaatctagtggagccgtgaagccacctatcggtgtgaaccggatccctcacggcaccatcgacggtaggttttcgttccgtcaaattaccatcgtttccgcaccgtgtagaacattttatcgtgggggagagtcgtccaagcgggttggccgcacttcggcgggcgcgccaccgtgttgtgtcccggtccgccgtggctgtgtgataggttgaagaatgggtgtgggccattgatgttaggaggagcggccaggattagaagttggggccagatcctatctccaccgttggatctgctaccgatgcgtatgattagatggtagggtaaccattcgatgtgtttagcctgagacgctgatcaacggatcgacggtccaatacactcggtgttgttcggccctatatcctaaatctaacgaccac

SEQ ID NO: 150114 - DNA, 1250 bp, Zea Mays
gcggacggaggctcgacgttcggaatcatcatggttggggaaattggttagtaaaggaccatttcctttgccaatatcgccatgcatcgacaagccattcatgcaggaggatggcggcaagaatgtcgaaccagcacggtccaatgtgtttgatgagaaattggcggccttgcgtgcctatcggcgtgctcaaggcctatgtcaacaatgtgcagagaaatggtcgcatgaccatcaatgttctcagaccattcagtttcatgtcctataagaagtgttggatatctgtacttcagatcaagtggatagttgttcgttgcagtccactgaagaatcgctgactgaacaattatttgtggctgtgtcaattgtagtagttcaaggtgttgaagctgttcataccatgaagttccaagggttgattcaaggccttgaggtgttaattttgatagactcaggcagctcccattcattcttatatactcgtttagctacgaggttgtttggagtaactaacctgccccagtcttcaagggtgcgtgtggcagatgaaagttgtatgtcttgtactcgttagttaattggagttgtttggtctgtccaacattgtgaatttgtcacggatttttgtattctagacttgtccagttatgatatgattgtgggcttggactggttgtcattgcacagtcccatgaagattcactagttgcacaaatggatggtcatttcttccaacaattcttcagtcctgctacatggtctctctgctgcattgatgctaggttctatggtcgaagttgccgtggttgattcagtcagtccttcttttcaggatgctggtttacctgaaccgcaggtgtccttactgacagaattgcttcagtttttgctgctcccactggtttaccaccgtctcgggagtttgatcactccattcccttgttggctggtgctaccccagttcatgtgaggccctacaggtaccctccagccatcaaagacgaaatagaacatcaagttttagtaatgctccagtcgggtattatcaagccaagtaccagctcattttcatcttttgtgttgttggtcaagaagaaggacaacacttggcggtttggtgtcgagttccatcatttgaacgccattacagtgaagtctgtgttcccagtgccagtgattgaggagttgttggacgaattgggtcaagctgcatggttttcaagtttggatctaactgctggttacca

SEQ ID NO: 150115 - DNA, 605 bp, Zea Mays
tagtgtatatcttagtgtatagaaaaaaactttgtatagaaaagccaaagtgtcttcataatttagaacagaggtagtaaataggtatgaagaaaagctaaaaacgatctataatttggaacagagggactaatacatagtcaccgttagaatgtcgatggtaattactggttgagagctgaactgatagtaccaaacattctaaagattgtgaagtttaacatatatttaaagtggaaatgtatcatttagaaaatgaggaaactaataaatggacaaggtatagaagggtattatgtatcttgtaactgaaaaactattcagttttggctagttccaagttgtagaataccatgcataggattcttgccatactgatagtacaaaaacaagcacccatgttgcctatgccagccacataacattcatctgtcaaaagataaatcatcattgcattatacttgtttttggtttccatgatggagtaattagtgatactactttccttgaaaaacaaaaggttatatctttttttatttgactgaacattagtttgtatatcaaatccatacgggaaaattacagttctaactttgttgctataa

SEQ ID NO: 150116 - DNA, 499 bp, Zea Mays
tcttcgtctgttgtctgcataacttttctgtcgactctgagcttcaagtaacctcttgcggatcagggcaactttctcttcggcttctttaacaaagtcgggtccttctagtgtcctttcccctacattggaccacattaggggggtctggcattttcttccatacaatgcctcgaacggtgacattttgatgctggcctgatggctgttgttgtatgagaattcggcgtacggcaagctggactcccaatccctgtcgaacgttagcacacaggctcttagtaaatcttcgaggatcttgttgactctttccgtttgaccatctgactgggggtgataagcggtgctgaaatctaacttggtgcccatcgcttgctggaggcctttccaaaattttgaggtgaactgcatccctctttctgacactatcttctgtggaatgccatggagcctgactatctccttaagatatatccgggcaagggcggctcctccaaaa

SEQ ID NO: 150117 - DNA, 328 bp, Zea Mays
gtacacctacaggtgtggcaatcattctctacatggtatcaagctatttctttcctaaactcaatccattgtcatgtagatttcgcccctcatctcccaaccctagctcgtgccgccatggttgcagccaccgcctccaacaccaactcctcctcgacatcttttagtgcttcctcctccgtcgagctgctgtccaccaccaccgcagccatcctcaatcccttatgtacaatcaacatgaagactcatgcctcaatgacgttgcagatcgcacgccctaatttccatcgttggaacatcttcttccgagccatggcgggcaagtttg

SEQ ID NO: 150118 - DNA, 1619 bp, Zea Mays
cagaaagtgatatttataatgcagcgagagaaaaaaagtgatacctcaatttactgatactggaaaaaaaaactatgacatgtcttaccgttgtacttttatgaactggtgggccgagtgatagagaacacaatgctgcaacagcaagagcattcttctgctccctaagtaatcgcttgtcagcagcatgctgcctccatttcctgaaacaccacaataggaatcaagcttttataagttaccacccaagttctactgatgggagcataaaggaatagaacaagtataaaagaacctcaatattgctttcaggttttcatcagaaattagtttctttgcgggcataacaattggtaaccaatcatcatttgtgctgttactaatactatggtcctcatattcctcatgataggacaaaggggagctaataggcaatccagctccaataaccagacattcatgatctggtggagttccctcatccatatctgcaccgatgccagaaacatgtgccctgaagtcatcttccgctccatacatactggagtaatttaaagacatgctatctgcaagaggatgtgaaataattggttctgccagagcattggcgttttgcgtgttagcttgtgaccacagtatgtctgtttgcatctctaccttctgagggatctcagcaacaccactatcctggtcttcagctataaggtcattaaccaattttgtcttggcttcagcttttggtgaagctacttttggtgtttttgacagtatgtccctcttgccagtacgtggagaaacagcagtaaggacagatgaaaacctgtcttttctaccttcagttggggagagaggctttggatgtgttgaactgaatagtttactggcagctcttggagagaaaggatctgaaaacaatgggctaatctgtctgtcaggagtgattgaaataggcccaggaaatgatggatccaaatccattctgccatcaggaggaatcgcaggagcattctgtggtagaaatagatctcttttgccagcaactggttgaccagtatatggaaagacagtcttttctttgctagttggagcacaatctggcccagaagaaacatcatcaacgaccctctgcgattttttagaatgcacaagctgtgaacagccagatgggaaatcactttcactgttaagaaaaggtccttctttgactaagtacagttcttcatactgcctcaacccaaaaccatggtattctaatagattttcaacatcctcgcccttgaaagagaaaatgaaggcatataaggatttcacaagttcccagttcagaattagtttctgtccaaaggaagaaaacatactaacctccatagcaagccacaccacaacctgcgaaatagggatgccttggccattctgaagaccactgtgcaaggaagcgagtgcttgcctccttagctgggaagagagttcgcttgttaaatttacaaaaaaaaggtgcacttgaaattgaacagcagcctactacatgaaagtacaccgaagtagtgatttagaagtactgaaagacactgctatcacaaaatgatctaatgctaataactaaataatgtgtaacagca

SEQ ID NO: 150119 - DNA, 581 bp, Zea Mays
gccggatctcttgtcaccggtggcgagcatcccctctccctggtgcactaaccgtagttgagctccgttattctctttccttatgctgcgatgtatccgtctgctagtttgtaaccgataaggacggggcctgggaatcatcggtattttggtggagatcggcggcgggtatggcgcgtccaccgtgggggcggtcagttaagccagtcacggcgccccggtggccctcggttgctctggtgctgtctagcggagagagaatatgggaaacgagaggtggaagaaggcccttggccgtgggatttgcaagcagcgggcaggattggtctgtgacctcagtcaatctgggccatcaaacttatgtggacggttaggattcgcttacagcataacctttcctgcggatcgatctcggccaccggttgtgtatcgaacggctagaacctgatttgtgtagatcaccacgctaaatcgcctgtgtctaaggaatcattcagtatagtccctagacttttaggtattaatgcgcgcagtcccgagggttataaaaacacggaaataattatgaaaattgatttttc

SEQ ID NO: 150120 - DNA, 363 bp, Zea Mays
gccttggtgccatgaaaaattttgagaaaatttgatccaaagtcgggctgtcaggtcaccttaagtctgaactttcagtgatagtgagattggatgaacttagggctcgattttgagtaagatcctatgactttttgtgggtgcacaatgtaaaaaaatttaaagctagttaattaagcttcaactttgatacagggtgatggttgggtcaccacataaaatatggagcaaattgcccccaaacatgctctgtcaagcgcttcaaacagagattccaatggtacagtagactgaacgagatcgcaggtgcagtgcaccttgccgccggtgatccctacgcctggattcacgccggcgaagtga

SEQ ID NO: 150121 - DNA, 912 bp, Zea Mays
gctacaaagaaagattaatcttcttgctcatttcaaggataacatccctaaatatctcaccgccttgcccattctgattccagttcaacaacctactatgaagatcaatcacaaaatctctatcttgatttgcctgttccaacactttaaataatgattttacacacttgagcagggtatggggcagtcttgtttctgagttggctgacagaacgatgacatctatcttcgcaaccaaatatcaatgaggacatatcctcaactacgtcaagccagataaagatgagatatgctccaatcaaagcccatctctcagctatcaatgcagctgcctaagaaaccatcattactggaataatcttttgttcttatttgtgcttcatttgataccagaatcttccccagtgcttgtgtagcacagaaggatgtcacagttctgctcgttagcacaactaggtgatataagcaatactcctaaaggaatccactgatgcaatattaggttaaagtttgaaggatggagatccgctagttttccatcttgcacttgaggaaaggcagttgtgctacaacattttacacaggcacacagctatcatcaaattctttaacaagggagcttacagtgtttattggcacatgaaatttctctgacttcgcagctgtgggtatttgcagtttcctcctatggttcatagtaatttggtagctcaggcactttttgttgttcctagcccaagaatgtgatatttccaatatattgtttgatagcatctcgcattgatcatcattagaagggcatagcacccaagaaaggtaaaaggctgccctctgaacaagactgacgtcacttattgattcagcagttggctctttggataatgtttctgataaagaatcgtgtgagccttc

SEQ ID NO: 150122 - DNA, 413 bp, Zea Mays
attcaccccataagtaacatcatcacacatgactctgacttaaccgtagaggaagcgatgactacttcggcatgtcaccacctctctacaggccaaatcaatattaactacatcgatcgcgtcttatatcacacaacacttataatttattatctcaaatacaaccatgtcccggcatgtacttgggacacttcggttcaacttacgcaatcactactacaacgcacttcggcacacatgtttaataacccacctttctaaattaacctatctcattttccaacaccaattaaatgtcacgtaatttacattttcacctaatttaacctacaccaacgatgaatacataaatataattatcctagaccaactcattagccgactgcggaaaccaccaagtatgctttacgctt

SEQ ID NO: 150123 - DNA, 742 bp, Zea Mays
tgacctttacaaaaacttccctgcgtttctattcctttacactctgaggtccatgacgcggtccggcggagagccgagccccggcgagcccacaccggtcgtatctcgcaaacggctggtgctcttcttcggtttaaacctaattcaagccctaataaatgtttccactcaactaatttcaccagtggcgcactaacacgccctgcccacggtgacagcggacaccacgggtaaccaaacacattcccgacgatcttagggactctagctcaattggatgggtcggagagtatcaggagcatccaaggatactgaaacaaggactcagagggcatgaacggacctgagatgcgctggccacggcgaggtcaaaccgctcagtgttcttgagtgatttgggggaaatcccaaattggggagttctaggggatgattcgaggcacgagttgcttcactggttgcacaactacctagcggagcaggcggggtcggcaatttatagcaggcttgagcggtggcatccaatttcacgatgatgcactgacgactggagaggaagaaggtcactggcgctcggggttagtggctttcaccgtggcagctctccagcgatcaccgggcatgcacgacatgtttcactgcgacgtggtctagcgctttagcacgtggcacacagcggtgagcggccaacgacgacgaggtctatctcggccgcacgacgagcaagtgggtatggtgaaac

SEQ ID NO: 150124 - DNA, 333 bp, Zea Mays
ctgaagttaccatcgaaaatgtctgtcatacataatgtgttccatgtgtcccagctgaagaaatgtattcggttgccaacggaggtcataaccgagctagatttagagatagaaccagatctatcataccaagaacacccttccaagattctagactgcaaggaaagatccactcgtgcgaagacgatcaagatgtataagatccaatggagcaaccatacagaaaaagaggctacatgggaaactgaggattacatacgcaaatactacccgattgtctacctaaggaagtcggtacgtaaccacccccaaccccctacccttcgattccag

SEQ ID NO: 150125 - DNA, 301 bp, Zea Mays
ttcgagttgtaaatttaattgggctagctcgagttcaaaccctacttttgaaaaattggatagaatcttggtaagcacaaaatgggaacaaaaaattcctctttccaccatggaagcgttatctagaaatatctcggatcacacactgttattgttacaaaccggtgagccatctcatagaggaaataatccaaggttcaaatttgaactgggttggctctatagagatgggtttcagtgtttcacgatatgatgatagatacgtggggaagagaaactcgaagacgctcacctatggaaa

SEQ ID NO: 150126 - DNA, 644 bp, Zea Mays
ttacaatgtcaactatttacatttttcttgtaaattgtaatgcaactgttaaggttcttaccttggcaaattttccactgaaaacagataaagctaatctccagaaagctggaacatgctggatcagtacagaagttagcctacgaatgtaggtggcccttaaactatcagcttcctcagccataaagtttgttgacaactgatcaactcgaggagaatcaccaatggtagaatcaacttccagctaaacaaaaaggtctacatcaacatagggaagacacaaaatagaatgtaaatatgatatgttgaactacagaaagtaatatgctcacagatttatttgaatcttgttgcagctgcctccacttcgaatcagagagcactttttcgcgaattttattttgcaaaacttccattctcgagtcatgatcttgagtacacttttcaaacaatccatgaatcctgctattctgataggaaatattatggtataaataaaaagaaaatacaaacagaagtcacagaattgaaaagccagcacgcatatttagattaaaattgaacctgaatatttaaataatgccacactggatctgtttcaggttccaactccaacaatagacgaacaatgttctcaatctgaa

SEQ ID NO: 150127 - DNA, 521 bp, Zea Mays
ccagaaagcgcaggggtgttggtgcaaaagatcctaagacacagactagccagggaaggactgcgggttgttttctgttttagtcagggtttctttagcaaatttgacacggcgaaggggtatcggggtacaggagccgccagatctaaaatcgtcggtctagattagaccgagacactcatgaaccagggttcattcccacacgtcggattcgaatcctacgcttcacattcaccaagcccgcgatctaacagccaccctttgatctaacaccaacggcgcggatcgcgctggcgaagaggtaagtcacttttgatcctggccgtcaaaattcaaatctacggccagcacatcgtcttcaatcccccgactacctctctctctcctctatttttttccacggctgttcttcctaacacccgcgcgcaccgagcggcgaatgctccccacttcgagtgccttccaccccgcacgtcgccggtgaggcccagaccccacgcacgcgctctaccctgccccaa

SEQ ID NO: 150128 - DNA, 371 bp, Zea Mays
ttttttgtgtgattcagaaagttgacctatctttggaggtccttgcatctaattatgccccttttggtttactatggcatgtgttgctgacctctgtacgccacacatctgccaaatgtatcctgtgttttttcccttccaaccttgtgatttggatttcttgaattcaagatttctgaaacttctagctttgttttcatcagacgaagatttcttaacttgcatatttatgaacatcaccctaagataagcacaatcattatggttgcaccgccaatgttataattatattagattgtacaaaggcacctgatatttacattttattatcctaatatataaaaaatcttataattatattaaattgtaca

SEQ ID NO: 150129 - DNA, 508 bp, Zea Mays
tttctatcatttctaaccattcttgacatggccctttgaactgtttctcgaatttgaacttataaggtagtcgcacaagttctttcttctcctttgtcccctttagcttcgacatgttccattcactcagcgtcgggaacaccctataggctagatattcttggactaaaactcttgtgctgatctgctcggctaccaccagaaattctgccacagcttgtcggcatggtgaccgcggctccatacggcacagcggcctagtcagtctaaagcttaagctcagagggctcagaactagcatcttgagcttctccctcttcttttcatcggccttcacataaaaccaatcatttttccaactagttggccacttggtgcgatagctaaccaccggagtcttcatatctttgcggtaggcgaagttgtaacaaccaaagttctcatgaagaccatcttctctggccttcgtctgataatggagctcgtgcactcggcagaaggattcggc

SEQ ID NO: 150130 - DNA, 623 bp, Zea Mays
tattttgtttctcagacggttacttacatgaaatactaatcgtatgaatcttttcttagccgcatgcatcgtttcctcattttactcatgcggcgcgcctccatttccgttgacgcgggatgcatggcatcatgcgtacgtgcgtgaggtgcgctggtcaacaacggcaaggagaaagtccagtggttgcggttgcgtgcatgtcttgtagatcggaagaatgcgcgtggagccgatggatcccgcgaccagatgcgccgagcaacgccgccgagcaaccggatcttccagcccggtcctttgatcgctcaccacaccagtaaccacccggtctctgctgcagcagcctgcagggcatagtgctgctatgattgaagccgctagattgccctggtgctaccgtggtgctcactggatatgtgcgtcaggcacgacagtctagttgctgcctaatcagctgcagcacaaatctctcaaggcgtgcacgagccgatgtacatagcactccgcaccagatacctgtcgggcgacatgaagacggtggtcgggagggtaagcgtccgcccatgcgtggaggaatgaccccgccgcatttgtcacgccgtcggggcaaacgagaacag

SEQ ID NO: 150131 - DNA, 325 bp, Zea Mays
atctgtccctgccgtggatctgtttgtttagtgtttgcatgcgtgcacaactgcttgctgattccaaattaatcacatcaccaactccctatcggcatgtagtgcctccctccctttgtttgtttgggatcgaattgggcactgatacacaccactgatgcttgatatgcagtgctcccttcgtttgcattgccgcctatataggtcccatagttaacttcgtgtgctccctttcattctcctatggcagaaccggtttaccaccttccgtttgctagaaacggggaccaatttatcaatgttattatacaaatgactgggtgtg

SEQ ID NO: 150132 - DNA, 672 bp, Zea Mays
caacatccaagtttctgaataccgtgatgacaaccgtcgtagcaagatcttcctccgcccgcgccaaattctggttccgaccaatgatacaagggaaggaaggggggaagaatccactagcacaagtgaagtagaaccttagggtggagatgattctggcgccaactgaccgtccacatgattaaggggcaccaagggtcgtttccttggtcggcgacgatgcttcttagccagacgaacctctccatcaatagacggaccaccaatagaagaaacagctggaacaacaggatctgcatgctacaaaacatcactgacaggagtgattctcctccaaactaggatccttgacacggttcttcgcataggcgccaccttcgcagaagacgaaaacctcggcagggaggtcctttcacctaggaggtcaaaccgatcatgatacgtcatccccgtgcctagcggatctgagatcgacttcttggacacaggtgcaacaacaggcgtaagccttcgccaaaccggtcgtcgtggctcaacatgcttaggagcagagcacctgtaagagagatgtcccagggcaccacagtagaagaaaataggtctcccagcaatcctaggcaaggtgatgagtcgagaggcagttgaagcagcggcctacaaggtctgctggca

SEQ ID NO: 150133 - DNA, 481 bp, Zea Mays
catccacttttgttgggtccgtagaaacaccatccttgctgatcacgtgacccaagtaagcaattttctgttttgcgaaggagcacttagacaatttaacttgccactggtcctggcgtaatagctgcagtacccaatcgaggtgcagaaggtgattgtcccatgtatcactgtagaccaaaatatcgtcgaagaacaccaacgcacatttcctgagaaggggtttcagagtgctgttcattgcaccctgaaaggtagcaggcgccccagtaagaccaaatgccatcacacaaaactcgaagtggccatgatgtgtctggaatgcggttttgtgctgatctcgtgggtccatccggatttggtgaaatccagctcgaagatccaaggttgaaaaccaagctgctccaaagagttcatccaagaattcctccataatgggtactggaaatttagccttagttgtgagtgcgttcagatggcg

SEQ ID NO: 150134 - DNA, 346 bp, Zea Mays
tgtttctttgaatctagatttgtttaagtattcatgtctcccttcccactaaaccttacattctttagtaaactatgtacactatatatcgttgattgaattttggagatagattgtgtggatgtgtttggcatgattaattttctgtgccagtgcattttgtagctttagtaaacaacaggtgcacaatcagctagagtttcatcactgatctgaataagttccaaataatggatcaaggctttttctcatgacctttttaactcaggtgggttttaatattttctatcataagtaggtgccatataaatactaacagccaaagaaagacatggagaaaatatca

SEQ ID NO: 150135 - DNA, 728 bp, Zea Mays
ggattgataacgttgcggggtaagaatcctcgccgacggtgagctggaggtcactccggtgacatcaccgtggctttcttatccactttgcggctgggcagattaccatcgtcggtgagccagcgcctcccagtcttgcgccgcgtggcttcgctttccaccgcgtcaccgtagccccttacagccgtcaaaccatcgccggtgagcacgccacgactacggacacgaacttactacgcccagggttcttccctatctccggccgccgcacatctccattcaaattagcggccaccgcccgctagcactataaattgacccctccccgaactccgtagggtagtaagctgtccagccaccacgaatcagccacggtcgttcactggaatccgcgaatttggaattctccccaaatcaagtttccgccaccgcaagaaactgctcaccgcggccagccctttctaggtccgttcatccctcactctcctttgtttgaccactcttgtcaccctgtgatgcttgccgagcctccaatttgaactaagagaccaccactcgtcgggaacgcgatcaaacgctcatggtcttcgcggttctcgtgggcaggctagaataggtcaccaattgtgcaattaacttggggaaattgctcggggtagcttggatttggtgtccgccgctcgggtgcgccggtcatggccccgtccggccggtctgcgtgctcgccg

SEQ ID NO: 150136 - DNA, 610 bp, Zea Mays
ctaagtatagttttggtaattgagacaacaagtggactaacctctatctaagtgttgtgaatgagataggttcaagtccacatccaaaggttgagcacagtgggaaataatgagaatgatggtgatgaccacgaaggatgaacaagtgctcaacctggaaaagagaagcaaaatgtgtaagcttaaggcaaaggtacaagctaaggcatctagttttgttgattaagaagcaatagagtgcatgatcggatttaggataagtagccttacaataaagaggaaactcaaggttcaagaagcttacaataagcctatacatatgtactagacctagtgaagtcatgaagttccaccttagtcaccattgattaaggctaactcaaactctagtgtttgggatacattggagttagcactcatgcaaacattggaagaggattgtaagatgcctagaataggtgtctaatatacagaggcgtcagaccagcacaatgccaatccaattgctaacccttgccacatggttagagtgatcgttggattatgtgcattggtacgatagtaggcgtaagactagttcaacgctcacagttgctctctagtcattttt

SEQ ID NO: 150137 - DNA, 763 bp, Zea Mays
cataaagatctccggtgctgtgagctcaatgccggtgatccgccgccacaattcgcgcccgcctaggagattcgtgccacgggaagagtagataacgttggggcaaggtgaaaatatccagtgcggggtgaatctggtcgctggccggaccggccgtcgtgtcccgccgcggtcaatcgcgttggcatcaccggagttcactattatctggccaagctacgtgcctcaaagccttaccacgtcgcagtagaccgccttaggtagcttgttcgtcgcctgagacacagccccgataaatgccacgttacgtggctccggtgactcacctctctctccgaccgcgagctttctctttcgaaattgggtggcaccgctgatggacactataaattgatgccccagtgagctccgttaggttgtcacgaagccagagcacccgcccttacctccgattagccaccatagcgatctaatttctttcttcccccaattcggttctccgcactgccgtgagtcgtcgcgtcgtggaccaccgttcccaggtccgttcataccctccttgccctcgtttcagcacccttgtgtgccatagatgcttatcgacccagccaattgaactagaccacgttagatcgccgggaacacctcgggttgtcctcagtttgtgccatcaccatggaccgagagattttgagctagaacttcgcaattgatagagggattagggtcgctcgaggtggaattcgatgttaaccaagtaaga

SEQ ID NO: 150138 - DNA, 432 bp, Zea Mays
gttggatttgcatttttggaaatttgggaacttggatcgaaccaagttcataaacttttattcacataaggtacaaaagcaccaaactatatggtgtagaaacaatccacatgaaatgtcatgaagtgtctgtagcataacacacctctgtatattaataaatctgaaagctgactcattgacggatgatacatcactggccaagaacatggcacactacagccagtgcactcgtacgaagagaggaaaagcagcatgctaggctagcaatatgtgctggcacatcttctattttttttataacaatagggaacagactgaaaaatcagaggccgcaggcattacagaatgtagcattcgaaaatcagtataatatgcaatagcaggtagtcaacgaagagcatcccgtttgaatgtatcttctgaaaaaat

SEQ ID NO: 150139 - DNA, 528 bp, Zea Mays
atagatgtcttggttgccctctctgggaatctgctgatgaagcagacctgatgttcccctggtcaagtgggcaagcaatggtggccaataaaaatgctagtctactgaaaaaatgacatatgttgattcgtctgattccaggatacatttcacagacagacaaaagaatgtgttctgcacaatgtataggaccgattttactaattctatataattaagtctgttgcagttacagccataaagttatgttttggcttctgattgagcacatgaaaattccacaaaaaaaacataatatcaatgcggaaaaggattgtaaggatcaagtaatgcaccaaaaaaatggagcaacctttaacgagggagatgaaaataaagagtactgccttaaaaattgatggttgcagttgtcccactgcccctaggaattattcagctaatcagcttatgctgcggccagagggcaagatgctctagtcaagtgaacaagcaaaggagagcgcagaatgctagttcactggacatcat

SEQ ID NO: 150140 - DNA, 486 bp, Zea Mays
gttgttggtctagctcccaatctttgatgcacaccaacatctccactgtctctgcattcaagcgctgtcgccgatcctcaagaattctgccatacaaactaaaagtagactccgaagaagtagttgaggcaggaacagacataatgtctctagccataattgaaagaattggataggttagttttatgctcatgccaccaatttaagatatcaaaatcatcctcataggcagccacattgtcactgtcaaggtaaacagttagctcataaagacctacaccaggtccactactacctgaagaacctgatgcagttgaggatctagaagcacctgttcctccaaaaattttgccccatgcctattttctcttacctgtcatacctgattgatgtgtggttctagatagcctagcagcaccaaacttagtttcatacttggcatatagcttatacaactcagtcttaacatcagcaaaataagtactg

SEQ ID NO: 150141 - DNA, 846 bp, Zea Mays
aatctgatgacgttagcacgcgtacagcagcctcagcatctggttatggccagagttatctgaaatccagaaaccagaatgcaagcaaacatggatgcactttgtagcattcctcatcaactggcagcagatggtgtggctgctatgctgtctgccttccctctgctagctccacttccaatccacaggtatgctgttttcagtgttcaggtccatggatatctgtggttattcgttgttagtgtttccaattgcatgccatttttttatgtataagagaagtgctgttttgtgatattttcagtatctcctgaattcaactaaaaacctgctaatgatatctattgtctatgtaccaacttggaatgtgtgcttgtctttcaggatttggatcttggaatttggtttctcaggaatgcagaaccaaagctgacagtggagatcttagcctacctacacgggcatgttactcaggtaaactttcttgataccagtaacatgaatgctttctgattctctgactatgctagttttatttttcgctgattatactgtttgttcagcagtactttttcgctgaacccaagacaatatactcttttatgagcagtgggcagtctctctaggatcaatgggatcattgaacctattacaccaatctctctcgtttacagtaagcaaccgaagctaattctaacgagattgagagaaagaaagaaatggcagacaagaaacactctctctggcaccgtaccatggtctggtgtccaactctggaatcctggtagtggagcattacaaggatccctttctcgtgctctgatggtagtggaatcttaatagcag

SEQ ID NO: 150142 - DNA, 558 bp, Zea Mays
ctcgccttcctgccccagcagccaactagaacaaccaagcagccccagtgcaagtaggaggccacgcatgcttctattgtaaggaacaaaaccactgggtgaagcactatccgaagaaggcaactcagcagtcaccagtagtcaatgccctagcaagacaaggagcaccacatcaagcactaggaggccatggtcaggcttacaaccttggaaaggtaaaccacttggaggccgaatcaatctaggatgctcaagacatggcagtcggtatgtttccagttgaatcctatcaagcaaaagtattatttgacactggtgccacagattcttttgtttctacatcttgggtagaagcacataacatccccatagaatcaatgtttccacctttaagagttaattcagttgggggaaagttcagtttgataggatttgtccgaatctaaggattgaattaagggggatagacttccccgctaacctagtagtaatgggtactcaagggttagatgtcatcctagggatgaattggctatataagaaccaagccaccgtcag

SEQ ID NO: 150143 - DNA, 438 bp, Zea Mays
ggcggacgaagtacggtgggaataaattgttcgtggtctagagcttcatcttccacctcaacctacttgtgacgagctcgtgcatgtactccggttaatcccgctctgcaagatccccaaaagccatagatcgacccagcgacttccccaaaatctcgcgcggcggcaccctctgattcgtccatggtgcggctctcattagcaattgatatattcggcgtcaacacaagatggatgagggaggggaaaggcttggactttatagccatgaggagataagatcggccacgaacggtaggtggattttggttgaataaatcggagatcacggagatgcagaggagttcattgaggaagacgactgcggttgggggcccacacgtcatacgcagtatgctcccgtggcgcaagcggcgacatagagactgcacgtggggc

SEQ ID NO: 150144 - DNA, 311 bp, Zea Mays
tagctggaggtgcaccagagtagatatcatttttaataatagtatgaccagacacataattactcttaatgccctcagcaagttgttcaggagtaaaatttctaagaattgtcacattcataaatctcacctcacctcaccgagagcttactttgatattgttggcactgaaatcatattagcaaacaccacgctctttatttcctcttatcctctcaagcattgtcctaacagtttgtttactaatattttttgcaatttcatatgaagatacaatatcagtctcaccggacaaaactataaaaactcca

SEQ ID NO: 150145 - DNA, 417 bp, Zea Mays
ccagtccggcggccgctggcgctacgaatcggcgtgaggtagaaccacagcaggccgttgtccgcgttgcccggcgagtgccgcgcgctacggttccgttccaatagtttttctatatcttgtgcacactctagagtcaatatagctctgcatctttgcctagccagaaatctggaatagaggatagcaatatttggacatctagttaaagaagctgttggaggaccaaaatctatattctatcaataaggatatagaaactcttggagttactcttaagctcaatgatttaagtagaatctaaaaggagtaaagtttcctcagtgttattggggcacttacatgcatggtggtggcccttcaccttcgggttcaagttttctccattcatatggcttggccacagtatcaaaggcc

SEQ ID NO: 150146 - DNA, 336 bp, Zea Mays
agaagctaggagccagaagaggaaggctactagcccaacacctcaggaggaggaactggatcaagagatcagggatctggaggctattcatcaacaagtgcaaaggaagaggaaaaaaatgcttcggctcgccgaccttcagaagaagatcgatgaaaccactgaagaaatgcgccatctcactcaggatgaccaagaccgaaggcctcaacacagggagctttgccaagaaagtccactcaatgatgatgaatggtacggtgactttcatcacggcaattttgcttttgacgatgcttctcccttggcagcagaattgcaggctaccccgtggcc

SEQ ID NO: 150147 - DNA, 299 bp, Zea Mays
ggattgtatctttctcggccatgaccatttgatcaatggatcaaaaggaatagaatggaggtgcccccagtctggatagacgaagggattatacatgtaccatggattcatcatcgtgccattccatgtttgaacaggataatataccgacgatgagtaaataggtggaaagtaccctggtctcatagaatgaataggcgatgcttgttgtgtcgccttttgggccgttttgttttagcaggtggccagggtttctttgttgaccgatcacgtggaacagtctttttgctagcattttt

SEQ ID NO: 150148 - DNA, 367 bp, Zea Mays
tagtgcaataagtttttaatcggctagagaagtcgaaggagacattacttggtgaaacaagcacgatgtcaattccttgtcctttattgcaaaccgatccatcaaaatataaagtccagggagtaacagtgaggtatgatatgtttagtttatgagtatcatcaatccgatgttctacaataaaatctgctatgacctggcctttcatagatttcaatggttcataagccaagtcatattctatgagtgcataagcccatttaccaattctaccactcataatcgggttttgcaacatgtatttgatcacatcggtttgaccggaaacggtgcaatgactagatatcaaataacatctacacttggt

SEQ ID NO: 150149 - DNA, 508 bp, Zea Mays
ctagggaaaccagcagatatgagccaacgactcccacttcaaatagagagatgcctccagctgcatttcatcaaaggagagaacttctgagctacgagcaactttgttgcctcgatgatgtcaattttgccaatgctgtcatctttggcaacaaaggctttaggcccctgcagtacgaagcttgcagggctgcaatggataaccaagactgtttcatacttatgccaactggtggtgggaagagtttgtgttatcaggtcagtaaattctgtgttcttgttcgaaattgttctttccattgcctggtggcatgatctggaaccgttcatcaaaatttatatacttgcagctccctgcaacattgcacccaggtgtcactgttgtcgtaagtccgctgctgtcgctgatccaggatcagattgtggcattaacttacaggtttgcagtaccagcagcattcttaaattcccagcaaacttctgctcaggcatctgcagtaatccaggag

SEQ ID NO: 150150 - DNA, 532 bp, Zea Mays
gtacatgtgtaatggcttgtatgaagttgtgtgccctcgcacattcggctatgcttgcgagggcgttacatacttggtcaggtgtaattgttatgctggactggtgcgcatgtagtcggtctttgcgcggacagtttggtgtggtcgttttcgcgtttgttacgcttcgtccggctgtgccctcgggcaactgttgtgctagtccggctgcacccttaggcgacttctgcgcggatagtcttcgcggtagacttcggttttttgcacttgttgtgctagtccggctgcacccttaggcgacttctgcgcgaatttgtcacacgcgagggtagctagcgctgagcctcgcggtgactttgtattggtcgaatgtcgaagaccgtcgtcgcggtcttttttcgacgcatgtttttgcgggggatttttcacttgtatattacatggctccgcctcgttaaaaacctcaccccccgggaggaaaagagtgcgggccagaataaaattgtttttgcgaattacaagggcgaatcgg

SEQ ID NO: 150151 - DNA, 1519 bp, Zea Mays
gtacgtgttgctcaagttcctgacaaggtacatgtttcactgttttgcagttcctaccaattccatgtgctggttgatttttttttctttctgcagggctcatctctgcatcttgagttcttagtcaactacatttgtgagctgtcacttctggagtacagcttactttgctatttaccttcaatggtagctgcctcttctgttttcttggcgaagtttatccttatgccaataaaaaacccatgggtatatgtccccaaccttatattttatgaatcttcattgttaaactcgatgtttgcattcttcacccccaaaacataaataaattttgatgcttgcattagctaacatttgcatttattcttgatcgaaagcagaattcctcactttcttactacacgcggtatacaccatctgagttgcgtggttgtgtaagggtactgcaccggctcttccgtttgggccctggaagcaatcttcctgcaattagagaaaaatacagtcagcataaggtgagccttgcctcctacataaggtgattgccgatgagaatcattactttggtacctactctgatgctaaatgccctaccctttatctgctcagtacaaatttgtagcaaagaagtactgcccacagtcaatccctactaagttcttccaggatctgacaagttagaagccaagattacttctagttactcaatgaaaccttcctgaggtacttagtgtgatactatgatattgatttgacagatagttttgaatgcaaggcatgcgcgcggccttgcgtttagcagataaacaggttcaagtaaactgtatgtcacttgtggcaatgttgtttcagtgttgtgctttgattgcttccagcatcgtcttatacgttgctgttgtggtcttctcacgctgtctagaacttttattgtatagttctggaccttgctcataacaagggtagatagtttggctaaagataaagtgtactcattctctcattgttatctacgtgttgcttctgtattctgaagattctgctctgaaacccagcaaatgtattatcaggcatcagaatagtagagtctgagtcaatttttgctattgggaataagtgggagggtaactttggaaagcaaccgatcaggttatctttgctaatccaaaagttatttcagggttatgctttaatatgtctttttactgataattatgctaatgagatcttcagggtcttggacgcatggattgcaaacttgtatattagcagtacatgtcatttgggtatttaaagtcttaagtttgtgttgtctaaatttctctattctacacatccacctaaatttgcatggtacagttaacttcttgggcatagaatagatctgcacatcttgtttaggtttgtttagtgaactctaggaaaatatactggttagtaatggaagtttaatatgaacataagaattattgaaaagatgttttggatggaacatcatgtaaaacacaagtttaagagagaa

SEQ ID NO: 150152 - DNA, 975 bp, Zea Mays
cccccccccaacacacaaacacacacgcggttataccaggccaccataacttcggccccagccgacaagctaaaaaatgaccaaactctaacaagatttagaatctctgtaatttgtgtaacaaatcacaacattagctaaatcatcctaaagacagaagttgattcatccggcgaatcagatctatgtgaagcacatatttcagatatgagcaaattttgacaaaaaaaaaacaaattggtagcattatgacactacttgcatagtatattgaagtatgcaaactataaattggcagaaccatgtccaaatcaaatcaggacatgtttggatacacatggctagttgctagtttggctaaaaattagctccagttaggcatggcatgcctggttaacaactggttggagacttggctaaaaagttagccgacctattagacccagctaaaattagctagctaacaactaacccaacatagcctccgattatgtccagaatttgtttgtacccacacacacatggttataccaggcgagcataacttcggccccacatcaggcgatctgaaaaatgaccaaactctaacaagaggtttagaatctctgtattctaagcaacaaatcacagcattagctaaatcatcctaaagatggaagttaatccatccttgtgaatcgggtctatgtgaagcacatggcatctcaggataggcacagtcacatgaaatgggataacttacgtagcctcttcaaatcagaagcaacaccatggctatggctcaagtgctccaatcctccaactgaccaccccgccctgccgctgagcacactgcccgtcggctgaccacgccgcatgcccttgccgccgccgggctgcagggcccacgacgccctgccgcgcgctcgacggcccgcgtcacgctcaggcctgcccctggcgcccagcccgcgctggcagctgcgtgccctccta

SEQ ID NO: 150153 - DNA, 532 bp, Zea Mays
ccaaatggaggaagagccgaagagggactgagggattggggaaagagggagagagggatagagagagagagagagtccggctcaaaagcctccaggctcctcatctagtcatcctcttcgtgcccacctggccacctcacagaacgaacaagcatcttgcttttcccttccaacggtagtcctccgagcagcgtccaaccagaaccggccgtgtcaactgagcacctcccgtgccgcctcccccggctcattccgccgcccattatattgccccaagaactgatgcgacccgacccaagattccggctcacgacggtgccaggtgcccttgctctagcgccgactcatccggtggcgagacaggggcctgaatgaagtgaagctcgtggtgggctgggttacgtatgccaatgggcgcgcttcaggtgatgctcctccgcttggtgctgctcgccgcgtccgccgcgacgacggctgtcacggtcacggccgcgccgccgcccagtgaggtggcagtgggcgcactcttcac

SEQ ID NO: 150154 - DNA, 1917 bp, Zea Mays
gaaagaataggaacaagtactggcctatgggcgcatagggcacaaggcaggcccattgaagccaacttcagcagctagggacgacgcagcgtcgcctgggagcctgcctagtcgccgtggtgtcgtctaaggtgaccaggtgtccgcctaactaggtttaggcaacgcgactgggcatggcgtccattgccggccgcatggatgcctaggcaatgccgtgataactatgccgctctctttgcttagaaaaaggctcagcaattttttacaagaactctgaactctaatggctaagctaatgacatgagccttcagagggatacaagctatcccttggtccccataaattagaactgcatacaagaggcaacaagccaacagagaattccttcagaagtacaaaactaacaaattacccaagcctgatgcgctgatggttccagatgtatgcacagtgacacttcttgccctattgaaatgaattacagttccttgtacgagaccccagacatcaatatcttcaacacgacagacctaaataggagaaagataccataagctgcatcttatgagagaatctatctgggagctgcatgcgagtgttcaaaaattgagtgtacctgaagggtaaatgacaatgaagaatttagattgcaatcttctggtggatgaattatttccacagggcagctatcagcttcacaattcagctttggggccctaatagatgcgcaagagcttattaatgagcaaaaagatttccaacataaaaaatagggaaaaagaatgtctctatgtgatagctgaaggtaaaagtatttacacatcatcgctacttctgtttacaagtgggccccgtaaaacagaaccaggtccaacctacaaaatgaatatttatcactattctttctttaactggtcacagaagcgaaaaagaacataatatctcatgtgaccacatattgaacattcaacccgggtagttgtaaatttgaattgtgtgtacaggaaaaacccatcagcagtatagtatgacacagcagacaccagacagcaaacaagacaacacacaaaagtatgacagtcattacagcagtataactattgcttagatacacttaaaataagtggggacatatgactgaaaccattacgattagcattgctataaaaattacctgtactggcaatcaaaaaaaatgaccagtactgcatctttggtttgactagagcagtgcagcactgtagagttcaaaatgtgaattgctatgcgatacgctaagattgcagcaataaacaaatacatcagaaaggtgatggctaaaaaagacactgatgctgaaaagcatatatatcatacttgtatgctgtagaacagcgaaagaataaggtgttgcgcctcaattgtgtctccgtccccagacaaatttaggagaccttggccccgaactccaagattagcattagagtgtatcacagatgattcctgaaaacatatgagcaatagttatacatactgagcacaagcagcaaaataggaagagcggtaattaacattggaccaactagaaaccttcagaactatcaggttgctagcatccaacaaagatgttgcaactatcgaatctccaccgccatcaatttccattctggagttccacataaggagcatctttacagacattctcaaagcaccgaacacctagaaaaaatcaagttaaatgtacttgtaaagcagatacaatgtagatgaataattgaatatcacaagaaaccaacagggaaaataccttgattgttgagtcactcataagaagctcctcagccatcagttcaaactccgagtatggataacgagtgagaccaaaagttagaatagcaccagaaagaaggctaagttgcccttcgacctgaaaa

SEQ ID NO: 150155 - DNA, 337 bp, Zea Mays
cttgtttactgtttacattattgaattcatccaagaggtgcaaggttatttctgattggttagcttcttaccctttttcatcacatacataatcggctatcttaaggttagtgtcccttcatgattgttagctcattttaggctgaaataattgattggttgtaggctgggcaaaaggttcgtgaataaagtgaaaggcggcgagcctgcgacagcaggaacgtgagcaaattgtaatgaagcgtaagcatgaaatggtaagttcatggcttgttttcatctgttacatctacacgttccaattgaagcgcctgcagcataattcaagggaaggtcc

SEQ ID NO: 150156 - DNA, 1552 bp, Zea Mays
aggggtggacatcatagcctttttcaatttctgaaaagccatgtttgctagatctgtccactaaaaccctttgtgctgcaataagttggttagaggttttgcaataactccatacccttttacaaatcttctatagtatccagtcaggccaaggaatcctcttaacgcagaaatagaactaggagttggccacttctccatagcaagagtttttcctggattagtggagacaaacttttgagaaattacatgtcccaagtaggtaagttgggtccttccaaatacacacttggacttcaaaaagaattggtgtttcttcaattgttcaaacaccaatctgacatgtttcacatgctcagcccatgaagcactgtagatgagaatatcatcaataaaacccataacaaatttcctttgaaaagggtcttggaatgagttaattgcacattggaaagttgttagagcattggtcaacccaaaaggcataactcgaaattggtacaacccatggtgagttttgaaggcagtcttgatctcatctgcctcacccattctgatctagtgatagccagctatgaggtccagactagaaaaatactgagttcctaccaattcttccaggatttcctcaactaaaggcattgggaatctgttctttatggtcaagtcatttgattttcggtaattcaaacaaaatctccaggttccatccttcttcttaaccaatagtactggtgaaccaaagggacttacactcggcactataagtcatgtttctaggagagccttcacttgcttctctatctcattcttatgaaaaggtgagtatatgtagggcctagagttcataggtactgcaccagaaacaaagggaatgtagttatcatattgtctggagggaggtaactgctgtggtacttcaaacagatcagcaaactccaacagtaagctttgaatctcctccttctgatcacaatcctctctgtcttccacaacttccaacaatacaaatgcccagacctcatgtcccttcagccatttatgcacttgcaatattgacacattttgtatagaagtttgaggctaagaactatccccctaattatcatgactcacttgtgcatgaatttcaatatcttgtggtccaagtcacattgcattggactaaactgcctaagccactcatagcccaaaatgacatcaaatgcacttaagggtaggactctcatatcagtgcaaaatgaaaaaccctaatagcaccattccagtcctcttaccattctatcacacaccatagtttcaccattaggcaccttcaccttaactagagaacaaaccacctctactaaccgcaactgatgcaccatgtgagcactgatgaaatttgatgaacttcctgagtcaatcagtatcactaaagtctgtttgctcatagtttcacttaccaccatgctattctcattatccctaccaaccatatcttgcaaggacactttgcaacacatttcttccttctcatcctcctgctccaattgttgcagaacttcatcaa

SEQ ID NO: 150157 - DNA, 1191 bp, Zea Mays
ggcctgaagtggcatctcaagaactccagggcaagcagttcacgctgtgtcgtcgccctcttctttttcgctttagtcacaaagggcattgaatcctgtcttctagcacttctggtatacaagcggaagtcgaatcttttcacacaggccggagaggcggaggaaggaactgcaaataacagtacgacgagaagtcaccctcggagcatgaatggctacgaatatggagtctgctaccgtccgtgtggaggtggagtcgtcaccatcgcccagatatgggatagtctgggtatctcaacttctctgaaagacctgtgcctgtcctatgccttgtttgtgcagctcattcacaggcgtttcttttgccgagtccatcccatggcggccagctctgtaacaagagaccatgactttgtattcaagaaactgctgccctctgaacgggatttcgaaagagcgttcaggattgttgaggcagagctgggcttctgctacgatttcttcttcacaaagtactactacaccttcgtaatcactaatctgctaccggtgccgttcctccagtctctggctttagcaaagatcactctaatcttaacagtaggggtgtttgccgtcaggaattcactgctacttgagacgccaaatccgatcatacaagtacgcatctcaagagctgacaacatcatcactctgctgcttctgggtatagccctcatagtggagctggtgcatgcggcattttatctggcatcggactgggcccaggtatcagtagccaccatgtatgtcaagagatactggtacgaaatcagcccatccatctttgcaacagtcatcgctttccttagaagggtcacgttttctggacagctgatgagaaacaggatgaagcagcactcagtgattctcgggcagagacagcaagatccagtggaggtttctgatgcagtgaagatagctgttgctagatcgctcatatcaatgtatagcggcaacccaaccaacgacgtcggagaaacatcgcaatggcaggaccacaggtattcttgggcactcctccagggcctctctcagtctcagctggaagtcatgttaatttggcatgtcgcaactgagtactgtcatatttctggtgctcgtcctgctagtgctactgcgcgaggcgctgcagttcatctgtctagatac

SEQ ID NO: 150158 - DNA, 543 bp, Zea Mays
ccgaattctcgccgccgagagcgcgccgtactggccaggtgcccggtgatggagtagtccgggcggagaagaactgcccgttggttcgggtgccgagcatcgtggacgcctgccgcagtgcccccggcctccccgcctgcgcggcgcagtgcatcgtctaccactaccgcggcgggtactgcgacatgctgccccacggcaggcccggcgactgctactgcaccaactgcctagcgtagttatgccactatctaggacggccggccggccggcggcggagccgcctcgatgtctcgatccccgacagatgatatgatcggagctggcaaaccaccagggacaggaaaacaaaatacttattagtcgagtcatactatttgttatatgtctgcatttttagtgagctactactttggatccgccgtttcttcgtcaattcatggtgtcccttcttcctgatttctcattcatttcctaatattgttctttgatctacaagattctttattcggtgaaatgaattttctactatattaaatcatc

SEQ ID NO: 150159 - DNA, 443 bp, Zea Mays
ggaataatgctttttagaggtaaaggtgtcattaaaatattggatggtcaaattcaaactcaaaaaggtaattctattagttcaccatttgcattagagtgctctagtgttgaagccgttatccactaaataatacatattctttatatgataaagatattttcttttacatgaatattccaggactagatgttctcaaccagtactagaagacaatggtgacactactattcaaatacaaaccataaggaggaggaagatctcagacatcataacattaatttaaaggggaaaattaagccaatgattatgtaggaaatatattgttactttattattactgatgaattatgttgattcagttaccatcagattgtttcatcctttctattcgttaaagtcgtcattaaactaaaatagatattttaattcttgtggttgct

SEQ ID NO: 150160 - DNA, 525 bp, Zea Mays
cgtctgtgttgtctacttcgcctaggggcccctaaaatcatatagccggccctggagcaatgcgctttgcgagtaagctatcacttcatggatctcgcacttaaatcctcctttaatcaatctctttattctctcctttaggtccatgagataatagctaagacaataattacctttgggcaaggccgcaggagcaagtacgcttcttgttggaacatggctcatggccttgatggggagtagttggtttgtccaaaaaaatgaaagctccagctaaatccgacagacagacatcagtgtaggctctgtccgtaaaagggcctgatcttgctgctccttacagctcacatgagctgaatagaggcaagccaatgaaccatgccaagcgttcggtttctaggaagaaaaaacgagatattctgaaaagatctcatggaggttttgttccattatttcgcttgagcattgaggaagtagtgttacttcaagcttcataaagtgtcatgtctgaagtgtagcatacac

SEQ ID NO: 150161 - DNA, 324 bp, Zea Mays
aaggtaatctaatttctccataaaatcatgatctctatttttcttataggtaaaatccatgaaataaataagtcatttcatgtgtaactataattttgactaagggctagtttgccataagtgttgctatcgctacggtaaaaaaacatgcattctaagttctaagctatcaactagccaataacaaaatagaaagataaagcacataatgaaggtaacaatgtaaatgtggaaactaaaagtgtgtgagatataaacttatgtcgttgactaatatttttatcgatcttcgttgaagctctatgtaagagaagctaacgtgag

SEQ ID NO: 150162 - DNA, 406 bp, Zea Mays
gttgtgttggtctggtgcgcatgtagtcggtctttgcgcggacagtttggtgtacacttgttaagcttcgtccgactgcacccttaggcgactgttgcacggatagtcttcgcggaagacttcgatttttcgcacttgttgtgctagtccggctgcacccttaggcgacttttgcacagagttgtcgcacgcgagggtagctagcgctgggcctcgcggtgactttgtattggtcgaatgtcgaagaccgtcggcgcggtcttttttcgacgtgggtttttgcgggggatttttcacttgtatattacatgactccgcctcattaaaaacctcaccccccaggaggaaaagagtgcgggccagaataaaattgtttttgcgaattacaagggcgaaccggccctga

SEQ ID NO: 150163 - DNA, 610 bp, Zea Mays
cagggaaggccataccctcgttgtcaccaagacgattctaggatctcgatatagaaaattatcatgggcccaccaattgggaccctcgccttggggccccaaaccctggcctctacccttgtaggggcttggcaccgagtgatagtgacttgacattggggcaccccaaaggaataactacaccataaattttgtaagaagccactaaggggtctagggccatgggatgtccctggctagaagaatctaagtcttcgggccctcttgtgccttgaggcactcatgaacaatctaagcccttaggattcctcgtgccctcgggtgctcatgaagggtacgaatactcggagcaatccgaccacgacactagggccactgctggcctgaatatctctagcctcagattatgagcacgactaagccccgaaccctttggtgtctatagcctccaaaggaacaagggacttgatgcaactgagtgtaatcttatcacaagacgaaagggtgtgcttgggtccatcgaggcagtatggcctaaaatcaagaccccacaccaaaaggcctgctaaaaagtccatagcgttagcttatcggataagccttaggtgca

SEQ ID NO: 150164 - DNA, 401 bp, Zea Mays
gttggaaaatagggagctgatgcttaaatccataaagcagcaccttcttcgcgccaaacaacgcatgaagcatcaagctgacaaaggtcgcagtgagcggtaatttgcagttggggactcagtgtatgtaaagcttcaaccctatgttcaaacatcggttgctacccgtgccaatcacaagctcagtttcaagtacttcgggccttttgagattacccagcgcattggtacagttgcatacaagctcaatcttccagaatcatcatctatccatcccgtgttccatgtttcgcaactgaaacaatcggtgaagtccactctgccagtgagcgccacacttccttctaccactttgcaacttcagtttcctgaacaggtgttagaccgccgcacggtgtcgc

SEQ ID NO: 150165 - DNA, 624 bp, Zea Mays
ctctatgcttcaataatgcctggctacattacagatgagttctctccagtttctactacaacatgtttattgctggatacttataatcccataccgagtcatgcgttagattgtactttattctactataaggaaataattattgagcacagtagcacaataaacattgttatttctttgtttcattttgttacgattctcttagttactcttttgtgtgtgtaagcttcctttcttttcttttactaggtttcaaaattcatggcatgctaatgtctgtttttagtgtcacatacttgataagttgtttgtgttgcatacctgaatgactcatgctcggaaatgtttgttaatactattatgcttatcatttctcttccctcaattcagttgcagatagaaaagacaacactgacgatcaaatggaaccatcaattttggcacttgatcgcaacaacacatgtgtaagccctactttattatggactctcaattcagtctgaaggcatgtacatatcttagaagataaacgaaggaatggtacaagtgccgcacagaacaactatgaccagccagctgccaccctgatgccgccacaccatggcatgccggatctcagcatgc

SEQ ID NO: 150166 - DNA, 402 bp, Zea Mays
ctccggaggagtgatttacctccccctccggcctccaatcttatatagagatgcctcaattccattgccccattcccatcgcctgacctccagctccaggcttttgaattgtgatcgtgagagcaagtagaacacggagagatttgtttgcacagttgcaggagagaggatatatacagggagtcggttctttggtttgctgatttgcttggggtggcattttgttacccaaccaaagactgatctagcgagaaggagaggcacacaagtgacggcagtgccgtgcgcgcggcgccacccccaccacaccatgttgagttcttgcgcgccaacgacggcctttccgcccccagaggcgggggccgccgcgccaccggagccgttccggtctctgcagatcgc

SEQ ID NO: 150167 - DNA, 408 bp, Zea Mays
ctcggagtcagctacgagaacaacattcagctccatggccggttgcagaatttggcctgtccttgttccatcgaacatgtcataagtgacatctgcgctcgttgtaccctgaaccacggtagtgcccttcacatagactatgtcgtcgacggggtctgctggcacaggctctcgtcgtgcaattcttgttataacaacttgccgcattgactgtggtgatagaacttctatgttcggcactggaatgtaatttgctgtatggttcaatgaccacatacagaatgccacatggtgatctgtaacgttacggatctctagtgtgcttgacacctcttgggcaaccgggaagcgcaactctttggggtcaacctggatcagctcatttgagggagctgacgagctagccta

SEQ ID NO: 150168 - DNA, 442 bp, Zea Mays
tcaaggtagattaggtgttccagatcgggttgttcagagttggagctgtatcaaataggccctaactctgttaacatcattccttgctctttcctggatccgccccattcccactcaagccagtagcctatgtaagccatccgctcccacctaatatcaccaacaaccctcctaatgcatgcacaactcccaccatgccaaagttctctttaaagatgaataaataaataatgagggaaaggatcaaaggagcatcaaatataaccccgcactcacgcacccagccacaaacgcatagttgggcgcacaaaatgcttgaatcatggccattaaggattcaccatcacacaaccgttcctaatctaggacaaaaggcacggtgtctactcaaggacacttggatgtattgatgcaagtgcaaactaggtggcaccattcaaca

SEQ ID NO: 150169 - DNA, 615 bp, Zea Mays
cacggtttatcagcgtaaaacggtaaaaactggccaaatccaaattcaaaagcattttttccaaatccaaatcaaaagcattttctggatctgctcggtttgacattgacttatcggctgatatgaccgataaatcagttctagaaccgataaaccgacaacacatcaggtaaaaccgaatctctttttttggcaaataaaaacatgtttatgtctcaacaattaaacaaaaaatgtcccaaatgttatcacaagttcaataacaacatttagctatggtaatttaaaaaagatttcaagtgaaaagagaaaaaaatccccctaaccctagctcctatttgacggtcgactaatcagttctacacatcgatttattagtgccacacttcgattatttttagtttgaaatggcgtattttgaaatttggtttcagtaaaaagtcttcaaatagttatcacaagtccaataacacagttaataagtggttcaaatgcaccacatgagacgatttcatggttcaaatacattaaaatgtctcacttttatagttcacaaataatattgaagatacaatacaccctcggtcgttaacataagcatagtcgatacttgat

SEQ ID NO: 150170 - DNA, 801 bp, Zea Mays
gtttgcaaaaggtaggcgagtgtgacacccaacttaacaagcatgatagatggaatcactagtaattttattacaactgatggcagaagtactagtgagtttggacagagcctcatgtctaggatggccaaggcggcgatgccaaatagtggaggagacaatggcaataagggcacgggacaccggggaacatgttggagcaccgagggtgtagaggggctcggagctattgtacccgacgatcacgctcctggaatgaagatccttcatagaaaggccaagaggatcaaattcgacagaacaactgttatcagaagtaaattgacgaactgaaatgaggttttgaacaatattgggggcaacaagaatgttattaagataaaagggacccgatatgatggagtggccagaagttgtgacagcctgacaggtaaagtggatctgtttccaaccatgatggaagtggagcgcggaggacgaaataaagagatgttaccactgtcaggagtcatgtgactggaagcaccagaatccatgacccagtccgtggcgccaggaggactgagggtcatggtgctgaagttgctggcgagagactactgatcccaggattcagtctacagagtccatggcgcagtttgagaggcaggaaccgcaaggggttgctacggcctacgaagtcctaagctgatgcagtggcggactgagctgatgctgaaccggcccgacgggttgggtaaagtgacacgacagaggggtgtactaggtcagagcagcgaagagcgcttgctggggcacttg

SEQ ID NO: 150171 - DNA, 505 bp, Zea Mays
ctataaaaacgtgggccaccaaggctgggaaacagaagaagagaccgagggagagagggaatggagtgccgccgccattgcagttcatacgaacctgaatattgtgcctcggcgaactgctgggaatcttcgggtggtcgagccgaaggattgggaagccttgcgacgtgggttgatggtcggaatcagggttgattcctcgtcgccgttcaaatccgacctcgggccgccatacaccgcggcggactctctctccatcttctcccccggtaagaactcctctggtggatttgctatcacctccgcattacgtaggcgctttcagattaggagattagtgcttgtgtgcgcggattccgtacctcgccggcgggagccgccgcgcgggctacgggcgccgccgtgctcagctgttgcctcacggtggatgacgaaggcccctgcgccgtccgtccaaggatgggcggacacgattagatctagaacccagtcaaccgtggccgtc

SEQ ID NO: 150172 - DNA, 773 bp, Zea Mays
aaaagagttcagaacggctctgagaaaaaatagttgtctagggcaagcttccattatcagtagtgtgtcatccgcatattgaactatcggaaaatcttgaccacaattcgcggccaggggtaacttgagcaggtcttgctgtcgcgctttattgatgatgctctgtaacagatccgccgcgagaacaaaaagaagaggcgagaggggatctccctacctgaccccacgcttgcaatgaaaggttttccctggaacaccattaaggaggactgatgacgtgccagaccgaagaatatccctaatccagctcatccatctgggcccgaagcctccatgcaacattacctgaagaatcaactcatgctcaagagaatcaaaggccttttcaaaatccaatttgagcacaataatctctttttttgaaatatgacaaagatgaatatattcaaatgctcaggccaggcagtcctgaatggttcttcctttgatgaagccatattgatttttgtgaaccagggaagtcatcactgtctgtaaccgattagccagcagcttagtgatgattttcatactattattcagaagagaaattggtctgaaatcacccactaaactagcattatccttcttcggaatcaggacaatataagaagcattgatgcttcgaagacaaacacccccgtggtaaaattggtcacataagtcatagaaatcctgagaaataatcggccagcattttttgataaagttggtattaaacccatcaggtcccg

SEQ ID NO: 150173 - DNA, 540 bp, Zea Mays
gcagtttaaagaaccaatccagcatctttttctcaaattatctttagtaagaatcttatttcttaccactaaccagaagaaaatcttaattttatgaggcagtttagatttccacaaaaatttatatggaatcaaagattgattttccattttctttctgtataaagaattaacagagaagcttttattccccagtgaccacacaattctatcctcatgatcagatagacaaatctgcttacaataatcaatcagatcatcatataataatttcagattacccacaatccttcttctgaaagtcagggattcaaaatttgaagtgaaaacttcgttaacagagacatctttgttataagtcaagtcaaacaaaacttgaaactgactagacaacggttggtcacccaaccaagtgcttttccagaaactagttttcaaaccattacccacatcagttttacagtatttgtaaaagatgtcccttaaactcagcagctttttccagaaatgagagtcattttgcttttgcttaacaacaat

SEQ ID NO: 150174 - DNA, 666 bp, Zea Mays
gagcagaaacaacccgttgtaaaaggccattaaaatcgggaaaataccatattttggctctgtggcgttgaagtggtccctgtgtttgattggacaggctagtttacagtgtcatctgagattgtgatttatgccatactcagttgccatgaggctatcgacatcctcctttttggagcttccttaagcttgcttgcacaatcatctccgtggttgagatggtttctttattgcgctttgtttcggacttttagctgtgtcgttcgggattacctgtgccttgttagtaccagtatcttgtttcgggcttatttgtgcagaaactgacctgctgtagaattccctaacataacgttcagctgggcaaggtttgccaattgactgaacccccttctgtatccagttcaatttggcagcggtattaaagtggggagtgtgtatgactgcaacaaacttgtttacaatttcgtatgggatattgatctgtggcatgctcagcagttagggacaggacacaagtgtaacacccactttgtaagaaaatcgaaaaggagaaaattatatcccttttgtatgcatgagtgtgacatttccgtctaacatttcatatgaacacattacttactcaaataaaccattaacaagagacacctaaataaattgtgc

SEQ ID NO: 150175 - DNA, 462 bp, Zea Mays
gcgggcggcagatgatagcagatgggcagggctggtggcggggacaaagtcacaaagcttcgacgtcctccctcagattccaagtaggggatatggcggactggagtggcggaggtaggtagcggacggcgcgaccaacgatgagggcaggcatactcactacggtatagtactgtatatttagttgacatcataaattttgaaaaatatagtactagagctactgtataatgcaatactttattattatgatggcacattgacgtgaagtactacgggttgccaccgtggagtacaagtgaaagtacatgtaactttttttatggtcaacctttttcagcaaataatagtacatgcaactgatacaagtcaaacatcaccacacgtagcattggcccggcccactaagaaagtcaacattggcccagcccatccgtacacgaaagccatgacaaatcggac

SEQ ID NO: 150176 - DNA, 302 bp, Zea Mays
ccgttggcaaagacacaattggcctagttggaccaattgtagtcgaacggcgaccgtgtgagcctcagaattatcccacctcgcttaacttgggaggaggaagccactttaaaagggagagccacccttcccccattggactagtcttttggggcgattgggcctttccctaagttgggtgtgcttgatgaactgttgggctccgggcaaccctaatttgttgggcctcggccaaccccacctgggctgggtgtatcatctggtatcagagctagggcccattttaagaaggtgggaatgat

SEQ ID NO: 150177 - DNA, 454 bp, Zea Mays
gaaaaaattgaggattatcgggagaaagttagaaaaatccatgttcatctcagtgatggttcacgggattctctacctgcagacctaggtaggccattttcaattggtcagcatgttagtgtttgtcatccaaattctagggactttgtgatggaaaagtggtgatgatgggtctggattgttataaggttcatttagatgatcctgacattggtgttgatattgtaaaggtatgggcgagcgagcatgatgtagtgcgccggccggcgatgcgcaatgagcccgtgactacgagtgctagagggttttgaaataaataatggttggttctgatatctgcataatatgaaactatctgaattatataagtggaagataaaatatttgaagaaaaaggataatgtcatggataattatcttgcatttctaacacaaacttgcatgctcgtcttca

SEQ ID NO: 150178 - DNA, 282 bp, Zea Mays
gcctaaacaaggcatgcccaaaggacacgtttcccttatcacgtatcgaccaagtggttgactctacctcgggattcaaagtgttaagcttccttgatgcctactatgttctatcaccaaatcgcgatgaaggagcccaaccagcctgccacatccttcatcacctcttttggttcatactgttatttgaccatgcaattcggcttaaagaacactggggccacttagcatggatgcatgatctaatgctttggtaacatgattggggttcatggaagcgta

SEQ ID NO: 150179 - DNA, 295 bp, Zea Mays
cttctcttgagcacgtaatcctgcctcagcgagtgcgatgagctcactcaaccttgatgtgttgtcctcctcttccccatgtaatcctgcctctgcgagagcgataagctcactcaacctagatgtgtcgtcgtcctcctccatcagctccaccgtcgccattttttcctgaacgtatcttgcatgtgcctcatctgcgatatagtttacaacacatccaatctatgcaaatataaagagaaataagtttgcaaagtcaggataaataaattgtacaaacaaatctatagtgtca

SEQ ID NO: 150180 - DNA, 855 bp, Zea Mays
tggccattactatatgtcagtagatgagattcctctcttcctaaagaaagtgttcgttgtcaacaagtcaaaaggtaccgcaaagtccaagactttctctccctcccgattcctactaccatacccaacaccttcatgccccttgaggtctcctcccatgaaaaacttctcactaataggtatagttctaacaatgctatctaagtctccccaaaaagtcacttagcactctcattgggggtatacacactaattacgtttaagatcaaatcacctacgacaagcttgactaagataattctatctccttgccttctcacatcaaccacaccgttcttgaggctcttatcataaaaaaaatcctaccttatttttgtttgcacttgtccctatgtaccaaagcttggagttgatattgtccacctccttcgttttctgacccttctatttagtcttttggacacataagataaactcttagtcgctgcttcaactaacttctttaacttaccagtaagcggccctacattccaactacctaaatggtcgactaacttctttaccttttgcacccgtcaatgatgtgaaggcccttgctcatttttcactacattagggcgatgatgtagcgcgccattaagaaagcagcgatccgattcttgctcatttgacaccgtgcccaaatcacgacacaatttgtcaccaagagggtgctgatctggcccttgcccatttagtaccataccctgggttccaatatggtgcatcgctaaaagggttataccccaacatttttgggttctgtctcaattagaaatgctaggtttaacattagcttgccaaggctatcataac

SEQ ID NO: 150181 - DNA, 625 bp, Zea Mays
gaggtggtgcaggcggaggcgtacttcgcgcacccgagctacgcggaggcgctctggcggcgctgcggcggtgaggaggccgagattggagagtacaccgtggaccatgccggcgagtacgtcccgaagagtgagcgccttgccgacgctgctgggcttattgacgccatccataggttcgtcgccactgccacggacaaccgacgtcgtgctcacggattactaccatagttcagtgaatatgtcacgtgtttcctcttttcctgggctagtgcttcggttgcagctgagtctgtcacgaactgtaattcatcctgcaaatttgcagacactgcttttaggctatgcaggtcgtcgtattatgtattcagcatgattgaatccgagttttacgaatgagaaatgttataccacactttgtttggacacatgattcttctcttttcttttctttttctctccggtgagtttagacgaatgttttgggaagcaggcagaccaggagacggtggcaaggcgaaagagacagggaaatatgagatggccgcagagctcgagcgaaatcctatcatgggtgcggccactgcggtctgcggcggggcggtggacggcagacggtaacagc

SEQ ID NO: 150182 - DNA, 354 bp, Zea Mays
ccgatatccaaggtggtcgcgcgggagaatcggataagagctacggataatgctcaaaacatcgcgaaccgccttggcctgcgcttgtccattccttgcgtcggcccattccgccagcagttgtcccttggcccacgaaggaatagccttgcaagacagtaagcataaaacctgtttgcgaggccttctaaccttctagtggacccggaggatatatgtcccccacattcaccattggcgatgttaagcccacaaggatctgggtcttcaggggcctatggaccccgcatagtaatgatagtccccatatcgtggagtccgtgttcgcgtgacgaagtcttcgcattcgggtaa

SEQ ID NO: 150183 - DNA, 502 bp, Zea Mays
gcaatctgcttaatgtattgcccatggagccaacagtcaatccagaaaagggtcgaagatccgtcaccaacaatggaacacacataagttgagaagagggctgctgcatttggatgtatttgaatattaactacagtccatggtctgtccggttgagtttttttaagccaaagtcacctcatgtttagtacccaaccaagaattccaagttgtgcaaacccaaacctccttgcctccttggttcactggtttgcataccttagtccaaccaacaacacaatgacctcctttgatatcactatatcagttcttcctttccatagaaatcccctccggattttatttattgccttgacaacccatttggggcattgaagtgctatgagatgatagggattgccgtaagcacttatttaactaatgtcgccctccctgctggatggattaatgcagctttccaactaggtaacttatctttttctcgaacacgcaggagagctgc

SEQ ID NO: 150184 - DNA, 444 bp, Zea Mays
gttgtacacggcttgttcagatgatcgaacttatatgtgcttatttttggtggtactggactggcaaggaggtgcagttgttttttgttttcttttgatgcttaggtcactgagttttggcggtggaggtagactaggtgaaatgctgtggtgttcttggctagctttgcaggatggagccagtgagccaccgaggtgggaaatgtgccttggggggatgaagccatctttgtggaaattctatgaccgccactttcgtgaagtgaaagccatatcaccttagtgccttttgcacttgtgccttatccttcagaccatgcagagcgttagagccacagagcagagtgaaacgatatggatgatgttggtaaagatgtccagtatcttcgagcgttcttgtgcgtgcgagcctgtatgttcgaagcggtggtattcatggatacc

SEQ ID NO: 150185 - DNA, 370 bp, Zea Mays
cccacacacttcttttcatgacttttcttttagtgtaggcacccacatatttaacaaccagtttccctgaatcccaagtcaacatataatcacaaaggtaagaatgtgaaatgggagctctaaacttttctccacttgtggagaccacatccttcatcttgtcttttgtgtaactcaagtttacctttgcttgagttgacttgtcatttgaggaatgaatcctccccaaggcatcatatagggcggttccctctatgaacttgggggatctccaccccttatgctctatgctagggtttaccttatgtgagttgtacccaagcccctttctcccattgttgggctttaaggacttgtacttgggttcaac

SEQ ID NO: 150186 - DNA, 467 bp, Zea Mays
gctgcattcgcaaatgggaataccacaacccctggaatctggatataaacctgacagctttatgtaaacaactttgttctagttaagtagaaaagttgttggggcatggatcctttagaattcatttagttccctagcctttaaattatctactagatttaatctttctgccaataaaactaaaagaagttatccccacacccacacccacataaatgataggagaagtgttttttctctcaaacacacacaggagagccgtgtatctttgtattatagggaaggagagtggtgcatacaagaacccttcttttacttggaccaaggcaagatgagtaaaccaaatccaaaacaaccagaaaagactttctgagattataactaatcgaccctactatgcaaatccagtggacctagagcccaagacgccaggagaagcgtgaactttggaaaataaaaatgttgag

SEQ ID NO: 150187 - DNA, 496 bp, Zea Mays
tttttatcttgcgattctcaattcatactcttcacatgggttacattgaacctgctcaatttgcccgactagggcttcttgcaatcacacttgttagtatagcatctcctgatcatgaattaaggatgttgggctacgagtgcctaggaaaattcaaaaaatcccttgaggtacctgctgtttcatgaatctctaaattttacctggtttattatattcttatcaactactagctgcttatattggattttctatattacaacttatcttcgctgggcgaacatattgttggttaatgtatatgcttgtatcagtatgttcaaattctagcatttgttaaaacgtttaatgtgcttatttaagtatgttgaaattcctgtagtttaaatattttttaattttttatttgttaatgatattcacttgtgatggcttttatgcctattgacttgaatggcagcataaaattatgcctattgacattctgggggcattc

SEQ ID NO: 150188 - DNA, 524 bp, Zea Mays
caaaatcgaagaatgatctcagatgcttcttacatgtcaatgatttcaatccttcatggaggaagagtgagatgtactaatccactcaaccattgatgttctaaagggaagatcgatactcctcgcatgtatatttcttcagcaatggtaccttctctgaacggacatgacaagacatttcagttaaatatttattacacgaataatctaggacaccttttcaggtttgtccctatcaacacgacttgttcatcgtttggtcatcggagagttggtcatctggtccgcctcatagagtttgtcgacggagagttgatcagccggtccgcctcacagagttggtcgctcgcgaggttggccttgggcgagtcatgactgtgtatcccgcccggggttggcctcgagcgagtcatgactgcgtctcccacccgaggttggcctcgggagagtcatgactgcatctcccgcctaggattggcctcgggcaagttgttctgactgcttctcccacccgaggtggcctc

SEQ ID NO: 150189 - DNA, 772 bp, Zea Mays
gagagcatggcggctagagcattgtgttcccggcgatccacgaggttctaacttaattaaacgggtcagtgatcatccatagcacgtaagaacgttgaaacaagcacgcagaggacaagtgtggacctgatttgggctggccccaaagaactggagttcacggtgttcttcagctgatttgggggaaatcccaaattcgagttctctgctgggggtttcggggtgcaggtgggtgcagtggttgcttgagtacatggcggagctgagggcgcggtcaatttatagagtccgtgcgcggtgatcgcaaatttgggcgctgacgcgcggcggtcggaggtgaagaagaaccaggcacgcgtgagtgcgtgtccacggtcgtggcgagctcaccggcgatgatgggactgttatagggagtcacggtggcgcggtggaaagactcggacacgcggcggacacagagatggcacgacggcggcgagcaaccttatccacggcggtgagcgagtggggatgaattgcggctagccggagtgacttccaagtcaccggcggcgaagatattttgaccccgcgacgttatcgacttatcccgagcgtgaatcacgacgccgacgacgcgaatcacagcggggaggtcaccggcggtgggattcttttgctgcgtccgatctgatccgttgggggcactgtaccatcgtgaactcccatgagagcacctgacagagcattttgcagaggaatttcctcccaatttcatatggcaactcct

SEQ ID NO: 150190 - DNA, 923 bp, Zea Mays
cagaaagtccgcgtcaccaagccgcaaagctagaatccttccaccacagccatggtgccatcacgacacaataattgattgccactgattccagcaaggttctaataaatcttgtagatgcaacctcgctttgcctgccgccgccagtcttccgcctccgccacacacaaatgtccagtttctttgctgtagctgtagctttggtgctctcatctctcatccatggaaccacgatggccacagcgagcagcgaagagagcttcttccagaagtgcccagcgtccaggtgcagcgaaggagggccagagatccggttcccgttccgccttgcgaccagccctctgtcatgcggtgcgcccggcatggagctggtgtgctccaaagcagacaccgtcctggttcacccaaaccttggcttgtgtaaggtaactgccatctggtatggcggcagcactataaccatcgtcccactcgcagtcgcagcagaacccaagtgccctttccagaagatcatctccaccaatctatcaaccgatgtgtatagaccttatggggatagggcaaccttagtgagctgttcagcagagttcatagtaccaagccatccggccagccttgctggtcccatctcttgccttaccaacgctagccgccggttcgcttacttggtgccgtcttttcgaccaatggatttccttcccttggactgcacggttctttcgaatagcatctcggtaccttaccctgcttctgtcaacgcgggcttcaacggaactgcaagaggagccatcgcatttggcgagacaatgttagaatggagagttcctaacattaccgatgtctgccgagactgcgaagctgaaggaaggctctgtggatttagctccgagagtaggcaagcattctgtaagagtaagaatcac

SEQ ID NO: 150191 - DNA, 488 bp, Zea Mays
ttgcgtgtttctttactgcatggatacaaacatagtaaattcttgcggaggaattaaaatttggggttcaactggatcccacggcttgattttctcttggttaaatattgttcttacatataggatagacatgctctatgggggtactggtgtttgctagtttggtatatagtcaaaattctgaaataagaatcagtttaagttttgttccaaaatgcgataatttagtttatgttgggtgcaatgtgtgtagttctccatgccttttgacatttcctgacagattgcttattattccatccactccccctatggtttgtttgcatctgttcttctgtctcaaactcgcaccactagtattagttatttcacaggatttggtcgtttcaaattaaaccctatgccgcattaagtaatgccatgtggtaaattgtaattttcctgttcaaacaacacaacgacatctctgatctatatgacactagtaa

SEQ ID NO: 150192 - DNA, 609 bp, Zea Mays
tcaacgggcgcgaccctatcttctcccttcgactaaccgagacggcggcgccaccgtttctcacccagccgagctccggtgaggtcgccaatcagcgttccccgggcgctaagcatcaaattaaatcgagatttaccatgcggagggcgggacgaacacgagggacggatttcttacctagggaatggagcacaggggcgcaaccacggcgatgtgctgtccacggtggtgttgttcctctagtgagcaattatggggtccccgtccactaatcccgcacgccgaggccaccagcaccctcaccgcacaccggcgaaaccccaagacacaacgcagatgaggcggcagcagtgagcgcccggttccacttcaccgagccgcggcggctctgttctacaatggaggtgcaggttttctgcgtaactggaggtggcggctaggggtagacgatgcaaccgaggcgggggttagcacttataaagtaccgggattccggccgtacctccacgctggagtcaacggatggccggtgagattttcacggggcgattccgccatggacgggcgagttcgttgcagccgcgactgacaacccgggcccagcacgca

SEQ ID NO: 150193 - DNA, 522 bp, Zea Mays
cttggccgccgaggccgttgcaacctcccgttgtgatcttgggtactcagccccaccaacacgaccccgtgctcgcctctataaagcgtccgaccctgaagttcgtaccgccccgtcgtgtattcgggtagtaaagttcgctgccggggtatggggtagtgtctgcgccgccttcgacctcgggcgattgtcggtggtggtccgccctcgcggatggaggtctacgcccggggtactcgtgccatgggaatttgggccttgggtgatcgcgaatgagcggcaatttctcgccgaggttgatctccgccgtgaaacagcagtgcaccgtgggcagccccgcactctccaccactactggtaagactacttcctgtgcgtttgccatcgatttgcttcacgaagatcgcgtcgtgtttatgggttttgcgcctggacgatgtgtcgcgcgcggcggcgatggggctccgtcgcgggtgcttggcggcggcgccgtccgaatgcctgggcaagatgagagctagg

SEQ ID NO: 150194 - DNA, 741 bp, Zea Mays
atcgtctttgtccttgggtggggaggtggtaactggtggattggagggataatttgtggagttggcgggagaggtaatctttcttggtggtgtatttggctgtggtaattggtggaataaggggggaggtggttattttggtatcgagggggttgctgggtgtcttggtaatggaggaggtgtgggctttggtatttgtcggttggtcttgtgttgtcctcgccattctttctttggtttctttcatcactgcacagtccatggtggagtgctcgcgtctttgccatggaggaagacactgtacaatttttggtcctacatggggactctgcctcgcccagggcctctgttggtcctaacccctcgacctagttgctgagggtgattttggttgcaagggggctttgacatactattgttgattggtgatgttgtggacttactattatggtttgctgctagattgcgaggtctctttgggctttcgcgatgtttccggcttgtggtaatgtagctcctctgatcatgcatatttctcgtgaacttatatagttcctagagcatggttggagggtccatagtgtagtggctatagagatggccagctcgaaggccactgattacataatggatggcgatacgatctttgactgatgggagttgtgactccatcagtaagaatctattgtagtaattgcagaggctttcattcttctgcgcctgtaaagggatagttccgtg

SEQ ID NO: 150195 - DNA, 285 bp, Zea Mays
gtgggtgagaagatcgacacatcggtacctcttgtgatcagaagaataacctaggaaaagacaacgagtggagcggggcgcaagtttgtggggagcagtggcggaggtgttgggatagcaagcacaatcaaagacatggatgtgcgtataggaggtggcgctgtcgaatagggcgaagaaaggagtgggatgactaaccgccttggaggggaggtggttgagaagataggtgacagtattcagtgcctccaccgagtagctgacaggaagagacgtctggaagag

SEQ ID NO: 150196 - DNA, 424 bp, Zea Mays
cgacctcaccggagttcggctaggtgtggagcagggggcggcgccgccgtgcgcgtgggcgctgttggggcggtgattgtgcgccgttggattctagccaacggctgagattaagtgttgcgtaccgttttcggacgggcacgctgtgaccgtagatctgcgatcctaaggctcggattaaacctggtctcattaaatcgtaggcgtcggagttggatcctgtggcttagatcgcgtaccgattcacgtatacagcagtctaatctggcgcgcccaagtctgatccaacgaccgggatcaaaccgtgccccttcgcgggtcacttttgttaaagagccctcggactttagtgaaatcaacccgccgtcctatatcactgtgcgctgtgtcttaggagttttactccgtagcccctgtgttttcc

SEQ ID NO: 150197 - DNA, 540 bp, Zea Mays
ggccgcatggagagatactacagcttctggtcaaaatcggtgagctacccgtagacacctctatgcttcttgtcctccacgtccgtgagattggcctatagaatccagaagaaaggaaaaccaaggcgtagggaggagcggagcatgctggcaggcagacggggcacggacacaccagcctcttggcgatggcgcagctccccacggcggcgacgtccgcgcctccgcagtctaggagaaggtcgtcacggccatgggccaggtcctagtgtcgagcgctgcctgcaaggccctgctcatgtccggtagtgtcgtgggacgtgagaaggcccaggggaagagagaagggctggagatcctggcgacgtgcagtgcaactcgacaagaaaaatacatttgaggggttgaggctcttggcgacgtgtagctctgcgagaagaagcagcttcgtggccggacggccgcgccgacgcgcgaacgttgaggaaaaggatggggtttctggcgacgtatagcacgtcgagaagaggcttttgatgg

SEQ ID NO: 150198 - DNA, 315 bp, Zea Mays
gccaagtcttgcttcatttctttcttgtaactctatgagcacataaacatagcacctttctcatggcctagatacatataaactttcaaaaatacttcatcctctcagacaaataggctaacaatattgtacaaccttaatgtagtttttaactgagtagcaacttctgataactaataatcaaagcttatattattttgaattgttgaactagatgaggtaggctagttgtttgaagttaaatggaagccagtgctgttgtttaggttctgaagcaatttttgctgcaggttctaaattatggatgttcaatgt

SEQ ID NO: 150199 - DNA, 516 bp, Zea Mays
ctcgttccgttaccgtcgtaattcctccgcacccgacccgtttcgtgttcagcagacaccccactgctccccgtcgcctccgcatctcggggaccttgcacctcgctagcgcatccggcgacttcccagaagctgtagcggccgcgccgggcactagtaccggcgcggagcccatcactttccgcctacctcgccgccgccgcttcggccggcggccatggcgaactacctcgcgcagttccagaccatcaagtcctcctgcgaccgcatcgtcatcgccggtacgaacctgtcgcctcccctcttaattgcaaaaacataattctatccccaaggatctgaactgcgctgcgggggcgcgatctgggtagcttggtccacctgatcttgttgccgtgtgatctggaaggttccgaacgagcctagattcgtgcaggaatggcgttaccgtgctttgtctggttgtgtagctgagtgcctgctcgttgcatagtgcctatagtgatagtttcagaa

SEQ ID NO: 150200 - DNA, 442 bp, Zea Mays
ctacttcttgtgtcctcatgaatccctcggctattcttatttggaacgtgcgtggccttaataagattgatcgccgtaatgttgtcagggatgtcatcctctccagtaatgctgatattgtttgtttgcaagagacgaaggtcgctattttgacccagcaggtgctcctttcagtttttgggactgtctatgataacttcgtggctctacctgctgttggcactagaggtggagttctggttgcttggaaggggggttcttgtcaggccgtcgcttcaagggttgataatttctcagtttctgttcttttcgctgagcatgaaggtcgtaattggtggctaactggagtctatggtcctcaaggcgatgatgaaaaagtgttgttcctgcaggagcttagaaatattagggctctttgcaatgggccctggcttgtggcagg

SEQ ID NO: 150201 - DNA, 834 bp, Zea Mays
gcaattctaagggctccggtcatctatagtctagcccgatcgatgctacgtggcttctagatggtcgcaaatcgagtgggagtgcatacctaggatccctgggcgaaggcgagctcggccatgtgcgaatgaagtcccgccctgatgccggcgaggaattgacccccgatgcactgaatccgcgccccacacccggtacaaaactgcacggtgcgcaacggcgagccccggcggctggtcacgaggtcacagctacggagaatttctgagcgcagcaatggcggcgccgtcactcaaatccacgaatccctctacgtaatggtaccggcgagctaaggggtaagagaagaagggataggtccgcctacttatcccgcggcgaccaactgtgcgagaatcccgccacagtggttgcgaccgcggaagctacggaggaattggttgcagcgcgacattggcggtgtggagacgatgtcttcggactcaccagggtgtgacatgtggggcccgggtggaagagagaccaggcaaagaatggcgcggcgcgaagtctggatgacgagtggggcccttatggcagagacacgcgtcggaccaggggagcaagggagtcattgacagggaagccccacaggtcagggcgccgggtgagcgcgtgcggacacagggagtctgggccgcgcgaaaagaaagcaaggtgggccggaatgctgatctgcggcccaggtaggtttcctttccccttttcttttattttctattttcctttcttgttttctttttttattcttaactattttgaatttaaatttaaattttgaatacgaatttcac

SEQ ID NO: 150202 - DNA, 322 bp, Zea Mays
ggctacctgcgctgcctgcgtcgcctgaaatcggcagacccgctcctccagtgtccgctccttctcctccagtttcttctccttctcctctgcctcaagttcatgatcggccatcaacttgtcccgcctatcccacatctcctccctgaaggcgaggtccttctcctgctaggcgagattcgtcgcccgctcctccagggaggcatccttcgccttgaggttctcctcgtcgagagcgatgttgctggccctgtcatcgagttctcgctgcagcttttgccgactcgccagaaccgcggtctgcttgtcccgctgtttctcc

SEQ ID NO: 150203 - DNA, 477 bp, Zea Mays
cagactcggcagctctcagtgaatttctcctggaacgcctcaaagggacaactgcgcccacctctacagaaccggcttgagcagacttcccccttggcttggcaacaacaggcgaacaggtgacttgggacctcagttcacagtcttgagcctcagcacatagcgaatttctgctggactgcctcacaaggacatctgcgcccagcgaattcctcctagaccacgtcatagggacatgtgcggccagcgaattcctcctggacagcttcaaagggacatctccgcccacctctacaaaggtaaccttcttcgtctcatcagcatcgccgccaatttgcctcacacaacccttcctcgctgccactccagccacctcctcctctgcactaacagccctctgcgaaagcaaggaagcaaaacccagcaacagcattagagaacagtaccgccaaccatttccataaaaaaatgaacgtg

SEQ ID NO: 150204 - DNA, 302 bp, Zea Mays
gtcgaacgcgctggtggacacggagagaggggcagtggcccacgcgacattgagagcaacccaacgcccgtggtgagaagaactgggcagtgggtcccgcctggcggtgactggcgcacggttgagagagttgggctgcgtagaggagttcacagggtgggctgaattgcaagccaaaggcccagtaagttatttaccccttttcttttattctattggaatttccctttacaaatttgaatttggttttcaattcccaaatccaattgaaattcaaagttcacagcaaatttgtcttcaca

SEQ ID NO: 150205 - DNA, 475 bp, Zea Mays
ccgtgcctgccacctctctcccttctcggcctctgttccaagctcggccctgcccatctccctgtgtcgtctctagccttctctccctggacgcgcgcgctctgtcttccttgtcgcgctcgcttccatcacgccgcgcacggtcggagctcctttctctccctcctatggcgtgctcccctgctcctcctggctggttgtgcgccctctccagcgtcgtgcccctctatgctcactcgtgcccagctcatctccatggccaccgctcgtcgctgccccctggtgctcggacctcgcccagccgagctcctcctttatctcctacggcgcccggtcgccccttctcccatgctacgctcctccccatctcccatgacgcctagctcggactgtgccctactcccagatctcgtcgtcccagccatggccgcgctttctccctgctcggctctttggagctcgccgatgccgcttg

SEQ ID NO: 150206 - DNA, 631 bp, Zea Mays
gagagacagatctgtagtggatgtttatgcgttctttgtctatattattatctggcatcaaacacattactgttttctccttcgttccgccctattctcacagcttcgccctcttcgttttacgacatgctggccgctcacatcaattcacgtgtcctagaatccttctcttgttcatagccatccatgtggttgcttttctgccactaccggattgcccgcttcatttggcgatagagtagatggaagcacaggagaggagaggagatgaggaagagtgatgcaacgatggcgaagacgaggaacatgacgacaatagcagtgatgctggccacgaagacgaagacgaacaccaccatgacaacaacctgctgcaaaaagtctcaaactgaagtgtggcttataattcagcgcgctcttcgaatgatgaggacagatgcgtgaagaacacagtaattaaggatgatgaggatccccatcgaggaacacgaggtttagaatccaacgtagattgtggtggtggaggatatgaggtaataagctctgtgccttctctcctcgatattaacagcagcaacgacgacgtggcgttcgtttaggaacacgtatagatgcatggtgacgctggccg

SEQ ID NO: 150207 - DNA, 1025 bp, Zea Mays
gggactccggggtaagaatccctagacatagagcacagtcgctaggatggcgggtttattctataaaaacataaggttccccatgtaaaaatgccaggtcgaaggggtatcagcggaccagggccgttggattagaaatcacgcgtccagattaatccggacccgggttatgtatactgctatgctaacaaccgttggatcccagatccgtggtccacggcgcacgatacgcacgccaatttacagccctcgatccaaagatctatggtcccagagggaaccgatcaaatcggtaggctaagccccaatccggtttgtctattcacagatctacggtccgatgaccatcttcatcccacggacagaccccgacgacgccgtgcatccacggtggcgcgatggacattcacggcggcgacagcggaatacaggacttctacaccaacccgatgcccttcatcaattaactcgcgcctcgcaaaattgatgctcccctaagctcaatcccccaaccaattttggccgacctcgagtgcacgactcggtacacggcacgccgcggcggcaccatggccggatagcggacccaggggcatagctacaccattttacaattcgctagcgcatagcctaaaggaagggaggacggatatggtgggggctcaccaacggacggccgaggccagacgacgctcgtccacggagaggggcagaactcgcctgcagtggtcacggcggcgagcaattcgcacaccacactgacgcaaaactccaattgaacgcgcggccggcttccttggacgattacgatccttcttggccacgcaccaaggaaaaaccacccgcaccgaagggggttcaccgacggcgcgacaaattcttcctagcggcgtcaattcctctacgcggcgcgcggtgttctgggagaactaagctcgcacggtatggtcgcaggggaaagaacgggtcacgggaacacctatttatcccacggggtttcgacttggagggagggagaggtcgcc

SEQ ID NO: 150208 - DNA, 445 bp, Zea Mays
gccgccagcaggaaggccaatccacccgcaggctcccggtgtccggcgttcggctccactgcccctgacgtccgatgttctgctcctgcgcgggcgcggctgcgctgcagctccaactccggcgtccgctccgctgctccagctcccaacttccccccgcccaggtccagtggccagctggccaacgaacgagcgtccgctctaacttcgtcctgtgagttagtgtgtgaccgtgtgtttgcagtttggttattggattggatgcaaggctgctggcaggctggcagcatgtaggcgtgtaggaacgccggggtttgcttgttggattggaagtaggtttgcttgttggacatgtagggctccaggtttgcttgttggattagatgcaggtttgcagtttgcttgttggattgaacggaggtgcagtggcagtgcctagacccta

SEQ ID NO: 150209 - DNA, 760 bp, Zea Mays
acacctaatataaatcgaccacttcattaagaattacaactcatgttcataagtaccattgttccattgatttaactatgatgacagtgttaggatcaaagggttcttatccaaaagacgatgattcaaatcgatgtacatccatttggatgaacctcatgatatatgtaggtctttgacgtacatatatcaaccattgcttcaaatcattcaaaatgacaagcaccatgatgcctaagagagggatgaattaggcaatttagaactctactactaaaatatggcctctaatttacaaactaataaaaacatatgcaagaaataaactatctaaaagtgcaatcaatgttttgctagatgtgtggctatatctaatacaaaaggttatgcaacctatgttccattcgtatcaactagcctatcaactaagataggaaggtaaaccatatgacctaagtacataatgtaatacaaaaggtaaggaatgataaagatgcaaactctcgttctatagcgccagtatttattatcgaggttttgagaagcgcgcaagcttcccctagtcctcgtagtaccccacacatgggtagcccacaagctcccggccaggtaacttcgtagatagccccaagccttttccacgtgcatgtggtgctctaattttggcctctctcaaatgatccccatcattaccactatcaagcttaagactaaaatgtcgtggggtttgttctctctagtacatggtggtggccacacc

SEQ ID NO: 150210 - DNA, 512 bp, Zea Mays
tcacttgtccaggcaaccagaggtcaatctatgaaatcattttacattgtgctagagtatgaagaagaacgaagaaagaatttaggagcaagtgcaagtttgtggactataaaatactataaggtctgcatgtgtttgctttccttattttccattgctcggtcttgtcaattatatgggaattcattgaggatgcatgcattcttatgttgttatgttaaatcgtttaaatgggtcattcttggtacaggggttggagacaagcacaaccaaagaagggtggaagtactttgaagatattaccgatcaaaaaaaggattttgtctaggtagatgaccaagatggcagtcatactgagttagcatttagcaagaaacgaattgctgataggaaatagtggcttacaaatttctaggttaactctcactttctccgtcccaaattataaggcattttgtcatttatggattcatgatgtttactatgtatctaggcataacatatatacatgg

SEQ ID NO: 150211 - DNA, 280 bp, Zea Mays
gggaactccgatgatcactgagggtggtggacagaacagagtgactagtgattcgttggcttcacaatgaagggacgaagagctgtgctcggttgatttggatgaagggggaagagagcgcggtgaatttataggcccagtgagccaccgcgaaggccatggtgataaccatcaccggaccttgctggcgaccaacgacgacatcggcgctggccttttctaagagtttgccacgttccgccgcgacagtaatgccgtcagatcggtgatggcgtggatg

SEQ ID NO: 150212 - DNA, 412 bp, Zea Mays
taacgatacggacgcacagcaaaaggattggcgcctggcaacaatggaatggcatgatcacactgtcgggtaggaggcaagccaaccgggtcatcaaaaacttctgtgaattgggagagcactgcctgcaccctgtcgtcggcaggaatttgttgctggtcactggttggtgttggagagtcagaaaacagcctcagttcaatcaccgcgcccactggtaacgtcgaccgcattccttgaagacagactgaggtgccctgataaggaatagtaatccacttgtgataccaatcaatatgcatgggactataatgctgaagccaatccatgcccaccactaaatccactgagggaagaggtaaaaaaatgaaatcggaaatgaactggaaagtggccatagaccaagtggcct

SEQ ID NO: 150213 - DNA, 482 bp, Zea Mays
atatttttatgtgggtatggaacaggtgtcaaggtggctatatccatcggactctttatcccaccttctatctcactccatattttaaactctactctgtaaatagtgcgatacagtgtaaaacaatgttttgcacgaccatatacatactctgtagagccgaccttactaaacatgggtgatatgggtatgggttgggtgcggtttggatttcctacatggtgtatgggtcgggtattggttggttgccattaggaggcctaccttttttaggattgagtaggtcgtaagacttgagattctgtgcatgtttcaactgcaactgtatgggactagcgccaaagctaaatgagaaatctagcgtggtgaaacacatttcaaattgtgaatgatcaagggtagagtcaagaatctcaagagtcctacaaacatgagggctagtttagaaactcaaattctctttaagatttgagggactgaag

SEQ ID NO: 150214 - DNA, 1413 bp, Zea Mays
gtaacatgcataaattgaatcatggattgtgaattgaagcttgctcattctaatgatcttagtccattgtacccaatatatctaacttttttgttgttactctttcattcagttgctagctgatagtgtcattccaaatgaatatggaataaatccaaagcagaaactcaaaattggctcaaaggtacttgcatgtactacaattcagcagcttgggacactgctcttgcattattcatgttgtttattcagattttttcagtatttgtagtaagaaaggcattggtttctgttttctggacataatcatatcgctgcttcttctgtcattatttatagatagcacgccgtttattggggaagattctaattgacctgcataacacaagacgagaggttgctgctgctgctgctgaatctgacatatataatgatataatgacagtgtcatctgcaaaacggaaggagaggagttactatgaggaggttaagcatgaatgtgttgaaagatctatctctaacaagaagggcattgatctagatgactcccacgaggaaacaaaatactgcttggatccaaagtaagttactaagcaattccattttttagttgtaaaacatatcaagtaattttattgcagatatgctaatgtggttgaacctgagcgacgtgttcgaacaaggctctattttacatcggtatgataactgacatgtaaactctgaaccgtattgtataatgattcttcaaaggaaaccatattcttttttttcatttcaagaacttctagctaaatcggtttacttgggtacgtctacagaagcttatgttcatgggttcttgatggttgaagagaaaaaaaacatgtatactgtcctgaccctgtcagtgtagtatttgaacgttttgaagctatgttttgcttaaacgttttagtgctaatcaaatattacacatgtgttgcttgtgaacatttttcatggcttggtcatattgcagtgcttatttctgtgcgttcgagagaaaaaatattgtagtgctaattaaatataaaattttcctggtgaactgctgaaacaaaagtgtcttacctttttttctaaaacatgacatggtagagatactttatttggtggcatttgttaggtttcatctctaacctactcaacttgcttggaactgaaagtttttgttgtcattgttccttcatataatgttttatccccctcataagtggaactcaggattttgttcttggcaggaatcacacatacactctctaatgaatgtacttcgctattgcaatttagatgaatctctgaatggagaagagagtcttgtttgcagaagttctctagatctgctatttaaaacacgtgaactcgactacatgagttacattgtcttgcgta

SEQ ID NO: 150215 - DNA, 565 bp, Zea Mays
attaaattatgaatttgaaaattttaaggaaaggaaaaggaaaagcaaagcataaaagaataaaaacaaacccaactaactgggccgcaggccaacaattcggcccaaccccgaatcacacccgcgcagcccaataactcctcctcacgctcgcataggtgctgacctgcgggtcccacttgcagcccctctgacccacgcgctcgcctggtgctcggtcgctgacgcgatggagcccactggtcaggtccgccttcttccccgaatccgcgccctgtaacagctcgcgatgactgagcccgagctccgtatccaccgggaatttgttatgaaatggaccgactctcgcgtggatgtgggggcataagaacacctgccgccgcccgtcttcgggcatagcttccccaacgaatccctcgcgctcagaaaacttgaagctctcgcccaagctcggattcgccgccggggatccgcgtgcatcgtgctcgggtccgattccccgcctgtaagcttcgttatccatcccgtgaccttttctgtttcaatttggtgcggaatcatgtgt

SEQ ID NO: 150216 - DNA, 606 bp, Zea Mays
gcaaaggtttcctcatagtatattccctcctagtaaaacccttgggcaaccaaccacgccttgtttcaaactaccaacccatcctcactttttttgttttttaaaacccactttgtaccaaacaggtggcagttttgaggaggtggaaccaaaacccaaactagattctatcaaaaaattcaagctcctcatgcatggcattgacccagttaggatcagacaaagcgtgtccaacatccgagggtttgaaagaagtaacaaaagcagagtgagcaaagtaggacatctactaatacctagagcacgtgactcgttcatgaagctcatcaatcatctgttgaggagggtgaacatggtgggtgtggcatggagcatctctcaacgatgccacctccccctcaataatgtcaacacctctaggcttagtgctctttggctcaagcggtccccaagtcatggaagaagtcatgttgggtctatcatttgatgtagtggacataggatcaactaggatagctagtggagttagctcgatatcaccccagttagcgttgttatgctcttactccacaaaaatggtctcacacatctgatcgtgacctgcat

SEQ ID NO: 150217 - DNA, 805 bp, Zea Mays
ggggaccccccaggagcccgcccactaaccagggggaccagcgaggaaggcctgaggcagttgggctagagcaggggggccctgaggtcggtggacgagaaggtgctggagattgtagtagcaccctggccacatgtaaatcgaccccgtccaaggattgtagtagctatggccgccttgtggactgagaacttggctggaaccagcggacagtgcaccacggttaccaccggaggtccggccaccgcgcttgcctcgcttgccccgctactggaaggagtcgtcaccgccacgcccaccagtctgttgttgctagttgggtgaaggggacgcggctaggacgactaggatccgctggagctgccggtattggacagagcagcgagggcagcggccggtgcggcctttgccatcgggagttcctcgagagccaggtcatcacgaacctgcaataaattggggagtgggtgggtgcggcgcaggtgaagtccgagaacctggaagtgctcgttgaggcctctaacaatgttgaggaccaaagtccggccagagactggttcgccgagatcgtgtagatcttcggcgagtttcttgtagcggcgacaatattcagcgaccgggagatcgcctggagaaggagcggaattcttggtcggcataaagagcacgtgtggtgcgattgccaagaaactgggactctatagagagccagagagtgcaggcagaggcgtcgcgcttagagacaatgtcagctagggcatcagaaagagtgccaaggagccaagtgcggacgacggcattcatg

SEQ ID NO: 150218 - DNA, 840 bp, Zea Mays
gctacaattatttggcccatatatggtttaaccagttaaaaaaaagaaagccttcaaataaccaattataattaacatagtcagcaacaacaaccagtaccaaacatcttgaaacatagttgaggcaccctagatacatcaatcggtgcaatatgacaggattttattaacctactgtattacaaaatacaagattctcagttaattatgaaaacatgagcatttgcttatcagcatgtccacacattctggatacatacatacatagcaaaagcaagactatttcaacaaaggtgacctacgcaagaagctataacatggatagggatgacaaaactggaatgacaagtcctcacgaatcatgcggagcatgcacctagcaagtacatggaaaatactggcgtctagccatcagcacacaatcttggatgccttccacactaggtagagatctcaaatcgagtaccagaggactgcatgccacaagacatgcaaaacatcgcaatgtaacaaaagtgcaaggttgtagctggccacaaatgttaacttgagagccaattctcgtgctgcaaagtgatgctctagtatggtgtagaaaatgcacatgaggtcgacaagcatataatcaggggcggagggcccaatatggctctgtattgctcgagcaataccttagcccaaccaataagggaccagccgacaaaaaaaatcctaaccctaactcatgttcgacactgttccacgcgaggaattgccctctgccaaacgaacagtgcctgccgccagcctccaagctccgtcgaccgtgccccaagctctaaccctctgcatctggatccg

SEQ ID NO: 150219 - DNA, 970 bp, Zea Mays
gcaatctcacaatcaatataatcacatttattgatgttctttatttccttttgcaccataaagaactgttcgcgggccttctgtagttcacaccgaagcttcatccaatcctcatcggatttcagcggcgcggttgccttgccatagttcttgggtttatgcattggtgcagtggaagtatccaagttatcaatagcaaacaggaccttttcttcctcctttctttgagctccatacgcgccaagtttcactttaaggccatcaattttgcttctcaactcagtttcagattcacgtgctcttcttcttgcggcagatagttcatttttgcgagtttggagatgattgaaccgttctttcttctgattcattgattcaaagctggcatccaacctggactctgcaggacttttggtcttcaaaaccatgttccaacatgatgctgcaggcaagaaatacttgccttcaaaagcaattatcttctcctgtgattctgacagcacagacttaaggacagtgatgtcttcctgaagacgctgtgcgcctagatactgaagctcaattcttgaataaagttctgtggccttaccactagccatttctagtagcttaaaatattttactgcatcctgagtagacacaaccttatcttggacaagctccagcttactccgaacaatctgcagcacatctttcaaagctacaattatggagtcatgaacatgtttcacttcaggattctcagctgcttcactcatttcagcatctttctcgcccaataaaatatcttttacagcttcagagtcgctttgctctaaaatcttccgtttgaatacatctctttcctgcatagttttctcatgcaaacccataagtccttcattttcctcatccatctcctccagctgaagacacaattcaacggatgtaactcttgagaaattgtcctcatttgtgcatttttcatcta

SEQ ID NO: 150220 - DNA, 1143 bp, Zea Mays
gcagtcttctgtgctcaaccccagtttagtcaccattctctgactaataaaagtagtggagctaccggagtcaatcaacataaacagcacctgatcttggatcagagattgcatcctcatacaaccatcacactctgtcccctttatggcattccaggacagctgatgtaatccttccactatatgctcctcctcctgttctagctttagcaacacttcatcagttagaattgtgctcatatcctccactgtcaactgatgtatttgagtcactactctcttgggacatttggcttgatgcccaggttcaaatttgtctccacatatgtaacatagcccattggcccttctataatctcttaactgtctttccttactcaattcaggattcaggatcccacttctactccccattgcctaagtcttgatccccataaccccctatgacttctcatcctattcttctcggcaatttcttgatataattgagctaatctcatggccttatccactatcttgggtgtcaggcttcaaacccctcacatagtgggtcacaaacaaagtttcatccaactccgaattatgcaaggtagctgcatatctgatatcattgaaagcctgagagtattcttctaccccatgctattgtttcacattgactaacgctctcatggcatgagggtactcttccaccccaaacttctccgtcaccgcatgggtgaactgctcctagtctcccaaaccatgttttagtttatacacctgcagccacttcgacgcatttccctccatgtgcatcgaggcagtgcttgcccagatccactcgggcacctaataaactgtgaaatattccattgcagttggtttggaaacgaccacttcggtagagaactgggcctgaactcccttccttcaccccattgctccctccgttctctacctccttccctgccaaatcctcagcccctctcatcccagcgatgaacatgattttctcgcttagagttggattcgttaccttccaaatccttcgccagcaactcgagtcgaagacgcgagacaactttctcagtttcctgcagttgatgagccatgagcgcccgatcctcatcagccttccatcttgccagtcagacgctccac

SEQ ID NO: 150221 - DNA, 515 bp, Zea Mays
ctatcttacaggtgaatattttccacaaattccaaattcccaaagcgcatcacccgaatgaggaaaaagaacaaaaagaataacctccacttctcctctttgcaaaccgggtatcacactctaccccccttaaaaagaattcaacctcgaattctgacgcttctatcggaacgacaaaagggaaaaaattaatgaatcaacaacacttacccacaacaaaaagtttcggatatttctgccgcatcagctcctcaagttcccacgtagcctcgcgctcagactaattagtccataagaactcgacatattaatcgacctcttcctcaaaacacgcccgaggattccaagatacgcaccagacgacactccaaggtcagatcctgctgcaccgcaattggttctatctcaatctgatggttcggatcctgcaagaacttcctcagcatagagacatgaaaaactgggtgtacccctaccatggaatccggcaattgctagcgataagccaagctgtc

SEQ ID NO: 150222 - DNA, 756 bp, Zea Mays
gaccagccgtttatttgggcttattcaccactcgtggtcaagactcaataggaaggagggcatatgtgtcttcagaataattcctggaccaccggtagaccgataaaggccctgtactgaccgtgctctcaccatggtggtagctcatgagcaccaatctgtcatttgttctatcaactctgggcaatgattgattggttggttttacttccatgtgtcaagtaaaacccttggattctacgtggcattgaaggcgagagagctaataccagtctaccatcttccttggtcctcgtttcgcagatttttggccagccgctgtcacgagcacgacggcgcctgtacttgcgacgacgatgacgacgacggatcagcgtccagtggacagagccgtcgcagcccttccgtcctcgaacccttatccagatatgcgcacgcggaggtgcgcagcgaagccgccggtcaattccagctgcttttcaccgatgctgccagccagcagcgtcggagcggggggagaggtaacggacggacggcacacagctcttgacctggaagctccccgccctcgtgttgatggtagcgcaatatctcatggtgagacgagatctggagcgtcgtttttatcccactgtgcgcggaaaaggccttgcgcgtgcctggcgcgagctgattggctggtccaggttaaaagttactgcaaatggggggtgttaatgttattaggccgtgcagaaacggggacgagggtcgcgc

SEQ ID NO: 150223 - DNA, 311 bp, Zea Mays
gaggacccgagtggagcaaggagggatgccatggaggttggggaaagcttcaaggaggagctcggcactggggaggagcaagcactagggagcttggggaatctacgcgacgtagagagctagcgctgcaggggaaatcaggggcgcgccatggatgagcggagtagcagggaacttggaccaggagcgcgacgatagaagggaggagcagaggagcacgccggcgagccgagagggaggttgcatgctgcaccagggagcaggcgcgcgtagaactccacggcgagcagagggaaggtgcagtctgagct

SEQ ID NO: 150224 - DNA, 372 bp, Zea Mays
tgggtcaccattcttacagttataccacctatggccatatcccttgcaaatagggcactggtgtgaccccttctttcttgtagtgctgccaccagcctctgtacaactcttgaaccgctgagtatgtcttcttccagctatagattttagaagtggtgggtgcatgaagaaaccatgattagattctggccactggtccttgtcaggcatggcagggattaaagtctgatatgctgctctaaatttctcaaccgagtaatacatgtcaacatatttctccaatggttccctaagagatgtgatgaatgcaatggcatgtttgcaaggaatgcctgagacttgccattttctacaagtacaagttcgttcagc

SEQ ID NO: 150225 - DNA, 554 bp, Zea Mays
cttcgcaacaacctctggtgtgttgatcttaacccacaccaagcgtcgcctacgggggacagcacacgccgaggttgctgacgaggccccgcgctgcaccgagaggcgctgccacacagacccccttgcttgttgtttttccaatctctgccacactgtcttcttgctctgcacttctcgacggcctggacacctgacagcctgatgtccagtcttgaaacacttgaaacagcgcgtgggtcgacggcagacagcagcaaagtggtcggaggagaagcagttgaaacaccgaccccgaagatccacaggggactctcgacgaggccgatgatcacctcgacacctcctcttactctggaccacttgccaaccgtcgtcgtcacaccgaggggcagcccgccgactttgcacctccggttggatatcagtcaccaccttcacgcttggcgccaggggaggagccgcaggacgcgaggggcaggctaacagagcctccctatatgacggaggcgcccaccaagaatcaccagacgatgaattcgggctagaatcac

SEQ ID NO: 150226 - DNA, 363 bp, Zea Mays
caagtttgtggtcgttttcattgatgatatactgatttattccaagaacgaagccgagcataccaagcacttgcatactgtacttcagagactgcgcgatcatcatctttatgctaagttgtctaagtgtgagttctggctgaaggaaatcaaattcttgggtcatacaatttctcaagatggggtatcggttgatcctgagaaggtgcaggaggtgatggattggaaacccccgactacagtgaagcagattcggagttttctaggattggcagggtattatcggcgttttattccggatttctccagaattgccaagccaatgactgaactattgaagaagggagtcaaatttgagtggag

SEQ ID NO: 150227 - DNA, 393 bp, Zea Mays
gcaaaagaccccgcactcatgcagtatcttgcagctgttcgcagtcttgagagacaattcaagggtttcaccttgcagcatgtggaccgcaccaggaacgaagaggctgatgcattggccaaagcagcggccagaggcgaagccttgccctccgacgtgttctaccatgtcattggcacaccagccgtccacaatctagagggtctacaaataaccaacgacgtcgagggccatcgcatcgtcaacctcatcatgactgaagattggtgggccccaataaccctgttcctgcatggatattaccaccgaagtgacgtcaacgaggccaagcgcctcaagcaccgaagccgggacttcgcactcattgagggccagctatacaagaagggggtc

SEQ ID NO: 150228 - DNA, 660 bp, Zea Mays
ctttggatatttattgaacttcgctcatctgcactcgattttgttccacattcacatacatattgtgcctgtcctacagctccacatactatatcttctgatcaatacagatttgaccttgcaatcgcggtttcactacctcttggtaagtatcatgaaccagcctttgattgtaccatcctttgcattgtgtttcattagatactagtaagaacttaataagacacggtagtgtgtgttcctattcacccagagagcgtgtagttgcttattagggataacctttactgtttgttcctgttttggtgtttccaatggcaggatccgatgacgagattgaggtagtcattcccacacaattttctgattgtgtcagccgtgaagacttcgatgttatttgcaagcgtatggaggaaaatatggaggaaacggtccacaagtctatccatgacaattattgcaatggatcttggcaaagtgctaaatagggtggagagacggataaccgagcttgtcgatcgggttgccacattggagacacgtccactacatcagcagcctcctccaccaccacaaccccagcagcatccaccacggcatcagcaacctccaccacaggctcaagatgatgccattttcgatgcacgtggcaattttgat

SEQ ID NO: 150229 - DNA, 326 bp, Zea Mays
cacgcgacggctgcctccaccacgccgatggcgaccgctcactcacccagctgaacaactccgccgagcacgcgcaagcagcaggagcgatagagatagaggaaggcgacgaggagctcggtccgagctactagctgcggctgcggcgaccatggagttggaccggctgctgctcgaccagctggctggcgaggccctgcgggagctgctgcacgccgtccagggcaccctgttctgccgctccactgccgagcgcctgcgccggagcgtcgagccgctgttgccgctcgtgcagggcctcggcccgcacgcccagcgctccgcgg

SEQ ID NO: 150230 - DNA, 431 bp, Zea Mays
atcgcttcagaatggcccaaacaacattagatcaggaactcaattctctctaaactgtcacagaaaaagaaatctctcgtacaaattaatgcctaaggaacaaaggaaataaattgagattgaggtggtgctgttcatcggcacttagtccacgaaaagtgggggagtgcgatcttcgtagctgcacgttctcggagcatagctgagcgagaagggtggtcggtgtgcgacgaattgcgggccggagttggagaccgccgcccgatccctaattgacgtggtcaggtcgcggtgagcacaggtttttctctgttcctgtatggtgtatcacctttcgggcgaacccccccccccggaactgaaatcccggaccccagctggaaaacccacaccctgaacccgccaacacatatacgcatctgaaaagagtc

SEQ ID NO: 150231 - DNA, 592 bp, Zea Mays
aaataattaagttccacaaaaaacatcactgcagagtacaatgtttctcagattgtaaggctgataacaaaaaacatcattgcagagtacaatgtttcttagaagaaaaccacaaagaaattacacacggctagaccccctatgctgccacatttgagttgatatagaatctctttgttgggtccaagtttggttatcatgaactgcatcaatggcaccttccacattggcaatgtttagagcccaagtgttttccgaagaaaaatgtgaatccaacccatatctaagaatccagttgtgaaggatggtgcatgctaacacaagcttaacttgtgtcggatatggatgaaaaggcttgttgtatagaatcttgaatctattcttcaaggcaccgaaagctctctcaattgttactcggagggaagaatgccttagattgaagagttctcttggattgagtggatggtttcctccaccaaattctcttagatgatatcttgtgctacggtatggaggtagaaatccaggtctaacagcataaccagcgtcaactaaatagaattttcctagttcaaagaattctagttagttt

SEQ ID NO: 150232 - DNA, 375 bp, Zea Mays
gtgacagcgaaggcgacgaggtaagagcgggattcccctcgagatgaactttcgttattcttattgctgcaaacttcaactgctcctcttaatccacgccgattcgctctgccttgcgctacatccgcgaagctagattgtttagtttggcttgaaatcgatcgcctgtgggaattgggatcggtggattgagttcagctgggatggtacggttatttggcttgctgtttccctggattgaagcatattgggtatttttgggttcgattgtgtttgcggcgcgagacggggattcagaagattggcgttcctcgagtgatccgattgcgagcatgctgtgaagcacttcgtggagggtttcgcctcgctacccag

SEQ ID NO: 150233 - DNA, 410 bp, Zea Mays
ctaacagaacaggcgaacttcacgcgttggcttcatgaaattcacgagcccctgttcaacgccggccaagcctcggggcccatacaaatcgccccgtcttcttgttccatagaccaagagtgcaccgccatgccatgtgaggtcgagataggagagaaaaagtggccgggaaatccaccaaatccgtcgcgcgggcaatttcgttgtgtgcccgatagaatcggggtggattggccttggggcatcgcttggccatcgtggatccattggtggcgattggatgcgcagtggagctcgggcgaattgggaattcgtcaccggacttggatagcggcttggcgaccgcggtgtcgcgtgggcggggccctgttacttcaattcgaggtaagctacctgtctcaacgttcgcc

SEQ ID NO: 150234 - DNA, 465 bp, Zea Mays
ggaataccatggtgatgaacaatatgatcaaagaaagccttagctaccgaagatgttgtatagggatggctgagaggcatgaaatgagcatactttgagaagcggtccaccacggtaagaataactgatttgcctccaacctttggaaacccctccacgaaatccatggctatatcgctccaaacccctgaaggaaccggaagtggctgtaacaaacctgccggatgaaggtgttcggacttattacgttgacagactgaacaacccttgacaaaatctcttatgcggctgacagcaaggggactatggaaggaagccctccaaaggttgagggacttttcgatgccctcgtggccttcttcatgaactgaagctaacaacaggggccacatggatgaggcatatagcacaaaaaaaattcccttgaacagtaagagaccatcaacctcggaccacccttccttc

SEQ ID NO: 150235 - DNA, 690 bp, Zea Mays
ccagggactctttagcaaaagagcgcggcgaaggtgtattggctgtgtctggctgttggatccgattctaaaagccaggattagatcacgaagcggtacgtgctcccgaacatccaatcaacggcgagcggcccagatttaattatttgatatacgatcgtggcccttgtatcccgatcaacggtcgcgattctattggacgaaggggtattccagtttctaatcctagccatatagcacgatctcatggcatgcccacctttcgccaacctgacactcacgcacagcggcgccgcccgccaacacgcggcggaacatcaccggcgaccaccaattctacgcgaaagtggcccaaacaccgaattgggagatgctacacgtagctagggatcaagtgaacgtgacaaggacttcttaccgagggattgcgtggcgtagaggttcactgtcgatgacccacagcacgacggcgatttcctaaccccggcgagcaatcggcgattgttcagtccatgattccgcacgccaatgccataggtggcttcccgatggtttgtgcaagtccttaacccgacccaaggttctgacagcggcaaggaattggatccatgaaggcgcacggtcgaccctcaccacacgcgcagcgacggcgaacgtgggggcgcgattggtccaaaatccttggaacag

SEQ ID NO: 150236 - DNA, 332 bp, Zea Mays
cggatctaggatccacggttctgctttaattagcactaagtcgcatcagaccgcccgctagaagatctacggtgcagaattatccgtacgcgcgttccaatctaagctatcgtccatggatccgacggcgcacagaccgtccccttcgtcatatcctgaccgcccaccgaatcggacggtcgaaggcgcgtcttcaacctccgatcagaccccgggcagcagcgcataaccccacggcggagaccttcctccgatgccccgatcgtcgcctagtgagctaatctcggattggagacatgctacacgaagcacaatgcgaaacgaagagaatg

SEQ ID NO: 150237 - DNA, 415 bp, Zea Mays
actaatatttctagatagcctttttctgtcttctcaatagatttgtcatgcagccttttaaactgcgcaagtgtttagattgaactcaacgtaataaaaacctcaccgttgggaggcaatattgtgcagggcaaattgaagctccaaaaatccaaatacatctgcactcttgacatacggtaacatgattttttaggcacatggcaattgatcgagcaccttataggcataacatatactattgtaggagaaggagcttaattaccattgttgatgcgctcaacatcttgcaagcaatgggcattgtgtggctggccagctgctgctcacagtgaccctgtgtcgtcattgagaatcatggtcgtggaccacccgctcgtggtgacccaacgcccctgtttgccgtcgtggccgc

SEQ ID NO: 150238 - DNA, 347 bp, Zea Mays
caccttctcgttgcattgttgtctactgcgacaacatcagtgttgtgtatctcttcaccaaccccattcaatatcaacacaccaaacatatagagatcgatctccattttgtctcagagaaggtcgtcatcggtcatgtctgtgaactccatgtcccgacgacatcctagttaatcgtcatcttcacgtagggcttctccttggttttcaatgagtttaggtctagtctcaacatttgcagtggctagagtttcgactgcatggggagttagagcatatttgttagtatagatattatgtctcgtagactgccaatatttgctctagatattgtatcttgtagactg

SEQ ID NO: 150239 - DNA, 271 bp, Zea Mays
ctaagccttggagctgtatggaaataggagaaaaatggacctgaagttaagatatcagtcacccttgatactgaaattcgactaacagtgaactaggatgaactttgagatcgattttgcataggatccagtggatgtttgatcgaggttgctataacaaaatcaaagctggtttgttgaagaacaactttgctacagacggattagtgggttgttccataaaaatttgaggaaagagttcctaaacttgctctgtcagaacgacttattg

SEQ ID NO: 150240 - DNA, 356 bp, Zea Mays
ttctattcaaaggcattttttctgtaatccatgaatccatcactaatgtgagcgcctgtggtctgttccttgtaagccataggatgcccagatctatcttgttagcattctattcaagtagttttagctccatctgtcatagtttgcagttaagtgcagagggtggttcaagactaattattcagctctgcacatgtccagttggcagcattgcgtgttagtagctttgaattatttggccagctcattcagttcatccttgcctgcattgttaggtttgtacaattggcattagttcggggtgggttgtggttgatcagcccactatgggactgagagttgttggctaatttaga

SEQ ID NO: 150241 - DNA, 458 bp, Zea Mays
ccttaagaaaaaaatagaaaagactagtttgaaagaccagagaagataggagaggctaaaatctcctccaaaggaatcttgtatttcccatgagagtacgtctcctaagaattacgtggcattataaaaatttcaatccgttaggtacaaattctcccctcaagttgtcatcaataaccaaagttcagccgttatggtgaattgttttaattcaccatcttataagtatataaaattcaaaagaaaaatgagtgttcatgttagattgagaaggaaatcaaatgttggagagtattccaaactgcaagcccacaaggaggaacgagaagcctgacaaactccaccacggtcgattcatatccgagcaccacaccgcaactccctcatagcaactttggtgatcatgccagaggaacctatcggcgagctcagttcacgctgagtatcacgataaacat

SEQ ID NO: 150242 - DNA, 279 bp, Zea Mays
gtcgcggatgtattaattgtttgctaaagcacttcgtcgtaagtagtgtgttagttgtggtaaattaaataaagcgtaaaacatgcttagtggtttccatagtcggctaatgagttagtctatgttaaatatattttatgcattcatcgtggtgttggttggaggtgataagtagattagaagtgtgggtttgtcgaagcaccgtgatgtcgaacgtgtatatcgaagtgcattgtagtggtaattgcgttaagttaatcggtagtgtctcgagtgcac

SEQ ID NO: 150243 - DNA, 526 bp, Zea Mays
gtcagttctagaaagacgtctagctcgatagtagagctagagggggatgtggggaagaagtccgtctcgtagaaatataacatggttggagatcaacaagcggttggtgaggttaagacatcgatatcccatatgatcagaagagtacccgagaaacacacaacgagaggatcaacaggaaagcttatgagaagctgtggcatagagactggggtagcacacacacacacccaaagacacgaaggtggtcatagaaaggagtggttccgaagacggcaaaatgaggcgtgtgggagcagagagagctttggtagatagtcaattgagcaggtaggtggcggtgtgaagactctcgacccaatagcgagcaagaacagaggcctgaaacaaggaacacatgatgtcgatagtagcacgaatcatatgctcaaccttgtcggtttgggaagaggatacgagcatgacattctagctgcataccatgtgacagtgacattgttcatccgccgcgctgcctcctcacatc

SEQ ID NO: 150244 - DNA, 297 bp, Zea Mays
gtattgtgcccgcgggtgtacccgcgggtgccataaacccgcgggtagcgggtttgggtaacatacgctacccgtcgcgggtagcgggtgcgggtacgggtttaacattaatctcgcgggtacgggtttgtaatctctatacccgtgggttttaaacccgttgccatccctagccccgatctgacctagaccgttcattactgaatcaacgccacagatctattctcgcgaatcggtgcacagtcatctaatctccaccgtaggggacgatccaacggccaggaggccaccttctcc

SEQ ID NO: 150245 - DNA, 598 bp, Zea Mays
ggcggccggagatgaggaaggactctggcgccacggtttcgtgtccaccgccgtggcgggctcaccggcatcggtgaggcagcagcggggaaacacgatgacacgacagaggtgcccggatacgtggcgtagggtcggacgacggctatcaccggcgttcttatcgtcttccaccgcggtgacgcagtatggtggccggagttttttttaatggctggaacttatccacggcggcgtagcgtacaccgggtgttacccacctacccagagtacaacgtggaccggcgacggcacaattcgccgtgtagttggtcatcggcggtgggtcagttgcgctggcggtctgatcctatcaggctactgtaccatgggatcgccattcagtccatctgacagcccgagttggagcttgatttccttcgatttttatgtggcaccagaactagccttctgcatcaaagttgtagtgccacctaccagctacaagttttgttatggaaatcattcacaaatttgcactggatctcagttgaattggctctcaaacttagagcaaagtcactgtcaacttaaggttcagactatttcagtctgacat

SEQ ID NO: 150246 - DNA, 628 bp, Zea Mays
gtttgtttgattttgcccttgagcaggcggactcagttgctcaagtcttgattgcccccatctaatcaccggagcacagtggctttgcttgtatctgcagccagttcgtctggaaaggtttttttatctgtttttttaaggttgcttttgaatagtgatcgtatattcgcgctttgcttgcacgtggtattcttttctgttcttagccgcaactattcatcggtgtcgaacagagatcctttttcagcgtgaacttggctgtttttgagcgaagtatgtcgtgcatattttgagtggcgcaagtccgttggcttccacgcatagctggcatatgtgtgcaagcgactagtcagaggaaaaaaagtgagtgttagtgccttagtggtgcttaacgacctgtatctgttctaacggaagtttggcaagtgacaacttatgctatgctagtacaagctattaccggccatgtgcatggaaagtgtcggttagatatgccaaaatatgaacatgacacttaaaatgataaccagggagccatttgcactagaggtcgctaaagtttggctgcacttcatcctatttgtctctcacgcctatgtgctgatatgctgtgctaagctggcatgat

SEQ ID NO: 150247 - DNA, 1824 bp, Zea Mays
ccggaacgaagactccaagccgatcacgcggggagacgcttgtacctcttgagaatgtctgcgcaatgtgtcggtgcaatgcaatcgtgcaggcctttttatttatttatatccggtctctccttgcttggagagggggaaatccataaaatagcaccggtctatgagctaattcagcaaacaacactggtaatctaagtattcacggaataacacttcaggcactagcagcagtcagaaaactgcacgcatcgtcctttcctatcccttccgattttttttctttcccttgcccccaaagccaaaagactgagttggcccctcgtctctcctgtgctcccttgcctttcttgttccgttcttctgccaccaagcgccaacataaccctagatacatggctgatggcggcggctgattagcacttcaaccacaaaatcccccaaacacaagatcagaagtgagcgacgatggacatgaacagcttcaacaagatgggggatgatcccatctgcagcgggtggaagggcacagacggcatgagaggcggcaaaatggacggcaatgagatggccgacaggtcacagcttgatggaaattacagcgcattcgtagagtgagttccatatcctaatcccaacgtgagtctgattttgtagttcatccgtagagtgataggtctaatttttgttaattttccttgattggtacgtaggaaagagcatgtgttcagcctgcgcgctacgattccagcctatacggctattcttgaagatggcagtaaggttgagatggaggataaaaaccatgttttgtccgtgaatgttgtgggtggctacttagtcaaacatttaatggatgatcttgcaagcagaacaatttgggggagttgtcaagagccgatatgctggttttgggatcgagaaaataagtatctacaacagattatcacaaacactgatcttgacaacgcatttcagatgtattggacaagtaaagtgctaacattggttgtacaatttgaactgaaaccaggttatgtaaggagcatatcagtggaggagaaattgttggggaaattgccatgcaccaaaaatgcaagtcaatatgtgggggatgtcgatcctactatgatgcatgatgctgatatttttgttggtgatgagcaattttatgctgccttgggatttagggatggcgctcaggaagctcctcaggtggaacaggttactgaggctgagatctgtgaggcgcaaattttagttgatgatgatgcagattgtgaagctagcatagtggttgacaaggaaaatcccaaaattgaggttggtgaatcttttcctacaatgcatgattttaggatggctttgagacaacacgcaatcaagaaagagtttgaggtacacaatgtggtgactaataagacaaggtatcgagctgaatgcaaagcagaggggtgtggttggagaatcgtggctcgtaaactacagcgtcagccaactgttgtggtattactcatatcttctttgttttttttcttcttctattttttagatcttgttttctttatcgtaaaaaacgattgtgttttctttttgcagatttcaatgataccttgtagtcatgattgtatttctagtagtaaattagtaagctcaatggcatctaaaaaatggattgctgagaaggctattgcatggttaaggaagaatccaaaccttggagcaaaggatttgcaaaataaactcagtgaactttatagtgttgaggttacctatgggactgcatgggcaggtaggcaaaaagctctagataagatttatggg

SEQ ID NO: 150248 - DNA, 286 bp, Zea Mays
tttgtggattgctctggctgtttgttgcaccataataaagttgtcttgtatgcttctcccttttacaaaagcactctggttaggggatatcagctcaggaagcgtgggagcaagccggtttgccattaacttggtaacaattttagcaaaactatgaataaggctgataggactaaaatcttttatctctgcagcatcagatttcttaggaagtaaagtcaccaaagctgagttaagaaggtgcaaattcgaaacatcacccaacagaatcctccccatagctgcc

SEQ ID NO: 150249 - DNA, 304 bp, Zea Mays
gttaggatgggttatgggaaggatgtaccgtggaccgttgatcgcggaatggacgtatcggattagattcacgtatacccgttcgactcattaaatccagggcgtagatcttggatcctagggctcgggttgcgtaccgatttgtgcgcggccagatttaatcgtgacctttggtttggatcggacggctctgaatcaacgataccccttcgccctggctttctttctaaagagaccccggaaaacttgctattcaacccgcggtctatcgcctgggttctctgtgtcttggtgcactttgcgc

SEQ ID NO: 150250 - DNA, 867 bp, Zea Mays
agttctagcactgatagcttaggtacagccacattagttaatgaacttgcactctgaaatggccagtcaaaatcagtcacaaattagaaaaaatatatgttgaaactgaaaataatgtatggtaatttgataggctgtgcctgtgcgtgtggtaatttatatcagtagttataggataggtaaattgggctgggccggcatgccgtgctgaggcagtagcctaggcacgaccttctcatcgggtcgggccggtcctaggctggctaaaagctcaggccataggtttggccatcaggcctcgggacttttggccaactatagctcagcccccttttgttaataccctgcactttcccaccattcctgatttttctccttctcatgcattcttttgccccatttcttgtttttccaattctctccatctcttacaccaccttaatatatacaagagtatcaagttgcataccgctttagacaactctgcaatcagcatgcccttttgtactgcttttttgcttatttttcattaggctagccttgtcacccctactcttcttaaaaccttcccacatttgccactaacaagttgaaaccagtgtctttcaggctttcagcatattcacagcttgcttgtcaccccaagccattttaaacattgtaattatagcagtttgctgtagtcttgctttactgcatatctaactgtaggtctatgtgttacattggctagtaaaaaaaacaataacatgaaaagggcaacagtgttcatgatttttttgcagcatgtccttttgttattaaaacatacatcatgtaattgtgattcagttgtgcaagttagagaagggcactcttagtttctat

SEQ ID NO: 150251 - DNA, 490 bp, Zea Mays
caaacttctgcacaatgaaaatctgttccatttggaaagcaaaactgaacccaagtgtcgcttcttcgcttggactcttttacacaatagagtgttgacagcagagaaccttcagaaaaggggatggcctcacaatccttcttgttgtctctgtaattcgacctttgaaacgacggttcatctctgcaaggactgccccttcagcagggaggtgtgggacagaatcttgtcttgggcgaatctttcgtcctttaaggggatctatggctctgattcattgtacgactggtggagaaatttgcgaagtaggtgcaacaagccttcgagaagatcctttgatggccttatcatttatttttggtggagcatttggttagagaggaacaatagaatctttcacagtcagcttaaatcagcggagcaggtcgcgctagtggtcaaagagttagttggttgtttccatggcctagctggctagtaggtccgctta

SEQ ID NO: 150252 - DNA, 864 bp, Zea Mays
gttatctctaccaacagctggtcggtcccgatctcccgcgctgcgactgcgtgccgtggagcatggcagaaagcaaaggaagaatgtctcccggccacgcatgtggtttggcgcgcaaggcgacgcgggaataaacaaaacaagcgtgaggtaatgaccacaacgcaaatctcaaggcactggaacaatttttttttatcgttgtcccctgacacgcatgtcgccgtccgtccgtccgcaccgcgggtcacaacgccaaccaccgtagaatttgtggcccggccactcaactttgttcgttaaaatttccatctcgtgacagctaaattattttcgtctcgttaggctatagtcatcagatgactgtgagctggaggtcagagaaggatgatatgtgtgagctggaggttcagtggttgcgtgtgatcacgcatgaaattaccttggctctgctacgaggtagtattgggccttgccaaatgaggagcaagttctacgtaccggatcaggccagctgcttagccatattagcaagcaaatgacctagttgaatgctattatatatatatgtccaaacgggtcacccgacctagaccgagctgaacccggtgaagcctagcacgaattgggacaggcatagctcgacctggtttggtctacgggccgtgtcgtgtcggctatgggtcacggacgagacccagccacaatctgttaggctgttttatcgtgtcagacccacctgtggcctgacagacctaacagaccaatgataatccattacgtttaaatagtaaaagaggctaaaatataaaaattagagatttcaactacgcttgttggctttaaaaacccatctatagccac

SEQ ID NO: 150253 - DNA, 590 bp, Zea Mays
ggcggataatgattggctgtttgaagggaaatgagggtggacgagaaaaagtgcgattttggtttgaaggtcggatcacaaaccgttgcttcttcgcctggccctgattaggcctctcaccaccgaatcccttattcttcccaaaatttgtgtattttgcttcaacagataaggttgtgctgacagcctttccgtacgtgagatctatgcatgtggccattttcctttgtagccgatcattcagtccccgcataaaacagttcttcttctctaaatccgtattcacctggtcggtggcatactgcgacaggtgattgaatttgttgagatattggttgatggtatctccaccttgttgtaacttcataaattcctcttgtttcatatgcagcactccttcggggatgtagtgttcacggaaggctactttaaactcatcccaggtgacttgatggttgacaggttgaatagccacgaaatttccccaccaggtactggcaggaccacagagttgttgtgctgcaaataacggcttctgcgtctctgagcaacggagaagaccaaacttttgttcaataacccgaatccac

SEQ ID NO: 150254 - DNA, 1654 bp, Zea Mays
ctctcagggtaattgcagagaaagaagaagagtgtgaagaaaagctcaacggcggcgatgctaccgccaagataagcagtggtgaaggacccgtgtctcaaggtctcagtgaatctgggagactttgcaagccgaatgaagaaatgacgaggacactctccggccagggcaggagtgtgaggatcaacatcccggtcaccacgccttccaggactgtcaccgccatacgcgaactgctgttcggggacatgccgagccagtccaagaagactggcgcgcatggtaccgacggcagtgagaagctgagcatcaacaagaggaaggtgcaccaggcggagaagatgatcagaggtgctctggttgagctgtacaaaggactgggctacctcaagacgtaccggtatgcgtagttggttctgcctgcgacatggcttcttgtacttgaacgtacgtggatgcattactgacaaggagggcacgctcgttgcaggagcttgaacatgatggcctttgtgaagatcctcaagaaatttgacaaggtttctgctcctatctcttgctctcctttgatggtgccctatctcataagagcaacaatcctgatgacagaagctatatatttttccgtgtttcaggttacaggaaaggaagtgcagcaaatttacctcaaagcagtggagagctcctactacaacagctctgacaaggtattttgaaacaatattggagcaattctgatttcattcaacctcagctccaaaactcctgactgcgcgcggttttcatcttaacaggcagtcaggctaatggacgatgtggaggagctgttcttgagacatttcacagaaggtgacagacggaaagcaatggtgtatctgaagccaaatcagcgggaagagtcacactgtactacgtttttcattggtaataacttttgacaaggtttccattccttcatcaccataggtttttccgatctttaaacaggcatgtaaattttccaggagtatccactggcggcttcatagcattgttcataggttactgtatcatggcacgcgttgctggaatgtacactcagcagtcaaacaaggtgtacatgtcaacttcttatcctgttcttaggtgagctctcaaaatgccaaatcagttaccgctgtgcagttcctgaaaaaagaaaaaccgttatgccattgctgacaatacatgatcccaaactgcagcatgttcagcctcttcttcctgcatctcttcatctatgggtgtaacatcttcatgtggagaaagacacgcataaaccacacattcatatttgaattcacgcctactaaagagctcaagtaccgagacgtgttcttgatatgcactgcttccatgacaattgttgttggtgcaatgtttgcgcacctggcaataattgttaaaggaaattcatcaggcgttgtccaagcgataccagggtccttacttctggtatgcactattgaacttaactgatgtgttcataattacatctgaaatttatgagcttataaggtgctccctctatccaggtgttcttgttcatattagtctgccctttcaacatcgtctaccaatcaagccgttaccaattccttagagttatcagaaacatcattctgacaccctttta

SEQ ID NO: 150255 - DNA, 318 bp, Zea Mays
gcatattccttggttatggatatgtgtattgggtaactgggcattcacgttttgtatttgttgttgcaaggtccatatggatagtccgactgatcttggtatctctggtaggctgtcgttcattgctgaaaacttttgtgcccgttgttatctctgatagcctgttgttcattgcctgatatttgtttcatatattatctttggtgtttgtgtctccacatgagtacaggaggcaaaataatcatccactttgagctcattttaataaatcttctcaagacataaaagtcttgcgactatatgcaacatttcctcagc

SEQ ID NO: 150256 - DNA, 658 bp, Zea Mays
cgcacaggaggtcaacaccctacgtatgtcgaccacaccgcccctcgccgccgccgccgctttccgcttcctgtttctcttctccacatcgatggtgacacgctccatgcccccgatgcatgtctcgtaggcatgaagtatcattttgtcgaccatctcgttggcacatctgtcctctagctcattggtcgtcatcatcacagctctgttgaccctgctattaataatgttgctttcctcggtttgatccagcagctcatatgtaccttcatgcaagaaatcattcggcccctcgctgttgtttgtgttattgccaacaaggggaggggaggagaggatctcagcgaagggctgctgcacctggagtagcgcagggtgatcaccaagctcatcgtcatcgtcctccatgagcatgcgtgagatgtaagggagcgtcatgtcattgttagggacatgatgccggtcctcattgctggcattgggcttgtgggggaggtcaaggaagacaggtggggacaatggtggctgctccatgagatccttgatgaagaattcctccggtgtggtggccatgctcatgaatggtagtgctgcaggacaatagctttctgttaatacatatataaatgtcataaagggaagaaaacaaaactacttc

SEQ ID NO: 150257 - DNA, 639 bp, Zea Mays
tacaaaatgagatgataccggtaaccaagtgaaatgtcctatacgtacctacggatacagttaaaggaggtctagcctgccctgcagctgcggatgactcgtctacacaataaaccaaacaccggccgcactctggtcaaaaaggaggtatttctagccttccctgcagctgcaatcctagactcgtgtacgcaataaaccgaacaccggccgcattctggtcaacgcacgttgagagcacggttgtacacgggtagacaaccaatcacgtagttagagattgttctgcagcctggaagaaaagaaatagaaagctttgagcagttgagccatttactacttgctagttgctacgccaggacaattatttacaatacaaaatatgatttatacaacacaagactctaatgagaggttttccagcaccatttacaagaagcccaaaacattgccctcgctggacagaaagtgaggagcctctgacagtaaatttctctgcatttccatcttttggagggtaaactttcttaatgttgtcaattatgaccgaataactagaatctggtggttgcaacttgcaagaatccctctccctccctccttgtgaaaagaaaagagggggcactacatcttaacaaa

SEQ ID NO: 150258 - DNA, 367 bp, Zea Mays
caggactatcatacatggtggtaggcgaatatggaatatggttcaccatcatatctcttggtgtcatagttctttggcttggcatttccatgttaataaaagggacttctcaaccttcttcaatttttatttgtgagaagaatctaatttttatatggccaataatgggttattgtcattaggttgttcctgtatcagatgtgaatctgttaatttgcccataaatgtttttgctgatgcaagggaactgtcaaatagagattcctaataccagtacacatatagagccaacaggttctgtaacccatttgtaaaattatagattttttgcatgactttgttagtctgtttacctccattatatatt

SEQ ID NO: 150259 - DNA, 598 bp, Zea Mays
tttctggattgatcccaacaatccagcagggcgcctcaggaaagccccctccagttctcgtgctcatacatctgcgggtccgtctgctggtgctggtgctgctgctgctgctggtgcctctcgctcttcccctggccgcggatctcctacaccacgtggtcatggtcgtggtcgaggtcgtggccgtgggatgggtgcccgcttggcccacgggtttgcggctttcttctccatgtgccgaaacattgctgcagatgtccatgaggtggctcgacgtcagcgggagaccgacgacaacctacgtcgtcaagcttccgctttgggtactcccttcgccccccgctctcctgatgtacctctccaccctcctcctccagatgtcaacgagtggtatcagcaggcatatggggtgccttttacgacagctgatgacgtcgaagaagaagaaactttttttgatgatccggagcagtttgtcccgcctccgtatcacggggatccgggccaatcgtcctcttatcctccgccccaggacccgtctggcagtgctcctcctccggcccagtctggagaggaacactttgcctctgacctggcg

SEQ ID NO: 150260 - DNA, 348 bp, Zea Mays
aatgtttgtgtgaaaaaccattgtgtgttcccgtcgaaccactttactcgtcctatctaggacctctatgcttgtgttgcatacatctctcagaattgtaaatacttatagtcattgaattgacttgggatagtcctttgactggtatggtatacattataagctaaatggtaaaggtcggtcctgaatggacacatacctggggtttatgtagccgaactacactgaattccacccttttggtatgcttaccattatctacctccgatctaccagaagtgagaagagtagacaaataactatgaaatcccacatcaccacagagcttgaagctaaattagacattaa

SEQ ID NO: 150261 - DNA, 2056 bp, Zea Mays
agctctgtataagagtcaagaaacaatgtcatgaagttcaggaatttaagcaacaaaccttcttacagtatcactaaattgtttgatcttttcatctgcatcactgacttccttatttaactcttcatttgtttccagagcattagcatgcgctttcttcattttatcattctcctctcgttcagctactagcagaacctgtaataatagcatgcacacattgtcaatcattcttagcaatgcctaacatgctaagtttagggtacaacttaattaaattctaagagaaatgttatgttcgcatactattaagtgtatgaacttaagattatccatttgataaaacagaaaagattggtccttgtttgaatccttctgcttgtagatcagttgcaacaaagcagaatattatagatgaagaacatgcctttaggccctcaatttcagtagtcaataaactgatcttttctctttcttgagctagagcttcttcaacagccttttttgctgattcttgttcctgcatcgctttcacttcttctactcgctgctccatctcatgaagagcttctttcaatttggaaacttcatctgctttagacttctccaaatcagcctgtaaattgaatacacacaagtatgatccatagatgctatgtctataagcatgaaaactgcagttgcaccatgtgccaatacaggatgcaacatgatgtacttctgggttaaaagaataggcacacataacaagtatttaaatattgttcaagaccaagtattgacccttagtttcttttcgcggtccaggcgacttgttagctcttccacacgttcctcaagtttctctttggccacctttagagcctgtgtatctcttgcagcctaaaaagcatgcatcccataacaaacttagaagaaattttacagaatgaatactataatagttggtcaagtaccagtttgagcttcctcagctccttcctagcaacccttcttcgccaagcacactgatatgttagtgcggctctcttcaaattcatataatttgagtaatctcggtggcatcgccactgggactgcaggaaaggaatctcatattgatggttcaaacagaataaaaaaaattgagaacacataatagcgacttctgacaggagattaatatccatctgcagtataataagtgaaaatagcagtgaattgctataagtgctaacctacctggatatggactgaagctttatttttctttctaaaggtgaactcattacgagctgccatggaccttagcccggcctgcaatgtaatggctgacaatcgtagttggtaataagttttccaggcaaaataccatcgtgcatttttctgaattctcaaagctgctgcttgttgtctcaggaattcatgttgcttacatgccaatctggctgtaattgaaaataaagatcttagtatatgtacaaggctccactatgactccataagcatgcattttacacccagggctatacggaaagagtttacctctaacgaaagattgcaaataaatagatgtgtcccgtagtactaggaactgctcacgagcaacatgagtacggaattgactctgaacgccttttgctgcattgtttcgcatctctgttcttctggcatccagatcagccatttgaccagccctcaggaataccttagttcttcctatctgttgctcagaacatattttacggaatgagagcaatgagtatataaaattaacatacaattttatatgaaactaagataaaatcttttgtgactcaaatgtatgaagaaataatcttaaacaaaaagtgattaaccaggattttaagttccacccgttccagtgaactcactgccttattctttgaacctttttggtaattcatgtggtctacatacaactaaaataaaatggcttttaactcgaatcaattgaacttgccagcttagaacataacataccctagagccctactgaaacccaaaaattatgccgatctgtcatatgacctgcccattcgttctcctaactgtt

SEQ ID NO: 150262 - DNA, 567 bp, Zea Mays
gtgcattagtcagtacaaacgacatgacaaaaaactcatataatccatatctcgttgtgaaggctgtcttgggtacatcttctgctcgaatctttaactgatgatatcctgaccttagatctatcttcgagaatatcttagctcccttcatccgatcgaataaatctttaatccgaggtaatgggtatttattcttaatggttacttcattcaaacttctataatcaacacacattctcctcaaaccatctttcttgctcacaaatagaactggggctccccaaggggatgaacttgggcgaatgaaacctttttctagtaattcttctatttgtttcttcagttctactaaatcattgacatccattctataaggtctttttgagataggtgcagttccaggtaataattcaatagaaaactctatatcacggtcaggtgacatacctagtaattcctccgaaaatacgtctaggtattcacacactatcttgatattttccagggactttacttccaagtgatttaccactgtctttccttttgtatatgttggcttgtctgtgc

SEQ ID NO: 150263 - DNA, 530 bp, Zea Mays
aagagcgtcggtagcctcgccgcgagcccagctcctgcttacagacacaaaatcactactgctgctcctgctagcagtaaataaccgcgcgcccgttaactaacaaagaagaagcccgaaccgtccgtgtcgtcagcagcagcgacgctgctgggacgtggcgacgacctttacaagactgcagctagtagcctgcgtgcttgatgcttgttcgtcgtctagaatgcgagagttttccccacaaaattcctatgaacatagattttgcatgcttgttcgaggcggccttcatcttctggaagggggttttcaggtgtacgtgttctgaataatgaagtctagtgtacttttcagttcttgtgagttggacgctctagttcttttggtgcctctactcagagtcagagagccctcactcgatctccatcggtagtttcaatgggtgacatttctagttccagttcacaattttactccacgttttttcttcctagaaaagttcagaaagttctttgttccatttggatggg

SEQ ID NO: 150264 - DNA, 773 bp, Zea Mays
ggtaaacaatgacgccatggctgttcggctgccaggtgggacccctgtcagctatttcttctcgctggtaacaaaccccgcgcaattcgcgtctctgatgtccgatcttgttccatggctcgatgtgccggtgtataaataacctccaccgctaccgccctgcctgtcatctgaggaacaccatagccatgcatctctcggctgcatgctggaggtcgccgttaccgtgagcctagagagaggagagaaggccgagaggatagggtactgaaggtacacggtgtgacccactggtgtctccgtcgtcggtctgctcttacaacctcagaactaggcgcttgctgcggatatccagtcatggtcggccgggtcggcgctaaacttggtaagctttgttttccctctctgtagcattacagaagctatcaagatttcattatcggtagcaggggcagggttgggcgtgcgcttgggattttggcaccaccggcgggattctcatggtggtctgtgccgtgggcacgtccgcctgtatggaacacggccgaccccaggcattggcttctggaggttgaagatgggcgcatgtccgagcgatcggatgtgaatggctgtggatagttgcgtggtagtggtggatggccaatcactggcgtagccatcgccctgggtgcagaacgtggtccgtatggggtcagctatggcgccgccgcgccggaccctgttcacctccgtggttgcggccagtgtgggaagatgggcgagcgccgttg

SEQ ID NO: 150265 - DNA, 649 bp, Zea Mays
cctaattcatatgagaatgttggggcattacacttgtgatgtaaacaatctgtgacttttgtttggtttccaggtaatcagccaaatatagtatgtggtctggagttcatatttttgctacttttctggcgcgacgatgtggtggaggcgatggcagggcctagaacggattagtcgtcctgctctgtgttggaagttatgtgaattttctgcctcctagcgctagacggatgattttcttcagtttgccaactccttgccattgctttctactattgtttgtttattttagtgcagcaacggagcctatgaagaagccctattttctattgttgtttgccaactctaagcagatcgctcgctgaagaagcccaccctcctcgctatagaaggtatgtgtttaacagatatgaaatgttgttctgaaagagcatggaacacaaagaaaaataaaaataaaaaaagaaaagcacaaagtctgaacttatgaacttctgaaacctacagattattctaaaatttctattaagtctaaaattgtgaaattgtgaaattcgtgtttagtctaaacttctataattctgaaagtctacagtcacctgaacattggctgaaagtctgcagccacctgaaagtctgcaaataaaga

SEQ ID NO: 150266 - DNA, 811 bp, Zea Mays
caaagcctcagttggattttgcatcatgcattatccacgaatcacagttctatgagattacaatgctactgacgccaaaatgacctgtcctgccacttctacaagagtaacagcttagccaatggtcccacaggaaacaatttcgattttcgagaacggggcatgcattttttcggccctaagttctgttagtcttactacactaattcaataaaaagtaggattagctttcctactataatgctgcacaaaaaggaattcatactcaacttccaattcttttctcggggatttatctgtacatgttcacaactcagccaaaattgatgtctgagatgaacacaactgtggccaaaactgtctcacatccaatcatttctcgggttccaagttgagatgtgtactctcgatttcatcataagcaacggcatgttgaagtgtaacttgaaaaaacaatagtatcacctcaccgaggctctacgtcaataggtttcattgtatctaggaagtatggaccatcttgggagacaaatcccctgcagcttcgttgcagtccttatctttcgtgcttctagaagttttttcgtgcttctagaagtttccggggcacaggacctgaagtttccggggcacgttgttgattctaagagcctcggcttccatccccttcgccactgccatcagaatttttcgtgcttctagaaggcgagggggggccctccttatctttcgaacaaccatcagcattttcaggctttctgtgaggtggatcgaatatttatcatcgccatcagcaacatcacaatccgca

SEQ ID NO: 150267 - DNA, 691 bp, Zea Mays
tgtggatggaggtactagtgttttgtctatagttctaaacttggtgtgcataatcaacatcatcaataccctaaagtagtaacagttttcacaattcacaaaagcaaaatgaaattgaaatgcagaaaaaatgcaaccatgcacctcatgctacggatatgattatccgtgggtcaggagcagtatctgacctcactattgcataatataacactatttgttgcaaacagatacacttaaaaaggttgaaccagttgctattgatggtttcctaagatcgacatggaaccctagtaagactataaatctagaactaatcatgtgggatcaacccactactgcaagcctaacaatgaagcaaactgagctgggtgtaaaatattctacacaggatagaaaggctagtgctttcaagacacattgacaaaatatattgatttgttagttgtaaaacatggaatagtatctaagacttcactggatcaaaacatctaaaggctagaaaagatgactacaactctagaactgaacatgtgcgatcaaaccactactgtcagcccaatgatggactgaatggagctgggtgtaacacatttcatgtaggacaaaaaatagtgctctcaagatgcatgtccaaaaagtagattaataatgagttgggtacatggcattctgcaacatcttgtatgaa

SEQ ID NO: 150268 - DNA, 449 bp, Zea Mays
ctaagtatatagccgttgccaatggtgttgcagaatcttgttggttgcgccaactcctccaagaactctatagtccattgaccaagagcaccccggtctattgtgacaatgtgagtgcagtgtacctctccatcgacctagttttgcatcagcacacgaagtatgttgagattgatctctacttcgtttgcgagcaagttgccatcgacgatattcgagttcttcacatcctgatgtcctctcaatttgctgatatatttacaaagggactaccgttcgtggtgttctcggagttctgttatagtctaattactcacgcgtctgatgggactcgtagactatgggggtgctagaatccctgtatagcgtgcctatatggctacggtagatagatcgacctctattaggcaatgatctccgttcatagatagagaccaatctttattaca

SEQ ID NO: 150269 - DNA, 585 bp, Zea Mays
cacggcggcaggagttacgtctttctcggtgtactcgtttgtcaggagtttcccccatttcggaggcttcgtcccaggacacgggctgcgccagatcccgttccccgacttcatgatgtcgccacacgtttcgacatctgtttctttgtcgccggcatcacgctggggaggttgctccccttgcatggtaggctcatcgtcggagatgggcgctgactccaatctcccctagatgaagaggacgtcagggtagaaaggagccggcatgatggtgttcttcttcccatcctcctttaagggcggaggtatcagaaaggtggcttggtgtgttctccttccccgactcgggatgtttacttccttcttccaagtgatccgtgtccactatttagtgggtgaggtggacaacggagttcctcgggttagtgaagccctgattgattggtcttccttttcccgagggatcctaaatcctagtttccaagggaccatcttcccccgagctatgagagggggagctgtccgcagtcttgccttagcttctcttgggattcccgagaaaggtttcttctcgggtggatccgc

SEQ ID NO: 150270 - DNA, 847 bp, Zea Mays
tgatttcactattattttgatcctgcaggtgtttgatatcacaaaaagatctcattgtgtaagaaggatagttcttattctcctatccatctagtttctatgttcttgggtctactactattcaagagtgaataatgcattgtttttttggaggaactgttttctgggactaaaatgttaggcctctatatttctgtatgaacctccatgtgttgactatatgtaagttaagatcggagtaaatgggtgattttgtatgttgtgattttgttttgaatatcttgtgcgcaccaagcagtactcacaagttgttgaatatttttgactgttgttggatcagtactcgtgcaacagtaggaaaaacggtgcctagacacctgcttccaaacagcaacggggaagaggggaaagctgccctgggaaacaaagtggattggaaaatccaattcaatccacgttggggcttcccttccctgggctattagccccttgatgccaaacgaggccatagggggatctggggatggaagaagtcctgggcaaaggagaccggaggctggcctgtcaagtgggcatggacattgcttggttctgaacaaggctgccctcgccttgcctagctcaaatggcacgagcaacgaggtgcttgcccgcccaaacaagagagccaatttggctcacttaaggcagcaagaaaaatcttaacagcacagaaatcaagatcgggtagcaagacatccaaacacgctgctcattctagttcctggctcagcagagctgtaaaataatccagcaaatttgtcagtccttgcaaccagtatcaggaataacaggagtactataagct

SEQ ID NO: 150271 - DNA, 649 bp, Zea Mays
aaggtcccatttgagaactgtttgcacaggtgttcgtacagagagcaactaacccattcttattttatgaaataatcttatacagaaccccatcaaattctcgggtttcaaacaggccacaaactacaagcagaaacggcaataatatataagctatagtaccggcagcattaatctgctgccaccatatatgtacacacattctaattggccgtgcgtgcgcatcttctttgcagagatgaccaggcaagcctagccagttatggtagtagtattatagaaggacaagaattgccattaaaagaaacggaaaagagccccaaaagagtgtagcagtccgcaatagcagccgcgccagcagtagactggcacagacgccggaactcaccacacgcaatcgcccggcgcagtccatggcccttcgaaccaacccactcatcatctccatccctggcccgcagcaacagcacgttgattcccggccgcgaggacgacagaaactgacatgactcaccccatcacaccaccaccgagagaccccaagaacaagaatgagaacatccgtgatctcaactcttccaaaagtcaaagagcacgcagctggtagatcagcagcaagctagaaactaaacaagagggttaatatctg

SEQ ID NO: 150272 - DNA, 600 bp, Zea Mays
gagttccgcaacgtcgcggatctcgaccgcacggtgagcgcccagtacctgctgctactctgctagcgtgttgcgtgtgtatcgttgtgtttgtgaagcacggaagcgacccttgagttgtgtagtgatggtgacccggtgatcccaagtcatgcacgggcccaattctgttcaggaaaatatccactaaatacttgtttttattttacgcactggaacacaggttgatcttttcagtcacattgctgttttatataggagtcatgtttatataagctactagcctactactgaactcgaggtcgcatgtgcattatttgtgtgactgtgcaagctcattgacatgaaaaacataaaccacaggtgtccagttcatctctgtttcaagaatatgaaaactgtccatcttgaccaaacaattcagcctgagatgggccaagtcaatttgaatagtcatggtaataccatgttatttactattatattcttgattatcagattgaaaaaatgggatttgtagccctgtgagatatggcctttggattggcagtatggttaccaaagatgatttgattaggtacactgtatatttgaatatct

SEQ ID NO: 150273 - DNA, 327 bp, Zea Mays
gcacgtaccaccttggatagtgttggtaggacacgaccatgcaagatcacaggtaatggtaccacttgtgttggcgcctccccttcaaacttcctcagcaaggaaacatggaagacatcgtgtattcgagcacgaggtggtaactgcagcttgtatgagaccagccctacccgaaggaggacctggtatcgaccgtagtactttggcccaagtttggagggagcagcagaagtcaacctgactgctgtgaactgttgtaggcgaagccacacccaatcgccgacttggaactccacctggcgacgtttcttgtcctggtaagctttc

SEQ ID NO: 150274 - DNA, 953 bp, Zea Mays
gaaaaaatttgcatttaggtggggcccaggttttccacaccctggtatagtggctaataaattgatctcttgaagagcccttcatatgccacttttagctcaatagttaccatcagaggctatactaaaaacatgtttgtcttcaaatgcaggttgtaactctacatcagaaagaaggtcccaaagctgtagataatccaccaaagctcccacagaaagagctcctttgatgtcagagatccatcttcaattcagaagagcctcctgaacggttcttctttttgtaatcctccttggaatgcttcattgctttgaaatagcctgagagcgatatcacagattctctaccctgagagccatttatctgtctagaacagggtgttggccccatttccaacttctaaaattagaacagtggagaagaaagcccgaactttgttaggaacatgaaaggagagttttgcccagggacatgctggatcagttttatgcagccataactgtctcatctgaagagcccagcacatctcggataaactggagatgcccagacctcccaatttaagaggccgactgtcagggcccaagatgggctgcggcaaggagcagcagcaaggataagattaggcatcaagcatccttatcccctttgattagaatgttaaggcccataaagcccatatattctcgtctgcctatatatatgctacagtacccgagggggtgattgtcttgcctaatcaaggttagtaacatggtaacagagcaggttacgaaaccctaatttcttagccgccgtcgcggctgttccccaccctagccgccgtcgcagctggcacggatctcccccatcctagccgtcgcggaccgctgctgccgtgttgtcttccatgcgcgggtggcgcctcagccgccgtcgcggaccgccgtcgccacaccgtcttcatctctgc

SEQ ID NO: 150275 - DNA, 407 bp, Zea Mays
gcacactgatagttttgtgggtgtgtggccaagtgcccaagtgtatgcccaacattctcatgaaaattgggcctcatccttttcgtgtataatatagcgctttgaaattggagacagtcaaccgtgcttgcaattccagattttgcctactcacgcagaagttagtatcaatttatcgtagccgtaagtagctacaccagacatcattcaaataaatcagagttccaaagtgggggcagagatatgcctatacgatgtttcttcaaagaagggtgctgtctgtcagttgtcacttaccatgcgaggctgtatattctacagtctgttctgatgtccgtgctgtttcttcttatcaggttcctggatttcggcctgggaagaccattccagaaaacgttcttataaac

SEQ ID NO: 150276 - DNA, 363 bp, Zea Mays
cttattcacatcaaacttagagaatgattccttgggtcaagacaagaaaaacacacaagcaactctgaaggtaggtcattaaagcgatgatcgaactctgtggtgatagaatctatagcagcatagaaagtatcaacatgataaaaatgttctgtggtaatattgtttctcccacctttccttgatcgaccaaaacgtggtacaacatgactcatatttggatttggtattgggatatcatttgcaaggcagaatgttgtggcttcttccaacaatggctcccaaccatcatttctcaaattaatcaagcgtgttctgacatcaacatcgccttttcctagttggacgtgattccgacgtccg

SEQ ID NO: 150277 - DNA, 667 bp, Zea Mays
cgccgacggcgagcggccgctgcagatggtggagtggcctgagtccatgtggctggacgacgacgtggtgcccggcctggccacgacgccgtgggagttcgaggacgacaaccccttcctcgcctaccagaggaacaacgctctgttcgatcaccagctggaggcatggaacaacgacggcagggtcgagctgttctgaggcgctgagatgatctacttcttcctcgatcgtcattagattagatgtagttaattaatacgtcatccccggcctacgatcgagcagttcgcgttgcacagaccagagcactcacggccgttgaaaataagcaagagaaagagatgaaagtggttgcacgcccggtttcttggttttctaaaacctttggccgggccgaccacaacttgcaaaggaacagttggagagaaaaaaaaatgttcgttagcaatctgccagtgctgtttggcattggagaacccttccgtggattgtttattggacaatgcaagacccctctacgtacgttgaaaatgggaataataaagccaggccactttgtaccgaatgtctaatttctactagaaatcaaggcgttccggtggttctcatattaccctttaatttgacccgctgcaggcgtgctgctggctgctgctgttattcaac

SEQ ID NO: 150278 - DNA, 802 bp, Zea Mays
cccacactgtggaagtagggtgccaatcttatggtggaccatcccattaattttgaaaacgtagggtgcagtgtcattatttatcgttctatcgatagctgcaccgaaagaggtgaatgcaaacaatgaattgtaggaccagataagcctcaagaaacgcctcgagcgagtacctccatcaaatctcaaaagattagcaagcaaaggtggcggacgctcaaacggttttaggttcactttccctcctctgcagcaatggttgtacacaatttttttctgggtggagcaggaatcgtttttaacacgctcttggaaccagaaaacagcatggcagtatgggcatacatgttcaggtccaccgtagtatgacctctcagggtaggcatctacacaggaagaagagaaatggtagcaccaaagcaaagcaggaagaatgttaccaaaaatgttgggcataatacacaccttttagagcatctatgtatgacctgtccaaaggaagcgtggttgacaatggctcgtcaggtaccatgtgatgtactctactgcgccggcgtcgcctattgaatgcggcaagcgctgaagggaatgacattatagatctactacctgtgccgacataagcatcactaacaccatattgttttttgttgaagtaatggctgaacaaacatgggtgtacgcacgtgttccctatagaacaggtattggctggttagaggtccccgaaaggttagatgggtctacttcgtcttcaccatgaaaaatgcgatgggcatcagttgtctcaaagactgggcaa

SEQ ID NO: 150279 - DNA, 748 bp, Zea Mays
tggattactagaaatggttgaatgcgagtatttagcacgctcatgttggatctgtgcatgctaccactatgccaacgaatattcgcctgattgcaagagttgcggtggtctggactcggagaataagctccaggaatcaatgcagccctgctgctgtagaagtagaacttgatgggtatttttctttctattctgtttctcccccctccaagaactgcaggcactgttttttttttaggtcacgacggcagaatagcatgctatcttctctctgttgcgtatgcataacaaacatctagatgaattttaatctaaagcttgtgtcgacgcaagaagctggcacggagtagatgtacctgtttgcataaacaaagacaatgctagctatatacatggggatgtcgcctgtcatgccagagggtgcaattagttggatatgtccgtcgttctgggcccatgctccgtagtaccattctcctccccagtgctgcctctcctctacttttgatgccaccgctgccggctgttctattattggcgcctccattacgatcgcctgctgctgtcactctcactgccgcaacacacttttcttctgatgagcgagaagaaaccacacactattctaaatacaaagaaaatgcacataaatatgaagactgctgatggctacaggcttaactgtgggcagtcttggagatggttatctctttctaatccaaccacaggagttcattatatgaaggct

SEQ ID NO: 150280 - DNA, 634 bp, Zea Mays
aacagaacaccgagaggctcgaggatcttgactctgcaactgcaaacaggaatgccgggcgtcaggtcagagtccccctcgccggaggtaagccgcgtccggatggccctacccactgcttccgccaagatagccagtgccagggcgaaggtcggtgagagagccaagacgccggccaactcgaaggcgaagggacgatcggatgctcaagagaagcggggcaggaatggaaggctcgtcccgtcacttgggtgcatgagctcgcctcctctggtgccaattggcccggactcggagaagaggaggtgttcctggatcactgcaaactcgggttagttgatcgcagttcctggttccttttttttgtttcgcttaaaataagtgaaataaaactgcattctcttcgtcgctccactagtgcatcgcaaatttatagagttgcacttgagacttcttctttgtaactttgttggtttgttttcataagctaccgaacatgcatctctactctttttgtacacataaaaaaactgacccgtgggatatgacagcctcgagcattatgttaattatgttaagaagactttatcacgcaggttgacaaaacctccgaatccatgtcccacccatacac

SEQ ID NO: 150281 - DNA, 651 bp, Zea Mays
catcctcaggctgttgttgatctgttttgtttgtgcttgtcttgccttgcactgtggattctttagccaacaaacactggcatgacctcagggcctgtcagagttcagcgtatgcaacataggcaagaagactctctgcggtccatgacacagggcaccatgttgtgcctgcccatctcttgcttgctctatcatttgggaatcatgccgctactactgtaccatcttggtttaaaaggaaggctaaagaatttttgactgggcacacagactgacaggcatgagtttctagcaacatcagtaattcagcatgcatgtatgtttgatcagtaggggttacctgtgatttagatgtggttcctgtttaatcgttgtcctacatgaacttggctttgaagaattgtttagacttgatcctaatgtggaatgtttgtacgttagattttttgtgtaaatataagttattgaagcattaagattgaactgttaggcatttaaatgaagaccctcttgatgtcttatgtatggttatgtttttctgattcattatcagtaagattaacataatttggtgatgagggctaaaagcttcgttttttgattttttttttcagaatctaacgtttcatgtgccaatcatgtctgcttctc

SEQ ID NO: 150282 - DNA, 479 bp, Zea Mays
gaggttgtgcatctttattcataagtcgtgttacccatttgccccggtttgcaaggtctttcacctcttccaaagagttgtggcagggttcactacgaaacctttacaaagatccactagtatgatataacttgttaaggttttaggtcgaggtggtatagatctcccttgactaaaaagctaccataatgtagatcagtccgagaatcgatctatacttgagcaacacctcccctcttgcccatttggtaaggctaacccataactaacttccgtaattaattagccaagacgagagacataataatccttgtggttatactgttttcttggcttctcgctccatgttctaattaaacatagtgatcttgaaaatatcataccacaaaaataaaacaatatccacatgaataaagcaatattcatcttttatatgtaacattatcccataaaccaagtaaagcattagcatatctacc

SEQ ID NO: 150283 - DNA, 505 bp, Zea Mays
ctaaaacccgagtgtgacaggcctctaatgtcttgcgaagactcgcccaaggttcgcacactctgtttcggcactccgacccttctcttgcccctcggcgtggtcggggcaaccctagacgaagactacgccacaaacaaatctaatgccacaaaataatctaagtcatcttccgaagactcatcgtccatcctagcgaatggactcagcaattcctcactttctgatgaccatggatcaaaatcagatttcccactactaagcactatcaaacttcggcacatcaacgatttatcattcccaatgcaccaaaatctgcttgcgcaggcccaggcgctagaacctacgcagcagccaactttaagtatcgtacaaagtaaaaacactattgtactagccctactctaatttttacacctgagcagatgcagatggctgcacagtcccctccgtcatagggtcttcagccctgactttcgcgagcgaaaactgttcttcagctccc

SEQ ID NO: 150284 - DNA, 747 bp, Zea Mays
ggagatcatgtggcttatagaaatagcactagagtgatctcctcaatcaatcaggatcagaccccctgcttccttgtgagggctgatacatattgatcccctactgcaatcaggatatctcctaccataacaacctgttttctatccataacaagcctggttactatccttgcctagcacacgtcggcagagcaggtaacgggggaaagggtactgctaacatcccctgcagtcgggttgttgtaggaatggacattcagactggaccggaactccatgaagaccgaagaaggtagccccttggtgaaaatgtcagcatattgtgaagatgtcggaacatgaagaacacgaagatcaccgagagtcatgccccgaactcatgatatcatgaaagatggagatatgctgtgttggctatagtatattgaatgaatagagagccaacgcttacataatatatagggggaggaggagatcatgtgacttatagaaatagtgccagagtgatgtcctcaatcaatcaggatcagaccttcctaatgagggttgatacagattgatcccctacaccaatcaggatatctcctaccataacagcctggtttctgtccataacaaacctggttactattcttgcctagcacacgtcggcagagcaggtaggggggaaaaggatactgctaacagtttcatctccatagaatggctaggtttaacgttggctcgccaagcctaacacaaccctcc

SEQ ID NO: 150285 - DNA, 301 bp, Zea Mays
ggccgaagcagcagttttcctcttctttccctgacctcgcagtggatagcggtagtcggggtagacaaaaccaatggcatcaaaaactctattcaatctctttttccctgcctccgaaggctgtggatagtgcattgtcttctgccctggaatatgatccaagcagttcgtcactggtaacttcgatgaattttagccagtcatcgtttggttcatcgaatttatccccgtatctgaatgtgtactttagtcggattagttcaccttcactagattcggtgatggcctccttcagcatttc

SEQ ID NO: 150286 - DNA, 383 bp, Zea Mays
gcatttttcatttctaattgctctagatagtttaattcaaaaatcttgcattactcaattacatcatttgtatatgcatgcataccaactcttggattggtcaaaatgtccatatatgagccccaattcagattcgaaattcaaaatcagcaagtggacagcaattggcaaaatgagtatcaggccgcggaccgtccgcccatggaccgcggaccgtccgcaccatcaggaaatggacagtccgttcaagcttcgcagaccgtctggacacatcagggcgcggaccgtccgccgccccagcgcggaccgtccgcgacagggcagaaaagtagatcagcggccgcagacttgtcatttgtgctcactcgctctatctctcttgc

SEQ ID NO: 150287 - DNA, 313 bp, Zea Mays
gtacatatgggctctccgaagccagggaatggatgcgaatgctgaagctttctgccgggtgcacgaacttcactaccagacgaaggctagagcagatggccttcacaggaactttggctgctacaattttgcgtatcggaaggatacgaaggccccggttattggctatcgtaccaagtggccgactagatggactaatgaacggttctacataaaagcggatgagaaaaagagggagaagctaatgagcatggttatgagtctgttagagttaaacttcggcatgactcgacccttatgcaatatgcaattg

SEQ ID NO: 150288 - DNA, 276 bp, Zea Mays
ccaaagagtacctgaccgacagacggacaacctccgacaaaagacggcaaccagaaacctgaagtttcgccaagagttgtctagacagcctctgattcagggagccagcacgcaggacaaaatgggccatcaagttcaacgggcattaacccaccaacatatatagtagagtaatacagctactgctcaaggactcatgcaggagccaaaagcataaaaaactacgatcgaatccaagcaggcagcaacattttgttcctcgctttccaaatcgcc

SEQ ID NO: 150289 - DNA, 323 bp, Zea Mays
ctctcttggaaataagggcggtgccaggtataagctatatggaaaattctactttcctttcaggtggcatacctggtaaatcatcgggaaacacatccaggaattctgatactacattgataccttttgatggctcgatttcctcaatatgggcagtgatctggtgatagcttcctttccttggtccagacaagaccaactccactaacacttcctcttctgataaggacactaacttcacagtcctcttgtcacagctaaggcttgcttgatatttggttagccaattcatccctaggatgacatctatggttacatctcgg

SEQ ID NO: 150290 - DNA, 662 bp, Zea Mays
taccttccgtagctgcatgacaatattcatcaggctaagtaacttcttgtcatttagattgccacgacttccatcaagcaactcgttaagcgagatcttattttttatagcttgatagaaaatttgttgacgagaactcaatttgcagggaacaatttcttctttctttttggtcatttcagcaatgacatcaatcttaacccggcggagcatgaagggcttcaaaatagcatgctgtgaaaaaaggagaggtgccattataatcttaggagaatagcaattgtaccaggactcaaaatatccaataaacaataacataaacagtatggtcatgtcttaccaatctactaagctgatgttcattcaaagctcctccatgctcagcatgaccctcaatactgccaaaacattagcaacttaaggatggacaagataaaagaaggtacaactagaaacaaagagaacagtacatcagtacccctttgagaaccactcgttgaactgttcatggctgtcaaatagagtgggcatgatgaaatgaagaagtgcccataactcagccatattgttctgtattggtgtcccagtaagaagtagacgatttctacagctaaagctcagtaatgtcttccagcgctggctgcagcagaggaataatttgt

SEQ ID NO: 150291 - DNA, 603 bp, Zea Mays
attaatcaatgtactttacatatttttttagaacatcgctgaagatctgcgagtcaattcattaaggagacaaaacagaaatggagcgactgaagagtcagcaccgggtacaaagaaggcaagaaatgcacaggcccatcaacagccacccaaacagccactttacagaaacacacacctacacaggacacacagctaccagcgactcaaattaaaccctaagagcgggttggcaagtgaggagctcaggaagagcagaggcacccgcagcacaccaaagggtacattcattggccacaacctgcaaaacagtatgaacaccaggctgttgcccttcgaatacacaatcattccgatgcttccagatttcccaagcagccaacatgatgagtgtgttaaggccttttctcaacttctttggatctgttttaacagctctactccaccagtttaggaacttgtcactagactgagatgacagagtagacaacctcaatttggcgaataacagaaaccacacttctctagaaaagacataggagactaaacaatgttggatagtctcctcagcctgatcacacaaaagacaagcagaagggtgag

SEQ ID NO: 150292 - DNA, 640 bp, Zea Mays
cccagaagtttctggaggaatgagtacctttgctttagtaatagcagcacctagcgtcatcggtggtgatgatcttggttttggcaagggtccctgccatggttgaatccgttgcctgctttgacgaagagaaatttctttttgatgctgaacaaatacagcatcatttatttttttctgccaacgatccaggaggggcacgacagtctcgtgtggttggtgaaaccaccacttcattctccgcctgaattagttctggcgatgtgaagccacacgttctggccatccgtgtataatctggagtactaatgtcatcatcttgacaatcactctcttcatcagagccaggatctccatgtagtgcccagaacttggaccttaccggttcaactccatgaacatgatgcagatccctcaccccaccagatgatgccaattctatccgtctttgaaactcctccttatgaagaattctttcttcctctttgtttatcacctgtagagacacctcggatgtgcccttggccggagccaaggttaatcgacttaccttcacatgattcttcctcatcccatgcgcagattctctgtattgtgattttgctcggggaaccgttgatggagcagttggagaagaaga

SEQ ID NO: 150293 - DNA, 370 bp, Zea Mays
taagtgccatgctggatatgttagctgaggattcttctgatgccgctcctgctgaaacactggtggtggcgcccatccctgaggccggcaaagctttggatgctcagaggtctgacagtgttcgcccgaagcgttctcgccgagccaatcagcccacttctcctgctgaggggaagaaaaagaagaagagatgtcttcgtcgagtgtctagcttggatcaggatgccggtccttctgttcctgctgctgaggaagtgccagtgcctgcatttgctgaagctatccccaatgggtgtgacccgactgctgtggatcccaatgggtgtgacctagatgacattgaacccagtgggtgtgatctggccaaagc

SEQ ID NO: 150294 - DNA, 452 bp, Zea Mays
cgccgggtaaggtttcctcctggtaggaagtggttttgtatattttttttctgatgtgtcctctctcaattctgtgatccttatttacatagtattgtggtcacggggcccacagacggtgcccagacacaccccactcacaccacgcactacggacacacctgcctactagtgctcctcttcttcctgtggtgcgaccggaacaggaacgggcgcgacaagtccctcccctggagctgatgcttgtccacaagctgacaccgacggataccttgccttgagtacgtaccagtcctcccaggttgccgaagacgctggtagattagtccacttcacaagcacttggggaacagctttagagccctttttcaccaaacgacggtccagaatgctcttaggttgcagcgcctatgtactcagatctagaaattcttgaaagtctgcaaacacag

SEQ ID NO: 150295 - DNA, 965 bp, Zea Mays
cgggcaagggtggctccttcgaaggtagttttcactgggatgaagtgggccaccttggtaagacggtctattatcacccagatagagtcgttccctttttgggtccggggcagtccggttacaaaatccatgcctatttcttcccacttccattcgggcactagaaggggttgcagtagacctgcagtcttctgatgctcgaccttagttcgttgccaagtgtcgcaccgggccacatattgtgctatctctttcttcattcctctccaccagtatctggttttgaggtctaggtacatcttggtggtccctgggtggatggagtaggctgagttgtgagcttcctcgagcaggacttctcatgcctctccttttggtacacacagacggttcttgaaccaaaggactccttcctcatctgtcctgaagtccagaagtggttccttgcgagcttttccataagacctgttgtctcagtgtccaggctttgagccttgcatatgaggtcttctagcattggcttgacatctaggttgccattgtctcccagacatacattcagttgagctgattctttcttccaatcttccaagaagttggttcctttcttcccgaaaggttttcgactgagggcgtctgctaccacgttgaccttcccggggtggtagtggatctcaaggtcataatctttgatcaattccagccatctccgctgacggaggttgaggtctggttgagtgaaaatatacttcagactcttgtgatcggtgaagatgtgacatttgttcccaattaggtagtgcctccatatttttagggcatgcactatggctgccaattccaagtcgtgtgggataattctgctcgtgcgggtttagtaagcgtgatgcatatgcaatgactttctcattttgcataagtacacaccctaagccttgccttgaagcatcacagaagacgacgaa

SEQ ID NO: 150296 - DNA, 438 bp, Zea Mays
gagaccaacataacaacgaaacaggaaaaaggatgcctaaacaggctccagccaacaactaaaaaataaatccccggaattggggccattagaagggccaagttcttggctccggctagcttccaaacttccttttcttctccagctcttatgatagctgcatccaggtttggactaagcccgccaaacacacaaccgtttctgtccaaagtccaggaataattaaggagttaaaccatgtatcttggggtccttttggacctttatctccttcttaatatattttcgcgcagctctcttgcgctttcgagaaaaaattccttgcagctgttcgctggagcttttccaccattgcatggtgtccctttctcctatttgaggagtaagtccctgaaggttaacctgtccaaacagcttgaactgaaaactcctagcgaa

SEQ ID NO: 150297 - DNA, 608 bp, Zea Mays
gggctttacctcaagaaaccggtcttcactcatggacaactttatgtggccgtatctaggactacatccagaggtggccttagaatccttattgagaatgaggatggttcgtgcggggtacagactcgaaatgtggtgtaccacgaagtcctcgttgtcgctgaagcggctgccatcctagccacctaattttttatccatcttttgtgttgtacatagcaatgatatgtaaatactccagcgctgctgctactcagacgattttgtctcttttcatgcttgttatcttcgttttttcttgctgcgtgtacaataacttttgctttgaggtaaaattgttctactaatgcgcaatacgtacaccatccttatctacttccatgctgctgtattctctaatgtttatgccatttttggggtcaacactgcagatgggagacgtgttgattccaagcctacggtgtgggaacttatctgtgacgatatgcgtccgtgtttctcggttttgggacttttctgatcctcaggatgatgcaaggctgttacactgtgatatggtgttgctcgacgaagaggtaaagtaccaacaaactctaccaacttattgt

SEQ ID NO: 150298 - DNA, 877 bp, Zea Mays
ttccagagacacagcgaacagtaaaaatggacggcgggttgattctctggtttccagggggttctttaacaaaactgcaagccgaagaggtatgaagccaactcggccgtcagatcggacatgggcgttccagattagatctggagtggatcgaaacggtacgcgtcggccaccgcacgatcaaatctcaacgcttcttattcaaaacgctcgctacacctgtcatccgtctgatctaaatcggacggccagaagaagatcaggccgaaccggtatactgcgagggtcgttggatctaggatcgaggatccggatttaattacctctagatctagtaacaaccgtacgatgcgagatcaacgaccaccacttcctcggccgaaacggtacactaggatttaatcccaaccgcacactaccggatcaatggcccacgtcccggctacaaccccgcgcccaccaacgtcgatcatgaggcggtgccgccctttcctcacggcggcaagctcgccggaataccgcccccgaagttctaagggtagaattcctactccgcctagttcaacaggaaggggacaacacggtgaaccaaatggttagtgacataccgaagttgggcgcacgtgtacatgatgcccaggtcgaggcggatccacggcggtgtcgtccctccggtgagcaattaaaccgccgctgatgacgctccgaacacaccccagctaccgcgagattccttgaacccgaccaagccccctcgcaccacgaaaccgcccgaacgttgtttaatcccgaacaccacggcggcggcggatttctcttcctcgcgattcaagacgacgacgccctcgcttccaggtggctagccggtgctttcgga

SEQ ID NO: 150299 - DNA, 331 bp, Zea Mays
ccccgatcgaattattgatgtcagtaaatcaagattccttttttgctttggcaaggcctgttgaagacccaaggtagcagaggtgctatatcacattttatttctcctcttcatgctttatatcgagctgttccctttcctaaatctgatttctattaattaccattactcctgacttttgcaaaatcttttaattgccaacttctcatagcttttacagttttactctgcatgatacatgtcttttgtgatcacctgatcttagtttgcctattatgttgccttctataaagaattgacatgctttactgttagcctgttagatggtgtt

SEQ ID NO: 150300 - DNA, 637 bp, Zea Mays
gcttgcaccagatatgttgcgagataagaggagagtattctttgaaaaacaatatacagtataggaaagaaaaatatagaaggtggttgaatctaaaatagatagccagaatagccggccaaacacattacacatatgcccctaaatatatgctcccgtcgcggcattgggcaggggggcgaggctcagccagcctcctccttcgacgaaggttccggcccagccatgcccgcttcctttgcgacttgacttgccactcttgtgttccttgacaggctaccaaccaccaactctctgactctacggccaatcgacccgatcaggccggaaaggtctcggttagctgcggcatgcgggtggagttggggattaagttgtccgtgtctacggcagcggcggcggcggccatgaggatgtacgccatgtcttcgtagaattgcgatagccttcgctgaaatcggaggtctacttttgcggccgtgcatgatctggaagcgggttctcgaagcgaggaagcatggacgtggtgcaggtcctcgcgtcggcgacccagctggtctccgcgatggtgtccgcggtcggggcactggagcaggcggcatccgacttggcggaggccccgaggaggctgcaggtg

SEQ ID NO: 150301 - DNA, 435 bp, Zea Mays
gtggtagtggttctggtgcagcaacaacaaatgatggttgtggtagtggttgtggtccagctgatgtaggtagggatactttgccaagtggaggtggcagcggtagtgctgctgctgcagcggatggaggcggcaatagtgaacaaaccatcaatattgaggatgatgtccctactggaaaaaggcagaagaaatgcacatctgatgtatggcaatactttaccaagaagaagttggtcattgaggataatgggaagacatatgttcagttgtgggctcattgcaactggccgagatgcaagcacaagggccgatgtgagagtaattatggaacaactggattttggacacatttgagggtggcacatagtatagtgaaaggccagcagcaacttgcagttgaaaaaaatggggggaaagacatcactgttgtgg

SEQ ID NO: 150302 - DNA, 386 bp, Zea Mays
tgaccattgtgtctctcaaggccttcgttgcaacttgatatttattaagggcattaagggcctcgaatctatagactttaagaaggtctttcgttgttgctttgtctgcatatagcacgtagtctagattggctcaggacgaatttatgcttgagttcttgtgggggcattacttttgctccatacataagcttgaagtgtgtacaacctgtggctctagactctgttgtgtttagcccccataggtcatcaggtagttgggccattttgtgaagtactcaatggcgaccaaagaaaatttgagattgccttgggccgttggcaaggggtcgatgatgtttataccccatcgttggaggggccatatggatgcgattagttttgtt

SEQ ID NO: 150303 - DNA, 570 bp, Zea Mays
ctcctggcgccatcgccatgatttccacgcttttccgttgcgtttcgattcttctgcgttcctcgccatggctcagtgttttattttttcctcttcgttcgaatacgtgccccagatttcgtggacgaggtccaggaagccgtcgccgctgagagaaccggatggcggcttcccgcccgtgccacctcggttccgttgccggcgtagagaaaaccgttgcaggttctgggtctccgtctgctccgccgcgtcatgtcccgctgcgaagacggcagatgggctccctgaacagttctttgatgtgagcactgagcggagccgcagatctcttctttcccgctcctggtgatttgggttgggaccttgggtcgtgtgtcgccatcgacaatcccaggcgaactcctttctcaacccgtgctcgtctgatacacgcgaggcctagagtgtcgttttggaggcgaccgtcggcccgcgcctcggattcatctggtcgtgctttgaggcggagctgtgcggatctccgcatatgagaaatttgctatattgtttggtctgcgccccgtgctaaga

SEQ ID NO: 150304 - DNA, 1006 bp, Zea Mays
agctgatggcaaaggcagtgtaggaggcgttgaagacgatgcaggtgggaaatgaccacatccgcaagacagtcgtgcagaggctgcgacgcgagtacgagataggtgggtgatgaccgcattcgcaacaccgatgcacagaggctattgcgtgagtacaataacctcgtgttcaaggatggcaaatccatggagaacttcgcccttgtgctcgttggcatcatcgcactactcagcacactaggcgacctgagacagaggacaaggtcgtggctaggtatcttcgaatcacccgaccacgatataaatagctcgtgatctccatcaaaacccagctagacatgtcaacacacactgacgaggatgtaactagacaaatcaaggccgtcaaggaggaggacgatgtgatgctgcccagtgctagcggcaaactgtaccacattaaggaacaatgggaggcccaactcaagtagaagaaggatatgttggctggctcgttaaagtaggcgaaccaatgatgccatccacgccacagctcgtcgaacggatgtggcggcaccgagaaagcaggtggaggctagggatgtgggtcgagatcaatgccagagatgtagaaaaaccatcctttggctagggagtgcatagttcaagcccaagaaaggagaggcccatgccgtgtaggcagaagaggaggcggggactttgctattcgcacgggcctccttcgtatagctcccgactgacaaaatggcaacgacacatcgacagttgaatcttcggtgttgaatgtgtcacaggtggaaatccacccatcgttggcctggatcgaggcactagagttaccaccagcttagatgttgacacaggcggccctagcccctgtggagaagacattgtcggacttaccacccctggcctcggtttcagcgctagaggcaccacacatggctagggaggccccgctgacctcggttccagtgctagaggcacccccatgctgctaggg

SEQ ID NO: 150305 - DNA, 524 bp, Zea Mays
gtttcctctttgcccgaaggagatgacgatgtagaagggttcgtctcgtagtagatgatcttcttgatgcgcttttccttggcatccttctttgggtgtgaagaattgacagtattctcctccttgttcgtctccacctcatccttatggatctccacccccttgcctttaggatcttctctcgacatcacttcgagcggttaggctcaacaagaagtgtcgggctctgataccaattgaagtcacctagaggggggtgaataggtgacgcctgaaaaattacaacataaacacaaacttggatcacaaattaaaagttagtgcaaaactagatccaagagagtgagaagaatgagacaagttctttcttgattgctctcacaagatagtggaattaacttagagcaatattgcaagtaaacttaagaactttgagagagaggaagaataaatcgcaaagaataaagcacacaagacacgacaattttatctcgtggttcggtcaagccttaactgctttccta

SEQ ID NO: 150306 - DNA, 409 bp, Zea Mays
agcaaaggttacagtttagttcagcaaaggttacagtttagtaaaggttacagttttagatttagcaatgcaatttgtggataaagttgtcgggatctatattaaacaattgttcactttctatttgaacaaatcttcccttctcaggattatagagcacagtctgccgacccttgttcactttctatttgtgcacagtctgccggctgaagtttagtaaaggttagctgttatatttgaacaatctgaaaactaaaacatatgatagtttagtaaagtttagtaaaggttttagatttaacagctaacctttttctgtgtatacagtctgaaaactaaaacagtctgaaaactaaaatagtttggatcttggagagtccaaggctcggatcttggaagagagtcagtc

SEQ ID NO: 150307 - DNA, 646 bp, Zea Mays
gaaactatcgccagcaaagggagagtgccgagatgagagagagaaagaggaagttgcgtcgccgcattgctagctgggtcgttgcgatcccatctttggtgattgagttcggccgttgaggcgttgagcatcccggaagattcggctccaggaatcgcaggtggaagagggctgcgccgcacgggtgcttttacgaaggcggcattatcggatcttgtgctgatggcaagggagacttccttgggcgcgtggatctgctcgatgcttggttggcgcggcgaatcccatggcacaacgtggacagtttctccaatgcctcccccgctggtgagaattcttccaagtagttcgattttgcctccacatccgtataagccgtggtctctcatctgccagccgcttcccgccgctcctttccgaagccgtcaccaggaaaatccaatacgctatggagggctcgccgtagtacagaggtggaggccgccaccatgaagcagtgaagggaagagagacaaactcgtcgcccgcctcgcgtttgttgggagtgggtctggcgtgatggccgggtcgcgttgatcgtgcgcatggtcggcagtgggggaaattttgggccgctggtcaaatttctcgccgccatcctgccggg

SEQ ID NO: 150308 - DNA, 467 bp, Zea Mays
gtgtttttcttttagagcatcccttctcttgcaagatgagcttgtggtggtgacaattaagtgaatgtactcaaagaagtcatgaaccgattggcaacaagcactactagcaatagaaaccaccacaagttggagttgatgtgcaaaacaatgaacataataggcatgtggattaatatcaagtatctttctttgtaagccattaaattcaccttgcatattcgatgctccatcatatcctttgcccctgatcttggatataaataatccatggtgataaagaaggccaaaaatagcttccttcaaggcatctgatgtagtatccttgacatgcttgagggcaacaaaccgttccatcacatggccttgattattcacatatctatcttacaaaaaattagttagctaggcaacacatgaaaatagaatatgaaactacaatatgcaaataaaatatgaaagtacta

SEQ ID NO: 150309 - DNA, 445 bp, Zea Mays
ggcagactgatacccagagattactgggcacctttatcgtcacaccagcagttcaaaacatattgaaaatataatcaagttttctgtcataatagaatagaacaatggaagtgaatattcaagtgagtagcctcccatcagcttggcttaagcccagcaagcgtacgattagcgacccggtgaactcacatgctcagcaaggttgtggctatcggtggtctgaagtctgaacccgtctaacccgcacatcacgtaagctagcttctcgtcgtgggcatcgccgcccgtgagcttctccttcgctatctttcccttattcactgccttcccctttgtccacggatcagaaccaagctccggcgaggtatagcgaggtctgaagaagcgtttggagatgcagaaaatatatgtgatgtaaagggcgatgcgatggccgtggcacgac

SEQ ID NO: 150310 - DNA, 426 bp, Zea Mays
cgccatatgtcctgcaagccgatggcggacgcacacgtgaccattggacaagtgaggcagtgactgaaggtctgcaacgcaaacagccaacaccaccgagcccagtggtcgcgattactgttttaacacgtactggtcgaacaaacaaacactcctgagcgaaatcagaagcaacaacttgtttgctgtccaatatatgtacgtactctctggtctcttatggtcttgttcggatggcatggtcgacactggatttgcattttagactcttctcccttgtattgtattgtattgtatgtggatggtggtggacgtctactcacgggtggcatgaagagtcatccaaagcaggagactggagacgggtcaaagctttttttgggcatccagatccagactcagagaaacagggcttcaaacagcact

SEQ ID NO: 150311 - DNA, 323 bp, Zea Mays
gctaattccgcagtggaccgcgggttcatttgtgaaaagggaaggggctcatatgcgaaagaccatggccaaaagggtaaggactgcattgggccgccagattagaagtctacggttcagattagactataccattttatgaattcatatgcatccatggccataggatcaaggatccacggcccgaaaccaaccacgtctacatttcatccctggtcctcgatcccccgatcgacgattcagatacaatgcgctgaaaggttactactatgctcaatctgagccgtccaactgggtgtcaactccaagagaccctcttccac

SEQ ID NO: 150312 - DNA, 573 bp, Zea Mays
ggaagaacgaacatggctggtgaggccgaattttccgagcgcagattcaaagaagcatcgccattgcccatagttcccctcatccatgtcgaggacgacaggaacgtgctggcggatgggaatgctttggataacggaagcgggtgctggaacgacgagctcgtcatcagaggagtcatcggaggggagtggggagtgagccattgatgtggaaggtgagacacaggattgctgtaggaacgaagaaggctgataccatgtagaatgaatacgatgaactcaatctctgtattgataactcacggtgcatatatagattacatgaactgggcaccgagaggactgggtccttgagtggtgcgcacactatgccgttagagtggtgcgtacaatacggagtagtgcgagtcgtgggagtatacgcaagagacccggtcacagcggaacggtagtaaccgtagtccgctttcatccatctccagctgcttcgagcggtgctgcaccatgaggaagtccccttcgacgatgtcgaatttcccttgcaatgtgaacgaacaaaatgtaagccttaat

SEQ ID NO: 150313 - DNA, 492 bp, Zea Mays
accacggagggggtcacggatcctgcttatattcccgagagacaccagacccgcggtgtgagcggagaataaatcacggtttgtttgaggtaggagaacgagctgcccgagcgggatccacggcacaggtgatgggaggttgttgcagtccgccgatcctgagaaggaggatatggcaaccgaaatccgtgcaggaacaagaagcagtcggcgagattccaggcggtgaatcggcgttctgttgtggcagagtctggtttgtttgcgcgtgtggtagaagatagagctgacgacagggcccacatgatagtctccgtagagcacaacaaccgctgtgacatgctagcgctgggcccacggataccgtgatgaagcagccgatagaaagaataaagaaatgagaaaagggttaaaaaaattctatgcgcgctcatgcttgcatgtcgagtgaaatggtctggccattttatggttaccccggtttaattctct

SEQ ID NO: 150314 - DNA, 577 bp, Zea Mays
gtagagaacagcatagggaaaaataggttagagcttggagaagttgagtttgtgtttttcttcttgtatgccccgcaccaggcgaccactcagcctataaaaaccctcacactcgttcgccagaatccagcccattaacccacgacggcccaaagttccttttgttgtgcttcttcacttgatttgaagtcctcgttggccctgtagccacaccgtcaacatgttcactgctgacatttctccttgctggaaacgctgattgcccccaaacagtggcatgtggaaactgattctgcaactccagcacatcctcccatgtagccaattcaaccggcatgtaagcccactgtaccagtacctgagaacatggatgatcaccacgcatgacaaaacgatgttgtattatcttctccggaaaactgaaactgtagtcttcagtaggtaggcaacattggagacacagccagtccaactgcgaaacatggaagaccggatggatacgggacgtagatggcagctgcaacttataggccacacttccaatacgctgcaacacacgaaaaggtcccaaaaattg

SEQ ID NO: 150315 - DNA, 510 bp, Zea Mays
gtgatttatttctgtcatttttgtgtatgacacaggagaaggtttaagcaaagtaacagacaatagagagcatgaacatgatccaaaaaatttgagccagagcaataatgctaatatgggaatatcaaatgctttcaccaacaatatgtatgtggatttttcatcaatggaggctccattaatgcaaggaggatacaccaggcttctgcttggagttgatcaagatgcatcggctgctcggaaattaaattttgatgtagcaaaccatgtaacatttaaggactaagtattcataatacactcagcaacctgacgttgtcagctttgtaattaacattgcacgtagaatcctttgtgatggtgacgattacttatgctgaaaaatgcagtagctgtaactagcttcagagttcgcctctgtttgtttgcttgtctacggctggctcgaaagactggctcgaaacgttggctccttttaacattaaattagctagtgtggccagccgatcc

SEQ ID NO: 150316 - DNA, 790 bp, Zea Mays
ccgctcgtaggcgcgtgccagggctatggcctgctggaggtcggcgggcgcgcacagctcgacgtcgatgcacaggcgttcgggcaggccggtcgcgaagagttggacgcgcgcgcgtcgagagtggctccgtctggcagagcaactccatgaaccgttcgagtaattcgtcacggatgtgcggaacggtagccgtgcgagctcgcccattggattatggcgagcaggcgggccgaaggcacaactccttgcatctccatatgcccctgccaaatgttgctttaacctctttatccctccactaacaacctgaccacatagagtgcattccaccttatctttattttgaagatctggccaaaatccgtacttccaccctggatcagtagacttctgtggcttccgagtaggatcgctcttcgggtcgtactcagcagccacagaagatggagctacatttggagaagacattgtgttgtcgctacttgctgcagtcttgacagaaacctgaaaccagggtactcgctgcacagtcttgagttcttgacacttgacagaaacctgaaaccagggtactcactgcacagtcttgagttcttgacacttgacagaaacctgaaaccaggggaagcaggggaggaggaacaccattcttgagtcttgacagaaacctgagagaaagcaggggaggaggacctaccagggaagacctgccgccgtgcagggaggggcgcgcccagggaacagcagccacgcgcagggagcagcagccgtgcgcagggagcaggga

SEQ ID NO: 150317 - DNA, 541 bp, Zea Mays
gagattagtaagaaagggatgtaagaagccttatttacagtttagcttttagttcctaattagtttaagactaagaagtttcctattaattagaaagtgattatgaaagcatgggtatcttctatgcctagccacttttttaggcaatatgagatttgttagagcaaggatagttgatggtaagaagtactgggtaaggaaagacttcatcctggtgggtggatcatgactactttcgtgatccagttgactcttttatcctttgctgatgaggttaatatctttccatcttgggtcttggtgtctccatccgagttaggaacatgtagttaagatagctggggtacatgggtaggtcaaaatcttgtttatgaggttagaatagatggattatgtaacatattaggagtgcatggccgagttggtctagggcactaatttaggatttagtgaattaggagtatggccttatcctttgtaccagcattaagtaactcacgctagattagatcatattatattagataggatctagattaga

SEQ ID NO: 150318 - DNA, 318 bp, Zea Mays
tgcataattcatacttgtgcaattttcatgctgcctcttgttatgataagaaaatgccaggtgacatctagactacaggtatcaagatttatctttcaattagtatgacaatattcatttgatatcttggacctatgtcaaaattataccaacaagagcttgcaaaagaattgtaaatccaacacaagtttggaactccccttgaaaaggtaaaatgcaaaggtacatcacttcatgtcacttatccattgcctttgtgccatctaaggaccctcttcatgatagtgtgttcaaatcttgcttaatcacaatttctac

SEQ ID NO: 150319 - DNA, 1144 bp, Zea Mays
tactgtgttcaatcgctcttcctccagcacatcaatatcctctagcctggtagcttctgcttcagctatgctttcgaagaccagccttggtgccccgaacttgaggtcggcgggtagcaccgctttcgaaccatagaccatgaagaacggggtatttccatgcagggctcgactaggttgagttctcaagcttcaaaccacatagggcaattgtctgatccactttcttgtaaacttttcatttttgtcgaacaccttcttcctgagtgcttccagtatcattccattggccctttccacctgaccattggctcttgggtgtgctactgatgcatatttgatctggatactctgttgttagcagaaatcaaagaattcagagctagtgaagttggattccaggtcagttatgatgctattcgatatcccaaatctgaatattatgtcttgtatgaactccactgccttggctgaagtaaaagaagcaataggtttgtactctatcaatttggtgaatttgtcgatggcgacaacacgtgagcaataggtttgtactctatccctgagctctcttgaagggtccaatcatgtccagtccccggtatgcaaatgaccatgttacaggtatggtttgcagctgctgtgctggtaagtgttgttgctttgacaagaattggcaagcttcacatctctagactaactcggcagcgtcactctttgctattggtcaatagaaaccggacctgaaaactttcccaaccagagttctggatgctgcgtgtattccacactgtccggcgtggatctcatctaatagctgtttcctagtaaccgaggaaatgcgattcatgaggactcctgtcgcaccccttctatacagtgcgccccctatgagggtgtagtgggccgactgtctcgtgatgcgttctgctgcagctttatcatctggttcttcttcgttctttatgtacctgatgataggttctctccagtcattagagtccgattctggttggctcaaggtgttgcactcttccgcctgatctgagggaatacttgggcgtggcacttcctggatgaagactccaggtgggacctgggcccgactggatcctagctttgacaacgcatctgctgctgcgtt

SEQ ID NO: 150320 - DNA, 542 bp, Zea Mays
agtcctcggagtggagtccagctcaccggcggcaaggatttttaccgggcgggacttatccgatggccacggcgcacgaatcacagcgaccggcaatcaacggcgacgggccaccggcgacgagcaaaaaaaaggggaaaaaccgtaatctttttcagtctggagtttactgtaccatggaatgctccatcagggtttctgacaggggaatttacagagccaataacttccaattttgtgcagtaacatgatcgacaccctttagcaaagttctagacctaagatccagctacaatattgttatagcaatcctaggcaaatacttgctcgatcatgcattaattcatgcccaaagtgcttgcagttgcactgcttgtctgaaattcagaaattaatcagcctaacagccaaagtttgagcatgattatctctaaatttctcataggatcatggcttgaatccttaaacaaagttgttctcctatagttgggctacaaacttgttgtggtcactttggccaaaaaccctatatttcaaaagat

SEQ ID NO: 150321 - DNA, 441 bp, Zea Mays
gattgctaaagtgcggaagttttgatgacgggaaagcagccgaagcattttgggcatgtcccggaagctacagaaaatcatggcaacgacaaccaaagatcgaagtatttaaccgggtaaaatctggtctgaaatttgtgtggtagtagaaatagagcggtcacatcattagcacaaaacggccgtactagcgtccgaacaaatgctagtgtctggacacagttctttctcgttcaccttgctcgatgctcgctcgctggcgacctcaccaccggccgtccatccccgctgctgtttgccgatcctttcctaatcccagtccgccggtgacctaaacttccactttcgttcccgccgtcgacagttgacaccgtgtaccggttgtcactctttcctcgctcgctggccgcgccctatcatcgaatttgccgccggacaaac

SEQ ID NO: 150322 - DNA, 1214 bp, Zea Mays
gtagatgcaaagccattgatgacattgccaacatcaatcttgtctaataatagataatatcttttcgatgcataaagtagcgaaagtatttaacttttcttgaaatatttttgactttaaataatcatcaacttcaacttaaaaacttgttttagttgatgtcacactgacatagtaaataagatctaataagaaatataaatattaacacaacaattcatttctctaataacatactaaaaaaactccatggcggatattgtttcatctgataaaggcaattgcacaatactaagctctttacttagattatttcaatcaatataacatgagctattagaagagaaattgttagccaatttattataatggtcttttagttcaatagaatccaaggacctcaaggttgtggagctcatagacacccaactatacttttgaattattcgagttcttcaaatatacttttaataaactaattgcaatatcaaccataactaagaattaattaaaattaaaattaaaaaagccttctcaacttcgagattttctttctcataatcggttccattatattatttgtgtagtgggcctatcgatatctcatgagaaaacacaactggacaacatgattatttaggctcacccttattccttccaaagtatcaaaggggagaagggtggttaagaaaatatctgcaatcaattcaaaatgatggcaaagatactcatgtattgaaacatgtaaaattacagatgacgaagtaaactacatgctcacaataagctttgtccatttatattgacaatgaagtatttatgattactgtaaacaacaaaccatattcatgtaacgaatgagaaaagattcatttatttatacctttaggagctctctaggaagtagatactacatgcatagtgttacaaatggttgatccatgtaacggtaacactattcatctatttatagagttatctcataagaaaaaacaactggacaacatgattatttagtttcgcccttcttccttccaaaggtatcaaaggggagaagggtggttaagaatatctacaatcaattcaaaacgatggcaaagatacacatgtattgaaacatgtaaaataacagatgacaaagtaaactacatgctcacaataagctatcctttttatattgacaacaaagtctttatgattactgtagacaacaa

SEQ ID NO: 150323 - DNA, 404 bp, Zea Mays
actctcacacttttatgtttgtgtattgctggcatgatttatgatctgaatatgtttctttcccaacatatctcaagcacatgttttctgaagcattcgattgctactgggcttcaggtggccctatcatatacatagcatacttgtgtattttgagtgtcaaatactttgtgaatcatcaatgcttgggtgcattttgttcttagtttctagacaaatacgagattcattattgtgcttatttgcaacctattcggttgtctgtacaaggccaggccagtttcataggatgcagttttaggctgtttggttgcttggacaaagacttgggcctgtgccacaggatgcaaaagagctccctcaccctggctcctttgaaacgagtttcacttctgtttcccgcg

SEQ ID NO: 150324 - DNA, 295 bp, Zea Mays
gtttgacgttgttgatttccttatttgtgagatcgaggacactgtattggatggtatgcgtgctcgtcgtcagctaccatatgctcactacttgtgccacatttttgctcagctgatttggcctccacagttccagggcacacttgaggcctcacgccttgtttttggatcctaccgtcctgcgcctgaggctcctgtgccagcttctgctccagtttttgacactcaggccgaggatgctgctcttcatcatttcgaagctcaggatgcagcaattgatgatgatgatgatgat

SEQ ID NO: 150325 - DNA, 669 bp, Zea Mays
tgccaaacctgcgttacttcgtcgacgcggcgacggcggcggcacggatgcgcgaaatgatcgacaagctgcagcctctcgagacggagggcaagaagggcaccgccatggagaacatcaggggccagatcacgttcaaggacgtgcatttctcgtacccgtcaaggcctgacacgcgggtgctccacgccgtgaatctcaccatctccgagggcgccaccgtcggcctcgtcggcggcagcgggtccgggaagtccaccatcctctcgttgctgcagaggttctacagccaggactcgggggagatactactggacggcatcgacatcggcacgctcaacgtcgagtggctcaggagccagatcggcctggtgagccaggagccggtgctgttcgccacgaccatcagggagaacatcctgttcggcaacgaggcggcctcgctgaagcaagtcgtcgtggcggcgaagatggccaatgctcacgatttcatcaccaaattgccccatggatacgataccaatgtatgccgatgcttcgaatcctggccacagaatgaactagctatttgcctatttgtacttgagcaagttcaatgcttgcatttgcaggtcgggcagttcgggacgcagctgtcgggaggtcagaagcagcgcatcgccatcgccc

SEQ ID NO: 150326 - DNA, 272 bp, Zea Mays
aaatgactctttgatgcaggttgtttgggaaggcttctgtcctggattctgaaccgactgaactacaagccctcgcattgcccgtctcagggcatccttcatctgggatattcatggatcatcttgctctggattcggatgcatctatggccatactcgatgaatggactgaaccagctaagctcgttctgaattcaagtgcgcttttaacagaggaacatcaaagtgtgctggatgcattccacttattgcgcgaagacgcctatgttcag

SEQ ID NO: 150327 - DNA, 531 bp, Zea Mays
ccgatggctgggaggctgggtgaagctgtccacgcggcacggtgggttcatggcgtcgctgcgcgacgacgagaaattcccccaccagcacgcactccttcggtcgacaatggtcctgtacatctcccacatggtttgccgccccatctgggactcccaccgaggcaacatcgccagtgaatgcgcatgtcgacggtggcggtgaatggcgcgcggcgctgaggtcgggtgctccctgttcgcgagctccaaaggttctcggatcaagggctcgcgcgcacgtattccacacaggttgatggcccttcgcgaccccaccctgggatccgaacggcaggaattgtcgcatgcgacggtggcggcgtgagcacatcttccacactccacggcacgcggcggtgccacacgacaaggggtctagggaaattgagctgaggatgaaccggttggggaaaggaagggctacatccaggctttgtacacgaggcaaggtcgatggatcgttaccacgacatccgagaagcgcgccag

SEQ ID NO: 150328 - DNA, 363 bp, Zea Mays
atgcttgcaactcacagtacatttgttgcatttaaatatttttcttaagagcttcgtgcatttgatttacttcaacattcatgtcatggtagtttccgaactggttgtggtgaataattttaccactgttttagacacacagcgaaccaagataaaatgtgtgcaaaactatacatgtacacaatagacaaacgatgtgtgtgaaaatatgtttagtttgttaataccactcataatccaataaccaaactgattagtaaaattgtgactgaaataggatataaatgtacttcaacatgtggtacgataaaactctttaacaggggtactatttggtactgttttctggttattggaaaagag

SEQ ID NO: 150329 - DNA, 299 bp, Zea Mays
cctggccagatgcatagcacgctgcagcgtctctggagtttgtaattccacatcagttcggagaggttcgcctaagcctgctgtgtacatgttggactattgtcgatgagacatgtcgtcacaacgacacaacagggtcaagaattggcgcgaatactcttccacagtgcctgtgcgcttcagttcttttaaatcagccatgccattgaacctgagtggtggcccgaagcgcatctggatgaactcaatgaagcgtgtccaagtcagcacgccgcctagatcgcgctccaaggcataga

SEQ ID NO: 150330 - DNA, 414 bp, Zea Mays
cgcaacacaggagccactctccggcaatttgtggagctagagtctgcattgtcacagcagcctcccgtagaccttgtggcgccgccctcgcctactccacagcctcctcctcctcctgaactctcggtgacatcctcattgccaccctcgccatgccccccgccgcctgtcccttttagtccattaaccaccacaagaaagatggagaagagggatgatgagctcccaccaccaccacctctggttttgagtccaataagattaaggaagagggaggatgagttccatggggatgattttactgatgatgacgacaccgatagctgctcgactcctcaaccaccacccctgccacccggcatagattgggaggacttggatccctacaatgtgcgccccttgagtttcccatct

SEQ ID NO: 150331 - DNA, 304 bp, Zea Mays
ggccggagtatgtattagcatgacatcaggtatgaggtcatctcgttggatctccagttcgctagcaaattggtcgttgaattctcttgcatgcatccgtttgctatcggcacgtacagggccatgcatgtcgggcggaaggacgctcgcgggcaccggctcgtggacatgtggggctctgctgtagcatctctatcctcgtaacaaccttgcgaccaaatcgctgcatgccgcacaagatgctagccaggtaccaccagccgatctccccctctggtgcataaatacttgaggcatacagcca

SEQ ID NO: 150332 - DNA, 596 bp, Zea Mays
taaggcagtcggtccacatccttggtgccactgcactcatctcattgcttcagcctgcacctgaaatatatgagctatttgatgacattgttctccttgctgagggccagatcgtgtaccagggtcctcgagaaaatgtcctcgagttttttgaggccatgggtttcagatgtcctgataggaaaggtgttgcagatttcctgcaagaagtgagtgatctgggagaatgcgatttactgtacacgtccagaatttctagaatccaatttgatgtttttctatttggatggacaggttacatctaggaaggatcaataccagtactggtgtacaagagatgaaccatatcggtacatttcagtaaatgacttcgtagattccttcaaagcattccatgttggccatgcattgcagtcggagctcgagctgcccttcgatcgaaccaagaaccaccctgctgccctcacaacatcaaagtttggtatcagcaagatggagcttctcaaggcatgcttttgtagggagtggctgatgatgaagaggaactcatttgtttacatcatcaaaatagtgcaggtaagaaacatgcatttggc

SEQ ID NO: 150333 - DNA, 865 bp, Zea Mays
ctaccacaggcattactggaccacataattgtctcatgccatcgctgcaccatagggtgtaatacctcataggttgctgctgcaggctagggcgtgctatacttgccgccaccaccagcatgcctactgctaccacctcttggacatcatcggcgatgtcgttgccagatgacgcgtgagtgcttactgatacgtccaaccatcccagtttaccttcaccatttggttggcttatcatcgtgctgctgtcgccggcaagaagttgctgattatgcgtacttgtgcctctgttgatgctttggacccatgcctccctccacaacttccaccagtccaacgttggttactttggtgacaaaaagggctgttatccgcatgagctactcgtaggtttcactctagttgtagcatttgtaatgcgacattgctagaactgtcgggggatgttagtcttcgacgatttctagtctgacctgctatgactgtgtgggatgtttgagtctattcggtagtttaggattgtagtccaatattgtcatatgtttctggtaggcaacttgtccctaggcctttgcactctatatatacctcctgaaagactcaatgcaatctatctcacacattatacctaatttactacgctttcatctctttctagctatatatgtgctgttacctttttcagtcactacttttgttcaaatttagtaaatcccctttcgttattgagttattttgttgttatatgcattatagagtggtagttacttgggttgtgatctttgtattattgtttgatcattgatgccaaattgcaagttccctagtttcattttgcctggttaaaagcataatttctattaga

SEQ ID NO: 150334 - DNA, 739 bp, Zea Mays
gtggtacttcccgtataatgaagaatggtttcgatcccccttgtgcatatcattccgccttcttgttgatcgtcgcttgtattgattcctactgcagaggttgtttctgaacgcaacgcttgagtagcaacttagaattgttgagccatgcctcagactgccttcttcacgatgccaacgctttagtagtggtggccgagtgattatcagcggtgtcggggccttttagaggtgatggccgagtgataacaggtcgcgtcggtgttttagaaataacgactgagcggttactggcgatgtcagcgttttagaggtaacatctgaacgattactggcgacgtcggtgtttttagaggtaacagccgagtcaatttgagtcgcgtcggtcgttttggagataacgaccgagtgatgacatggcacgtcagcgttttagaaataatggctgagtgatgacatggcacgccagtgttttggaaataaccgcagggtgatgaagtggcacgccagcgttttagaaataaccgctgggtgatgactgggcactttttagaaacggcatctggcccgggaaaaaccccatatgtattgtactgtcgcgcgtctccacgcttcatgccctagtttttgcttagctttttgcatccaggctttctctgcttttctgcaatatcgcttctgctccgttcgccggcgaggttgaaatggcgcctaagcggaaagcttcgagtttgttcgt

SEQ ID NO: 150335 - DNA, 448 bp, Zea Mays
gattcatccttcttgataaacgaattgtttcgatacattcttttaacgatcaactaccagttcaaatgatgttccagtgctaaacataccatctctgagcagggcgttcttgtctgttgatcaggttgttttatggcaactaattcttttattggcagcaaataacccacagtttacctgccacaactacaacgacgtaggaagctgagtcagaaactcataatcatggcatatactggcctgcaacatgtggagagtgctatctgaatatccagggaaagaaaagaaaattgtttagactgatattttattgcttcttcactgtttagtttattccagaacagtaccgacacttaggacacaaatttaagggaatttacttaaagagaactgtttatactgatagtttaacggttcttcactgtttagtttattccagaacagtacc

SEQ ID NO: 150336 - DNA, 441 bp, Zea Mays
gggcggttcgcccacggcggtgagaaccggtcgctggtgaacccgactgcggttcctcgtcggtggcccggttctgtgtcgacgggatggtggcaaagcacgggcggaggtaggggtcgcggtggtggggtcaatttggccggtggacgctcgggatggccggtccacggtgggtggcggctcccgcggcggcgagatcgccggtgaggccatacagtgcgatagggaaggtgaaaatggtgccttgggaccgtggggaggtggtgaagctcaagagctaactcaattggaccctaggctactagagaggggagggagcactcaccggagcggaggaagggtgcggcggcgcggctcgattgagctcggaggaggggtgtggggaggccgaggccggtgtgaggagttgggggagctcggggcggtccttttataggcggc

SEQ ID NO: 150337 - DNA, 543 bp, Zea Mays
tcccgctcattcccatcctgcttcacacacgccaagaatccaccacaatcccatccatcacagccacacaccacatacacacaccaagtcgcatgaatagtatatgtatagggtagtagcatgatatcaagtaggagcaatgatatcaacaaaggcttatcaatcaaacggcatgaatatcaaaaggcgagacattcatgaaggctaggaatgagatctcgggtttttaggggtctcactcccatttgtcgctcggaactttggcctagcactactgcatataatcatgtctataggaagggcgaggatgttagggtgacctattgtagtgaagtcctcctcgagctcggggacatactccgagtcgtcggcttcctcctcaggctcctcgggtcctagtatcgacaagatcccgaacaaatcgggagcacaaacattcaataagacgcaaaaagatgcaacaccaagcaagatgggtaataccggggttaggtttattcattaggtggagatgggaagttatcaggtattattcgaagttag

SEQ ID NO: 150338 - DNA, 389 bp, Zea Mays
ctccctcagtgcaagataactttacaaggccatacattccacttgaaccttaaagtgttacccctccagtgctatgacgttatcttgggtatggattggctaacttcacgaagtccgatggaaattcactgggaagaaaaatggttggcgttcacagttggacagcagagaattgtgttgcaaggtctggtcccagatttattcacaatggatcacatttcagctccccatctctgtcacttggaaaagttggatgaactctggtgtacagttgaactacatacaaaggttaactcagatctcacaactgctgtcccagaggagatacagcgccttgttcaagaatatagctccctttttgacaaaccatcaggcttgcctccccctcg

SEQ ID NO: 150339 - DNA, 418 bp, Zea Mays
ggcgagcttaggggcgggcccaatttggctagaggaggctaggagggggctgaccgcggggaggtggcggagctccgtggcgggagtcgtcgccggtgaggttcgtgcggggattggggcaggggagtggtgttccaagctcgcggcggtgtggcgaaattgatgagcccagctatttgctcgctgaaccaccagagggggaagggaaaagagggggaagggcttaccggagtggaggaagacggcggcgctagcgtgattgagctcgagcgagggggagatgggtggctgaggccagtgcggggcaaaggggtgctcggggcgacccttttataggcgcccgaggggaggggagcggcggagctaggcggacgccggtgaggtcgcacaacaccggagttaatgccgcacagcggcg

SEQ ID NO: 150340 - DNA, 619 bp, Zea Mays
ctcgggagcacatcgcgtctccattcctctcccagggcaggtacgctcctcccgtcgctcgttcctccccaatcttttctgccgccgcatatgcctccagccaccatatgagatgcggccaccgtgtgcccctagtctccagccgcatctcctctagccgcatctaccgccgcatctcgtttccctgtgcccatacactaccttgcttcttctggatctgccgaggcatatgagatgcggccagagcagccaccatcagatctgcagagcagccatggccgccgagtagtccacgaacaacaacgatttttggattttttttttccattgccgagcagccaccattagatccattgtccttttgtgatttgcttttttgtccttttgtgatttgagaacaccacaagtccattctacgattagcattatttctgcgattgagaacaccgtcagatctctgcggagcacgccatctaatgctttcatttttttacaggtgcaaggattgcaagtattcagagaacaaaaaagacttcagagcttaaggtattataatattttttattttctcatttaagcagtgaaattaagcatgcatgtgtggtttcaattggttatg

SEQ ID NO: 150341 - DNA, 612 bp, Zea Mays
tgccccttggaagaactacactgccctatttatacatgttggagatgttttctgtgaatactggggtcgttgaattccaaggggagatgtcttggcgccctgtaagccgacatgactgtgcactacattgttgacttgtgttcgccgatttcctactgagagccgaggcagaggctgaggggttggccatacgcccgagcccccggggaggggttgcccataccatagttgttgtaacagcgctgttgtatgggtaaaagcctacttccgggttgcgtcagcatccctgtgcggggtgacgtcatgattccttgctgtgtttatcaaggttagagccttgctcgggtgacacagaagtgttctcgaggcgttggttgagccatcccttgacgtgtgccacagtcggtagagtggtcactcgcaggattcgcgatggagtaggtatccgaggtcgagctcgtgtgaggcggagaaatcacccgaggccgaactcagcgtcgagcgagacggagattgtgcccgaggccgagctcagcgtcgggtgaggcggaagtgtgcgcccgagggccaggctcagcattgggcaaggcggagatttggacccgagggccg

SEQ ID NO: 150342 - DNA, 667 bp, Zea Mays
ttgtctggtaccattgccgttagaattgaggaacactagagtaagcagactgattgaaagtggcagcattgtcactagttgagggcactattgtgcctataggggaacaagaaccatatgggagaggagcaccaaatggaggtgggaatagaggagaagcaccacatgatccatattgagaaccaccatatatatttgtatatgtatggaggagggtgtggataagcgaatgatggtagaggaggagcatcgatgataggatcttttttggaaggaggatgagcattcatgaaaggacgatggggaaaaaggaggatatgagtatgaaaacataggttgtggagttagggaacgagtatgagcagaaacatcctctcaataatgatgtatggtagaaaggtcgttgaaggagacctcccccacactgacaggggtgttgagaagttgtagagattggttgttgaccaagtggatgaaggtttagaagtttggagtccacctaggattcatattcaaaaagaaagtaggagactataatatgaaaaaacaagtgaaaaaagagagtgaggggtgtgaatgaatccaaacacacacctctatttataggatttttttgtaaatcaaacgattcaaaaagacatggatcaatcagaaagcgacacatggc

SEQ ID NO: 150343 - DNA, 421 bp, Zea Mays
acggaatgcagaatttgtctgagatgagcgcaagtgcatctgaacattcagttatgcaagttaagtaaaagaatgcattgcacaagcattaaaagaaattcagaaaacttttcccaagatcaaattttggacaacccataccttcttgccaacttctttccccattttttccagataattcataacaacttcagtcccccgcgaattgttcaaaaagatccgcagatgcaatttgggctggtgcccttggggaaaccttccatcaagaggaacccacatgtcacccaaatctgacaaattgtttttcacaaagttcacttctgtttgaccgataggagtttcattgtttggtatatctgaatcatgcacaaccacgtccaatcttgctggcgggtcgtccatcgcatcaaattcaaatatt

SEQ ID NO: 150344 - DNA, 332 bp, Zea Mays
accacctcagctccagcctacggggacatcgaccacggcaccatggttcccattcgctagaggctgggaccccaacgccctcgccgccgccctacagcaccatggcgttggctccaccatcctctgactgggtcatcgactccggtgcatcctatcacaccactcccaccacaggcatgttatctcgctcccacccacctccttccacacaccctacctcgatcgtcgttggaaacggatccactcttccagtcacctcagtaggtgtctcggtgctccctggaccgttctatctcaacgacgttctcgtagccccacacatcactcataat

SEQ ID NO: 150345 - DNA, 506 bp, Zea Mays
cgcgcgggcacggaatgcgggtgacagcgcggcggagctgcaggtgacagctggcggcggcgggacagcaggtaggaggaggatgacggccggcggcggcgggacagcaggcaggaagaggatgacggcgcggcggagcttcaggtgacggccggcggcggcgccagcaggaggaagcaacaaaccctagctcgataccatgttgtttgctgtgttaatttcgtgtgtcgctccccccagcacacacacaccttttttatctgcattatgcacaaaggacccttacaaatgttctaattccaacaacagttacataatatgattggctggagctcagtcttgttctctgtggcagtttcgtgtataataataagactaatctggcagtgttcttcttttttgttgaagaagactggatagccaatgttatattccctggctgactaatttttggagacagagagagaccctactaaatataaaggaaaatatttctcctgatcata

SEQ ID NO: 150346 - DNA, 358 bp, Zea Mays
gggggaccttgagatgaggagttcatctcgtcgctagtgttttggagccaccgccggtgttctggagctgctggtggtgttctagagccgcagcgtgtgttctagactcggcagagcagaggaaaagtttcaagggctggcggtgcgttgcctttattttactgtagatgggctgaaaaaatagaagcccagtagcccactagaaaaccttagctgcctggacaaatcctagtcgatttaccatctagtcggacgactaatcgcgcttagttgacgactagtcggacgacctggacgacttgatactctagtcgagtcgtccggctgatcggccactaccgggcgacctgcccgacta

SEQ ID NO: 150347 - DNA, 872 bp, Zea Mays
gacacatattgacatcatggttcaaatagaattgcaatgtagatacactttgagccctatatatctatctacctcggtgatggataaagtcattgcaaaggacctacaacaagtagatatccctcggtgtatatatgttcttttgttgactacgtagtgctagtaaatggaaattggtggaagactaggttttcgctggcaaactagagacaaagattttagatttcatcataattccaacactacttaacctaaggagtgacatgctagtttggaagatcaattaatgtagaaggaaaccttctgatatttgggattgatggtgcaaagagatagtggcattagcagaaatgttaaccgtagaatgaaagttagtgtggatgaaatgacaccaagaatctagcattctcttagatgtatgacaagaaggtgccacataggctaaaaaggcagggcccatagaacaacggtaaaaatacattgttatttagtctagaatgttgacataaaagtagacattcgatgtttaaatgttgtagaaatgcattagttgtattgttattatgattgaatgctccaagaaggggtgggtcaggttgaatagggctctaaaagaagttaaagcttatcaacaataacctatgcaattctacttcaagcattgcatgaattttcatagaaataataaatagagatggaacaagaagggtccttagcttcatgtcaagctgaaccatatatatgaagattgatcacaactaagtgcgtaaatgcaaaaccaaatctacttgtcaatcaacatcttaaaggcacaaacaaattgcaaaaagtaaattcaagaaaataaaaagatggacacatgacaatcaatt

SEQ ID NO: 150348 - DNA, 585 bp, Zea Mays
cttcttcatattgaatttattaaacattacttggaagcaaatcaatatgagaacaaatatagcaaaggcatgaaatagattctaatggacaagtgcattttaattagaatgagattgagtgcacatctatccgactttggtccaataaagaatttattctttacataggtagaatatgatatattagagtaaacaaccattgatgggaactatatttgattgagaggatgagttcccatacctttgcttttacctttcttcctttgggtgaagagcaaccctttgaagcttgtggctttaaacttgcacttactctcttgtagattttcataagtgagctcaagataaatgttaatagcaacacaagcactagtttcccttttgtaatcaattttgatgaggaatgaaaagcggattactaaagcatggaaactttataatatgaactagattattccttaaagtatgctttagttttaaactcatggaacaagcacagttagttctttaagattacgggaataaatctaattcataacatggatagcgataaaagtagaagaatcacatccaatataagcaaga

SEQ ID NO: 150349 - DNA, 287 bp, Zea Mays
gtgtgcttgtcagagctggttgatggtgaggaggcacaaaggagcagggtacttggtaatgtaccaaacaatctgctgttgctgctacacattttttatctttttcctggctagagatcgggtttgtgtctccacatcggctccttcatcttctccaactgtgccgcatggcgtggctagcagtgtgccaggggacacccacatgctatttctgtgcctctttgttggcacgttgatctccgccggttcatcgtcgccaatactggccgggaggttctaccatcgcc

SEQ ID NO: 150350 - DNA, 496 bp, Zea Mays
ccgccatcgtagccaagttgtcgcaccggattccgtctgtagctcgggtggtttgaatcggcaacaaaacgcgccctggattccggagccggccaaaccgcgccatctctaggaacgtcatacggctcgcctctataaaacccaccgtccgcctggagttcttcgtgggcgctacgagaagcaggcatgagctccacccgcggtcggagaagggaagagggagtggagaactcccctctgctctttccctacctccactttccccttgcgcgtccaccagaacgatctagtgccaccattgccgtgagcagagagaaaagggaggagagaggcggccgcacgaccatcttggcgtccgggccgcgtgtgagctgaagttgggtcggtgatcgtcgcgggttcacggtggagctttccgcgggtgagccaagtggagtcggtcggggaagcggcccgaattgctcaccgtcgtcgttgacccgcagacttccaccgt

SEQ ID NO: 150351 - DNA, 474 bp, Zea Mays
gtgtcttactacctctcccggagcactgccaggaacggtgtccgttgcgcaggcaatttatgcacctcaccgggtctctgcaatcaatggcaaagtggcctctgcccagacagcgggcgcatttaccttgcagacttaccagcagacggcgaggagtcggggtcgaggcatcgagcgaggcacccatgtcgcgcggtctggttccgcacaggcagcgcgtcggcgcttgcgccgaatcgtcgtccagctgccaggagcttcgtcttcaatgcggtcgcagccatgagttgtcggaggatcggtggagacatcaaagcgactggatttgctggtggatttgggggaggagagatgagtgacgtctggcgcgccgctcgcagtcaatgcaaagcgaacgcgcttggaggagtgaaggacctggggtaggctggcaggtggaggcggcggcagcgggggcaggggcatgggaggccg

SEQ ID NO: 150352 - DNA, 1821 bp, Zea Mays
aggtttagtaaattgcgaaggatactagtatgagtcatttactcaggaaaagtgttaggaaaaacaccagacatcctaggtcccatttgaggatagtgatcatcacaaaagggaaaacatggtccactagacctataggactttaaaaaactcctacgagatccatggtcatattgcccagaaccctgttaagcacgaccattgtgtggtcttgtagcctaaggactagcaccttgagacattgcacctcttggcctaacaactcgcctctaaataggcaatcatgtatatcattgggaggatggtagatgttctatttgttcacctaaaatttgtgtcactcatcactcttctctaaaatagaactcagtgaggtgatcattcctatggcaacatagtgttaccttacctctctcttgtatggttggttcactttcttgtaggtatggttcacgcttggtggctttttggctctaagaaggtatcctaaaaatgtcaagaagtttttcaaatgggttcctgggatggttaggtttcggaatccacacatgcttctaatgtggggattttggaggttctttaaacactccatcttcagtattaaacttgagggtcttatgtaaaatgattttgattagtttaggggtagtagatgtggttggtctctcactagacttcaaaccattataatatcccaattttcatacagcttgttacacccattgccctcaacaataaagcctaactctagtccaccaacaccacacttgaattatttgaccatcaccctaactatggttctctactggacactcaactcaagatggtttgaggtatgtgttttcttccttagaatgcattttatcatgtcaacaagactcaagctctagcactaggccatcatacagtgcacacttagaagcaggcagagtatctcagctagcttgttcaaaaaaatatcatatgattcttctttgctagcttagaatgcaaagcaggacaatattttcatatacccaacaacctaggcctagacttcaactcatcatgctcatcaagcaaagtgacatacatggttgggaaggtggatatgttttacatgtatatatcataagcatcacacttagtctcgtcaggcactatgacaacaaccttagcaaactcaagctcgctaaacatattgtctaacttggtcttaaatgcgttcctctattgagtaacatgcttaagaaacttatcatgactaagcaaggtggtattcatagcaagctcatttgtggaaagagataccttagatctagagtcaccgttgttgtcgctccctacctcatgccaagcaccatggtgcagaatcatcccttggtggagtcaaaaagtactagtttatatcttgaagagtatgaggagtgatcatcactagagtcgatgtcaaggtcgctgagggaggtgaggaaatcatgctcttgggacttggccttattgaggtacttctacttgagcgcctcattgtcgaacctcccttagatgtgtgcttgttttatgtgtaattgcacttgctaatggtgtcattgcccttcatattggagcagttggtgatgaagtggttggatgctctatagttgatgcaaccttccttctaaccaccacaccatcgatttatgcggctgttatggaacatcatgaactagttgatgaccaatactagtgtgtcgtcattgagtgcctcaacctgctcctctataacaaaaaccaaagaagtagagcaaacaaagcaaatgaggggtgaaagttgtctagaggggagtgaataggcgaaacctg

SEQ ID NO: 150353 - DNA, 401 bp, Zea Mays
gcctggaggatcttctgatcgagatggaccgcatcctaaggccttatggttacgccatcatcagagacaaagttgatgtcgttacctacatcaagaaacttttaccagcgctaaggtgggacgactggacgtttgagatgaggcctaagaaagatgcgctcacaataggtgacgaaagagtcttgatcgtgaggaaaaagctctggaatcactcggtgcaagatttgtcgtagcagccgtttctcttgttttgatcctaactgtagctaactctgcaccggcgttgtcctaatcctcaaatgtaatgtagtattcgacgccttcttttttctcgtgtggtgaaatgtcaacagtagatttagcatcagcatcagacgcaggcttcagtccttttgatatac

SEQ ID NO: 150354 - DNA, 428 bp, Zea Mays
cgacactgctaaagttgttttttacaggttgactcctatattttaagatagtgtactgattttaagtcactattaaagatgctcatacaacatttattgaccatgctaattttatgtcaccatctcaaccatattttgctctaaggtggtctttgtaccaaacaagccatcagctagctgtggcctgactgactgatcatgaaaagttcacaacgaccctgcagcaccccacggtaggaattagaccagaaaccaaacataacatcagctcgagagtgtgttttcgtttggatttcaacaacccaccagctccaccaaactctcttcactcattgcagggatcggagtcggagccgcccccacgaaactaaacatgcatgcagtttattatttccagcacaagattatcagttacgaatttacgatca

SEQ ID NO: 150355 - DNA, 869 bp, Zea Mays
atcatcaatacatcaattgtggttggctacatcaaactactgcatagatcatgtcgactcatctgcagaacatcgcctcaggtgccaagcccactacagggtatactatcatcgttagctcattcatctttttccttcattctgcttgagtccatcctagtgatgcactgtgaattggatataagtaaattaattctattcacaactatcacatatatcatacttatctaaatgaatttgtacggattaatctgtgtttaaatttcctacaaaaaccaacaattatttgctatagcattttgatattatttgctctctatgcttgacaaaagtagccagttcttgagagtgcatatccgaggaaatataggcaatggaacatatagcgtgctatcttgttcgctacggcttgatgtggatttaatccggatgcggctgcgacttatatgatattttatttttatggattgcagctgcacagccagccaaacaaacccgcatgcatgtgtatgtgattgtggatgtcaacagtgatcacagggcaaggccgttcaggcgttcagctggatcaatgcaagttgccttttgtgttcgtcgattagatcagagtaaagaaggtgggtgtcaatgctagctgcggtccgaaaagaacgcttgcagctcgtaactgttatgttggagcagctcgtattattgatatatcttatagctacttcagttgtttgtcatgtcttatatcctgccatctggttttacgtgttacgtaggaacagtgctatgttctaagtctactcacaaccgaccagtcattttgtattcctgccatatcatcgtaaaattcacagaggtgaaatttggaacagaaggag

SEQ ID NO: 150356 - DNA, 289 bp, Zea Mays
cttggttcgaatacatctacattgtttccatcttgctggtgctggacaaagaaaaggtaaaacgtcagaacagatctgtgcacacataaaccatgagaagtaaaagactgctctgttaaacttgtagagcttgcgtagcatttcagcatgtttcagaactagaattcggttcataagataagatgctactctagcatccctgcatacattagttgcgacaagacgaagattacattgttgacgcatcaagttattatgaacctcttctgtttctgtcaattgtgtcctc

SEQ ID NO: 150357 - DNA, 374 bp, Zea Mays
gtaggcgtggcccatgtaaactggggaggtgggagagagaggatcaagactggattagagcccctgcagcaccaagtaatccagggaacatggttaccatggagcaacttgacggcaaacttcagaagaagacattggttttgaagcttaagattttttatggcaagaccaccgatgtccttgaggcgacaaacgttgtcccaggcaacaagacatttaaaaccatagcacaaatccgtaacccgtctagaagaacacacggcgaaggcgatcaatggcattaagcacccgattagggaccaccatcgccgacatatagttaagaggcattgcaacacggttgcggatcttagatttccagccggcaaggtacc

SEQ ID NO: 150358 - DNA, 677 bp, Zea Mays
gcacaaggagaacacttttcaatatctaggatcagtgttacaaagagatgggattatcgatggtattatattagcaatatatttaaagtgaagcatatgaaacgacaccaaatatatgtcattcttcatgataagtatgtgccatagaagctaaaggtaaattctatagaacctgatcaaacttatgatattaatattgtaacatgcagaatgttggtctactaataatatgacacatgcttaacatttaagtgtcacatgtgaatgcagatgttgcattatatttgaaataatacaaaagcacatcgagtcctaaatgatgatataagggataggagaagggtagcacattaaagaaaaacttgtcaaacattgattgagatggtttggatatgttcagtggagaccactagagccacgagagaacaataagatacaacaacaatttaaagatggccaaggtcgatcaaacttgacatggatggtcgcaataaaaagggacttgagagtatgaaatatacctataaaaattgtccttggatgggagtgtatagaaagtagatggtttgaaccataaacgggctttaaaaacctccatcatagggcgccctataggcattgcagtaaaaggttgtacaaggatttgaatgtggaccgacaaggggagacctctcatc

SEQ ID NO: 150359 - DNA, 393 bp, Zea Mays
attgcatgttgttctggaaggaatatgaagcggccacccattgtcagatatgcggtaaatcaagatatgcggaggtactaaaagaggatggagctacttttgctacaaaagtggcagttaaacagcttcgatatatgcccatcaccccaaggcttaaacgtctatttttaaccccagaaactgcgaagctaatgttgtggcataaggaaggagaacgtgagagccaagatccagacattatgatgcatctatcagatggcgatgcttggaaggctctggatcgttttgacccagaatttgcaagagacgctaggagtgttcgtctaggcttgtccactgatggtttcactccttacgacaacagttcaacttcatactcttgttggccggttt

SEQ ID NO: 150360 - DNA, 598 bp, Zea Mays
ccgaggtaggaccgctgtcatcgaactttttccgggagcattaatactaaaggacgacctcctagatcgacgccgcctccgccgcctgccctgatcgggatcgtccttcgccagaggaggtgacggctggagggactgcagcaagttcggtcggtcaaggaccttcaccaacacccggataggtagactaatgaacggctcagcattccaccatcggtcatgaccggatcaacaatttcaagcttaaactccctgggaatggagctcgggctagaacaccaggcgataatcttgaacacctcacgctgtcgctcacaatctgggtgaagatcagcaatccagcaccactcattgaggagagcttgcacagattccaactcctaagcataggaagggatgccagacacttcaatctccacttgaaaaggcagagacaccgccgcagatgagttgaggattctgcttcatcgcataacatggattttagttgtgggagacaaattcacaattctgcccccatcataggcatggtccgccatttctaaacttggaaggataagaagaaaacttgcaggacccaatcgacacatagacagtg

SEQ ID NO: 150361 - DNA, 572 bp, Zea Mays
cgagagtagagctcgacggggagcacagcagctgttcgaccatggcgctgggaggagatatctacggactcgggtgaaggaagaactcaaacagagaatggaggataaaaaaactcaccagagatgaagaagatagtcgaggtggtgcggttgaggatagagcgaggcgcagcaacagcagggacggctccaactcttccttctcggttgctacagagatgaaaacatcgtctcggtaactgacatacggaggaaaagggaggagaaatatggagcactctagaaactctctcgagacaacgggagggaaattatacaaagcgattaggaaaccgttgctcgaggaccggaggtggatggagtaattgtatgaagcgaagcacagattaattatttataagtaatacaaaatagttttaatgcataaaaatgtttagaagagtctaaaaaaattcccatacatgctttcgagtttaataaactcaagtaaagtatttagagcttataaaatattttaaagtatttctaaataaataaaatttgcctttttaaaaaaagaatttattatacga

SEQ ID NO: 150362 - DNA, 423 bp, Zea Mays
gtcggcagtcgggccagcaccgctgacagcaacgctgggttgtcgcagagtggcgaaatgccctagggaggcatcaaggattcggggataaaagcctcaccagtaatccccctcacgaaaatttctagctcctcccaggtcaggtcagtcccaggcccgcgcaggatcctgccaatgtcgttggagcctgtaaaccaacaagacaaatacggcctcccctgtagtggcatgactcagagcttcaggaaatcaccaagtacgtgcattgaggtcaggccgacaaccgccagttccttaatcctatccaggatgggctcgaactctggcatgaggcatggtctttccctccactgcttctggccgagtctgggcccgtcattcggaagggcaagacggtcgctgacctcggtacgagcaatcacc

SEQ ID NO: 150363 - DNA, 583 bp, Zea Mays
gtctgaaaatacaagttatgtgaagatttaattagtacacgtatgtgtgggtgtgccgtggtgtattatggtaatggtggcgtaaggtgtttatttgaggtgtgcgggtatatgccgtaatatggttatactcgcgacaaggaaagatgtatgtattgtgtgacccgacgtttaggttgttattgtacaatcgtgtgaaggatgctcccgatggtcatgtgactaaaatgggttgtagtggcaaagcgagaagtaagtttaattctttaaagcaattagtggatagcatctatcggtgttgtcataatttttgttgtatggcaatgtgatgtttcactttatcaatcattacattccatgcccattggataaataaatgtgttgttgatcgattagaagtcttgtatgagcgttatcgcagcccaataattatgggaggcgagtagcgtccgtaagtcagtccttgttagaatcgaagaacaatccgataacatatgcacataagtgctttaggtccttcagtagccagtataagtcttatggagtttatgccatgttttaatgtctctatgttagaccccaa

SEQ ID NO: 150364 - DNA, 1621 bp, Zea Mays
agtttgaccatttcatttgtctccctgcactgggcacgcgtggggggatattggtggcttggaaggggggcacttgtaaggttcttcagaccagagtagactctttttcagtatatgttcaagttgatcatatttctggtactccttggtggtttactggggtgtatggccctcaaccagatgatcagaagttgcagttcttaaatgagttgcgcacaattcgctcggcatgttttggaccttggattattggtggggactttaatcttatatatcgagccgaagacaagaacaatagtaaccttgatagggctgtgatgggtagattccgtcgtattcttaatgagttaaatctgtcggaactgccattgatggggcgcaaatttacttggtccaatgaacgagcaagtcccacgcttgttcgtttagactgagtctttcacacttcaggctggggggattatttctcggactgtgttttgcaaagttcagcaacattcatttcagaccactgtcctcttctgttggggctgcatgagtattcccagggcaggagacggtttcactttgaaagctattggccaaaattggaaggttttatggagaaggtagaagaatcttgggtacagccagtgggttccttttgtccactgcaacattttgcagtgaagttaaaaagtctttcgaaacacttgcagtcctggagtcagcggagtgttggcaatgttaagaatcagctcttagcagctaaggaaatcatgcaccagctagaaattgcaggggattctagggctctgttgcctctggaggagtggcttcggcgacggctaaagctccactctttagctttatcctccatggagcgcactatggccagaacaagaggtggccttcgctggttgaaagaaggcgaagctaatacatctttttttcaccaacaggcacgatataggaagaagaaaaatttcattgccacactgaaagtagcagacagaatcttggtagagcaggaggaaaaacaagaagttgtgtgggatttttataataatctcttggggactgctgtgcaaaggaactgctctctcaacctggctgcttttcatattccaacccgaaaccttgagcagttggaaagggatgtcactgaggcagaggtatgggccactattaattctatcccttcagacaaggctccagggcctgatggatacactgggcgcttctataagcatgcatggccaattattaaaggggatttcatggcagctatggggaggattctgttgggtgatgtttcaaatttgcaccttcttaactcagctttggtgactttacttcctaagaaatctgatgctgcagagataaaagattttaggcctatcagccttattcatagttttgctaaaattgttaccaagttaatggcaaaccggcttgctcccacgcttcctgagctgatatcccctaaccagagtgcttttgtaaaagggagaagcatacaagacaactttattatggtgcaacaaacagccagagcaatccacaaacaaaaaattcccaaagtgcttctcaaactggatattggcaaggcatttgattctgtttcttggccatttctgct

SEQ ID NO: 150365 - DNA, 460 bp, Zea Mays
aaccaaaaattcgcagggtctgcgcaatgcatggcggccatccttgaaatcgtcatgcacaacatgatcaattagctacaaccggaatcttacatacagaagatggcttacatgcatgcagctctccaaattaaatcccggcaactaaacgtaattactggtgctaattacctagccagggatcggacgatcgatcgatcgatcttagtacagacttttttagctgtagcagcagtagttctagttggcgatcaactatcttttactacaccaaggcaaggcaactgcatggtgcgtggcagctcgcgcgcgcgatctccatctccatcgacgacgagatcgagaccggaccgtccaagtcacaagccggccggcgcaaggctgagctgcaggtccagccccagggcgtcctccggcccggccacgaccggctccgccaccaccgccatcccaggcccag

SEQ ID NO: 150366 - DNA, 348 bp, Zea Mays
gtgcaatctccttcctaatctgctctactacaagggttttgagctgggtggcggcgcgacggcggcctgaggcccaatagcacctccgcccggcccagtctccctttgattattctctactagcttgtctcgtcatctctgtcaagctggagccgccaccgtttgtcttctctgtcaaacaccaagcattcagggtccagccccagccggtcgccgctcctgcctacctttcggttccagcaagcaatccccgaggagcgagcggacaagagaagaaatcaagaaaacccgcctaccccgcaccaaaatgtcaaaccacaacaagtcccatctgtccctccccccgcc

SEQ ID NO: 150367 - DNA, 330 bp, Zea Mays
gccaaattatcttgtgccagtttctttctgtacctgtctgggtcagatcacaggtaacccatttggatgaaatgcccttgaagtgtgcaggggacctagagaacctcctagcccatgcaaccaactgaattggatgtctagaccttctcacatacagcgcagcacagctgtattgcagcacgtatgcttcatctacaagggcaggtcacatggtctggagttagcatatcatgaccatggttggttttgaagatctcaactgtttagcttgtgcgccattaatcaagtgtccgtactagaattacagtttcttggacaatgactcaggtg

SEQ ID NO: 150368 - DNA, 516 bp, Zea Mays
cttctattggaaagggttgaaattggatgttacaaattttgtgaagcagtgtgctatctgtcagaaagctaaaagtgagcatgttcatccgggtgggctgctacaacccttaccaattcctaaaggggtatggcaaggtatatcaatggattttgtggaaggtttacctaaatctgagggttatactacaattttggtggtggtggatcgtttctctaaatatgctcacttctttcctctgaaacatccattttctgcacaacaagtggctcaagtgatagtagacaacatttgtaagttacatggcatgccattgtcttttgtctctgatagggacaaagtgtttacgagtgccttttggaaacagttgtttactttgatgcaaaccaagcttttgatgtctactgcctaccacccccaaacagatgggcaaacggaaagagtcaaccagtgtttggagatgttcttgagatgttccgtgcatgcttcaccctctaagtggaaagcctggttgcc

SEQ ID NO: 150369 - DNA, 591 bp, Zea Mays
tacttgttgacagcaaggtcgtcgtaattaagacttggagtcgtgggttctaggatccttaggatcttaatccgccttattggtatcctgcacacgtccatccagactaaacctgtgcgttgaccagtgtttacaagtcgtccgactaatcgcgattagtcgggctggtcgcctggaagagggcgattaggaggacgacacgattatggtttctagtcgtcctagtcgtccgactagtcgtcgacctggacgattagtcgtctagtcgaacgcttccaggtcgttttttgtcgttgcaattttgatactgggcttcactctggtttttggcccatctacagtagcccgcccctccaaaaaccctcccagccgccagaaaaccgccagaacccttcccagccgccagaaaccctactcctctcctttgtcctctctggtttctgccgacatctctgctctagcctccaagtgctccagccgtccagcagcgtccaatactccagtgctccggcgtctgtgctgctgctgatgcattttgtttggatgttgatccgctctaggtagcagccagtagcagccagcaggtaatgc

SEQ ID NO: 150370 - DNA, 494 bp, Zea Mays
ggcagtatgtaacctagatttaggtttagcacgagaactccatgggacaacaactatcttagctccagacattttcatcttaagttcaggaaagcttatcatctcgtcaagacgttcttgagaggggaattgcattaagaaaccagaatggcactttgtagccttccaagatttaccccagggaaaatggaaaccaaagtccttcaccaactcatcagcagatactaaaccctcaatcaccttaaccaatccaatgaaaaccctctttggttttttggaaaaaggtttagcaaagtgagagagatagaatccaagaccatcagcagccatgcctactatgggcatattcggtttgctctgttttggcaacacacatctagctgtgacatgagtatcttttcgacaaatatcacaccaaagagcattgaaacagtttctagcatgatgtccatcaaccccacatttttggcaaaaagcgggacgaaccggatcaa

SEQ ID NO: 150371 - DNA, 365 bp, Zea Mays
cggtgacaacatgccatgtgctcgtgaactggtgaatgtggtttggcccattcaaggacgccagtttgtttctactataaggttttggctctatagcactatgacataatcattgcgatggattggctctcgtctaataatcctatgattgtgcattaggctgataagtggttgacactttccaaggacgaagtctttgtcaagttgtatggtgtcaagacttctaatcgtggggcttttgttcaactttgcaacattgttgacttaactgatgaagataggttggttgccaggatcttcccctggagttgagcatctcattgacaagtattctatggtgtttgcacttcctcatgggctgccac

SEQ ID NO: 150372 - DNA, 1932 bp, Zea Mays
ttttgttccggtcgatgctctcttgtggcgtgggacagggcatgccgactgcagtgacggtggctgtaattgttccggcatgcgcgaagtggaggcatttgcagaccggcagaagcgtccattgctacgtggtgaaaactggtttggaatcagatactctgtgtggaaatgcattggtgtcaatgtacgcaaaatgtggtggaagtagggtaatggttgatgcacatagagcattttcttctattcgctgtaaagacgttgtttcatggaattcagtcattgctggatatatagagaatcagttatttggagaggcgcttgcgctgttcagtcagatgatctcacagggatatcttccaaattattcaacagtggctagtattcttcctgtgtgctcattcacagagtttgggaggcatcatgggaaagaagtgcacagtttcgtggtcaggcatggtatggaaatcgatgtatctgtttctaatgcactgatgacacattattccaaagtgcttgaaatgaaggatgtagaatcaatatttactagtatggatgtgagggatatcgtatcatggaacaccattattgcaggatatgtgatgaacgggtatcaccatagagcattgggcctgtttcaggggcttctgtctacaggaattgctcctgattctgtttcttttatcagtctgctcactgcctgtgctcaagtaggtgatgtcaagacagggatggaggttcatggttatatttttcaaaggccagtacttcaagaaacatccttaatgaatgctcttgtcactttttatagccactgtgataggtttgatgatgcttttcgtgctttcaccgatattctgaacaaagactcaatttcatggaatgcaattctctctgcttgtgccaccagtgaacaacatatcgagaagttttttgtactgatgagtgaaatgtgccgtggggtaaatcagtgccagtgggattcagtcacagtcttgaatgttatacacatgagtaccttctgtggtattaagatggtccgcgaagctcatgggtggtctctaagagttggttatacaggtgaaacttcagtagcaaatgctattctggatgcttatgtgaagtgtggctactcacacgatgcaagcatacttttcagaaaccacgctgggcggaacattgttactgacaatataatgatttcttgctacttgaaaagtaactgtatagaggatgctgaagtgatcttcaaccatatggctgagaaagacctgacttcatggaatttgatgatccagttgtatgcacagaatgacatggatggtcaagctttcagtctgtttaatcacttgcaatctgaaggcttgaagcctgatattgttagcattgcaaacattcttgaggcttgcattcatttgtgttctgtacagcttgtgagacaatgtcatgcctacatgctcagagcatccctagaagacatccatcttgaaggagctcttgttgatgcgtactcaaaatgcggcaacataaccaatgcatataacatctttcagatcagcccaaagaaggaccttgtcacattcactgccatgattggatgttacgcgatgcatggaatggcagaagaggcagtagagctgttctctaaaatgcttaaacttgacattaggccagaccatgtagttctgaccacacttctgtcagcatgcagtcacgcaggcttggttgatgctggaatcaaaattttcaagtccatcagagagattcacagagttgtaccaacagcagaacactatgcgtgtatggttgatcttcttgcccgcagtggacatatccaagatgcatatatgtttgccttggatatgccccctcatgcagtcaatgcaaatgcatggagctccctgctaggagcatgcaaagtccatggaaaggttg

SEQ ID NO: 150373 - DNA, 884 bp, Zea Mays
atttctcctcaggcgctgaagacagtctctcagactgtctttgtcaccacccagaaaaacctgtggccttggttcctctcatgacttccacatatcaaagcagcagctgctagctagctagcaatctactagcgtccagcagcaccatccaactggctcatccgcaagcgaacccgatggatccaatcacaaggccggcagctccatcgttccatcggccagcagtcgcgaccgcgaagcatctccatcaggccgccgccaccttggctcggaggaatggagtcagcaggaggtgccttctgacgctgctgatgtccactgcggccatacctggcggcagcgaatcgaggaaggctctactgcaaggtgagcgggaaactgatcagacctttcctgggcttgaggaattggtattcgtggttcctttgcatgtaaactaatgcgggtccgcgtgcgcacagagtatctgaagaaatcgaaggagaacaaggaaaagaacgacaaggaggtaactggagactcttttcccgtggtttaatagtgccctatcgttgccagtcgattgaggggtaagaatgggtggagtgaactaaccatcccacaaacatggacacttttaagagaggcttgattacgtatttaagcgaacgatatacattgaaggactgaaaacacggcactgatcatgttgatatgctcatgttccagaggctggatgactacaacaagaggaactacagggactacttcgggctcatcgagggccaggtcagagagaagacggaagaggagcgcacggagtcggagaaacggatcctcgagtggctcgacaagaacaggtagtctaatgagcaggatcgaatggtcgatcatggagggccggc

SEQ ID NO: 150374 - DNA, 387 bp, Zea Mays
tttcccctaacttaattcgaagaatggtaacctaatttgccctggccacgacgaccgagaaccatgcggacgaaggaacgtgttcccggcgatgggtgatggtccagttcaattgaaagggtcgaagagcttgaggagggtctagggacactagaacaggcaacgaagagacttgaactaacctgagttgagctggccgcggtgaggtgttcttcatggtgttcttgcgtggttttggggaaagttaaaaattcgcacactctggtgaacgatcgaggctaattcttggtgactggatacttaactaccttatggagctcgcggcagggtcaatttatactacggaagggcggtggctgggaatttgaacggtgacgcgcgacggtc

SEQ ID NO: 150375 - DNA, 469 bp, Zea Mays
gctttggcggggaggacggacgatatcggcggccgtaatcattcaccgacaccataacccgagctaggcactactagaacctgggtaagaaatcgctctacgagttcgccatccacttaatttcaattcgcacccgagatacgtaggaatcgtgtaccgattagcgttgtaggcatctcagccatggcgggccaccgtatcgctaggcgcgatcgccggagttggcagcaaggtagaagaacgctccctgaccgttgatgcgaggatggagggttgagattagatcccgcgtaccctttcaccacgtttcgatctggttcgtcgatctggatcggatggacaaagatagatctaaagtaataaaaccctcaccgtttgattcggatccaacggatgcgattccgtaccggttcgcatgaataatgatttaatctggcacgcccgtatctaatccaacggctaggatctc

SEQ ID NO: 150376 - DNA, 386 bp, Zea Mays
gtccaaacacagccctctggatgcctttgatgaataactgactatttgttgggcctctgtatctcaaggcttcgatgaatcttcttgtacattgatgtattctaaaacttgtcttggtattgggtgaaccacaaagggtttaaatgactttaaatgcatacttagcagtagccaggaacaaattttggttaccatcatcagtggccttttaagcaataaattcttctgcaaggaactccgatatcctgctcacaatatacattgcagttgtggccctgcagtggcaactcatgcacagagctcagtttacctgaattctcacagaagttatatatacatatttgtgccttatacttgcaaactgcgtgcttttttggcaccagaag

SEQ ID NO: 150377 - DNA, 507 bp, Zea Mays
tccacctccccgcacctccggagctgccattagacttagcccaagttctggccaaccaaacctgactcatcaaggtcctcaccagaagtcttgagaaccagcgcccgaatggtggaaggcctcaggacaggatgggagattttctaaggctcaagcctcccacattcgctggatccagcaatccgctcgacgctgatgattggctgcacacaataaaaagaaagttagaagccatcggatgccccgagaaccagcgtgttcatctggctgctcatcaactttctgggatggccctatcctggtgggataccttcagcgttgtcgtcacagatgctacctaggcagaatttgaagccgcattccgagaacatcatgtgccccaagggatcgttcaactcaaggaagatgaatttcgggaattaactcaaggaggaagatctgtcaatgagtacgtacacaaattcacagaattggctcgttatgcacctgacgatgtcagcacagaag

SEQ ID NO: 150378 - DNA, 515 bp, Zea Mays
cctttcaatcaacagttagcaaaataatcgagtattatcactcaaaatcccctttttgtagagtggttcaatcaactgtcgaccaaaatcaaaacgcggaaggaaactcatgaaactacaaactgcttaggagtgaagtaaaactgataattataacatggcttctctgaactcagtcattattgaaccaacagtacagatgcatgtattgtacatttagtagatgtagatcaaacccaactctcaaagcaatatgctggtatggtccagagcaaaggtggaaggagcgaattaacaactccatttggaagtctagatcgtcggctgagattgagagatagtaccctgctctttttggttgtgctgttgtgcagtcgggataaatccgtgcaggtgcagtgtaaggggaagagttagggattgctttgtaatgtggagactggagagaggtcagagaacctttattttagtcttgtgatacatttgagtttgggggttcgtctacacgtctgctt

SEQ ID NO: 150379 - DNA, 471 bp, Zea Mays
ccattgttgaaagagtggccagccttttgccaggatggaaagctgaacttatgaccagggctggtagagctattcatgtgcagtttgtcatgacggctaagatgatatatgcagctctggcacttgaccttcctgtatgggccatcaaagcaatcgataagctgaggaagggcttcctctggaggggtaggaaagagttccgtggtggtcactgcctcttggcttggcctaaggttacccgtcccaaggagttgggtggtcttgggattagtgagttaaagaacctctgttgggctttgagagctcgctggccatggctgcagaaaacagaccccagtaggccttgggcggacttccccattcatgtttgtaaggtggttaaaaatctgattgctgcagccattattactaagctcggtgatggagccaatacccttttctggaaggacagatggttggaggggagatgta

SEQ ID NO: 150380 - DNA, 1079 bp, Zea Mays
cctatgaaccatcggtggagaacactcatgatgcagatagcaaagagcctcagctactcccgttgcaatcttcaacctctttatccagtccaaagattgcaagccttcatcttcctcccttgactttttgtgcagtgcacttgacaagtcaccatttcggacaaacctatacacaagaaccttttcttcttctttatcaaggcagtgacccaggaaaggaaccagcctttcatgcaatcctttagcaaacaaatctaactctgccatataggcatccttccgagccacgcgcaaagtgatcctcttcaccaccacggcagtcccgtcttggagcacaccatggtatagatcacctgagtgaccatgcttgatgagcctctcttccccaaatcccgatgtggcattggcaatttggtcgtaagcaaatgaatcgccgactttcgccatgtttgtggacaatgcagaagggtgtgtgccaccagtagctgcagctgtgccggtagctgacactaccgatggtgctggtgcacttggtgatgccccactttccctctgaccatccgtcctccctgttctcacagaacacacaaagcagaacacaatggctgcaaccccggctatcagcaggaggcttccaccaatggccccgatcagtatgtatttcagattcctgttcttcttccttgccggtgaaggtgcaggctgtggtgcgggtgggataactggaccatcatatggcaagccacgcttggcatagaactgctgacaatcagcctgggtacgctgtcccagaacgtcaaggaagcaattcgattgaaacgaaacattgccaccaggcccaccaccaccatcggacactcctagcttgccgtcgaagtagttcccagaaatattggccagcagcaactgggcgaacagccggcgaaaggtctctggcacgccgctatagaacaagttcgacgacagatccaccacctgtgcattggctggcagcgcgaaccctgccgtgggcaatgcgccggtgaggttgttacgagagacgtccagaacgctgagccccgggagcgaccagaccgcgt

SEQ ID NO: 150381 - DNA, 676 bp, Zea Mays
cacaacaaagtgcgcaaaatcgaagtctccctcaaaagactatccgtgcgaaagtcgcctaagggtacagccggactagcacaacaagcgcgcaaaatcgaagtctctctcaaaagactacccatgcaacgaccgactacaggtgccgccggactgacataataaacgcgctagacctagtgcacaagtcccctacgggcacgaccggatcagcgaaggcacacagcctcttcatacaaattatagttacatacgtacagcgagggcatcacaccttatataggttcaaccttcgggataatacccatctccctatagttaaacatcattatcctcagctcctcaccctcaaaaagactttgcaattccccctcacctacactcgccccagctagcgaggacaacaattcccgcttgccagtcctgtccacacgaagacgaccaccctccacctcactcactctacgcttcgccaccgcccttcaccacctacgcccaacacttggaccgggaacttcagcacccatcacacgcggagaagcctccgtcgcagccacatccaatgccgcaaaataatccaaatcctcatccgaagactcttccgtccacaccaccgaactcccagaatcatcagactcaaaaaacttagacacagaatcacccgaatcatttttct

SEQ ID NO: 150382 - DNA, 342 bp, Zea Mays
cgccggtccttctttgaattattcaacttgatgctattagaagtatatccattggattttaaacgtggattgtctctgagttgtactatagattgtccagaagtgcacaaattcctcaagaagtgcaacgatagctagttggtctatctcctctatgaagaggggtggtcgaccatttggaaaaagagcaccttggggatgtgttgcctaaagtgttgtgtttagctttgggcctgtactcacatatgatcgctagagatcacatcagaggaagtgagaatgattcctagtatattgcattgaacaattgcatcatggggcagtaggtggtcgagttgcaag

SEQ ID NO: 150383 - DNA, 783 bp, Zea Mays
acaagattgttaatgtacaggaccaaacggatcacaggcgtttagtgtctgtcagttctacaaacaagggtggttacatccacaagatcacgatgtaatagcgcgaggttccgttcatcgaatgccatgcaatggaaatcttcttgatttatgctgcgcgggtcatctggctaggaatacgactccacattcgtagactccattcatgctgcttaatttgaagccgacatggcacaacaagcagatttcataacacatcttccctatcgcaatttgacagtcagatctgggagaagttatggttcgcctccacaactaaagaatctcactcgacggagtcacattaatgctctgagaccgaaccctgtctatgatcttctgcctgcctgttaaatcttcttcgtatccaacgacctgcagaaaaaagccagatttaaatgagtcagacaatgttttttttttttgtgattgccgagttattcgatagactacacacctgagattctgtctgcgtctcactgaaagggtagtaagtagtaggagctggggaggggactggtacagagtttaagttttgaacctttgtgacagaggtgctatcttgcttctgttgcctagagaaaataaacaacagttaccgaaccaaacgtgaagcagggacgacaccatccctcaaagcaggggcaggaccatcccacccactatatcccagaaccaaagacaccctccctaattactgcaaacaagttgtgagatggaagttttatgctacgtagaggccag

SEQ ID NO: 150384 - DNA, 456 bp, Zea Mays
tactatggaggctgaggcttgcaaaagtagtgtgctgatggaagttgcctgcaatggggaagccaacggattggttaacttggacgcgagtgatgtctcagaagagtcaactaggtgttctgataataatatgggaatgcctggtgttcctgcaatagatttttctcaacacggtggcttagctcaaggtagcattgcataatcagatgataagacagtcaagtcagatgaggtgtccgcggtaactcatttagagcagattgactcccaagctagaataaatagttgtatttgtcgttctatatctatattttatactaatttttaactcacgcggcaacgcacatgcacatacatagtgctactataaggcaacatttgttagtcatgctatttttcatctcactgggcctaacgctttcccctcccatctaaccccaccatttctcatctcac

SEQ ID NO: 150385 - DNA, 281 bp, Zea Mays
catggccatccccttcctaggccagacaatttgtcaagcccaacaaccatatgaaatttcttattttctgttctttcaactttgtttctgacaagaacagaacagctgcacactcagccttctggagtttcaggatgatacgaaatgttggccggttccctaaccctcgatagttccacgcaatgatcttcattgggcctcgcaggaccgatcctccagccccgcttacacatatgcatttgcaccactcaatgcctcttcctcattcatcttcctcttct

SEQ ID NO: 150386 - DNA, 528 bp, Zea Mays
ggtcatcaagcaccaaaatataagaaatggtttaaggccatttccctttcatgggcccttgtaccactcatcctcgacatcaactccaccttctattctcggtggtgtaagtccttccttctaactctcaccaaattctcattggactgacacgtgctttctgatgttgtccaccgctcgcccgactggattcgcatgaacgtcgttattctgacttggatcaacggcaccatcaccgacaacctcgccgatacgatctccgagcgtggcgcctctactcacgtcctgtggcttgccatcgagtcccaatttctcgggaaccgcacgacgcgcaccctctacgccgaccaagccttccgctccttcactcatggcgatctttctgctgctgagtactatcgtcgctacaaaaagcttgccgaagattttcgcgaccttggcgagccggtctccaacaagactcttgtcctcaacatcatccacggcctcaacgaacgctttcaagcgctcggtcttcacctccatcgc

SEQ ID NO: 150387 - DNA, 601 bp, Zea Mays
aaaaaaatctcgtaaactaatcccaaaagtgtttttaggaaaggaaacccatttcaagctcttcaacagttccctcttcttacccatattcttcgtgtcctgcatccgctgcctgctgtcccacaaatttgtgcgtagcggatccttccccaatctagctcgcgcaactacctacttcccgtgtaatgccagcacataagcatttgatcttacggacgcaagtccagcaaccgacccaattagcgtttggcgtgccccatgttaggtgtttcaaaaatagtaaggattatttatcagtagtctagtatgggtttagcttttttaggatttttaataacaaccctaataagacgttttggggaacaaatttttagtgcccttttagagttgttcttatagtcccttttagtcttccaaggaacttggaatttaaagagtatttagatactttagtcgcggaactaaactttagtctctaaaatttctatttggaagatctctttaccaaatatacccatacaagtcacacacacccgcatctgcgcgcgcacacacacaataattttggataacgactgaatataatttagttattaccggt

SEQ ID NO: 150388 - DNA, 914 bp, Zea Mays
gcacagcgctcccacccttcggccgctctcgcgtcgggcagggctcgggagtcgggactcctcgcacgcattggagacttggaggccgtcgggactccatatcggcattgacgtcctccgccacgattgtcctgttcacgattgtgtccctttatcccaccggtgcaatcgcgggtggttttgtgtttagggtttaacagtaacactccagtgcggattgcctccaaggtgggatcttggcttttcatcccgttcgctctagttctttgcactttttttgtttgcatcttcttttaaagattctgatagcggtaatgcttatacttaatgaagattcgaatcatttgcattatatataacttttatctgttgcgctttgaaattaggttttttcgcttccctttttactcccaataaaacttgcattatttctaccttttatttattgcactcttaaattgagttttttcgcttccctttttactccccgtaaaatcgtcgttcttgcattctactactacttcattttctctctattaatgtgcatttatttgcaccatcgatgatcgattattactttgggttttagtcctccctcctgtttggctctctgagttctttccggaggttgattggtgtcacgagtcacgtgaacagcatcgcctatctgatcatcgtgtgaattgtgatattctatggatctcagattgatctgtgacgccgatgacctgagtaccgggcgaactccacacatccacaccggctgtggggacgacaaggtactgctcttctctccgttgttccatgcatggactgctccagaccagcattatttcagtctgttgccatctatggccgtctccacctgccggcctcagtgccttcactcgtaaatcgggcactttctgtttggg

SEQ ID NO: 150389 - DNA, 564 bp, Zea Mays
gtaatttagatctagtttagctttctctaaccttagttttcattcctcttcgactctacgtcatctaggtatacctcggatggcttatcgaccctgaggtacgccttgtaactctcctgcctaatatggtccccctcgagaggcgatttctatggtttctacggaagaaaacttactttgtgccatcgtggaccgtccagatcctgcacgcggaccgtttagagaggagcttctgtgcatgaaaaatttctttccatcccgaatacaaacacactcctcacggatactaaatttttcgttttatttttagcgtaccggcgaaacagcagcctgaagaatcgacagaggaaacggaacgacatatgcaattcaaaggacaccaattcaacgcagagtactgcatgggaaaccaatgtgtgcgcggcccggcccgcagatgacagcatcaactgacgacgtacggtcagtagggcctgcccgtgccgtagttgcctggcgggaagtagtcgcaagccaggaaagtatcgccggagtcgcacacgatccgggcgcagccgagctgcg

SEQ ID NO: 150390 - DNA, 475 bp, Zea Mays
ctgagaagcagaactttgaagcagcacatttggaaaaatagcctcccaatcagaagagcaaaaaactctgtccaactttaccaaggcatgctaatttgaccaagtaaatttcctgccatgcaattggatttcctttaatgccagatcattaatagctgccctgaatctagacatcattgccctgttcaaatttgagttatttttatccgaagccttataaataaggttgaagtctccagcaatgacccaaggtccagcacaggcagctctgatttccttaatctcctagaggaaaagaattttatctgcatctgactgaggcccataaacgcaagttaaccaccatggtgtgccatcatttttacagaattgaatgaaacgcagtgattatctattcttgttaaccctatgtgaccaacattcctcctccaagcaaccagaattcctccactagcacccaacgaaggcatgaaga

SEQ ID NO: 150391 - DNA, 394 bp, Zea Mays
agctcgacaactcgattgatgacagtgaaatcaaggatgttgtgatgggtcttcactcggaaaaggcccctggtcctgacgggttcattgggcttttctataaaaactgcttcgaattgataaaatatgatctttccatggcaattaaggattttttcctgcatagatccaaaagcctgcacctagtcaatgaagcaaacatcatcctcataccaaagggggaaaatgcggatagaattgcgaggtttaggccgatcagcctaatcaacagcttcatgaaaattataacaaaaatcatggcaaataggctggctccaaggatgaacgaaattatctccagtgctcagaatgccttcatccagaaccggtcaatccacgacaattttctgtatgt

SEQ ID NO: 150392 - DNA, 524 bp, Zea Mays
gacgtgaccaaggtaggcgaccgtgtgagtgccgaagagacagttagaacacttgagcgccaacttgtgtgtccacagtaactggaacaccttcttaacgtgttggagatggtcggcccatgaacgattgtagatgaggatgcgtcaaagaagaccagcatgaacttgcggatgtacgacttcaacacctcattcatgagagcctggaaggtagaaggtgtgttcatcaacccgaacagcatcaccaggaactcatagtgccctcgatgagtgcggaaggttgtcttggcgatgtcgtcggggtgcatttgcacttggtaatggagttgtcgaggctagttggttacgccatctcttgttggaacttcgatgcccccttcacaggagtattcttgtctattgtgacaacatcagcgccgtctatttatccaccaatccagttcaacatatcgtacgaagcatgttgaaattgatctccacttttcgagaacgtgttgctattggtgatgttcacgcaggggcga

SEQ ID NO: 150393 - DNA, 488 bp, Zea Mays
cccatgcaagcgaacgggattgaacaacccagtcaagtgccaaatcccggtccgcgagctgatctcgcagatggcggatatctattctcaactcatttatgcggtcgccatctacaacccagatagctgtcctgcggcggagttccgcttggagccgacttacttcagcttcgagatcccctataggatcattgcttccgctactactattatcatgccttggggccagctggtgactcggcacaccaatcggtccagtatgtttgcgtgctgttctccttgtgcgcggcggcattttctaagggggaaaatttgattagtatggtttttagcatgatgcatgtataattacagaatcaaccttagttgattcacaccttctatatgttgcactcttactacttggtctttaagataaactctttagaacacttaggtaagaagggaagagagtttctaggtaagtcttttagaaaatccttttgaag

SEQ ID NO: 150394 - DNA, 314 bp, Zea Mays
aggtttgctccagcagctttctagttcaaaaaagctccatcgagtctccatgtatgctgatgatgtagtccttttcttatgcccaacactgacagatattgacctcattcttagcatccttaaactgtttggagatgtctctgggttacacaataatgtgcaaaagtcaaatgtgtatcctattagatgctctgaggaggtgctgctcgaagtccaaaccttgatgccatgtgaaatttcaacctttccgtgtcgttatttggggctccctttatccttatacaagttgacaaggcagcagttccaacctttcg

SEQ ID NO: 150395 - DNA, 396 bp, Zea Mays
cttcccacctagcaacaaaaatacccctacctggaggaaaagacttcaggccctgtcaggaagagatcctactgaggatgaccccaccatcgtctacatggtcggatatctccacactctcgataaccactatgatgacctttcctcccactgcacccacctaaactcccgggtggaaagcttagagcaacaggtcaaggaacttaaaaaggagaagcggtccctccaagaaagtctcgaaatagcaaaaggcgaagaggccaacactcgtgaagcctaccgaaccctgaagatggattacgataagaagctaaagaagctcgcccccacgaagaaaatccaaaagaagaccaagagccaagggtgccagactgagcgaaagaaggaagcccctcc

SEQ ID NO: 150396 - DNA, 497 bp, Zea Mays
gggtggtgtgtatcggcaagaagtgagttgtcttggtcaatctctccacaatgacccaaatggaatcatggtgccgggaggtattgggcaatcccacgataaaatccatacaaatgtcctcccatttccaagatggtatgggaaggggttgcaaagggcctactaccttcaaatgactggccttgactctctggcaggtgtcacattcggatatgtacttagcaatttccctcttcattctggtccaccagtataaggatctgaggtcatgatacatcttattactgccggggtgcatggagaattttgaaaggtgagcttcatccaatatcttctttctgagctcagggttcttgggaacaaccaatcggtctccaaaccataggattcctttgttgtcctgacggaagcatttgtatttgtccaccttttgtttgatcatttccttgataacttgaacacccttgtcttcaatttgtgccctcactatttgctct

SEQ ID NO: 150397 - DNA, 707 bp, Zea Mays
gctgtggtggcggtggcggtggcggggtcgccgctcgtgtcgcccgtggagtgagcgacgcgtgggcctttggtttcgttctgcctcgcaagaaatattgggatttagtttgtcatgttagactctaggctgagcagtgacatacacataggtttgtgttggcttgctgctagaaggaaacaattgtatgcaaatgcaggggttaatggctccattgttggactctgcagagagttacatgatcagaacccccctcgatctgagctagattatcacatcacacattttcctcacagtaggggatattaatttttctggagacaattggtttgagagctcgttattcttagcaaagaatagttaatgggagcttgccatgaccataggtagctcggatctttgccattactgtatttccgaaggatcaatatgtattatgaaccaactgcgttcttctaggttccatatgatccaaactttgttctctgtgattttgtaaaatatcttagttgcctttggaaacttaggaacgccaatctctcacagactaatcaacaactttgatgtccatgttttttatgcatgtggcatgagtaatgactgaaatatgtaaaaatgaagagctatggaatggcatgatgtgaatgtggcattactacatatctattaaactactcaacccaagttagtaactatcttcgaatcac

SEQ ID NO: 150398 - DNA, 625 bp, Zea Mays
cggcgacgcgtccatgaaggcctgggtcacctgtgagccggaggtctcgcggcgccgcctcaccccggactgccgcttcctcgtcgtcgcgtccgacggcctctggaacaaggtgtcctgccaggaggcagtcgacgtcgtcgtctccgccccgccaggtggagctggagcatcgtcctccgtggaatcgtgcaaggacctggtcgccttggccaggaaaagggggagccgggacgacatcaccgtcatgctcgttgatctgcagcgattcatttgacagtcacaggacgcggaggccaccgttcatcaatgctgccaagcaaaacattcgtacgtgatcaaattaatgttctttttatagtgtatatttttctctttttttttctttcacttttattattggatactctagctagatgatttcccaagagattatattgtacgtagtagtgtagagagggctgccttccgaagagatttgaattcaaactcgtcagaaagtgcagaagaagattagcgcgacgtgtaaaaaatagctatgatgatttcctctattagttcgagcaaatatttcggtgtgtcacaggctcacagcagaaggaaagctatcgaacattcatggaaa

SEQ ID NO: 150399 - DNA, 848 bp, Zea Mays
ccgccggcagcggtcgcccagggccgccgccaggggcgcccccctgtcttttccaggaaatctccgaactcgtcgcctcagtgaccaatggcgaagcgttacgaccccgaaggaatggcagtgcgccttctgatgacgtcggagctgctgctatggggtgcaccgaaggtgcacgaggtattgcttcagggagagcggcgatggcttctacctccagtgctggcagcatagcggaccgggtcgttcttggtgaccgtgcagatgatgggagacgtcaatcttgtggcactatcgcaaatactgcagcattctgccgggaggctggagacactggcatgacagtagattctgatgttgataatatcagcgcaatggtgcacaggattacaggaatcctccggtctgaggcacctgggccaccagtggagcagaaacttgagagcctgggtgctaattacactccaaaccttgttaacatggtgctgaagaggtgcttcaaggtcaggcaactgggattctggttcttccactgggcaaagcgactcccggatttccaccacacgacggagacatacaacacgatgctgtacattgtgggcgaagcgaggagctttggtatcatggaggagctcgtgggtgcgatggatagggagatgtgctccaaggacatcaagacatggacgattttattatccagttatggtaagacgagacagattggcaagatgctgtcaacctttgaggcgatgaggaaatcggaatccatctggatagacagtaaagtctataggacagttcttcacgctttgtgcaatgctgataagcctgagcttgcccttgagttctac

SEQ ID NO: 150400 - DNA, 754 bp, Zea Mays
gaccgcctagccttcttccgcctcacccccggcgcgtcagtcccaccctccttcccttccctcagcttcctgacatcgcaactccgcccccacccctcaaaccaatcgtttgtgtgtgcgcaggacggtgaagattgggaacaagacttgttcactgaagccgctcgtgggacgcccctttggctccctattccgcctcggcgccggcggactcgttccctgcgccgccgcggacgccacatctcgtggtaaggatagattctgattcgaagcctctatcgagctgaattgccagctcgaggttaaacctttttaaagctcaacaagttgtaaccttttactcgcaaagctcaagccttttctgttttcattcagtgtgcaattttcagttaactgaaaacataacagaagcacattattgttcatagttagtcagctattaggcctcatctatatccaagttctgtgaagttgctgttccattgtgccatatgtacaatgtgcctaattaatgaaagcctaattttttgaactagtttcctacaaacaaatcattctctcttctttttaacaaagataagggtcatgctgcaatgattcttactgtctaggttaacagttaactaatgccccctctttctttcatggtgtactcatcattatgcacactatctgatttttgtaacactgactcatttatctagatcataacacgccagatgatgccaatggacaaacgcaggatgaaaccaga

SEQ ID NO: 150401 - DNA, 700 bp, Zea Mays
atcagtgcctcgaaacattcctacgctgctttgtaagtgcctgtcctaaaaagtggtctgcgtggcttccctcggctgaattctggtacaatacaagcttccactcatccctgggctcttcaccctttgaagtactctatggtcgcaaaccgcattcttttggtattccacatggcgctgttgttcccagtccactatcagaatggctgcatgagcgatccacgatgcaggatttgatccaccagcacttggtccgcgctcaatctcgaatgcagcgtcaggtagataaacgccgctctgagcgctcctttgcagttggggattgggtatacatgaagctacaaccttatgtgcaagcctcaatcatgcctcgtgcacatcacaaactcagttacaagttctttggaccttttcaagtgactgcccgcattggcactgtggcttaccgtctggcattaccacctaccagcaaaatacaccctgttgtccatgtctctcagctccgattggcagcaggctttaagggtgataaatctgctaccttgccttcttctctgcctgaattcatcataccagtgcagattctccaaaccagaggtgtcaccaagggtactcgtttggttcagcaagtgctggtggaatggtccggcttacctcgcgacctcgctacttgggaagatcgtgaagcccttcaacagtg

SEQ ID NO: 150402 - DNA, 422 bp, Zea Mays
caatccttcatcttttgcatattctcactttgatacgagttgttggctttctagtttctataaaatgttctctttactgtgccattatggtggaggcaacaggattaaattctcgagcactcttcagttcatggatacgatcaacacaatcttgcactcacgtctgttccactgtacatgtgcaaactgaggggtgtttactttcttgtgtgtggacatattattcacccctgttttcatttgggggtcattgcatttatagatgtgtaattgatatatgatttatacctacaggaatgggaatgacgttgactttggatgacctcaaaaccacattattgatgcccaaggagttggctgctggatttatactgcaatacacggtcaggtccccccatttttgttcttcatatgtctgaatt

SEQ ID NO: 150403 - DNA, 822 bp, Zea Mays
taaaaacacacacacacacactccctacaacaacctatgcagggggcagccaaaaaggagagccctttggctccagcaatttcccagcttcttctttcctcacgtgcttgctccataatcagaggaaggctgggagaccctccataaaaaatggctctattgcgattcttccaaattatccaagatcctaaaatgacgagggagtcaagaccttccctgaccagaccatttgctgttgctgaaaccatctcccactaatccttaaaggaaactgtatctggctgtgggactaaactatgcagcccaaactttcttagcaggttgtaccagaaaacccttgagaagacacaactcacgagcaagtggttcagggtttcaccttgctggtcacataaaggacatctggtagggtgattcaaacccctttttgccaagcgatcagctgtccaacatctattatggaccacaagccaaatgaaaaaaacagcactttggaggagtctaagatctccaaacccttttatagtgcccaaaggtggtagaccctaagaaaaacccagtataagctgactttgcatagtatctgtcattcgatgataagctaaaatctgcgaggatattccaaaggtgtaggtaatctacaatgactccaactgtaacagcccctttgatgtctgcaatccatcgtctgttcaatagagcctgctgcagtccttctgttagtaattctttttgggataatgctgaataatctgagagcaatatctgagacccttttgccatggatccatttatctgtccaaaacatggtgttggtcccat

SEQ ID NO: 150404 - DNA, 381 bp, Zea Mays
tccaaaaccagtgtcgaaagcttctgcacgaggagcgaaggcacgctacagcggggcaggagaagaacgatgccgatcgggtccccgtggcacacagcgcgcgcacaacaccacgaatctcaaccgcccaaggattgtgagatgctgccgtagccgtcaaaattagaacaatcatctattgcagacgtagatttgctcccgagatttttaggagttatggacgtttcatatatagatagaacagaattgtgtgcgggcctaaagcaattagaggctgtttgtttacatttataatctcctctgttcaaaataagttgtattatataatctggtggtaacctactctgtttaaaataagttatgttatataatatcctataa

SEQ ID NO: 150405 - DNA, 851 bp, Zea Mays
cgaccttcttaggcgcgccaccgccatccgagccgagccgcagcgatccagatccaggtaccccttttggaccacccttgcccctctatccctcgccccatcggcgtccgcgtgtcctcgtcccctgagacgccaccggcgtggagatggagtgacgatccgatcagatctgattgctcgttttctccgagaatctctcccccttttgtcggttgtgagctctgaaagtcgaatatgccatgtttccctccaatccatccagttggcagcttgtttgccgcgtggtggagttcgtactgatgtaggtgatttggtccaacttttcgattttatatgggtgttcaactgagcctcttatagccctcgttttatctgcccgccgctctggaatgtaatacactccgatttgatgtgaacacaaactctgtgaattctgacatgtatttatgatccgtttaatagcagtgttggggctgccttgtgcaccgaatcagtgattgggcagcgtaatacaaagagggagcgcttgatcatatgagctggttttgtacagaatgtcaggtatagccaggtgctcgttgtcgttgcttcagttttaacgagtcggtcaggcaatgcagctaacgttatggcgtcggtcatgctctgttgcagagagtaatgtggatagcatccagatatctgttagtaacgatgagaggaggaatagggcagatgccgagatctcggaggacgagccgaggcacaccaggatgcggaggctgaagaagaaaaccttgcatgcatcgacaagactcacacactccctgaagaagagggggaagagaaaagtggactgcagagtgccaagg

SEQ ID NO: 150406 - DNA, 1056 bp, Zea Mays
ggtgtatgtcctggggtggcacatcacccctctctcacaccatcaccaccactactaccaccaccacttgacaagagagtagctctcctctctctccccccatccatcctagagagagaaagtgagggtgttagatagatggttagttatcactggctagtgatggaccttggcagcttgctactcccttgtgcacttccgcgcgcgcgcacacaaaagcttttggagatgcgtagtagcatgcatagccttaggcaggagcccccacggacacgcctttctgttctttcttttcctatgcacccctaggctcagaaaatggcctgcaagctcatcattgtccccaagcctttttctgctccgtccttctcttttgcttggctttcttccattccctagctagctcccgtgcactagtagtagtgcaatggcgcagatcggcagatggcgagcgagcgtgtgtacaagagaacatgcatgcaacagagctctctccatcatctcatccatctgtaaaaatatatatagtgtacatgagtacatacacgtactacacagctagtgcctagctagtgcctgtgtggatctattgcgtgagcataaaagtacgtattgcgagcgagagagtcttgagcgagatggatggtgccctagaaagagcctccttcacctaccatgcatcactgaaagctatgcaccatcctcacctctagctgctacctagtagctacctcgccgtatggcatgcaggaagcatcaagtagggctttcgagtgtcctccctcctctctctctctctctctctcaccggctgtatctctgtatttcttgctgctccatcactgaggaatggatccttttcataatggcttggagatcttgcttccttttgccactcgatatataggcctaccttgcaagcctgcatatgctctctcagcaaccgcaatcataggcttctttttgttaaggactacacacacgaaaggattcaagtatgaattgcgtgtgccacataaagtagctcatgttgaccgaatttcctgttgtccacgt

SEQ ID NO: 150407 - DNA, 816 bp, Zea Mays
gacactttcacctcagcttttgccgtaacgttggttgaggggaggcctaaggattgcatgggatttgcagttgctggtacaaaatcgcgtcctctttatttgattgattggtttcctcacattttgatttgatggcttctactttcttgaattccagctgctgctgcctctatcatgctgtttggttagcttgtttcgcggcttgacctgattacaccataaatttcttctgttgtttaatgtttgtttgctgcacactgtgtgactgtgtgatcggttggcatggaaacggttaataatcttcggcatacggatcacccctgtagtgtaatgttaggaaatcagtactactgctctttaaatgcatactctttttaagaaatggaaacccttaggcttatagcgtttcctgttgactcatagctgcctgtactatttccacgcaattcccgcgacctcgtattagctatgtgcatccaaacagcccaactaaaatgcaactaataattagttatgtcccatatatttattagttccctagccaccccacacccgcttaagagcagctccaacagtctgtgtaaacataccgtgctcggtaaaaataagaaaatcttagtcaaaacttcttccaacatcctctccttcctcgctacttcatcttcctcactatcgtgccccttttgctagacatctttgccgagtggccacaactcgtcatcgcctcgccctatggctttccctcgctctctccggccttgccggctgccgctctcgcacgaactctcgccatcccactccctcacgctttcccgc

SEQ ID NO: 150408 - DNA, 456 bp, Zea Mays
gccaagagcaagatgaagacgttccaggggccgacggcagcgaattcctcaagcgcaaataactgggaagacatgtatggatgttcatgcgcttgccgcaagctgtctgctgctgccttatcctccttttcccagaaaatgatcgccagagatgagcccaaggcagttccgttgtagtactggaaatccatgatgaacagcagagatgagccaaatgcagttccgttgtagatctggaaatccatgcggcgacctcggtgctgtactgatgacgctgataaccgggaagacatgtacggatgttcatacgcttgccacaagctgtctgctgctgccttatcctccttgtcccagaagcctgcctggtaggttaggctggctacaagaattgcaaggagcagcagaagcttgcgccccttctcctgcttgcataagacggaggaagttgcattgaag

SEQ ID NO: 150409 - DNA, 796 bp, Zea Mays
ttgagataatgactaagagacatgtaaatatcttgtgtgtccataagactaaatggaagggtcagaagacgaagggggtggacaataccggttttaagctttggtacatatggatagctgcaaatagaaatgaagtagggagttttaattgataagagcatctagaacggtgtgatggatgtgaaaagggaaggaaatacaattatcttagtcaagcttaccatggatgatttggtcttaaatgtaattagcgagtatacttctcaagtagacgacgatgagagtggtaggaagacttcgatggcatgtttagagctctacatattagtgaggagctttgcataggagatcacaatgaacatgtaggtggaggttttaggtatactagtacaaaccaagagggagaggaaatcttaaactttgtagtagcttttgacctattgatagtgtaaacaatatatacaaggggtaccataggtacgttgatcctaaaggtgttggcttgtgggcccaactcggactcagtctaggacttggactcggtctcagactttcaggagaacctaatccacatgtcgggataaagtctacgtggtcgagcaaataaggaagattgtagggtttgtacgatatatgggtcatatcttcattgtaacggtaatacccgatttataagggaagccattatagcgatgatagggatccttgtaaccgaggacttttaggtccgagtccttgtctagtacgaccacacgttttcttgtaaccgcacccctccaactataaaaggaggggc

SEQ ID NO: 150410 - DNA, 1853 bp, Zea Mays
cttttattgtggtaaaccatctggcagagattctcatcctagtccctccttatttatattgtttagaccattactagtgatagtgatgcacgtcttgctcatggattttaatggtcataactagcaccattacatgttaatgttagtaacatgatagggcagctatttgctggagaaacatgacatgatagggcatatatttgctggagaaacattagtccattttaatttgttctattgttatgtggggcgcagtgtataagcgtcggccacagcagaaggagggttagtggatgagaaagaataggaaaggatagattaagttagttgagaaagtctagggatgaggattagccgcctaagagatagattgagtagttgagatattctagggatgaggattagccgcatcctccctcaggatactatttaatgtaatgaaatgagaggaacaaagtaagaaagaagttgagtcctgtcgagtacctaggaactgggtacccaaggtaaggctcataacctcttttcggcccgttcgaccgggtaagtccgcgaggcggagcggacgaccaagtccccaccgagcaagtctgtgaggtgaggtggacgaccaagtccctgccaagcaagtccgcaaggcggagcggatgaccaagaccccgccgagtaagtctgcaaggcaaggcgaacgaccgagttcccaccaattggacctgcgaggaaggaaccccagcccgacgcagctggcccacgtcggctacgaagggacgcaccatccttaggccacgcccgtgtaaacgtgcgacgcaccgaaggcgcgccgaatagtcgtcatcagggcacgtacggtgcgacccccgcgtacggactcagacacaccaccactgcgttttggggccagtcaagttcggtcgtcggatgacctcagtaccatactctcagcagtgacccaaatacctggaaggattggacagtatgccataccggatgtatgtctacaacacgttgaaggatgacgtagggcccatgacgacgggacgaaccatgtttcgtacgaccgcgccgtgagactgatccgcgagacccacacacactatcacgaagacatgtagcagactcgctacagggacctgtatggcggatgaacaggacggagcgccataccaaaggtacgacaacgcacgaccctacagacgacgtcaggaggaccatgccacccagaggcagcaagccaagctccctcccagtagaatacgagatcatactgtaaagtcctcccttgagttataaaagggcagggcaaccttctttctacacacaagcacacaagctataacacgatctattgcaattccagcactatactggactagggccctggcctgaaccagtataaccctgtgtcccaagggtgaccgccctggccaccagggcccctcctgggatggacgcatacggcgatgaatcgagaaggacaacctccggggtggccacacccgtcacccttaggatgacttgggtcgacggcgtcgccaccctggggggacgggatgacacatcacccagcggaacaaccccgacagccggagggggcgttcctcccagcggtggaggcacgaaggcctgggagacggaagcgtccccctcgccaccagggtcacgtccttcacagacttatgcggcacgtacgcgctggctgggaaggaaaatatgaaaaacataaggtaacagatggaagtcagagataagaaggcaagcaactcggacgtaccaggaggagcgcttatgggtggtcaccttcccttgggcaatcgccaaaggaaccggaggtcatggcatagcccgtggagccg

SEQ ID NO: 150411 - DNA, 323 bp, Zea Mays
tgtttcctcgtggcggtaacaacccgcccgagctactcgccgaccttcgcgccagctgggttccaaaacccccttccttaccctgcgcctataaaacccgagccattgttctccttcttcccccagtacgccccatcaatcacgtcacctctggtgcacatcgatttggagaaagccgggaggaagcaccaccgttgcggatctcccacgccgtgaatcctcatctcagaagtgtaccagggtcaccgcagaagcctcgcggaccgattccgagactaggctgcgtgagtactcccgtgggcgcctcaaaatttctcgccgat

SEQ ID NO: 150412 - DNA, 472 bp, Zea Mays
gttggcagttcaaagtaaccatgtgagagttgtgcaggtgtatctggtggcagaggacaaggtcataaaggtcacaccacggaacgtgcacacggccaagccagcatcggaggttttcttcagccacaatgcgacgtcttcagggaggtccgaggagatcattggcctggccgtcagtggcagctactcgtctctcttcctcaccatcagaaaccggggactcttcgccttctcgctccgaggcgagctccaatggagcgctgggcctgcgcttgatttcttcggttaccgtcttggctgcaagagaaacgtctccggctgctatttcgattcggctcctgttgttgatcagtgcgagggggtgctctatgtaaggtccataccagttgcatacataattgttctgtccactttctgtgctagctcattgtgcaccagccatgttcttacagatatccaacactgaaggcca

SEQ ID NO: 150413 - DNA, 293 bp, Zea Mays
cgacgctggggcaccccatccgggggctcaaaaggcggaagggtgcaaggcatgaggggatgatgaaggcatggccactgcccaggggatcgatccctcttttataggcagacctcctcgcttgcaccccttagcatcacgggcgaagtccccactgacatcctccagggttctccccccacgacacgggggctgggacccacatatcatacgagctgatccgaagcacgaagaaggcgaaccgccgcgcgcgaggcatgtaaccgtcccgcagttacaagcgctctcccatc

SEQ ID NO: 150414 - DNA, 1327 bp, Zea Mays
gaactattgaaagctggacatatagtgccaagtgtgagtccttttgcatcacctgtgttgctggtacagaagaaggatggaacctggaggttctgtattgattacagaaagctcaatgaaatgacaatcaagaataggttcccaatgcctttagtggacgagatattggatgagttagtgggaactcaatatttctctagtctggatatgacagcaggataccatcagattaggatgggattggaggatgagtacaaaacggctttcaaaacccaccatgggcactaccagttcagagtaatgccttttgggcttactaatgcccctgcaagttttcagtgtgctatgaactccattttggagccctatttgagaaagtttgtgatggtgtttatagatgatattctgatatacagtgcagatttgactcaacatttggaacacttaagattggtgttctctactttgagggctcaacagttttacctcaaaagaaagaagtgtgtctttgccaaatctgagttgcagtatttgggtcatattatatccaaggatggggtgtctactgacccagcaaagactcaggcgatggtggattggccagttccttcctcacttactgagttgagaggtttcctggggttgacaggttactataggaaatttgtcaggcattatggtgctattgccaagcccttgactactcttctccaagggaagaaaagatgggagtggacaaaagaagcacaacaagcttttgataagttgaagcaggctatgattcagaccccagtgttggccctaccagattttgagcttccttttgtggtggagactgatgcctgtgagaatgggattggggctgttttgatgcaacaaaacagacctgtggcttttttaagcaaggctttgggagttaagaatagtcagttgtccatttatgagaaggagttcttggctttaatgatggcagtggataggtggaggccatatcttcagagatctcagtttgtgataaagacggatcaccagtctctgacctttttgggtgaacaacaattgcagtctgaatggcaaaagaaggctatggctaagctgatgggtttgcaatttcagattgtctacaagaaaggaaaagagaatgtggtggcagatgccttgtccagagtgggaatggcgatggctatatccacagttacagagttgcaacctgtttggatccaagaggttactaattcctatgtaacggattcacaggctcaacaattgttacaaaagctcgcggtgcatagccccgatgaggcagggttctctttgcatcaaggag

SEQ ID NO: 150415 - DNA, 784 bp, Zea Mays
ctggacacatcgacatctaaaccctccacggttgaagatagattgactgcattatatgcttaccgcaaggcaaaagggctctgttacaagtgtgggctgcaatattcccgtggccaccgatgtgctgattcagtccaacttcatctcgttgaggaagtttggcaatcccttcaattatctgatgaagaggacagtcctaattcacccactgctgaagaggccaatatgatttccttgtcacaggctgccacagtgcgtgctgacgcccctaaaaccatcagatttctgggccatattgggggaatggaaattctgatactgctggactctgggagttctgtgtccttcatcagtcggcgagtggccgatcatcttccccattgtacaccagtgtccaaacccttgctcgtgcaagtggcaaatggtggacagttatcttgtgatagagagctgctcaatactacatggtacctcaatgaatatgagttttcttctactctgagggtgttggacctcaatcattatgacgtaatacttggtatggattggctctcacgttacagcccaatgtttattcactggtctgctaagtggctaattattccctataaaggttcttcaatcaagttatggggcatgggggctcctgatgttcaatgtgcagcaatagaagtctgtgctattgagactcttcctgacaaagatcaaactctggtgcaacagctacctcaggaacttcagcaattattgggcacttatgctgatttgtttgaggtccctcaag

SEQ ID NO: 150416 - DNA, 455 bp, Zea Mays
acccgagcatttcactagatcgggtagaggaatgcaatactctgagccaaccagagtcagattctgatgactggagagagccgatcatcgggtacaaaaaaatgaggaggaaccagatgacaaaaatgtagcagaacgcatcgcaaggcagtcagctcattatactctcattggggaaacactatacagaaggggcgcatcaggagtcctcatgaaatgcattctctcagctacagggaagcagctgctagaagaggtccatgctgagtaatgcgggatacacgccgcgtctaggaccctggttgggaaggtcttcaggtcggatttctactggccaacagcaaagagtgatgcagccaagttagtccagaggtgcgaagcctgccagtacttgtcaaaacagcagcatctaccagcgcagcaactgcaaaccatacctgtcacctggccattcg

SEQ ID NO: 150417 - DNA, 1616 bp, Zea Mays
cgcgtgagagaaagttggcgggtgatggctcataaaatcccggtgcttatctctagccgagggtgcatactattgttgctgattctgctggttttgctgaatctactgcacatatgcagtgagaccctgtagaagctgcatttgagctgcgatgaactattccatgttagggtttggtggtggtggtggtggtatctgttgaccacgctggttcctgttgttgttaggtcctgaacgagcgttcaccatctgattggttagaaagtgaactcttagagaagtggggagtaacaaagattctagaggggaataacttaagtttatgttttttatatgctcttatggccatccttccataagaccattgcactcaaacaaaaatccaactcaaacatatcaaccaacatcatcacatggttgttattattataaagataactttaaaagagtattcatcgtctgacgcgagaactaacttattacatcatagcttaaaaattcaaagtagcctagtgatggatccgggctccccatagcgaagtctcttacggggagtggacaacgccatggcgggaacctgggctttaggcggatcccatccttgaagtagggcttccagggctgcaatcctggcatgggcatcctctagctccaagtgcaccctagagagatccagggtggcactgtccaggtcggtgttgagaccggccactacaccagctagggtgttgaggcgatcctcaccagcttcacctggaacgatgttggtctggcttcctccactcagacgttgagtgagatgcctgaacctcgtgtcatgcaactgttgtcggtaggtgtggctgagagaccacagggtccgtctggcagcatcgctgaccgaagcagcgtaggtggatagcggtgtcagggactcatcagcagacagagtcctgaatcccctatcccctgcatcaatcaccctgacgtgaatgcgagtgatgtagtatcaagcccggggaggctcgctcactcgctttgtctcgtacaagggtcggacgtaggttcccaacgcatgcaacacgtcttgcagcaggttggggaagtgccccgtctcgaacattgatgtgtaatgttcggtgacaggaccaaaccccatgaagtagtcctgctggacgtaggtggcctcctcgttgacttgttcctcttcatcctcgtcctcgtcgtcatcctcatcatcgtcgtccctagagtcgtctgggtcatggcctccgggtgcaggagcttgaacggttggtgcaggcgatgccgaggttgatgacctagctgcgaaggctagtgactctgccaacggggtgggtgtcggcagcagttcctccgagttgtcttccattatgactccatgctccactcgaatgcgagggagatccaccggaacttcctcaacttccactgggtagacaggaatttgccgtggtggaggggcgtagctagtgttaacccgggtggtttgaagggtacgaaccatctacaagagaaagtgtcaactcagttgaattttaaagaggtaaggttgataaaaataattttataagaataaaattagcaagttttgaacaaactaggctttccatttc

SEQ ID NO: 150418 - DNA, 760 bp, Zea Mays
aaaaaaaatgtttcttcaggaactcagggacttaagagccctttgcgcaggcccttggctggtggctggggactggggactttaatttgatttatgaagctgaagataagaataacaccaatctgaatctttctttgatggggcgcttccgaagatttttgggtgattctgagctcaaagaaatcctgctgctaggccgtaagtacacctggtccaatgaaagggagaatccaactttggtccgtcttgatagagctttttgttgcatggaatgggaggagatattcccagatgcagctttctagagtacggcggctggggtttctgatcactgtcctttgattcttgggctgaaggtgtgcactagggggaacatcgcttccattttgaatgcttctggcctaaattagctggtttttacaatgctgtacagcagaattggtaggcaccagtagcttcttgtgcagttgagaggctctttctaaaactccaaaggcttagtaaggggctgcagaaatggagtcaaaggaaggtgggaaatgtcaaatttcagctggttgttgctaaggaaatattgcatcgcctcgaaattgccagagattctcggaacctgtcagatggagaagaatggttgagaaggaagttgaagcttcactgcctggggttggcatctttggagcgtactattgcgagaatgagatccagggtaaaatacttgaaagagggggatgctaatactggtttctttcatcagcatgct

SEQ ID NO: 150419 - DNA, 601 bp, Zea Mays
taggggctcttgctggagccagccttagactctctccagcaacgaactgtaaaacaacatgtactctaaatttagaggatattgtgctcctttatccgtccaataaggaaccctaaaaggcactctaaaatttagagtctctgtttgagccgctacatgtagagaaacattgttcgtcctctatcccgcaaccagagcgctacgacctacacctacgaacaacatgcatggtcctcgcctgcaacggctcgacgaagcttgaccgctgaggacgaccaccagagcggtaggcgctctgctgcggtggcgcagagtcgtttggcgatggcggcgccgtggagaagctcggcgacagctctgtggatctaagatggggaggacttctatccactggcgcggtgtcgctcggctatggacgcggagtcacttgtcggcggtgtggagctgggtagtggtgccctggatctttgctcgacggtgtggaggagctggcgcggtgccgcttggatgtggacacggagtcgctcgtcaaagtccctggacgagtggacgagtgttgtacgaagaacaaaaatccaatttcccattcgaatgtgtgaag

SEQ ID NO: 150420 - DNA, 968 bp, Zea Mays
gctagtagtactccacgtgcccatttgtttaagtaggtagtggaggctcctttgtttgcactttttgtcttgtaatgttggtaatttgtgcttgagacaaatgctctaattagaaacaattatctcttttttgtcaactaggatgaattcaaacactcatgtggaagctcttgaggatgatgtccttaatgctcatgaagatgagaggatgtttcctgagtttgttgaaaatggtcatgcacgtgggtatgacatgcttgcacaattcgaggataccgatgatgaagagagggaggagaaccttaccatgggtgtgcccgatgatgtagaagatgaggatagactaattgttgattgggatagagaaaatccaagtctagaagaaggcaatacttttccaaccatgagagattgcaggaatgcactcacaacctattgcatcaaaggggaatacgactttatcattgacaagagttcacccaagagatacactgtgcattgttggtttgagcgatgtaagtggaggatgcatgcctccactatgaggaatagcactattgttcaagttaaggtcaacccttttctgcacacatgcccaagtgcggaaagaaaagtgacgcagagggcagccaagagcaggtggtgctgtgatgcagtgttacagtgggtgatagaaaatccttctattggtccagccgcacttattaagaagattcatgagaagcataacattcaagtgccttacatgagggtcttctatgggaaacaaatggctcttgataaaatctatggtccatggaaggaaagttttcaactattgtactcatttaaatccgaagtggagaaggcttgtcctggaagtgttgtgcagattgacaagcacaaagtagtgtacaatatgaaaggtaaaactatggagaaggaatgctttcggagagtatttgtttcattcaaggcttgttggaagg

SEQ ID NO: 150421 - DNA, 407 bp, Zea Mays
tgtggaccaccatcagaggagttttggcctaatttcaagttatcccaagatagatcattggaagccttgaagcaaagtattgtcttaaactttagggtcatgaggatggccaacttctgtaacgggtagcctcctaattatctaaggtgaattatgaggaccaaggcctcattatgattcgtaaataaaaaaataggtgtgcaccctatttctgcttgcaattagcattttgatatagctataggtttgtaatacccaagttttatgttgtgacctttcattgttattgattcgttgggttatttgttttgtaaaatttgggacaacgttctgtttgttgtgtttacctcttagacacctaacaatgtgtttttctagctttgcaactttctcaccattcttgaatt

SEQ ID NO: 150422 - DNA, 553 bp, Zea Mays
ctggtgaccactagatccaaaatcaacggccatgattcaaaatctccctgatctaatcctagccataggttctacatctgacggctggcgtgtcttctcctatcccgagcaccccaggcggtggggctggccccacggccgtgcagcccggtgagctaccctgcctagcgattcaacgcactagagcccgacccgaaaggtgctacacaacactaagttcatggtgaaacaaagggtaggaccttacttgcaaacgtgcagcatggtgccccggcgtcgtgcatggtggctcggcggtgaaggaggacctttagagaagaatttcgatggctcaaaccaagctcaggatgttcacgccctcacacagcgtgccccagcgatgcaccctggccaccttgggactttaaacagcagtcatcgatctgatcgacgatggcggctcctgctggcttccccattggtttccgcccatgcacgagattgtggccgagacttgggatttcaggtctactctatcgcttttatatcctgggcagaggctataacagtcgag

SEQ ID NO: 150423 - DNA, 544 bp, Zea Mays
aacaatttctagcaattgtttttgtagtaaaaatggatttccatttcattttccctggattttctatcacctagactgggcgcataataacaaaggaacgcagggtctatttcataaacaatcctaagactcagaacgactggcgccaggactgcgggttgattccagtgtttgtcaaggtctctttagcaaataagccaacgaaggggtatctatggatccagaccgtccgatcacgttcctatggaccagatcaaccatatgaagagttatccctattctaatctgaaccgcacgctcacggatcaacgtcccacgatctttcttcccaaccgaagcgcccaggtagcgtttctcccttcggcgagctcgccggtgcagttacaaccaacgccgacgccccagaatccccaccgtcgagtcaacctaatacccccggagtcgggaaaacaaacaacgcggaagagagcgatctagtggatcacgacagggaaaagaaaaataccggcaacgacgtaatataatcctgcggtggcgctctgcc

SEQ ID NO: 150424 - DNA, 889 bp, Zea Mays
cagctccaaataccatcgtgtacagtgtgttcgtgtgaattttgcctccctccgatcggtgttctaacaacccagcaactcgcttaccagccgaccagccgccacaccacatttgcatacctctgagccccttccgtcgagcaccgagacccctgtcccagcctacctgggctccagccattcgaccgtcacccgccctagcatcaatgcctcgcccgctgggtcgtcgctcgcatcgctctcttgcctggcgacaccttttttagtgcagattgcagaggacatgtcgccttggctgtagaataatcgagtaagcgatagaagccactcgtatggagaggtagtaggaagaaatcatgaaacatttttcaccgtcagaattagatcgagcgaccaagaaaaaagaagacatggcattgcgaggtatcagctttgctttctcctttaatatatagaaatataaattggtgagttctatattgatgtactaccaaattttagaaatatatttctctttttcagtacaattattgttggatgtaaagaaaacattgagaaatctttatatgcgacacaattttttttcacagatttattgggttcaattgtgctctacatttcaaagctgagctgtgatgattggttgctaaacaaagtaggttgagatcttataaacagttataattaaattctttgctatgtgatatataaaagtcgtagcaacgtacgagcacttaactagtggacaataacgcttatgtagacatttgttttgcagccctcgcctttataaatcataaatggatctggaggaaaataacacttcgtgtacaccatttggagacctgataaacaccaccaatgaaggtaaccatttatctatatggat

SEQ ID NO: 150425 - DNA, 863 bp, Zea Mays
gtaggctacgcacgtcagtctctcggttagagaaagttctaaccaactctagctgatggtggtacctaccgctcatgagcataacttgctccaaaggataagtatttcctatttactgttaagagttgaaatattcaatgatggagaacaataaatatagaaagtgaaactaacatctttctccatcccaccagcacaccatggcttcttcccacatggttaactcatggatgtagtgcatgacaagtaatttctaattatcatacatactactgcaggaactgctgtgggacccataaccaggaattgtcaatcctaaatccagtttaacaatattctctttgcatgcaaactatatttactgctatgtgtcaccattacaataaataaatattacacaacagattgttgtacaccacagaaaccaccattgcgtaaagctaagactacaggtttatcgaacaaacatttttgagaagttttgtggcattgaaacatcctttccatgatgtcatcttccatgaatggtcaatctgattagatgaaaagggcacaaacagtgcctcccgagccaaataaaattaaacttgaacagctgtgctatcaataatgtgacattgacattgacatgtggggctcacttgattgtattattgttctggctgaagtagaaatgtcagtcataatttcttccagaaacagaatggtattggtattagagttcctgcagttattacaggatgccctagagagaaagttctagcagcaatgcattatgacttgtgccccgtgtctcactcctagcgttttgggggatcaaccacactactgcgccttttcacattagtataggtattaataaa

SEQ ID NO: 150426 - DNA, 395 bp, Zea Mays
agatagttcgtttgcatggaataccaaggactattgtgtcagacagaggagcaccgttcgtagcacgtttctaggagcaactgcaagaatcacttgggacccatgtaataagaagctcatcataccatcctcagacagatggtcagaaagaaagggtgaatcagattttggcggacatgttgagggcatgtgtgttgcactatgggaagaattgggacaagtgcctttccttggcagaattctcttataacaatagctaccagtccagcctaaagatggcaccgttcgaggccttgtatgggagaaggtgtagaacaccgctaaattggtcacaagctggagagagggaaatatttggacctgacctggtacttgaagccgaggagaaagtcaga

SEQ ID NO: 150427 - DNA, 274 bp, Zea Mays
tggcggctgagaaagggaatgtgtcatcatcattggaacaaaccaatgctctcatgagcaaaggaaaccaggcaggttgctgatggagaatggatctactttgcatcatcaaatcaaagagagaatagatggcaagaaccaacgaaccattattccacccacaccgccaatgtacggtgggtgacatacttccgcagcaggggataatcgtaccgaactagaattaaaccaaccaaacctgccctccgcatgcatttcaacagtactgtgctcc

SEQ ID NO: 150428 - DNA, 431 bp, Zea Mays
ggtgaccactatgccctgctaacagagcaatcggcttaaagtcggcaacgactcaagacggtgcaacatgctcgcgcttacttaactcggggtgaccactatgccctgctaacggagcaatcggcttaagtcggcaacgactcaagacggtgcaacatgctcgcgcttacttaactcggggtgaccactatgccctgctaacggagcaatcggcttaagtcagcaacgactcaagacgatgcaacatgctcgcgcttacttaactcggggtgaccactatgccctgctaacagagcaatcggcttaagtcggcaacgactcaagacggtgcaacatgctcgcgcttacttaactcggggtgaccactatgccctgctaacggagcaatcggcttaagtcggcaacgacttaagacggtgcgacatgctcgc

SEQ ID NO: 150429 - DNA, 408 bp, Zea Mays
cgtgtgggcagggctggcaggcaggaattgttgtcctcgccggctggggcgagtgtaggtgagggggagttgcgaagtctttttgagggtgaggagcttaggataatgttatttaactatagggagaagggaatcattccgaaggttgaaccgatgtaaggtgtgatgccctcgctgtaagtgtgttactatggtttgtatgaagaggctgcgcctgttgttggtctgtgcgtggatagtttcttggtgtagacttgtgcatggatgtaatgtgcttgcgtcttggcgcgcttgcacggatagtcttttgggagaagacttcgcttttgcgcacttgttgtgctagtccggctgcacccttaggcgacttttgcacggatagtcttttgggagaagacttcgcttttg

SEQ ID NO: 150430 - DNA, 483 bp, Zea Mays
gtgctattccggctgcaccgttaggcgacttttgctcggagtgtctttttaataaaaaacttcaattaacgcacttgttgtgctattccggctgcacccttaggtgacttttgctcggagtgcctttttaataaaagacttcgattaacgcacttgttgtgctattccggttgcacccttaggcaacttttgctcggagtgtctttttaataaaagacttcgattaacgcacttgttgtgctattccggctgcacccttaggcgacttttgcgtggattgtcacacgcgagggtagtctatgctacctgtcgcggtgacttcgaagtggtcgaatgtcgaagactgtcgaaacggtctttttcgacatgttgcgtctgagtttttgtttttgcgggggcttttgctggtatattacatggctccgcctcgttaaaaacctcacccccgggaggaaaagagtgcgggctagaataacattgttt

SEQ ID NO: 150431 - DNA, 1036 bp, Zea Mays
ctaggcctggagctttatcagcaggcatactccgaacaatgttgtcaatcacattagtggtgaacggtgagacaagggagccaaggccttcagtatgctgagaggattatgttggtatcagaaaatttgttcactgaataaaatatttcagacatcttctgttgcctagaatagttctggtactagagcaggacttgcctgatcacatgctaatccacataggcaaccgatacaaagtacattgcagatgaatataacaatcagtaaaaaataaagccatatgcccatatctaaagttaatgttaaaatatcagaaaggtgttttgtctcaaaaaactgatagagattagctggataaaaggactgaaaagcttcaattgcgcacatatgagcatgactttatggcaagtttacaggtgctatatggagaatctacctaagttggaagaacgtacagtctaatgcatcatatttaccaaatattaactaggagtagctcataacattaacggacatcatacattgatgtggaaaagaatatcacgcacttgacaaatagacgcctaagtggtatgtggcatctcaaacccttggtgtttgcacacatttcaataagacacttttaccatgttggtacacacaggaatagtttgcaatttcctgacaaactatgctgtgctatatgatatgcacttatgcagtaaggtttttggctatgactcaaatagaaaatattattttaacaaataaataacagtaaatttcgcatgcctacaggtgattgaccacagtatgagaactttaaagattaaaaatccattatcagaaagctgcagattgatggaacagtttatagttgaagatagtttggtcaattgaaccatatgttttaaatatttattcagtggcttatacccaaaaagtaggggttgcttttgaaaagctacccaatgtgaaaggagcttaaatgacacttgtgaagcctttgagtctttggcccacagcacaaggttagaaatggtgcaccttttctttc

SEQ ID NO: 150432 - DNA, 393 bp, Zea Mays
tattaggcaaggatctccgttgatagatggatccatctctattaggcaaaggatctccgttgatagatagatcgatctctataaaccctcggctatccttgcctataataaatgtaacaccatatctcctaatatatgaccaattagcctttctatcatgttatcagaagacggtcacgatcctatggccctagcttccgcctatccctaccctagccgccacgctccactctcctctcccaccggcgaacatccgatcgctcgtctcgatcgtcctagaccccctctccaccatctaccttcggtggcttgatcttgtcttcctcaccctcgagcattacaccctcaatagccatgtcctcaccgacaccgcctacacctcccctgtatgac

SEQ ID NO: 150433 - DNA, 1312 bp, Zea Mays
catcgtagcacttcttcctttaaaaagtaatgacatgaaacatgggtatacccatgcacataataaattaaaaggcatacatttcctaaaggctgtacctatactaaaaccttatccatttccagaaccattttccatgtgacttaagcaagcttaatgtcgtgttcccagtccatgacgccatgacaaggtaatccactggaaagctggccaggtggagtaggctgcttgagatcagaagaatacagtcggggaactatattggttgatactttcctacctcctcatgaatacatggttccttcaaatagcctcacgagtcacgactaacagatattcctaatgcaactaatcactaagaaagcaactaacctagcagattaagatcaagctgttgctgcatgacttggatgggacatccatgctgcttggctcacatgttgggcctagccagtcccatgattgctaactactctacaagattcagaaggttaaggttatctgatgttaaatgtgtattaagattaaccatcatgtgagcgcccataccaagttcgccttcattaaaacaatacactaaaattttactaacatgtactgaagaagttgtcgaccataatgatatcccccaagtgttgggctgttggcacatcccttttggctactaactgcactgaactttaaaaaaaataaaccgactaaaggtttcaaagttaaaatcctgctgggggtaccagcggacaagaaaagtgctgaattttgagttgtaccatagcatcacaacattttggttgtgcaagaagacagacaagaaaagagctaatgaaagaaaatctcaacaaagtgcgataagagagacaagagaaacaaaagaaagcagattgagttgatttttataattctgtgcgaatgaacttggcaaggtaagacatactaaggtgggcacttcagtcttaactgaaaaattgatatcaacctcgtgtatgcatttattatctccttagtgtcaatacatgatcattttgagagtgaggcttcaagtataaagcattgcctaaggctcctgttggcataaatctacaaaaccaatgcaatatctgtcaagcaaaactctcattaactactgctgagtcactcgttaaggcttatagaaagtatgaatttaagtttcaggatagatataagtttttctttcttccatcatcatgtaagcataaccacttaagctgagatcatttgcaagtagcatagggcgtacacttcacctagttcatatctcactacaactttacagaaactagcaacatatctc

SEQ ID NO: 150434 - DNA, 606 bp, Zea Mays
catgaagaaggccagtgcatttgttagaccgaaagacatcacagtgaactcatacaatccatacttggtaatgaatgccgtcttcgaaatgtctgaaggtcggatcctgagctgatgataacctgacctcagatctatcttggagaacacactggctcctctcaactggtcgaacaagtcttctattctgggcaacgggtacttgttcttgatggtgacctcatttagagctcgataatcgatacacatccttttggtgccatctttcttctccacaaataggacaggggcagcccaaggcgaggtgcttggccggatgtaacctttctctgacaactcatcaatctgcttcttaagctcaactaactctggtccgggtatcctgtaagctctcttaaagatgggagcgatgccaggaagaagctatatagcaaactcaacgttccgctctggtggcatacctggtaagtcctttggaaacacatctgggaattcggacacaaccttgatactctcaattgggtctgcttcactgctatcaacaaccatctgataacaacttcctttctttggctcaggcgggactaactcggtcaccacttcctc

SEQ ID NO: 150435 - DNA, 432 bp, Zea Mays
aagtgtgtcacacccagtaacgcagtacatgcatcaaatccggaaaaggtaaaaactcaagtgtttcttttcctcgcgcctcatgtctgttccggttctccaattcggctgtcccgatcgatcaactaggtgtttgttccattgtttgtctcatgcggaaggccaaacactaacaagtggtaccgtcatgctgcagtggtgaagtgtggattcatggacatgcactggtgcatgtgtgaatgtgcccgccggaaatcaaccaccatacggcccgtgatacctatactgatatgatatgcatggctgtagggtgcaggcctacagactccagcatttagcaacaagcaaataagggtacactggcacaaggcgacaactcagcttcaggtagtttgttttattcttttccttaaatctaaatcagaagacgat

SEQ ID NO: 150436 - DNA, 428 bp, Zea Mays
catgagttccctatttccgtgccatccatttgagtaagacgatatgatccaggccgagtgacttctgctactatgaatggtccttcccatagtggcaacaatttgtgtcgtccctctcccattagaatttggcagaggacaagatctcccactacgaaggatcgatgtcgtatagccctatcatgatagcgcctcagagtctgttggtacctggctgactgaatcactgtattcaatcgttcttcttctaatatatcaacatcctccagtctagtagcttcagcttcggctatgttttcgaagatcaatcttggcgccccaaacttgagatcagcaggtacactgcctctgaaccatagaccataaagaaaggagtgtttccgtgcaaagctcggctaggttgagttcttaggctccaaaccacatac

SEQ ID NO: 150437 - DNA, 530 bp, Zea Mays
cagacgtccagaccagcgaggagagaccagaccagcgaggcgagacctggcaggccggggatcaccgcaaaatggcagcgcaggctcgtcgtcgccggggccgcgtcgtgtaccggaggcgcagagggccgttggcgctggcgagcccgggccgggactggtcccacccctacctcctcctcacctcgacccccttctcgttccgtgtcgccttctccgccgtggccgcgacagctgccgcgaattaattattcgcccaccattaaaacacctccgcccccttcgcgacctcctccagtcctccccaactcctctccatatctccacccttcctcagttcctctctcgtctctcatctcatccactcccgtcccagaatctccgtacacgcttcctcctcgccgtcgtgccaccccaccaaaccacgcctgaactgccatttcccccgttttttcccctctcgcgcaaggcgtaaccggtgcgtcgtggggggtagtttcggccgagggaagcgcggcgcgggaccgggc

SEQ ID NO: 150438 - DNA, 416 bp, Zea Mays
attctttttaatggctttgccagccatctcacggccacccttcatccacacatcagagtagaatttgccgcccaaggtagaagccttaactgaagggtccttagtattgtgagcttagagaataaattctggctaggccgcggccttggcatgttcacacccagccttttctagaatcgccgcaacccctcggacaccggcgaaggcacaaaaatctccacggtcactgagtacttcttcaaaagcttcaacctcttcgccgatccattgaataactcctttgggatcacctcggataaatctttgctccaatgagtatgcacccacctttgcaaagctatctttaagtttcttctcgcaattcatggatacttcgtagcatttttctttggaatcccgaagttgttcaatatttt

SEQ ID NO: 150439 - DNA, 542 bp, Zea Mays
ttagttttacatgtacatcgctataatatcgggacggtttcggaaataatggaaataccctggaaacgtggatgcggttacttgtatagtatccgtgatttccttacatccaaaaaacaccacaaagcctgcataactatttggaggtggagatggctggctctggagaatcgccggcgatggtaggagatggcgttcgtcttgatccagagacagagggagtagttgatggtaactcactggtcacaccacctcctactctactgggtcctgtaatcgacgagatgagcatatgggaagaaggagaacaaagggttcgacctccgatgtccaatattagctccagggagatggatacgcctcaaatactgcattcacatgtaagtccaattgttgtatttgattcttgattgattagattgttatgatcatattccatggtacaaacaacaatgttaatgaatttgcagaaaaaaacattgatccaactatagtgccaacggtagggatgactttcaaggatgttgatgatgcatataaat

SEQ ID NO: 150440 - DNA, 476 bp, Zea Mays
tcctcggacatcttttggtgctttccagtccaagatagttgttaccttctttgggtctacagccaatccctcccggtttataatatgacccaagaacaggacttcactaatccagaagtcgcatttgctaagcttggcatacagatgacaatctcgtagtctctgaagtacctttgtcaaatgctcctcatgctcttgctcattctgggaatatatgagaatgtcatcaataaacatcaccacgaacttgttgaggtagtccatgaacacgctgttcgtcaagtacataaagtgggctggcgcattcgtcaagccgaatgtcataaccgtgaactcatatagtccatacttggtgatgaatgctgtgttcggtatatccgaaggttggattctaagctgatggtaacctgacctcagatctatcttcaagaacacactggctcctctcaactgatcgaataaatcttcaattctgg

SEQ ID NO: 150441 - DNA, 623 bp, Zea Mays
aacggtgacatcttcaaactggcctcgtagctattattataagagaactccgcatatggtaagctcttatcccaacttccaccatgttaaagagcacaagctcttaacatatcctccatcacttggttagtcctctgtgtctgcccatcagtttggggatggtaggccgaactaaaattcaactgtatatccaagctctcatgcaacctcttccaaaaccaagaagtaaattgtgatcctcggtccgacacgatcttcttaggcactccatgtagacaaactatccgagtcatatacaattatgctagcttggctcccgtgtaattagtccttaccggtatgaaatgagccacttttgtcaatctgtctacaatcacccaaatagagtcatatccagcaggggtgaggggtagtccaacaatgaaatccatgccaatttcttcccatttccactcaggtatcttaagcgggtgcaatagtccagctggtctttgatgttcggctttgaccctttgacacacatcacacttagccacgtgtgcagcaacatctctcttcaatccataccaccagtatttctgcttcaaatcctgatacatcttagtgctacaagtgtggataga

SEQ ID NO: 150442 - DNA, 352 bp, Zea Mays
cgggaagatgaactagtaaaaggaagtctagtatgacgacctaattaacaagcatgacaaaaatcgggagtgctgtgaggacaacttattgcggtggtgttgtgaagtttggtgaggacatcagggctaggatgtccaagacgtcggttccacgtggaagcggagatagccgtcagagcgtgagatggagtggtagacgtgtatgggaaccgaatggtgtagaggggaccatcactattgcacctaatgatctctctccgagaggtgaggtccttcatagaaacaccaaaagggtcaaattccatggaacaagcattgtcagtagtaaagcgacgaatggataggagatttt

SEQ ID NO: 150443 - DNA, 543 bp, Zea Mays
gttttgtactataaactttttatacaattgggccaattattgatcaaagataataaagttcaatgtttaaaatacactcatgtctcatgtttcgatattgttttgaatgaaatgcaggaactctgcatatccattaatggggaaagagtttagaaaacaagaaacaaggtccgaggactggatacaacatcgcctaacacacacggtgggaggaacatttccagcagacccacatagagcaggtagttgctaaggggctgcaacaacccaattataaggtagatatagcccccctaaaacttaaaacatcctctttgatcctcaaggctacccggatagggtttagagagctatttttgaagatcctctggtttctctccttccataggttccatagagtgtataccacaatgtcgttgaactcacgcttttgggtttttgggagtggggatgacgctgcttcccaccggtccttaatgttagaggagtgagccaagtctgcctaggcacagagggtcatacctttccaagctagaatataat

SEQ ID NO: 150444 - DNA, 399 bp, Zea Mays
gcaacggctagggttcccgagcggcggaaatcaaattggaccaagcccgggcattacccctaacctaattttaccattgactaactaataagctctggccacggtggccgtgaccatcgcagcaagttagttgtgttctcggcgaccagagggcccctagtccaattggatggtccagcaagcaccgcagataggtgagagagcttaaacaagggagcagaggggaagagctaaccggagttgggctgaccacggtggggttgagttcacggtgttttagaaccggattggggagaatccgaaattcgtgcttgctagtgagggatttgagatgcaggtgggtgcagtaggtgcttggatacatggcggagctgggggcacggtcaatttatagagccc

SEQ ID NO: 150445 - DNA, 673 bp, Zea Mays
tacgattttccaaagttttatgttcttggacaagttaaacataggctaaaccaattaagtgctcgatttcgaaaacatgttacataacaaaataaggttactaggttgtagctagtgttaatacgaacctaatgcaactggaacaggttaaatcagagataaaacggagaagttatgattttttttaagcttctaggtatttttacatttattttacacctaaaaacatttattaaacttttttctataattcctggatttaaatggatgtcgggtatacaaaatcttgaaagctcagggttcgattcatgaatttcaggaccttagtgttactatctttgagctatagtggacaacgggttgattccctggaaatccagggctcttctacaaaatggcgcagccgaaggggtatggtcgatcctggaccgaccaatctaccaacaatggcccagattagattgtatttataatgaaccggtacgttctaagaaccgtaggatcagcgatgagcgaccaggattgtatgccaatcacaacgctcgaatcaaggatctacggtgctgagttaaagcgacggtagtatggggtctctaatctggttcgcccatctaagaatggatggctcacaacacctcgagccgaaccggtatccctttctaatcatggccac

SEQ ID NO: 150446 - DNA, 282 bp, Zea Mays
ccccactccatcctccaggcagccatctttgtccacctctgcgagatgttcgtgggggtggccccctgcacctccctcttccgccatttcttcgtgttggtgaagtctgggaaggctaaggaccatctcagcacctactactttcagacaaggtcagattcagccgtggcctacatccccaccctcggcggcgcaaggtgggaaaactggcgcaacgactgggtgatcgccagcgccaaggccaacgaccgcctcgtcctggtgaaggggattactggtgag

SEQ ID NO: 150447 - DNA, 349 bp, Zea Mays
tattgtaatgcttccgctctaccctcgacttcgaagctacaaaagaagcttagtgattatagcatgcaatgtaaatggtgcatggtcatttctcattaactctttaatttagttctcccaggcccatgtttcaaagtactaaatctaagaaaaacactacacatgttcttaaagaacatgcaacaagcatcaatattcttcgcagaatttaaataaatagcattcaaggagtgaaattattgtaatatctatgctcctgtctttcataatgctctaaaatggataaacatagcgaaatggagggaatactaaccaaacaacagatgactctgcacctcaagaaatacac

SEQ ID NO: 150448 - DNA, 562 bp, Zea Mays
atggccattgattttcctcaatgggctttggaggcaattgataaaattagaaagggttttctttggaaaggccgcaaagaagtcaggggaggacattgtctggttgcctagggaagggtgtgcagacccctccatttgggagggttaggtatttctagtttaaaggaactttgctgggcccttcgtatgagatggttatggcttcataaaactgatccagaaaaaccctgggcaaacctccctatccaagttccaaaaaaggcaggagctttcttctccactgttttggtctctgaggttggaaatggagcaaacactttgttttggacagataaatggatcttgggatagaatttgtgtagtctgacgcctagattatttgccatcattcctaaaaggattgcaaatagaagaactgtgcttgaggctctttccaatagaaaatggatatctgatataaagggtgctctgtctgtgggagttctagtggattatttgaatctttgggagcttctttcagaaatagtgttgcagcctgaagtggaagataagcatattttta

SEQ ID NO: 150449 - DNA, 379 bp, Zea Mays
ctcctctcctcttggtgagcagcctcctcccctcctctgcgttctctctctctgtgtttctctaggcagtgcccccccttttgtatcaaattcaaatcttgtgaattcctgtaaaatccagtgcaaccaagttgtgaaatgtgttcccttgtgtccattgagtgtccttgcaggttcctagctccttcgggagggttttcccacctcaaatagtcgtttcaccgaaaccctagaactccgcacgtcacgtgctcggtgaaatgcccaaaccagccaaaaatgctctaattgaacccaaattttttaggcaccttcacaacacttccagtaacacttttgccaattttcacgccaatccgagattccaggccttaatttt

SEQ ID NO: 150450 - DNA, 336 bp, Zea Mays
ccaactgctttacccggattcgcaaaaaattgaagggtgctttggggtgattcattttcgacatgaagtcgcactgaaggcgcaaacacattgttggctcaagcgaaatacctggttgagaattgagatatctccttaagagcaaaagcctccgcaatacacccttcgactctagccttgttgcgaacagacgcctgagctttttcaacgccctttctataggatacatccacctgaattgcactggtccgcctaccaaagcttcccaaggcaaatgcacaattagatgttgcatcagattgaataatcctagcgggaaaaccttttcaaatttac

SEQ ID NO: 150451 - DNA, 1190 bp, Zea Mays
ggagtccagaccacatcaagaaggtggtgccctgggcgctgctaggcagactactacagccaccaatgctaacgtggtggtaccatccgctggacctgcaatcgcacaggatcaaccggccaaggctgaggcaattttgcagcaggctttagcggcgatccaggaattaaaggcggacaagggtggtagcagtggatcggcacagggtactgagggcctcaaggggccgcaggaccaagtggagagcgcagcccgggaaggtgagatgaaaaacaaggacgtcgttcaggaggaaggtatgaaaattcagagcaaggcacactgtcatagatgttacgcaaagggccatgtgatgaacgactgtgtggcgaagttgtattgtgaagtgtgtgacgtcgattcacacatcaagcaacggtgccctgttttcaatgcgccaaaagtgcatgctgtcccggctggttttgcgatcagcaagggtgggttttttcacatccctaccaataagaaattggtcaaacagaagggggactcgaaagctgctttgatccttgtctctgatggtgcattatctctggacaatgtggtatgtgaacttaagaggctccttccgcacctagcaccgtggaaagtggatcaaattgatcaaggaaccttcaaaaccatatttcagtcctcctcggaattgaatagaatggttgaatggggtccggtcagggctaaaacgcagaaggcgactcttgagtttaaggtatgctcatctggaggtcgtgtcaaagctaagctggttgatacttggattcagtttaatgggttgccggttgaattttgcacggtgcctcacatctggggtgttggctcgaccctgggggttgcatccgatgttgatatggcgttttacagacagcatggcatatgtaggatgcaggtcagtgtgatcgatccacaggcaattccctgtgcggtggatgtcgaaatagccaaggtcatctacgaggtacacttgtgggtggaaaatggcgcagggacagcggtcccaatggcggttgatgatgattctttctttgaagatgatgctgatagtaaaagtgaggataaaggtcctgataggaacaacaaagatggtatcaacagggaggaaaatgctagtgatcagacccttaacaagctggccggtggggataataccg

SEQ ID NO: 150452 - DNA, 915 bp, Zea Mays
agaggagaggggacaactgcactgccactgtgtggccaccataggcccaaccagcgcaggtctggcctagagatcggtggatctagaatctagagattggccactgggaggagcaccttctcaaaccatggtagaagagcttgatagagtcgatgagcacgaggcagaggagaatgacatgccattgccttccttgtgaagtcgcgctctagtgacggtgaggagaatcaggtgagaaagaaggtgtgttgctagggttggttccgcccgtgttgcccatgtggggcgacgcgaaggagactagcgatggatactaactcgacatggtcgattaggtcatctaggcacatggacaactaaatgttcgactagctggctagaccaactaatcgatgactaatagtgattagtcatatgatcggtggtcatacgactagcctcgatcatacgatcagataatattgatgaagatatcatgttaggctataggtttgaagaaagacagcaaaaaaaccttaaaaagttgatgaaagaaaatacaagtggaattaggaagttcaattgctcacatatttatcaaatgcctttgaactttctaatatgataaatgaacgacaatgctaagttgaacttctgtgggttagtaatgttgtttctcacactagtaaaacatcccttcattaagtacataaaactaggagaattaaatatcttacttgaagccaatcagccaccgcagcgatgttgggcatagtagcactcataccaattatctgcaacccatgacttgcaatcttcccactgctagaacttgaaacttctccgctacatgactgtaaagtcccttcaccagcagcatatcgaagctttgtcaacatcagctctaaaagatatcctctatgttggtcaccaacc

SEQ ID NO: 150453 - DNA, 325 bp, Zea Mays
ataatctaacacagaattcagcacagagtctaatacataatctaacataaaacagaattcagcacatagtctaatacataattcagtcaagactgctaatacagaattcatccatccatcaactcatcgatgtttagaggttgagtcattttcttcgttatttttttgaccaacatcttcgccggtgagcagatctggcggcgctcgctggagagctgggcgcagagaaaaacagaataaactccaacagagaattgcgacgcacagaagagaaggaagagttcacgggaaagacagcggcacagccgaatcgagaatcgcgacg

SEQ ID NO: 150454 - DNA, 729 bp, Zea Mays
aacagatcaatttgaccggtgtaactgggaaattgagtcatcacacaaaagcatctgaggtagttaaggtggtcagtgataaagttttgattcgttgcatcctgggtgatttttttttgtacttacgacctgtttctctcgtttatccatcttgtcaacctcttaggctcttactatagtatgtagttggtggcttggtgctattcccatgccaaagttatagccatgatataacagctaataaatattatgcataattccgatgctttcagagtctgaatcaattagttgatatattggaatacctttttgttatggttgcctcaattctttgacacatattttcatgttgctgttgtcaatcccttggagatgcttgctcttgcaaaagaccaagtaatgaaaaaatgctgggaacccagcctccaaaaagttgattcctatgatcgtttctgtctctaatatagaccggattgatgccttttccagcagagtattttacattcatgagttggccagattgccatgtctgaggtgctgttgatccttgttattatctgactgaagatttagattttgaggtagaaataaaaggtttggcatccacaactcgttcccagtatattacttgctactgcagtgccaggccacggagatgctctattattgttgttcatgatgcaggttagtcgtgatgtggatttcttcgattaatcctgaatactaaat

SEQ ID NO: 150455 - DNA, 1586 bp, Zea Mays
gtcgtgcccgcgtcggccaacttgagtcgcgcccgcgtctgccgccctaagctccacccgcctcgacgtcgcgcacgcgctgccactggtccttagtgccgcaccaccagggcttaaacaaagagtgtcatgtcgtcggtcctaagtgcctctctctcttctcttgtctaatctctcctttattcttctcgcgcatcaaaggcaatacacgtcaaaaggggcaagcctcgcgcccgtatttttttatgcttaaggcgcctgctaggtgctcgaaggggatgccttgcacgcctattgcgctaaggcccaaggcggacgccctatcaatctaggtcaaggcggtgccgacgcctaacattttttacgcctgcacgcataggcgacgccttttaaaccatggtcgtcccacttggtgtagtccagagaggtagctgtactgatcaccactaattcatcaagaagtagatgacaaagcgtcaaccatcaccaggaaggagaggacgaaacgagcagttgtgccgcttgcggactcccccaaaatgtgattgtcttcactcgagcaggtgaactctcggacgacactcgtttcagagtcttactctctcaatacttgtgcgcgtaaggattcaaatgaggagaacttggccaacaacagaactgaagaaaatgaatgatgataggatgaaacttttatcttcgagccagaagaaccgagtgggcgtgggagaaccgagcgggcgcaggagatcaagagacgggaaattacttctgtcatcatatgagaaactctcgtaacttccggagttacaaacgaagatttctagaaattcctttcgtcatcatacgtgaaactcccgaaactccgagagccacgaacgaaaattcctctgcatacagtaactctctgagtggcaaaacatcgccacgccgcatgcccgcgccatgcctcgacttggctcaacgacgacaacacgtatgtgtcatgccttcatccttttctcaacctctccatggagacaaatgaagtccaacactccaaccgtacaagttgagttaacattcaatgagaataccaaatggtactaaaccataacacaaactttatttaatacaggctttaggattatgtacttatttatatgggccaagcccacattataacttacattcaccaccaaaatctaggatacatattaaaaactatattttttgaactttaaccaggagcactggtagtcattttaagaaccctgtggacacctatgctgaccgcacgctcagacatagatgagtctgtccaagtgatcttggaatgcgcctacgaagcaacacacatgctctgttcccctaggaaataaatcccaatgcaacaccagtgttcgttctcgacgagaatcgaacgcgggtgggtagcgctccacccgagagtttttaccgtcgagccagaggctcgaccgccacatattaaaaaatctcaaagccactgttcttacatataccaggttttagtggagactgctaagttgaacactcgactataacaagggtaacaattattcacaactgaacaagggactatgccttga

SEQ ID NO: 150456 - DNA, 933 bp, Zea Mays
gtcgcaaggagctgaggctagagaagctaacaacgaattggcttccatattgagggccaccaagctatcaacttgcataggtgtggtttggtttccattattgttggtcttcgtcacaaaagaattattaatgtttctctgcttgttagcagcatggtcggtattttcctttcttcggtcagcatcctcatttcctccattgtctcgcccactatttggggtaggattaggggttatcgccggtataaaatcttgtgactccggtgtgaatgtaatatcatatccaacattgtgaaacacaacatctgttgttagtggtagttggcccttgtctatgacacccactaataaacggataacccccttccttctgtaggtcagcatatccacttccaaagttgttccaatcatggttccaattgcccaaaaccccagataatgtcgccaagcatggggaacatctgttacgtgtatccaaatttcatcgaggtgatatgcaggcttaacatctccatgcatctaccatttactgatagtgattgtaactccgctcttcaaattatatcctatatcggccatccgcagaagctcttcttcagatgggaaaactgctaggaaggaaccatctccctgaggaagagcctctcaattccagtccacccttgaaagttttgcaagttccgcttggactgccataccttcaagatcacctccatccactttgatcaaagttgttggggctggttctggtacttcaatcttgtaatcgaactcagggattctaaagaaacaaagttcattttttgcataccccatcatagctgtcgtcagttttggcatcttgaggattgggcacttttttgtgagatgtaagtccttcttgttgcaaatgacacaatcgaggtctgcaacacagttttctgtcggatgtcc

SEQ ID NO: 150457 - DNA, 392 bp, Zea Mays
cagtctttcatttggtatttcagtatcctgcacagacttaaccgttgtccacgttcatcaacgactaatcacctcggctatatatacacgcgagccccggacacgccgcctcgcttactcatctcaacttctccaccagtcgtccagtagtcaagtccaccagccaacagctcgtcggctgcctcgctcctgctctgcactgcactggtcgccgctcgagctacccggctgtagcaactagcaagattcattgggtccgtgaacgtgcagacgcagcacactagactgtctagacacattatcagattcgttctgcagtacaataatgggagcctgcaactcgtgcgaggccacggcggtggcggcggcgccggggccggcgacggcggagg

SEQ ID NO: 150458 - DNA, 580 bp, Zea Mays
ctttcctgctgcgcatatcgcatggcgaagaatgtagccataaatgctgcgccgagggccacaaccggaattgaatgcggaactcggcagctcgctcgcgcgcgcctactctcgccaccaacaagtgggagtaaaagcggaaaggaggaggatgccgaaacttaataaaagcgaggaaggagaccactagctagcttcattgatcagctcatatatgctgctacggcgcccctcacgcgtccatcagcgtttactgcgggtctgcagcagctagccttcgattcgctgcctgctcccaaattgtgcaagggagcatcaaatgtgttacggacccgagcagtgccagtgacattgcagcagtgaagctggtcgcccagcattaacttagtacgtagtagagagagagagaagatgttgagaagcaaatggggctggttatggagagacggacggatcaagaacaggtcacagtactcctagttactactctcctgccacactccggtgacgctggaaagcgcatgcgccagtgcgccgctgctagccgcttggcatgtggtcaaggcagtggcaggctaag

SEQ ID NO: 150459 - DNA, 312 bp, Zea Mays
gttcagccgttcagcttttcatttgctgttcacgtcttcaggatgtctattttcgttagatgttttacggagttattaatcgatgtggttcagcttttcatttgttgtttacgccttccagatgtttatttatgctagatgtttcatgaaattattaatccatgatgtgacactcaatcgagtgagagctgcgttgcgggagtggtttcggttctgattttcccttgtgatctactgctacggagtataggttcatttcgaggttctagtctacggctgtttcatggctcagtggatgttcctcatcttgtg

SEQ ID NO: 150460 - DNA, 620 bp, Zea Mays
caggggcctaaatcacattttccctaagactcagtattcaccacacaggatggcgggttagttttaccattccccgggggctctttagcaaaaagtcatggccgaacgggtatccgcgaattcaggccgcgcgatcagagatcaagggtccagatcgcccagctgaatcggtatcctcaggatataatcccatccatccaacccctatcggacgacgcgcagctatccgcgaagggagtatgccatcaagtcgatcacaatggttcactcgaaatctagcggctggcatcccccaaaatcccagtcgtccaacccgaaatcactggtcaagagaccatcttcctcccatgcccatctggacgcgacgagatcaagcgaccgaggtggggcggccctggcgaggtcccgcctggcgatcccccatacaaatccacccaatgtctacattttcacgatgcgggtatcctggcgaaactggagggtgagcttaccgtagttcagcagcggcagtcgttgctggcggcgatggacaaggaccaggcggcgagactcttgctccggcgagaaattaactggtctccggctgttcttctaaccccaatttccccggtcgcgatccg

SEQ ID NO: 150461 - DNA, 495 bp, Zea Mays
gcagctggaacatggagcaaagatgctgaagaagatagctctgcattttcatcagcaaggaaggatggatgggagagacaacaggttggcaatatgagctcgaagtctggtgaagaatgcaggaggctctgacgtctggattgcagcctgtgtagtggtaccaccaatatgggcgtgtaataagaatagtatcgttactagtagttaagtagttaactgtgtttacgtttctggtgatgtgagccggttgggcctgaattgtctggtacagctgtgttggtgtggttgtggtgccggttgggtgaaccctctgcgttcatcccagtcccaactgggcaatttcctaggatggctcagttttattccacaaactcttgtaattccgttgctgatgagtaatgaaattcggttcacccgtggtggaaaaggaatgaaccattgattctgctaaaatatgttttatcagtcatctgctacaaaaagagttgcatcata

SEQ ID NO: 150462 - DNA, 284 bp, Zea Mays
ggcagatgaaacgaaagaaaaaccatgattttcacactaatgaattatctaaccaatcaacatcatgttagggaggcacttacttttcagatacttcgatgtggcatggtaagctttcaagagctattatcatctaaagtaatcaacaaacatgatacagttaaatataaatataaaccatctaaattaataacactaatgtgagctccctgtgattcaagttgttagttaaatcaatctaggtccatctcaaaagtttccggtccacggccatcccgtcctcg

SEQ ID NO: 150463 - DNA, 509 bp, Zea Mays
ggagataatttcttaccggaggagaaggctcgccggaggaagactgcgctggtgggccgtgctggctggccgcgccacaccggggatcggatgccgaggccggcggcctccatggccgcgcaccaaggatgagggaggagcagagacgctaggcgcaggggcagacgggctaggcggcgtgcttcaccggcggctgggcagcagcggcgaggaccgtgggggagttgctttgggaggacggtcagatgccgaagccgtcggcacgtctggcagcggaagaagcggagctgagcggttataggagagatgagatattgctgacgcacagggcccatgacgcattgctacaggcgactaacagacggggctgtagccaggtcgtggctgggcacagcccctgcatgctcccgcgactagcatgctcagcggatcgcttgggctagtggaaaaagaaaaaatgtttttctcattttttatttcttctttctttatatgtatacataatatat

SEQ ID NO: 150464 - DNA, 506 bp, Zea Mays
taggaggaggatgtagtcgcctgggagaggtgattccagcagctgccttctctgggcggaggggaggaggacctgctcaccaaggatggttgagaaaattgcagtagggcaaaaggaggaggatgtggtcacctgggaggggagatgcttgctgctgcctcctacgggcagaggggagaggatcttggtcgccggagagattagggatgggttctcccgttgctgctgctatgaatttcgaatctgtgcaatggaggagatcgagagaggaaggggaggagatcggggcctaatgaatctgtgtataagcagttaccaaatatgcttcgtgtgagggaaaccaagcctaggaatctattaatttttcgtgccttgtttcggttagttttggtcgtcggtcactcttcgtacatatggccattatacatcattagcgaccagtcttatttgaaaacaacgatcacatttttttctggtcgtcggttcatttggatgtggcgatgttg

SEQ ID NO: 150465 - DNA, 465 bp, Zea Mays
gaaggcaaattgattggcccgaggcgacacatacacgatggataaggggccggactaaaccatgccaggccacgagatgtctaatagatctgaaccatttgaacatgtatacggtacatcaatgacgcgcccccacaaacatacaacagcgtgatgaagacgatgatcgtgcaaatgggactaccagatgtcaacgtgatagaagtgatcgttaggttcgatgaggaaaggagcaccgtcatagataccaatcgtggcgttgtcgcctttcacgtctgcaatgcatggagtcacgaggcgagcaagaccctacagccaccatcgtcaccctctaatgcattaaccgtttggtcgatcccactatccaatattgtctgttcgatgtgtgttcgtttcagaccctttgccaattaaccctcaaacctctttcatcgacaaaccatctcgaactcggaccaagtttct

SEQ ID NO: 150466 - DNA, 399 bp, Zea Mays
ggcgcaatgggccatatcctactcgtactggcccattgacaaacttgcgcagaactgttctgcctggcggggcccaccgttcggtcggcttgtgcgcttgtcgttggcttgacctggagaaactgccatctggggccggaatgtcagaatcgcccccaaccccgcatggacgcaaacagaatcgaccggctccctcctgtcgcgcgactttgcgggctcggccaacggatccacggccgcttcaccacctccggccgaggtcttctctaagctgccgaccaaatcctcctcttctctgtgcggctgggtggggaatcccctccttcctcgccctcatccctatctcctctccgctttgtgcactggtggttgaagggacggactccgcgcagaccttgg

SEQ ID NO: 150467 - DNA, 645 bp, Zea Mays
tgccgagtatcagaatgttctaagtatgtgacactcgacaatccacatatttgccgagtgtcgtgttttgccgagtacgacactaaacaaacaatgtttttgccgtgtgcccgacattttacactccgcaaatgttttaacactcgacaaaaatgtttttttgatgtggtaacacatgattttgcctgctagctagggatcagatggacagacaggtcatggagcacttgtgcatgcactgggaatggagacggtttgcttgcccgcaataatctgcgaaaggcccaaagtcacatgccatccatcgagctccagctccagctggatcagaaccagatcctgctgtgacctcgaccgacctgaacagtgcagtatgctggggcaggggggcattagaaacttgaaactgaaagacgggcccggccgttctctgaatctccggcccaaacgcacttgcagggactttccatagaatcccccacccacccacacacacacaaaaaacccagagctagtgataggagactgtttaatttgggcattatatatattgatatgttaaaacgtttgaactttatttcagggcactatgttcctcagctatcccagcttgtgtacaggaggaacatcggtgtagagtgtaga

SEQ ID NO: 150468 - DNA, 387 bp, Zea Mays
catcattgatggggtggtaatattccatgaaacagtccatgagttacaccgaaagaaactaaatggagtgatttttaaaattgattttgagaaagcttatgacaaagtgaaatggtccttccttcacaggataaaaggtttatcagaagtttggcgcacatggatacatagtcttttgtcactagaggtagcgtggccattaaagtgaatgacgatgttggccattatttccaaacaaaaaaggactaagacaaggcgagccactattaccaatattgtttaatcttgtggctgatatgttggctgtcttgatcgaacacacaaaagtagacgagcaaatagtggggatactcccacatttggtggatggaggcctctcgatcctcc

SEQ ID NO: 150469 - DNA, 390 bp, Zea Mays
tttctgttacagcccttgctaatctcatggacctttgtgacttactcgaggggatggttctgcagccggatgttcctgatgtgcatacttggaggttcagtgaatcgggtgaatactcggctagttcagcttacagggctttgctccttggctctgttagctttgagcctgctgaacgcatttggaaatcctgggctccaggaaagtgtaaattcttcctctggcttgtggagcacgatagatattggacggctgacagacttgctaagcgtggcctggatcacccagagtcttgccctttatgcgaccagatggaagaaactatcaaccatttgctggttcagtgcagttttgcaaaacagttttggttcagccttctgtggtcgggtg

SEQ ID NO: 150470 - DNA, 539 bp, Zea Mays
ccctcaagccaacccgagccacgccgtccgccaggcgcggcggcgatctcaccggcgccaatcgagctgccccccgtgaccaatacgtgccccgaatggttcccacccctagagacaacccaggcgaacacataggcgacatccatacctcgatttatggcgacaaccgtgcggttcatggcgcagggcggatccgcggcaaaactggtgcgacgtcgagaaattgctagagcatcgtcgtccaattgccaaattagtagtaggggcagcctccatgtatctccatgattcttcagagacacccgccgaggacccattgatgctcaccagcaagaacgacgacggcggcacaagctcatctctctctcccaatcgcgagctcactgttggcgctggttcgacacgacgagagggctaggatgcgcgtcggtatttatacacagtggggagggtccaagtggtcgcaacaactccgagatttccccgtgcttcgcgattctggtgccggattctgcgcattaagcgtgcctctgttgttc

SEQ ID NO: 150471 - DNA, 631 bp, Zea Mays
atgaactactccggcgccaccataccagagagctgaagaatcggcgccgtgtttacagaaatcacgtagggagagagaacagagagtgggatgttggccgctggcgccaatccacatgttcactgccgtcggggtctcaacacagggcttgggggattgctggggcatcccaatagtaccggtgaccttgctaccctcagagctagagctgtcgcgccgcaatttctcgccggcgccagatctccatctcagaccggcataccaccgtggcgggtgtctacgcagcataaaatccggtgagatctcgcccatagtattcgttcttatctcagcatcatttagcacctatcaatttttgatttgcgcgctgtagcgtcggggtaagctgctccggcatgggcgccactggacctggtgctcgtcatcgtttgtggaaggcaggggtagaagaagaggtgtgagccgagagccgtttgacccctatgacccctatagtatgtaccgcttcgtggaagggttgcggtggccgttgatccgaccgtggatgcctcagattggatcacagtcgttcaaaatccaaaccattgatcccagatctaacggctctgatcgcatcacgatccgatccgag

SEQ ID NO: 150472 - DNA, 548 bp, Zea Mays
attgggtggctaacctcctgcatgttaccagtgcccttccagtcatgtgctctcttggcggttcgtccgatgcggttgttttcctgcaaaacacagtcttccaccctatttccgaggcatcgttcccccgaagggacggatcttttttgagcggtttgtgtgggcacaccttccaagcgccgcttgggcttccttctcttgagcataaaatagaggggagggtgcatgtgtccagtttcgcttaccacaacctcgtgttcgggcatcttcttctccctctcccttgaagcttccctgcgcacttccgtgttcttcttccttcatcgttcatgctggcactggtcctatggattcctttcctacccgctccttgatccacagtcaactcgaagatctagagaggaaaggatttttgccccctaggtggtctctgggtggcgtcttgaggaaggaggcggcgccccaacatcgtgggacggtgaggtggtggttctcgcctccttctatgagtgcggcttcggatttccctagcatctgttcgttcacgg

SEQ ID NO: 150473 - DNA, 580 bp, Zea Mays
gtttgcggtcgagaagcgtcgccggggcccggggaagacgttcgtgggtcggcatcggatcggtagcgttctacaccggcgaattcttcaccggagcatcgccttggccgcggatccgccgcgcttcgacgctaggaggcgtcgcttcgtaatcctcggtacagatcttctcctccgtttcgatggtccttcaattcggttttcaccgggtagcgatggcgatttgggctcgggatcgagctcgggcatggtacagcgatggcaccgccgcgatttgggtgccatctgtcgtcgccggcggcatccagggttggggcgctgtgcgccgttagatccaagggcagcggtggagattagatcagatctttccggttcgctggattcatctaggccgtttatctggccccggacggatgcgatcggacgcgtttattttaaatctgggtcgtgcattaaggatccgatggtgtctggtgagagcgagggtttaatattgtttgatctaatcgtggccgctagcagtcgatcggacggcccaacatggctgataccgcttcggccgtgtcgttttacacatgag

SEQ ID NO: 150474 - DNA, 522 bp, Zea Mays
ctggcaagttgggcactgtttaatgaaatcttccacatcacctttcatgcctttccacagaaataacttcttcagacgatggtaagtagcatgaattcctgagtgaccacccacagcgctgtcatgcacagcagctaccaatttagtcctcagtgccgagttgttgcctacccaaatcagattgccttttcgaatcacgccctgagacaacgagtaaccatgttcatcggggctctgcacacataatcgtgccaaaagatgttgagcgtcagtatctgtcacatatgaatttatgacctcctgaatccaaagaggttggacctcactcactgctgtcaaagccatggcatgacctatcctggacagggcatcagcaactttgttttctcgaccttgtttgtacacaactcggaactgcatacccataagcttcgacatagccttacgttgtaagtcggactgaaggtcctgagtccccaagaagctgagagccttatggtctgtccgaatctcaaattctcc

SEQ ID NO: 150475 - DNA, 492 bp, Zea Mays
accatgttcagttggaataggaagaacaggaggaataggattccaaaattattatgaaggaagaaatcgaactggaacatcatcccaaagagcacagtaaaaagtgctgaaagtgttgtaagaaaggcctcccaggtaaaccacgataaccagtaagccgattcatagagccccatggtagacatagcctgcaaatatatcaaaattcgggctcactttgagcataaagatatgcaggcagactgtggtgagtgaagtctgaacctgacgaagctttagttctttctctgccaccaatgcactgatttggaaaacaaatccgaacatagcaatggcaagaaaaaaagttggccctgcttgagcaatggtagagaaggtctccgtggctgggtgagcaaattctttaaatccaacagtccagctaaaatttgggtctgttacattaatgaaaaacacttattcccaatgaacaattaactaacagaaccaaac

SEQ ID NO: 150476 - DNA, 313 bp, Zea Mays
gcagatattttgggccggccaataatggcccagctgatggagcctgctattttaagttttcaacacataggagctatttttacaaataggcctgcagatgcctctactcttggagacggtcttaggtggttagagtagtactcctcggttccttggtttgactttcgttggagtgattttctggctgtggttaaaaaaattatatcgtttgtccaatgtcaaagcatagatataaggcctagtatagccgcggtcgttctcacatgggttacgacgtcgctgtttttgggtgggacagagggttcgggttttt

SEQ ID NO: 150477 - DNA, 453 bp, Zea Mays
ctaacccttgtgtgttttacccataaagttacacctgcacagcttatagaaccccacagcttgaccgctagaccaacccaagtctccttctgcacatgttacatcaaaaaaaacgttgtttggtgtctagttgcgcaacccctatcaaggccatgtttctttccataaacccttgcccctaaaacttcatagcatttctgctaatcatcctagctgatcctgtttgcctacctctcctttcgcctggatctggtaatcctttttcttgtgaatcatgttggctttatcatccgaatctccggatcctttaatgattctgccctattatctagttatctgctcttaaccgttctcaagtatcggatgttgatctgcataaatctctcatttctggacagtctcatacccccttctccgaggatcatgacacttgttttatcaactgtatatcca

SEQ ID NO: 150478 - DNA, 333 bp, Zea Mays
tgcgaagcacgccatggtcaatcacaaccttggaccctccttcatcaagctgtcccagacttaggatagagttcttcagcgccggaatgtagtagacgccatgaagaaccctctgctcaccggtcttggcttggaagatgatagacccaacgcccttgatctctaccttcgacgcgtccccgaaccggaccgttcctcgaacgctagtgttcagatcagcaaagaactcttggcgcccggtcatatgatgcgtcgctccggaatccaggtaccaaccgctgtccacttcttcgtccacgccaagataggcacaagcacgtggcttggagaact

SEQ ID NO: 150479 - DNA, 291 bp, Zea Mays
gtcaggtgatcactgagacgtcgtgcctccacgggccgcatgcagccgcccagcgcgcgccagagcacagtacagcggcaggccgcaaggttgtgatcggtcgaccggtccgtcgacggctcgacgcagcgatggcgcctgcatgcatgtagcggcggcggtgtagaggctgctgacgctgagagactctgagaggcgcagcgcaaatgagccgtggactttcgtgtccagcagagccgaatcatttcctgggctccttctgccaactaacctcgttccgtcgttggttga

SEQ ID NO: 150480 - DNA, 490 bp, Zea Mays
cggcgttacatagctagtggggaaagtagtggtgttccttctcctaccttgtctgccctcgttggtctgcaagaattatctctggcgaactttgatcaaactcttgaagatatggttccagaagatctgttatcagaaccggcagatggtggcgcgattgatgtttgtgttgatgtgctcgatgccgggttggggtcatcccgggcagcttcccgtgcctcatcgaccttagagcgcggtcttgagagtcaggaagctggtttggattgccctgctcccatggaagtgactgagggaccttcagccttagaggtggctgctgcagataactcgaccctcaaggatggtactggcgcttacccagcccctgagggtgttgccggggatgattcggctcagatgggtagcgcaagctgcgacccagcccccgagggtgttgtcggagatgatccggctcagatgggtagcgcaagctatgagccagcccccc

SEQ ID NO: 150481 - DNA, 436 bp, Zea Mays
gttgggacatgctgcatggttcaccagtttggacctgaccgccagttaccaccaaattcgtcttcatccatccgatacttacaagacaacatttcaaacccactctgaccactatgaattccgcgtcatggctttcggcttggcaggggcaccgacaactttccaacaggctatgaatgcaatattatcatctttgttgaggcgttgtgtgcttgtatttttggatgatatattggtttacagttcttcctttgaggatcacctacgccatgtgcgtctggttttggaattattgcagcatgaccagtggcaacttaagctctcgaagtgttcttttgctaagcaacaactttcttacccgggacacgttattttagctaatggtgtctcgactgaccctggtaaaatttaggctgtaatgcagtggacaactctg

SEQ ID NO: 150482 - DNA, 850 bp, Zea Mays
atgtacttttagcaaaacatagctagatcttaaaatccacttttgggctagtttaaagttgaaattaaacttgatctgcttcaaatctttcatcaacttattgtatcctactaaaaacaaggttattcttaagctcaaacccaactttggagtatggatctcatgtctaaattgccattggtttaaaagttgtttgcttgtagtagatttcaaacaaagcctaacttctcttgcttttttcgaaacgacacgacctcacctttttacaaatttgttatcctagtaaatgttaagatgatatgccaaggttttagttctcgtaacaccagctgttatagttttgatgttttcttatgtccgtgaatctagttttcatccatcccaagcttcgacgtttatattcatggtgcatgtttctgatggcggttttctgttctacatctgttaagtgtgagatactcgattatgtgatgattattgattctttatttgaatccggaactccaaacaaatttcagaaatattagcagcacaggatcaatggttgaatttggctctgcagtgaaatgtattcaagcatcacaatattgtcttacgctatatttggaagttcaatgctcagagcacgccggcctgtgcacaaactaaaaacaccctacactttattatggccaattggccatgaaacacagaattagaaaaacacatccaatacgttcaaatttaaaaaatacatattcaaatcaagagtattgagacaaaaatatgattgtctgcattttggacgcatccgagtggaatgcccataagataattctagcataatacaaacaccgaacatgattaaaat

SEQ ID NO: 150483 - DNA, 421 bp, Zea Mays
attgggctatttccctcttcattctggtccaccaatataggggcttcagatcatggtacatcttggtgcttcccgggtgcatggagaatttggagagatgagcctcatccaagattttcttcttgaggtctttatttttaggaaccaccaatctgtcttcaaaccatagtatccctttgttgtcttgacgaaagcacttatacttctccactttttgatgaagattctccttgatgatttgcactccgttgtcattgagttgggccataattatctggtcttgcaaggttggctcaatggagatgtgagacaaggtaccagaaggaattacatcgatcttcatcttgctcaactcgtcacatagggtattgatgtgagaatccatcatcatacaattgcattatgacttccgactcaaggc

SEQ ID NO: 150484 - DNA, 964 bp, Zea Mays
aatcatgcactcaaccttgccgttctggagggaagtgtaggcgcatgacatccggagctggacaccatggcaaaggaataagacatgaggagttatcaaactctcccgttgtcagactgaatggcctggagggtgcgatcgaactaagtggacacccaggcgaagaagtgagaaagtgtgggggaacatatcagacttcaagtgcaacagaatactcgtgggagcaaccatcaagaatcacaagataatacttacaacccaaaatactctgaacaggtgaggcccacaaatcacagtgaattagatcaaaagggcgcacgacttgagtggagtgaggaaaagggagcctaatatgacgacccaactgacaagcatggcataaagactcatggtggccttgagtacaatagaggacaaaactactagacaccttggacataacatcgggacgatgtatgaccgagccgacggtgccaactagtggacgaagcggtagtagtcaaagcaggtgaggctgacgaagatggcgaagtagtggatgcaggaaagcgaagggtgtacaggggcccagagctgtcacaccacacaagaagactttgagcggcaagatccttcactgacaaaccaaaagggtcaaactccatagaacatgaattgtcagtgtgatctgacgaacaaacaaaaggttctaaatgatgccaggagcaataagaacgttgcgaagacgaaaaggactagggagaatcaagacgtcgatggaggcgaccggaagaagagaaccattgccaacaatggaggaaggatatgtaggatggggaggatgggaagaagagaggataccagcgttcagagtggtatggaacgaggcaccgaagccagccacccaatcgatgatgtccgtaggaggggccaaggtcatcgtgctaaaccaattagcaagagacagctggtcccatgccccaac

SEQ ID NO: 150485 - DNA, 540 bp, Zea Mays
cctctgccagctccataaccatccaagccacctagctcaattagtgttataagtgtcgctttaaggcaacgaccgccatccttaggaccacgactgccatcggcaaacctaccactacttgtgcctatctaccgctatcggttagttctgtcaccagagtggccatccaagccatgggccacacccataagagttatggagttctcctatggtggttccttaaggttggggagttgtcaatcgtggaaatctagccgtgtgtccattgtggtgagctatgccaatgtggtctagtttggccaagtcagaggtttctaggattggtgtcgatgatggatatggtggttgatgcgttgggtaactctggaaccatatcgatacaccgttgtcgtcgtggtgtgtgtagggttggacgaaatacttgtgcctcatcggctcggcttggctcgtgaccggctcggtacggttcgaaaaaataaacaagcatgtcaaaaaaaatcggcagcacttcccctgtacggggaggtttccaaaacctgc

SEQ ID NO: 150486 - DNA, 1436 bp, Zea Mays
ggcccctccagctctgacgaattatcatccgtttggccgcttcatttctctccccgcttcggtgctgcctgctggccgaccgccgaagcgacaaccgaggccaccgatcagttgactcccgtctcctcgtcgcagggtctcctcacacgagcacacgaacatcgagccctccccgcaggagcataagacgcttcgcttggtaaggaaaccctaccctacttggacgagcttctctcaacgactcaacctttctttcctggatggattagcagttcagtttactgtgaaatttgcatgtacgtggagtagagggaagcccgaacccggtttattttcgaaatttgctaggggttcagttgaattaaacctcctgaatcctgagcccatgtttgttccgctcctttctggcaaactctctgaaagtcgggttgtgctgtgcgattctggttcgttccatgttgggccaaacaatggctgcagtactttattaccattttaaatccgggtaaatgcagtatgagaacagttcctacttcttacttcagatgttgtggttgaacagatacatttttaagaaatcgatcttctttttttcttatcctagcctcctaggcaagagaacactggttaccatgatagacagtgtgcagtgtgctgtacgtggtgttgctttagtagatgtattaggagaaaacaacctgctagcagagcacccaggctcaagcgaccccgggtagttggcctctcaattatagcctataggcgcgaataaactcattcatacagaagactcaaacaggttttagccaatggggcacagctagagtattatacagggacaactggttacgcagacagtgcactgtgcatggtgttgcttcctggatggacaaggagaaaacgacacttgtgggttgcttgcccgcgactggagtgcaactctaacaagtaatcttcagacaatatgatacataaggatgctgctatcttcttctcatcggtttgatttgacttcacttctactcacacatcattgctctgatccaaatgctggttcctatccttgcagttttctaaaacattgctggggttgcagcatgtgtacttgggcatagagggattgttacatcgagctagtgctttggtctctgctgtagcagagcgcaatgggcatccgggcttgttcggtttgctggttgttctatgtgctggttcttgtctgttccttgtgtcagatactttatgttggatcagtggcggctcaaactgctcagttgactgtggatgcttcacctcagaatgctcagataatccctggcaatatgtttggcatcttctttgaggtgagtgtaatgtttaactagttgtccatacattttcatgcatggctattcacaagtttagctggtgtttatttttcctacaaactatagtat

SEQ ID NO: 150487 - DNA, 704 bp, Zea Mays
accctataaatttaccttggtatgacaggaaggatgctttaacgacgtgttttaggatctggagggagtatagtgcagttgtatcgtttaacttgcaagcaaggccgggatcggggtcttcaatcttgctcggcttgtgcgttgacagttgcttcgagccttcgacgacgctgtcggtgaagctgtttaagcaagtataataagagggtaaaagcaggataaatgtggaggtggaggacagaatagagaagagagaggaaaagcgggttgtaaactcgtagttggtttagacataagaaccaaaaaaaactttgtgtaggagataagtgagatcctacatctattactacttattaaggctaaggggtagcctgcctctgctttgttctgtcttccgacgatctcaaccgtccaatacgccatagagtctctcccgtccgatgcgcacactctctcccccacgcacacccgctcgcgacccccgttccacatccgctattctgatccaaaaccctatacgacacccgtagcccggatcccatgtcccgctccccccgtcaagcagtcgcggatgatgggcaatcgattgcagagacggtgtgcgagagctcggacgtggaaaggtctgcggcgagctgcatgacctatgttagcgtggagctgaggcagaggagcgtctccaggggtgggagggtggcggccat

SEQ ID NO: 150488 - DNA, 309 bp, Zea Mays
tgttctggattgggtcgtaatgctcgcttattttgtgtattcccgtttgaacttcgttctggaattagtgtacgagtgtgctgtggcttagggatgtgtgatttttgcgtttatgagtacgtgtatgctgttcccgtggatttgagggtgccagtgggatcagagcgtgtgctgctgaaaggaatgatatgctttggttctggttgggcttatgtttcggggaagattgaattatttgtggatgagattcattttatggcaaagaggcggctttgtttgttttcttatgctgaacacattgtcttgtgg

SEQ ID NO: 150489 - DNA, 679 bp, Zea Mays
aagatcatgtgtatgcgtatgattggaagcagcccagtgtgttggtcagaccgtacataacttcgtttattgaaactgatcatgcatgccaataaaatcatacttaccctgtaaaccactccaaaggatcctcggccgagctctcgactctcagagaaaccatctgtaatttcttctaatagttggaatgacacattctctagctcgtcgcggtattttttgctgtagaagtcgtcgccgtcatctggcttgtacaagtcgcctagcatgttatccattcagctggtacaaataaaacccgacccctttcagcgtgagcaacaaataaaaaaaaacatgtacactttgcattacaaggtgtatgatacaccagattagaaaacaggatacatacatacaagcaaaatgagcaaattataggacgcctagctccctttaattcattcagcacctcgtcataaggtagcaatcagagagcttatgatgggaggaggttttcatccagaaggtaagcccagtgcaagcaacgtacgcggcgatgatacggagcagcagcaagatccaaatgtagcagcaccgaccgtacctggagcaggagccggagccggagcaggagatccgatcgaggaacgccctcagttaaccagaagtgagatcgaagtagatctgacaatgcgat

SEQ ID NO: 150490 - DNA, 364 bp, Zea Mays
cgtccgtagatcggggaaccgacgactatgatcggtcgcacagatcgtttgggaatgattaaatccgagccgtgggtagcgaatcggagggtcataggcgcgtaccccttcgcatcgaactcaacctaatctgatccgtggatgttagatctaatggttgaaaagaggtatacattatatgctgcacgatctaatcatgtgcgtcggtttgtgatcggacagatctggtttatccatacccttttcggccgagtaaatatgcataagagaccctgggttatcactgaatcaacctgcagcccagtttaactgtgcgctgagtcttaggaaaacttgcgagttggccctggcttctctggaaatt

SEQ ID NO: 150491 - DNA, 654 bp, Zea Mays
ccgagccacacaaccagagatcgacggctgtgatcaaataactcgaaggggtacctgttgcttcaatctgggccatccatccacacatctacgatcccagtgcatcttcttccttgtgaagaccggtagcgccgctttgatttgccatggcgccatggccggtcgcatgcacgaccacaggtgccacgcgcggcaaggtttcaccccagggagactaaggcagcccgcgactatgccctacgcatcggcgcactcaactacgctcttcctggtccccgaacggtgacatccgcaagggatggcgatgacggctacccgattctctcgctgctcacatgtacggtgttcgactcaagtatgcggagggagcattaagggaggagtaggcgtccgttatttatagagggataatacggtattccggctcaaaccgagtccgccattgccggctgtgaaccatggtgggtcccagtttgttacgagcatgcccgcaatggaaggaggtgacgaattcccatgcgcgcggtgcggcaagggatctggcccatggccccatgcgtcggccatgcgagtatcacgggaagggaagcaggcaacaggagaagcggaggatcctaacaaccgatctagaagaagctactgccacctggggcc

SEQ ID NO: 150492 - DNA, 1055 bp, Zea Mays
cacagactccagtcgtccattgctatctgcatgtaccctacttcaatatatccagcgggttgctccactacttctatgccatcagcgctcgctgtgtttgtgatgttcaccttcagttccagaacctgcacgccagtccgtatgacgggcgttgcagttgggttttctctggtacaggaatgactcaacgccactgccaaatcctgagctggaatgtgagaggcctaaatgaaggggcgagaagggacactgtgcatgatcttgttcgtgatacaggtagcacaatcgtatgtctccaagaaacaaagctgtcgatggtagaccaccatgtcatcgcacgcactttagggtcaaaattccttactagctatgttgctcggccagcaaaccaaaccagagggggcattctgcttgctgtgtcggaagacttcttcacactctctaacgtatctacttccgacaacgccatcacagccatgatcaccatgaaagcggacggcacagagtggtggattacagtggtctacgggccccaatccgatgcagacaagctcctgttccttcaggaattgagggcccttgcctcccagggacacgagaggtggctggtccttggggattttaatctcatttaccaggcttcagacaagaacaatctaaacctaaacaggcgcctcatgggttcattcaaatccaccatagatgacatccaccttaaggaacttcgtctgaatggccgccaattcacctggagcaatgggcaggctgaaccgaccatgacaagaattgacagattcttctgcacgcccgattgggagcttctcttcccaacctgctacatccactccctaccctccctcatgtcggaccacacccctctgctcttgcaaggagagataatgcgcaaaacaaacagttccttccgcttcgagaacttctggacacgcattgacggattcaaagaagcggtatattcggcctggaataagccgttaccctctgtccagcaaccactcttgcgcctgcacatcaaactggctcgaacggccaaggcc

SEQ ID NO: 150493 - DNA, 1933 bp, Zea Mays
gtcgtcgtcgtcctcctcgtcctcctcgcaggcgccgccagcggccagcagcaggcgcagccgccgccggtagtacctccggcggacctgccggacgtggagaggcagctcaacaacctgaccaacgacatcgcagtcaccatctccgacaagttcagcttctgcgttgccgacctgtaagctgctcgatcgccgtcgtcgcccgtcagtacagaataacccgtgtagctgatcctgattcgtggcggcgtgctcagggaggaggactggaacgaggccttcaactacacgtccgacctcagcttcgtggatcggtgcctcacggagacccaaggtaagctcatgcatggcctgatcccggatgtggccttcatcgctgtttgactggtcaatccacatctcaggattttgggtctgatttccagttgatttttaatcaattcttctgtttgcttccgagtgaagtggttttgaatccgagaatctcgtctcggcacggcaaagattgttgggccgggtgaagaaattattaattatcaattattctgtttgataggtgcctgcttgcctagggtagtagtagtaggtttcgtcaacttatgaacgcgtggaccacaccttgtgtcgttcttgtagcccctcgatttttctctcgttccagccaggcaagtggctgactgagacgttgtcagtttgaaacgttctctcctacgcatttcgcttcgcacgtgaaatcattcatcttagaacaaccatttgtttatctgacacagttgggtttgacaagctcaactccaactaataatagtatgatcgtccatcgcagttcgcagtcctagtgacgttggcaatcttttcacaaactaggcattttgactcagtataaaaaatgaacctgtcttcattattttattctataaatatctaacgaacatacatactgggttccatccaggcgacctggtccagcgtctatgcacgccggacgaagtgaagttctacctggcaagcctgtacgaccgcgacggcgacaagaacatcaacctcaagacgaacataaactgcaacatctcgtcctgggggagggggtgcgacgccggatgggcctgcgccgccgacccggtggtcgtcgttcgggatcccaggaacggcgtcccgctcagagcgaggggctgccaggcatgctgcgagggcttcttctgcccgcgcggcctcacttgcatgctccgtgagttgcatttatcagctagcttgccccgcgtggggccacgctctctcgtgcttgcttgcttctgacttggtgtccctccctttcctcttgccgtcgtcagcttgtccgctaggctcctactgcccacgcgccacggcgaaccagacgactggcctctgcgacccgtaagacgcattccttcctgctgctactgcgacagacggattcagtgtgccatgccatgcgtgtgtctcaactactgtggggggcttttggtattatcaggtacaagtaccagatcaccccgaactcgacgaacggttgcggaggcgctgacatgtgggccgatatccagagcaccgaagagatcttctgcccggctggttaccactgtccgagcacaacaaggaaggacaactgcagcactgggtgggtactgcatgctctgtttcttctgcaggcattgactttcacttgaaccttcacgtatgaagtgaggtggtttgacttggtcagtgttgctctgtttcttctgcaggcactattgtaggctcggttccaccgctcaagagagtaagcgccgtgaacaatatacgacatggcttttttttctttttctgtgagctgatttagggttaattcgctgcagagtgcataataaagggctcctgcgatgagaacacggagaacgaaaacgtcaagatccttggagcttgcatagtg

SEQ ID NO: 150494 - DNA, 686 bp, Zea Mays
cctttaactttaaatctcctcataccccggatcggtgacaccttcagatacacgtgatcaccctccttaaactccagtagtcttctcctattatcagcatagctcttctgccttgattgtgcaattctcaaatattctcttatcattcgaacttgttcttctgcctcttgtataagctcaggcccaaagaactgtctttctccagtctgatcccaatacagaggagtcctgcactttctgccatatagagcctcaaatggtgacatcttcaaactggcctggtagctattattatacgagaactcagcatagggtaagctcttatcccaacttccaccatgcttgagagcacaagctcttaacatatcttccagcacttggttagtcctctctgtctgtccatcagtctgggggtgataggttgtactaaaattcaacttagtgctcatattctcatgaaaacttttccaaaatcttgaggtaaactgtgatcctccatccaaaatgatcctctttggtacaccgtgtagagacacaatctgagccatatataactcagccaattgagatcacttgtaagtagccttgaccggaatgaaatgagccactttggtcagtctatccacaataacccatatagaatcatatcctttcgaggtgtgatgcaatccagtaatgaagtccat

SEQ ID NO: 150495 - DNA, 632 bp, Zea Mays
agatgatgtcagtaccgagggcaagaagatggcccgtttcctgaagggactcaggccagaactcaagacaattctggctagccaagacttcctcaatttctctcacctttccaacaaggccatgcaagttgaaagggcaaaggaggaagaaaaaggacatctcaaaagaaagttccaggttctccgggcacaacagcaggaccggcaccagaagactcgatcatttgggtttccacccaaggggccaaacttcagtagaccagctggacccgccccatcacggttcagtcagcagagtcagagctctttccattccccctcagtggcaagcaaccaacccccggcgaatgcatgttggcactgcggtgatcccagtcacttcaagaacaactgtccgcagctgaagccactaggacccgcctactccaactcggtgaatggccccaagaatacctcggcatccgcccccaaggcgccctcctccgtcagccagcagaacaagtctccgtaccaaggaagggcacgaatgaatcacgtcgatgcccaggaggctcagcaagctccgggagtagtgctcggtgagttccttgttgaatttactcccgctaccgtacttttcgattctggagcat

SEQ ID NO: 150496 - DNA, 456 bp, Zea Mays
cgaagctgcagaaaaagacaaaattctgctttccttagtggacagagtgaagaaagacgaggcaaaattcaatgctcaatctgaagtccataaagccgaagttgagaatcttcagaagaaacttgctgaagctaatgaaaattttgaacttgcaaaagtaaagcaagaaataagtgaatggtcgaatgttagactggaaaagaatgttgaggagcttcatgaatccaaggagagatgctttgagaaatccttggattgcgtaagaaaattgaaaaccagctttgccaaggtgggtgcgtattccttcgaagaaaagttcattcgaggtgatcctgagggggtcattgattggataggtgaagaagtcgaagcctttgaggagatccttagtgatcgcggtgatatttgtgccttcgccgacgctcgaggggttgcagcaattctggaaaaggctgg

SEQ ID NO: 150497 - DNA, 644 bp, Zea Mays
ctgaatgacttctgattctaacgtttggcatatctttaaaataagaatggtgcagtatgtaccaggcactctcagctcttactggttaatatcagtttagcagtcaggatacctgacatgtatagaactatggcatccaaaaaaaactatggaaatgaaggacatttttacagaaagatttcctgtggttgccacaattggcctctgaacttgactaatcatactaaacactatgagtagagtctgcaatgaatagctcaaaaggatcatgtaaactatcaaactgcattgccattcttcctttgagctcaatctgtcaaacataaacacatacaattcaccaagctctgaagtttcaatatatgatgtcagcttgcttatcaagcatcagcgagttccacaagtacacttcgagctcttttgtgcttgtatgaagcacactaatcgaccctaatttaagcttccaaaaaagcatacccaaggtttagcgacaatttaataaatacaaataaatcaatagttataccacgatttgtttataactagccttgggtatagaggtcaacatctaataagggaatctgttcacaacaaaatgtctaaaatattttcagaaattgtgatacagcttcaaacagcaaaat

SEQ ID NO: 150498 - DNA, 561 bp, Zea Mays
gcgaaagtcggtgtggcagtgtctaggctctagtggagatcgttctccggtgtggctgcgtctatctggtggggacacttctggtccaccggcgatggatcgtccaaccgttcagcgcaagaccccagtttggcgaggactttcccctccaatgaactcctcattagtggagaaagaagcacagggtgacatgcatccgactgagggacgtatgaagaagagaagacgttctaagcgcgggaaaggcagctcgggactgcattcggggctaagtcagccacaccccaatcctcctgatgctgtccggagcgccttgcctcggaaaccttcctgcgtcttggagttctccactgatttggcaagaaaggaagctgctcttcggagagccttgtttgtttcggtggttgtcaccaggccgacggttcgcggggaagaggtgattgaggaattggcgcgatgttttggcatcaaccctgatgacatgtctatccagcatgccacgccagaggatttcctactattcctgcccgatgaacacacaacgacccaaattcttaatga

SEQ ID NO: 150499 - DNA, 484 bp, Zea Mays
cccgctcggacaccctcaggggctgggttgtagcccgtactgcccatcggagccggatcaccaccggcaacaccctcgggggctgggttgcagcttgcgctacccacacgagtcggatcattaccggcaacaccctcaggggctgggcaaccgctggcaccacccttgaggactgggttctctgcaacagccacctctaaggctgaaggattctcagtcacctccatgggacttgaacgaccttgaccaatctcttggctctgaagaccgccttccaaggtcgacgatgcacgagacgctacctgggatacctctaatcccacatctggaatgtcagagtagatgtccatcatatcaccatcggttggctcggacagcagatcttcaggaacaacatcctcaagagcctgatcaaaatttgctagggataattcttgcagaccaacaagagcagacagagctggagaaggaatatcgctactcc

SEQ ID NO: 150500 - DNA, 543 bp, Zea Mays
tagaggattgatatgaaggcaaaacttctagattttaagcaatatacacataaatagtaatcttaaacagccgaattgtatgtgatattacataagaagtaagagaatacagtcactcaaatgaaggtaataatagaggacatatatcaagcaagaggcctagtcagagcattcaagaaaagagcataaaaataaaatacaaccacgtaaatagaggcaacaatcgaggactaatattaagctgaaacttccaggttttaagcaagattgtcatctataacgaaatacttacaacgaatgaatgtaaatgtaagtagggcttgggtgatataacatttgatgatcaggcgcataatgcacgtaaaaaaatatatatgggccgaactaaaaaggtattagcaatgtaaaagatgaaagacagtaacatttacgtaggtagtaacaatgaacacaatatttacatatatgattttgcggctgacacttcgcagcaagaggctaagtcggagcattaagaaaagagcataaaaagtaaaatacgac

SEQ ID NO: 150501 - DNA, 301 bp, Zea Mays
tgctggttgaaagttctgacatgatagcccatgggattggttaaacaaccttgaatggagaaaaaacacaagtctcttgtgactcgcacacagtgtcttctgtctccatcttgcgctgatcacttgtacgtatatggtagaacgacgacgcacaaatatttagaccctgttcgtcttgtctcaaattaacacatgaaaattgaagaggattagatccttaaaatcctctttaattccctcctatccctcttaaactctatggtttatagggttgaaacagcaagcccatacgttttttctg

SEQ ID NO: 150502 - DNA, 352 bp, Zea Mays
tgtgtggggtggtggttctttatcaggcaccatggagaacgagtgcctcttcggttgctatcctctccattccaacccaaattctcgtgccctactttcaccctttgtgcactcctcattgacaacgccatatcaatctagtatgagagaacacaaacaggacatcgacaacaatgtcaatccctagtaacgatactgatgtcatcacgactgttatagttgtagatcggtgagggggattgatggttgggagctgctggtggaggcggcgcggtactgttcacgcgtcaatgaacagtagttgcgtcgcggttactgttcacagggtgggtctgcgcgggttagagagaaa

SEQ ID NO: 150503 - DNA, 999 bp, Zea Mays
tgtcgagtcgtgtacagggtacagacgaactcggccaccagtgtagatatgttctgaccgtgatgcataaccaggaaaacaacaaatataggagtcgtacctatggcgagggcaatggcgatgttgtccagggtatcgctgagagctcggtggaaagaactattctccgttgatgaactcgcacgcgctccacgtgaacgacgactagccacggccgcccaccgagatagaacaatggcatgactaaagtttccctcgcagctacaccttcctggcaatggtggcaggtgatgtcgagctctctatgtcttcggatatggcgaggctctcagcgttctcgtgatcggcccagatggagaacctgaggtacggggttgggttttatattccccacggccaggggagatctgccctgggacgttacaacagacggcaatctcggcggaggttgttttagtggtcaagcgtgcgcggtgttcggacttcggcatggtttgttacgataaggaaggaagacacggttctgaacgagcaaggcgcagagcttcgtacgtgatcctgtggtccacatgtcggcgacggcgactacctagaagtagacgtgtgcatggaaatacgactgcatgtgttgcttgcttgatgtcacacttgtgtcatgctgacatcatgtgcggcaagaggattaaataaaggaaaagaagagatgtggctatggggaatatggcaatggtgctgggccgagcgccaccacaggtaaatcttccttcatttttttctttttattttctgtttcctttttttgtttcttccatgtttttaaatttcaattacaatttcaaatttggacctagttttcaagattccacttcatttttatgcacgaacaaactccaggatgagatgcataagtataagttttactttttttagttactttattcatttagtaaatatttccaaatatgaagtacacacattctaagaaaatcttattttgac

SEQ ID NO: 150504 - DNA, 334 bp, Zea Mays
gttgtattatcttcgttgtttctcctgcaaatgctgacttagctcattctgatgctctccaactagcaaggcttgctgatcctaatggtacttaatcaacttaaataatgtgttttattactattttctttgtagtagattgctagctatgtgtaaacatttaactccttgttttactggcagggtctcgtacaatccttcctatcactaaggtatttatttactgtacacaaccaaagttgtatagtcctgtgatcactgtatggtcattttgataacctcatttcaatgtctttagtttatcatgggcaggggcactcatgctcgtaacttg

SEQ ID NO: 150505 - DNA, 495 bp, Zea Mays
tgcttttacctttcttccttttggtgaagagtgaccctagaggcttgtgacttaaacatgcactttctcttttgtagatttccataagtaagctcaagagatacgttgttagtaacacaagcactagtttccctttttgtaatcattttgacaaggaatgaaaagtggattactaaagcatggaaactttataatatgaattagattattccatgatatatgcttagttttaacttataaaacaagcctagttaattccttaagataatgggaacaaatctaattcaatcacggagagcgatgaatgtagaagaatcatatccaatttaggcaagaagcacaacaacataagtcattggattgatttttctttttatgttagattacgcacttccaaagagaaacttattctctacaagtgagactacttgggttatttagataaaagcattaatctcaccattctagttatagagagaattttccttttataag

SEQ ID NO: 150506 - DNA, 3238 bp, Zea Mays
gggagttttagcgcgcgggagtattagcgcgcgtgctgtgctgccgctcggtctccctcccacatggtcacggaaattgcctcgctgctcattccctccggcgctcatcccctccggctgctcccccgccggctgctcccctccctgctcccccgccggtgagttctcctcccccgtcggctgctcccctccctgctcatcttggatatgctctgctcgacttggatatgctctgtagttcgcatctcctctgcagctctgtttccctcctcttctgtttctttccccgtctttcctctgcttgtgctttgttatatagatgctgactggaagtgcttgagttctttgtttttacagctgatagcacaatggtatgttatactcttcactcgaattccaatatgttggtgcagtggttagacggggggttcccaggtcaaaatctggttggtagtatatagtagttatatagtcatatatagtagttatatatatagtatatatagttatatacataatatatatatataatttatggctatattgccaaaacgcctagaaaagcgcctagaagcgcctaagaccgagtactcccgactaggcgctaggcaatgggtcaccgcctagattccgcctagcgcctagctgaaccttgacagacgccaatatggtactgacagaaattagaaaaccataacttcaaatacagtaaaggtcaaaaacagccaaatgaaatcacttttatggaaacgatttccagtaaacgggtttatcacatagactagtgaccagcacagaagtataaatttgaatagataacagataaggtttttcaaataaaagaactcagaaaagagccactaactaactttcaggcatattacaaatgtaaagaaagggaccataacacattgagaaaaagaatgtcagaaaaaatgctaaatgattactaagatggcaagctattgttgttattctaaaaaaatagcactaaccatgtccaaaattatgacacgcaataaaatgatgtcaaacaaaaaaaataccggttcgtttcctgatagttttcccacacgagattgttcattcgccagtaggtgaatgatatgctctctttggtttttcacattatccccctgcaaccatgaagaagggctatagcttatttccacaaaactgacaatgtttcaaaatattgtcagataacgcagcatagcaaacataactgcacaaggatatttatttacataattttgaaagagtataaatactgatgtatgagtgaaagccatgtaatgacattggtttcctaccatctgactccatcctatgatgaatgacgaaatatgctcctaagcatgggctcaaattcacaatgaattatgtgtcatttaaaaaaactcgacctgtagagggtaagacaacctcggacattgtatcaagaagacctcacacaggtcaagaaaaaccctgccccacccatacacaggacagacgaggggattctttttacccaagccttgaggagtgctactcataccactaaaccaaacctttcgcactacaagccgttacaacatgtcatttagaaccaagtatcaccgtatttacaggatggatttaaatttttttaatcgaactcatgatgcatacagaaactcgattcatattgttttaccactattagggctgcttcctctactcaatgttcaacttaagaatctggatcaatagcatgtctatgatcacacaaaaggactcagctagctaactggctgatgcctgccaacagttaaaaaatcagccatccattaattatacaattaaaagttcagagaccatactccgcatcatttttaacaccttactttcatattaaaccttagaagcatgacacagattatacagtcaacgttaggacccaaaatagagtcaataagcaaatggacaagatgcattttcttaatatagttttatgtatgccatgaccgataatacctgttttgcaatttgagttgagggagcccaagggggaggccgggggccctgcccacgtccaagcaagagggcagtgttttccttcttaatttttgcttgaatagattggtaaatctcctctccttatatagagaggattacttgaccactaaacaagtgatccttatcgagaaagaattacttctaatgggttaatttatactgcccacctaggccagataggcccatgacatacgcctctaacagcagcaagaactaaaaatgtagcagcaaatatgcagatttacttataaagaagtccgatcatatagttggtcacgaagatcaatctattcaaacattttatcacttagcttggcaactaacatttctcatctattattacaacatgtgcctgttccgctgtgatacaattacagtagttatatcaacctggaacaagcatatgaaatttataagaaagatgcacacaaaaatactaacctgaaaaccaaatacacattgcaaaagatccaggatatctgaattcctagcatcagggactgaaaaggtaccaggaagcctgggcagatcagtatagtactgcagagttgatattgctgccctcacctaattaaaacaatccatatgtataaccacctccagatccagcaaattgccaataaaaaaaactcttatgatgaactattacctctggaaaattcacaattgcattagtggtagaagtcaaggaatctagaggaataatattatatggaacaacatcctccgtccttgctgcatccttttgcatgacccttttcatctgagaaaaacagaataaataaattgataacaaatggtgaaaccctatactagtcatggtgggatttgtcacaagaagatcgtcgacataacatggaagatagacaattattgagcttcccaacaatctacaccctctgaactcagcacagtattctagagggaactattttagacagtgagtgtatcagatgctaccaaccgcaggttacagtgctgtgtgttaccaatcacggtagcatctaaacacatgcacaaaaaagttatgatcaaaagatgaaccaatagacaatgcaatcatctttgcgcatgcaaaatttgaaacagaacaaaaaaatcagcacatcaatagttgcagatcaaaaatgaacaattgccccccacaactatccatgtcattctcttgttggcaaactgctcgccacgagtccacgac

SEQ ID NO: 150507 - DNA, 437 bp, Zea Mays
ctgtccaaacatagtttaaggttgtaaggcaccttttttccaccatatagttgctaaaaagttggaatataaagaattcaaaacaatatatcaccttttaaacctcaaatgtcgtttctatgatattgagggcattgtattcacacgagtgggttttagagtacaaccagtggatgaagacattattgggctagctaatgaccttttgtgataccaggtttcctataatcccctctattcaaggcatacctagacagtgtttatgtccactcaagagaaacacaacacatcaatatgccacatcatttctcaaaatataataaagaccatgtgaaatttagccaaattgcgtgagagaactgtccaaacataggttaaggttgtatgacaccttttttccaccatacagttgctaaaaagtaggaatataaagaatt

SEQ ID NO: 150508 - DNA, 362 bp, Zea Mays
tttttaattgaacatgcatggtcatgatggctggttcattgaccattatgaagtgcctgtggatgagagtttctagctgcaataaatgtatgctgaagagtgatgtgatctgcgtgcatgttttttcaagaataagaataggcatgtttctcttttattctgcagtgcatatatagtctcatgttgttttcttctaaaccttgactggtgatgtctctggcagatcaaagcaaacactataacctcggttattgaggttttgacatattcactttatatgcagaaagtcaagtctgaggtcagtttcaacaatgccaataattcaaattcgtcatagaccagtacaaacctacagacttgtg

SEQ ID NO: 150509 - DNA, 456 bp, Zea Mays
tgtggtattgttctttgctaatagccttcgtctcgtataaaagctcgtgcatactgcagaagcacttcgcgctcggctccagcccctggcttcttacagcccagataaacatctccatcctaattatagcttcgggggtaatctgatgaagaaaaatctgaaaaatctttaatacctcaaccaaaaatttgctcagtgggaaccggagacctgctttcaggaagtttcggtaaataacaacttcgttttcctcaggagcagggacagtgttgtctcctccaactctgacaatagacttgtcgcgaaaatatctccccctcatggcgtcaatatgactttgttttttagtcgattttccgaagatagtatgacttggccgccagggccgatcctcagaatcttcatccccactctccacgtcataactatcactatcatcagaatcttcggacaaac

SEQ ID NO: 150510 - DNA, 404 bp, Zea Mays
tttataggtaaacagtagctttttaacaacagcttggaactgcactttgcagcgtgttagctccctagaataatccctctgtcatgccggcctgccaagacgtgtctcgaggcgactacagtattctcgctaaggagtcgtcctcgggcaggcactttcttttcctaatcgcatgcttgcttagcatctaaccttcctaacgcctgcttttcttgacagtgtgttttgtgtgaggtccagctccagcaggaaccactaaacgagaggggccggctagctagattgcaagaggatgtcaaaccgtaggagaaaggactgtcgagtaacgttcatttggaaagggtggttttgaacatttgctcgatacttatatttaaactctattctatttatagtacttaagt

SEQ ID NO: 150511 - DNA, 1405 bp, Zea Mays
tctttgcattacataggaaatatagcttactgctgaatgctgaattaggttaaaaagtctgttctcaagaaaatttggacccacaaatattcctaggtaagcagcaaatagcatcaactaagtagcagtagtccctgaaccaggataacttttataacattgtcagttatccaattcctatagatgtagactcttctcgctcacaagtcacaacctcctagccggcagactatcttctcatgcttccagatggtcctatggctgcttgtgtctacagtggcagcagccttaagctcagacattagttgaggcttgcacatgcctctcccagtgcgtgtgtgcatgcgtgcgtgtgggtgccagagagcagcggttgggctgctgtgggcgctagagagcagcggctggctgcctggctgaggagaggagagcggccgctggctgaggatgaggagagcagagtggcggccggtgcagaagaggagggcggcggccggctatggctgaggaggagagaggagagcagagcggcggttggctgagggagtgagggcgccgcgtccagcgctggccagtgcccaggaaagtgacctagaaaatgctaaaggcccaataaaggcccaggacaggtagaacgtccttagaacgtctaaaacgccctaaaacgctatttggacgcttaaacgccgtttaaacactcgaaacggacattctacgccctaaacctaaaacgttcggacgttccaacttttaaacatgttttttcgtttaaacgatgtttaaacgccgtttaaacaacgttttaataacaatgcaaatggttttctttagtgacactgacacaactaattagcttagcacaaaaagagtgacttactgatactcatctgaagacggcttcttatctttggatccaaattgcagtttcgattttcctggaacaagtacatagatctcttcactgtcagtctcttccgaaatatatagcaaagaccataggtaacacttaaaaagatcatgctgaaagacatgggagattgtttcagatatacagcattacctatttggtgttcttcccatgcttcctgttcagcaaaagggttcattttatcattggccttaggatctctgcttgttcatgaaactatcaggacgcaataataaactagaaaattgcatgcaatcatggcataagtggtcataatgtaaaccttacttgtaccgttgcatggccacagcgaatctcttctcttgattgacattttcgcccatgtcataagcttcaggcattttgtactgaaatgcacgtatataaactcattgacattaaagatactaacaaacatgtgtacagcatgttgtatggtcctaagcatgttttttgagggcgaggcgacgcgtggca

SEQ ID NO: 150512 - DNA, 454 bp, Zea Mays
gaaagagtgttatgaaattcccattgagaatagcctaagtggtagtagtggatttactgagctgttatgacgtgtgggccagtgattggcatgtaatcgctataaatactgatcggccgtatgggccaagacaactaagaaataacagaaaaaagaaacagaaccaaatcatacctgagttattcctgtccgtggttgcgacctcgaggagaagatcgtttcgtacctccaggaaggtaggaagaggtcgcccacgttgaagatgaagaccgatgctgctgaaccgttcgttgaggccacaaatgacattgatgacgagagtgcggtcgggaacgggctcgccaagatcaccgagggcatcgaccatccctttgaacttacggcagtagtcggtgatggagaggtcgccttaacagaagttgtgaaactccgcgtcgaggaagaggcctcaggt

SEQ ID NO: 150513 - DNA, 314 bp, Zea Mays
tccaaataccgatattagaacgacttttaaccggaagagaccaactattccaaacaatatctttgaaatccggacgaaatttccagcgcagctcatatctgaagtctcttttaggagatacacggaaatcagttttaagacagagaggaacatgatcggatagagttctatcaagaccagttaccaccacatttttgaaatgaaggacccattctggactagccagaaatctatccaatttttcaaaagtgggagggtccctattatttgaccgggtatacattcttccactcaaatcaagttcaatcaaactg

SEQ ID NO: 150514 - DNA, 836 bp, Zea Mays
catttctaggcttgagattgggaaagaaaagaaggggcagtggcggcatgacaagagtcggcactgaataggagcatggaacagaaaagagaaggctaaatgaaatccaacgacccaaaaccattcagtttgatacaatcgcaccaatgtccaaataatgcatattagtagtcaaacggattcctttcaacaagttctacacagctatggtctttgatcgaccatacgattcaaaaggtaaaaaaatccttctctctttagtacaatcggtcaactcactaattatataaaaaataaaggtattacagtgtccttccgttaaatatgtagtggagcaggaaggagaattcaggtgcaacatgttctcacaggcacgacggtttatttagcaatggcaattcacattccccaatgggccttagatgccattgataagataagaaaatgttttctatggagaggtagaaaggaaccaaagggaggacattgtttggtggcctaggaaaaagtgtgtcgaccccttcaactaggaggcttgggaatctctagtctcccagagttttgttgggctctccgcatgagatggttgtggctacagaaaacatatttggggcggccttgggcagaccttcccatacaggtcccaaacaaagctagagctttttctctatggccctgatttctgaggttggggatggatcaaacactttgttctgggatgatagatggttgcatggcactagaatctctgacattgcccccagcctctacaactcaattccaagaagaattgctaagagaaggacggtgaaagaagcatttttaaataggagatg

SEQ ID NO: 150515 - DNA, 454 bp, Zea Mays
tgagaatcgaaaaaaagaaataataaaacttgcgctgggctgaaaacacccagccggcccacctcctctttctctccccctcatccgtcggcccagctaagcatccacgccgacgagcaaggcccactcgtcagcctcgctaccgcgtcacccacgcgcgcatttctttattatttcccgccagtcttgcgtcaccctggcgtcagcaatgacgtcacctatacgcttacccactcgctgacggctgggaccctcggactacactccgtatcaagcgcgtatgtccccaggaaacggttacgaccgtaacggcctagcatgatcttcggtttccagctgcgtccaccgcctttgttcgcctatttaaggcagccggcctccaaagctctgcctccccggtcgtccagagaagccaagcggcagattccccatcgtgtggcacggctgacgaagg

SEQ ID NO: 150516 - DNA, 549 bp, Zea Mays
gttatctctgccgcctcgcctggaatctggattcctgcatgttcctgattacacagctgatcaagaggtcgtctggctacgaaccttgggaatgaccctgcagagtagtaatcgtctggcacagcattatagacagtcaatgcaaggctgggctagcgaatcacttcctgcattggctgaaaccctgagcgagaggcagaatagtctgcacgcatactcggaggcccggcgcagaccgtaaagcagtacctctgttgaccagcagcgtatgcctctttactgtgaaggcacgcataggccgttgagaatttctagcggataaaatgctattgaaaaacaggtataagcagagcacttttggaagattcatccactgcatggtttcgttctgctctttgcgttacgttcggagacagtagtccatactcgtattggtcaggaacaaagagctaggggtggtatcatctagatcactgaacttgtatgctaacattagtccgaacaagttctcttatcctgttaccccggccgcatctctcctgagcttcc

SEQ ID NO: 150517 - DNA, 461 bp, Zea Mays
gtggatggcggttggcttcgtgtgggcagggctggcaagcaggaattgttgtcctcgccggccgttgcgagtgtaggtgagggggagttgcgaagtctttttgagggtgaggagcttaggataatgttatttaactatagggagatgggaatcattccgaaggttgaaccgatgtgaggtgtggtgccctcgctgtaagtatgttactatagtttgtatgatgaggtcgtgtgccttcgcgcatccggctatgtctatagggacgttgtgcgcttggtcgggcgcatttattatgttggtctggttgcgcctgtagctggtctgtgcgcggatagtttcttggtgtagacttgtgcatggacgtaatgcacttgcgttttggcgtgcttgttgaattagtccggctgcacccttaggcgacttttgcacggatagtcttttgaggaagacttcgattttgt

SEQ ID NO: 150518 - DNA, 441 bp, Zea Mays
caaaagtttctcaaaggcctaaaaaatgttggactgatttatggaagttcctagtaagcccagttgtttgtggatcggcccatgatgaacgaaattattccggcagttgattcgggctgagccaagagttcttctgagatccaaatcctagcgccagtattggactatcggtgctctaaaacagtaatataaattgagtttgaatgacgagatatactatgtggggtcatataagatatagtttttctcttgtttttttcacactcgcaagttagcacggtgagagatgatgtattagactatagatgattaaaggggttgtgtctagcgggctggcctaaaacacgatccatttaattatgtcacaacatgagccaatacgatttaaagtgggcacgtcttgagccgtcttcttggcctacagtgtcaacccagtccgac

SEQ ID NO: 150519 - DNA, 683 bp, Zea Mays
aacaacgcattcttcacgacaatcactcaacaatttgcgttttaaattagacatcacatgagcactactacttttcatctgcgaccataaacatatgcatttagactacaataagcaaatcatcatgactacgagcttaaccaagtcatctattaattcggctaactagcgcaacaacataggccgctatacatcctacacgtcggcttgcctcttattatcgcaatccgagacaacacatatataacaaacaattaacgaaatcgactcctatttaacatgagttgactaatcacggtagaagacctagcgaaccattttagacatcgtaactcaagaacatgggttggagccgattgatcaatggttctcaaccattgctcaacttgaattagttcacacacaagtcacctaaatagcacatttttggggtctatcgtggaggcatttacacatggcgtaaaactccataagactacatttgctactgacaccaacaatacctaccgacctattattcaccatacgaacgcagttacacaccgcctactagtttttaacataatcctcatatagctcgtaattcaaactactcactaacaataaatcacgcacgacaactaccacatcgaccggttaatttatttggacaccactcgtctagcgtaccactagtatcccgc

SEQ ID NO: 150520 - DNA, 505 bp, Zea Mays
tgccaatgcacatgatgtcatgccaagttttagttctaataacaccaggggtgttacaaagacatccatgaattcctccaccacaaatatgctttctactgctagactgaatatcattgggtcttgggctgatggttgagctttacatgagactgactttcctggtgatcggtgagaagaaatgtcttatctgcgcagcctatgatgccattgtgccgggacaaccaatccattcctaggattacatcaattccgtgggatggtagtacagctaagtctgccaggaatactaccccacttaaaaggattctgaattgggagcacttgaggtggtagagaaggtctggccctggggttcaggtgaacagagggacttctaatggtgcagtggggatgccatgcctttccacaaaactagcggcgatgaaagaatgagatgctctagaatcaaaaagtaatgtggtagcggtaaattcgattaggaactcaccgagtactactccac

SEQ ID NO: 150521 - DNA, 430 bp, Zea Mays
ttctgtccgtcggttcaccatcgataattcttgttccattgagtttgagccctctggtttttctgtgaaggatctggccaccaggaccccactcgcccgttgtgacagcgtcgggcccctctacatgctccggtcctcttccaccgacgcgtctccacctcccgtcctggtctccaccaccacctccacaacttggcatcgtcgtctcggctacccaggatctgacgtcatgaccaagctttccagcagtctagattcttcttgtagtaggggacattttgagggtctctgtcatgcttgtcaacttggccgacatactcttctcccttttactacctcttcttctcgagctgagcaggcttttgacctggttcattgtgatctctagacctcccctatactcagtctttctggatataaatactatttg

SEQ ID NO: 150522 - DNA, 559 bp, Zea Mays
tccatcttatgtgaaaagatcctaacttatcctaattaaaatatatcttatcttaaaagattttctcttatcttaatagattcatctcatcttaaaagattctatcctatcttatcttgtcatatcctaactactttgcttatctcgtactaagtgtaacaactatgatctattctaaaataagtagatcttaactagtctaatctagttatatccaatctgtctatccccacctaacatcaaacaagattttgacctacatcatgtagtctatctcatccatatctatcttaactatatttccaaacctcgataatatacactaacctcgaatcattgagaccaagactggaggagaaaagatcaacatcgacaaggaagggtataacagccaaagcgaatctcgagatgaatcaggacttaaacattttggataaagtcttttccatgccataatctttcttacctcaacctgttcagtttatatcccacatatatagtagctggatacctatgttctcccaatcttccattaccttcaccaccaccaccagctcca

SEQ ID NO: 150523 - DNA, 699 bp, Zea Mays
gcgatgtttggtctgttcagttggcccagctcccatttagtctagtccaaccgtgatagatgtgttgccaccatgtcacttgcagtcttgcagagcagtgaaggaacattgcaataacactcttggtttgtcattaatttgaatgaaaatcctacagatggtccgcgtaccacttataagcctagaccatcaatcttccagagtcaggacaacttagcaaaatatgatagtctacaatactcttataagagaccatggtccatagaaaccaaaaatcacagcctttattgaaagctcttctttttataactttttattgccaaaaaggcaggtttgggtgcccccagttctaatcacacggaagcaaatagaacccactttcttgccattgacatttgacaatgtcaggatggctagagtttccatcagcgtgttctcgactttctatggcctcttgaaaacagattgtccatttgtatacaaatattgatgctgtgttgcatagctcctaactatatatgtgttgttttctgattttctgaatccaggctgagttgtttgtgcaattgcctggctggatttgtcataatatgtaggtttcaaagttttgcagggaagatgatttgtgtcttcttcttttttgttacctaacattaagcggttgcttgaatcaagttacataaagctagctatttttcc

SEQ ID NO: 150524 - DNA, 718 bp, Zea Mays
tcgaaactgatagtttgtagcaaacaaggtcatggagacaccagttcatcacatggcactactaggacaggttgccatgctcgtattttgtttagtatcagcagagagggtatctggacagtgcaacaggttgaacttgaacataatcattatctggctagtccaagtaagacacacatgttgagatcccagcgacatgttatggaagcggacaggaaactcatcagccaaataagggaagccgggatgaagccgtcacaagtgttcgagttcattaaacaattttatggtcgccctgaaaatgttccattcttgaagattgattgttgcaatgaaattggtcgcgaacgaaacaaatacttagaatccaatgatacacaaacactgttagaatatctaaagaacaagcaaatggaggatcctgcattttttatgccattgaaataaataaagaaaatggtcggatagcaaatttcttctgggctgatggtcagtctatcatggattacaaatgttttggtgatgctgtatcatttgacaccacatttcaaactaataaatttgaaatgccatttgctccactccttggaactaaccaccataagcagacaatcatttttggagcggcattgttatttaatgaaactattccctcatttatttggctcttcgaaacatttttgacagtaatgtcaggaaagcatccgagcactatttt

SEQ ID NO: 150525 - DNA, 343 bp, Zea Mays
ttcagatggctgaatcaagaatcttcagtggcttttcttggtactgcagatccttttgaatctaaattgtcccttcttcaatgtgactttctggcactttcaggcatttgcggagctgggatacatgaaacacattgtggataacacacatggattctggcaatttaaggcggtaggctgcgggccctattctgccaatggtaggataggggccaacgaatcgcggagctagcttccctttcacttgaaatcttttgaccccgcgcattggggagaccttgaggtagacaaaatctccttcctcaaaaccgagttctctccttctgttgtctgtgtaactctt

SEQ ID NO: 150526 - DNA, 472 bp, Zea Mays
gcctaggcgtccaggcggcgagtggagctaggcgtcggcgccgcccaggtgaaaatgtgtatggcgtccgccttggcgaggtaggcgtccgccttggcgtagtaggcgtccgggcgacgccttagcctccctgggcgtcgccttagcagctagggtttgtattgggctagggtttgtactgggcctcgcgttttgggctttctgtgcgcgcgcggctctccctggcgccgcaaatttggctgctcttccctgcgcgcggctgactcttccctgcgcgcgcgcggcaaactcttccctgcgcgcggcaaactcttctgctccctctccctgcgcgcgctctctctcgcgcgttctctgctccggtgctccctacgcgcgggcgcggctactccctacgcgcgggcgctcggctgctggcctgctgctctctctgctctgggcgcggctgctgctctgctctgggcgcggctgg

SEQ ID NO: 150527 - DNA, 357 bp, Zea Mays
cggctggttgcgcccgtgccatcctgtctctggtggccttcgtctctgggcagtctcttgtagggtgcacgcagtcttcgccgtggaacaagcagtaaaatctgcacggctgctgcgcacgtccccggccccgaccgcgagttccgtttctgcggccctggggggatactcctggcggcgaggggcctcgccagcggggtgctggttggcgatgttgtgcacctgttgctgattgcggccgtcccgaacggagtctgcctgcgagggcctcgtccacgtgcggctggactgcggagggtctttgggtttcctctgagactcgactttgcgctggtggagctctttggatctggcgta

SEQ ID NO: 150528 - DNA, 339 bp, Zea Mays
gcaaattatatataaggttcaaaactgtatgcaggcgtgatttctagaatagctaaaagcgtgtatcagcaagttttttgtgcgccttgtgatcgagttttcctttataatcacagacagtttcagaactgatcggtatcctaccacgctcacggctcatccggctcagatggaccaatgacgatcccattaaaattccattctggcaacccatcaggatacacaagcaacgatgtcaggacgattcgctatatggggagaagattgggttaatttaactacaagttcagggcaatttcaccatcccctgtggagaaaatgctgacaaacgtccttgct

SEQ ID NO: 150529 - DNA, 1073 bp, Zea Mays
cagagagaaggtagattgcttgggaggtaatgactgacttaactaaagtcagtctgccagccatagagaggtttttcccattccagccattgagcttgttcgaaattttgtcaattaagaactgaaattcgctcttcttcagtccggatgatgagagcgggaggcccaggtattttaaggggaaggtagcccttctggctggcatattccttagggccgcgttgaggtcaataccttgacaacagataggcacaactgtggacttatggaagtttgtcaacagccctgacgcctcaccaaatagcccgagcagctttagtattgtctcgacctcctctttttttggtgcaataaacaaggccgcatcatcaacgtacaatgagagacaaggcaaggcgagcggcccctaattttgctgagaagtcccgtctctattgccaagtctaaaattttctgcaatgggtcaatggcaagcacaaataacaatggtgagagtgggtctccatgtctaagtcctcgaccatgagacaaggggggattcgggatccgttaacaaagacccttgaggtggatgttgagaggatggctgcaatccaatctctccaccaagaagggaagcctagatgttgaagcagcgagagaaggtattcccatcggaccgaatcaaaggctttcgcaatgtccaatttgaggaagagcgagggtatgttcatgcgttggtagcgcctcactgcactacgcacggccataaaattatcctgaatagtccgtttcttgatgaacgcgctttggcatggtgagacgatttcatgcatatgtggcgctaatcggagagcaagagtcttgatgatgattttgacaaaggagtgaatgaggctaatcggaatgctcctcaccgagtcaaaacttaatgatggtgtatctgaagagagtgatgggtgtttttttgtaggagatgtggccattttcatgtttgtaccattctattagaaacactgtacagtggcaccgtgacatctattgagtgtattgcagctatcaagcaatctgtgtcgccttccatagcacctcgc

SEQ ID NO: 150530 - DNA, 320 bp, Zea Mays
gttgcccacatattcaatgatatatggcaaatagcatgaggcagtatgcaagacctgcttcggctgattctactatgcttcggcttcagcgatctccttctgcttttggatcgtgacttggcatgtccttgttgtgtgtcccttatcctccccatagaataagtagaacaatctcctgggttgagtgctaaaccttcctccaaagcttcttccccctctgcctcttggaactgctggcctataggaggtttgctgcattcccgaagattgtgagctttgctggctgccttgagtgtggttttcactgtcatcatttgtgc

SEQ ID NO: 150531 - DNA, 418 bp, Zea Mays
cggcgagagcgtcgggtacgcgtcgcggcgggaggcgacggagcgcgacgagtgcgtgatgcggatgctgcactccacgtccatgggcgtcggcgtgttgccggccgacatgacccacccgtccgacggtgagctcacctacatgcgcgtgcattttgatcgcctcgttggctccaaggactccgagacgtactacatgcacaaccctgagggcagcgcaaccgggccggagctcacaattttcttcattagaacttagcacaatattaaaccagcagcctgatctcttatatatgttccttcctaccaatatgtacttttctgtatatatcacttgttatcattggattagctcaggtttcttataaagaaaagtagtaagagcgaaaaaatataatgaggtgtttaatttaagtta

SEQ ID NO: 150532 - DNA, 277 bp, Zea Mays
ataattcaatatgtgcctttgcatgattcgtctttatttgcctgctacgactaaacctgtagctaaacaaatggacaactgttgagatatcatgattgaaagtttcccatcttttttgtcccatgaaatgttcattgtcgggcagttttacacttctacttccatggttgtgatataaattcttttgttgggttgcaataccagagtaatagggtgtcgtcaaacctaaccctctggtatctccctaaacttctccggatcacatgttggtgatgca

SEQ ID NO: 150533 - DNA, 451 bp, Zea Mays
attgttcttctgtgcatctcaacgtcgtggaggccttctctgctagtcccttcacacactgacacatggttgctgccctctacctagtacgtccgttattggcaacacctttgcatgccttcaccaccgatgttttctcgggcttggcaaacctggcgcacgccttggccatgatggttcgacaatgtcgacttcagcatcgaccttcttcatcgtctgccttgaccgtgtcaccatcttcatgtatggcgcttcctccagtgtgccaccatcaccatgacggccctagcgcgctcgtgacttgtgtggctcctacttttcggcggtctcaacaactacgactatccttcgcacgacatattaataacgactgcttgtcctcgtacttggctacctcgacatcgacacaaatggctaccgtatgcatgatctactcatcgttttcttttct

SEQ ID NO: 150534 - DNA, 505 bp, Zea Mays
agttatgggagtgtgagtccgtgttctaataaaatctagccgctagttatgctagtacagtacatatggccccatcccatgtggcctctagatttcgtctgatttgatttggtttgattaaacccttcccagatgttattaactaaccagactgcctgcctgcctgccatttgacagtgattaaaataagcagcagcatgggtttgactggctctctttctcagatgacagtttataataacagtttatgtaagatacctaccctaccactagtagcacagtagtaagtagagtagcaagagctggggtggacagacacagacaggctgagtctgagtgattgataattcttgcttgcactaggatcaaaaatcaacttgacattcccgacaaaataccaactcggaatttgttccgtttcactcccccaactcctcccatacttctcatactctagattcctagggattgtacctcttcctacgtaccccaggttgattcttaa

SEQ ID NO: 150535 - DNA, 317 bp, Zea Mays
agaacaaacacatcagtagtccccgacgtcgacgaacgtacttccaaagatctcatcgacggagactgcgtcctcgccctacaggccctcgacagatatcaggctcaaaccaaggcctggcgcgacaacgcagtcgtcccaagagaattcaacaaaggagacctcgtactcgtccggaccacccggacagaatcacggggcaagctggagccgaaatgggaaggtccattcattgtcaagtcgaaggcatcccccagcgcgtataggctggcaacatcattcggcgaggacttagagcattcctggaatatcgataa

SEQ ID NO: 150536 - DNA, 1155 bp, Zea Mays
gtgatctgtcaggaactacagtttcatataaagggaaaccatgaatattgaggtcaggtagatatatttttagacaaaactttggatagcatactgcataccatattaatgtttgtgaagaaaggtgtggtgttcagatttgagcgctcagagaggtgtcttccatctcatactcgagcatcgcaagatctgggcggggctggcgcgtagaatgggaagtactcgagcatcggaagatccagacggggctgacgcgtagaatggaaagaatgagatggcggggtggtcctgcacttgcgatgggatgcgggccgacggtggtcctgtgcgctggatggcgatgaggggattgggttgcgattccttccatggtggcgaggcgtggattgcgtttggggcgagaaggataatgggcggggcatccacggtgcatggaaagaatgaataggcaatgggtggtcctgcgcgtcaccggcaatgggattcctacgtgttggattgctgcgaggcgtggatagcggcaaggggatgtgtttacttctgtggtagtgacatgatttttccttccatggctgaggcattaatcggtgaggggattgcggcgataccatgcggatgcaggggtagagggagagagggcgcgcacggggaagaagggagacactaacatgtgggtcgtatgcgccgtgagaaggcagaaccgtgcaccgcggtctacgttaggttcttatagagtagtagagatatataatacataatttgaaccatcaaaaaatttggataagtctacaatttcatataaatgtcgtgatctgtcaggaattacagtttcatataaagggtaaccatgaatattgaggtcaggtagatatatttttagacaacactttggacagcatactgtatatcatattaatgtttgtgaagagaggtgtgatgttcagatttgagcgcttaaagaggtgtcttccatctcatactcgagcatcgcaagatctgggcagggctggcgcgtagaatgggaagtactcgagcatcaaaagatccaggcggggtggtcctacacttgcgatgggatgcgggccgatggtggtcctgtgcgctggatggcgatgaggggattaggttgcgattccttccatggtggcgaggcgt

SEQ ID NO: 150537 - DNA, 574 bp, Zea Mays
tgaatctagggacacacgatacaatatataatttgttgtaaggcatgtcttgttcagatacagaatctactaaaactgcactatatatatttagacaatgtgaacatatgggcacgcggaacaataactaatctgttgcgaagtaaaaattacaagttcatggagaacagatcaagagaccaataaattacaagttgccaaatatgcatgaacaaatccatcctcattgtgcaggtactaatccttatgcgtaaatccagggacacaaacttgtaaggcaacaaaagaatcaagcacataactatagaggcatggaaatggacagaccagtttaatcttacatcaggtgatagaaatgaggataaacatgcatattgtacaaagaatcttatgtacataggctcaagccatggtgggccaatttattaatctgtacacttgcacagattttatgaaatgaaaaaatatcctcacacactgacctaatgttcttcccgattttttcacttcttatcatccactaaatctaagaacattggtatttctaaattgtgttttccccgaagttgcaaac

SEQ ID NO: 150538 - DNA, 349 bp, Zea Mays
cccaagacaaattcagggcctcaaaagcatggtcgatatgaagatgatatgttctatacagcgcttgcattctctaaaactggatcagaaaaagaacttgattctacttcttgtaaatctcgacaacacaagtgttcaatttttctgcacaaaactatatttgcaagttcccgatacttcgtttctttgttcactatttttaggtgcaacaatctcaacatttttgcagggccctcagctaacccgatatgggtaaatggaagtttatatatgttcaagtgttacctcttttgttgcttttaaaactgtttatattattgggtgcagattctcttccttacataatgac

SEQ ID NO: 150539 - DNA, 387 bp, Zea Mays
tgtaccaccaacaatatcattcgttccttactattccaggcttcccttcctgctcaatattggattgaaggtcttcacacagccacctatcgtttgaatcgccttcctaccaaaactatacaagccatctatccttatgttgctctctttggcaccattccttcctatgatcatcttcaggtctttggatgtgcttgctacaataacatcacttctacggcaccacacaaattagctccccgctcaaccaagtgtgtctttcttcgttattcttccaaccacaaaggttatcaccgtcttgatctctccacaaatagtattatcatttcccaccacgtcacctttgatgaggcagattttcccttctctgcctcgccccatctaact

SEQ ID NO: 150540 - DNA, 510 bp, Zea Mays
cactaacttcttcggcagagggtctaggcccaaaccgccatcaccagcaggaggatttgacacaaaatgggtaaaggccttggaaggaggcaggttccaggccgagtatgcaacaggggcgccaacatttgataccttgcctctaagtatcatttcgagccggctcaccaagtccacagcaggaattcttctgttagttacccgggttgagtcagctaggcctcggtacagatatgtcgggtatgcactgtccttaagtggctgaatattcttgaagacaaagtcagcaaccacagcctctgcagtcggacccctctccttcaacaatccaacttcagctagcagagcccctgccgcagccacctcctcgtctatgggggattcggtccagctcggagtgcgaacatccggctgtctccctgaccgtgggggagagaatttccgtgattctcaacgataaaccactccaagcgccatcccttgatgctgtccttgagggggatgtcgagg

SEQ ID NO: 150541 - DNA, 567 bp, Zea Mays
gccagtctgaagatgtcactgttcgaggctctatatggtaggaagtgcaggactcctctatattgggatcagactggagaaagacaattctttgggcctgaattgattcaagaagcagaggaacaagtccatataattcgagagaatttgagggtggctcaaaccaggcaaaagagctacactgataatagaagaagaccactggaatttgaggaaggagactatgtgtatctcaaggtgtcaccacttagtggaatgaggagatttaaagtcaagggcaaattgtcctctcgctacattggaccattcttgatctttagaagagttggagagatagcataccaactcaagttacctgataatctatctgatgtgcataatgtattccatgtgtctcaacttaagaagtgtctccgtgtccctaaggaacagttaccaatggaagagctcagtgttcggagtgatttgacttacacggagtacccaatcaagattcttgacaccttgactcgaattacaaggaataaagtgataaagatgtgcaaagtgcaatggagtcaccacggt

SEQ ID NO: 150542 - DNA, 580 bp, Zea Mays
cttggaaccctccaccaggttttacccccagaggatgatgatatcatcgaggatggcaaggtcctaggcatctcagctgaagaccagctcaagttacgagaacttcacattaaaaacaatcacctacaaaaacagaaggagatacttgaagccaagtgccagcgcatcaacatgcaagccaaagtcaggtagatgatcctagaagaagagaagaaagcagagagctggaacaggaaatcgcagaaacaaagggcgaggacgccccgacgccaccaacaacagcaggcccccgcactcaacataaaccctcgtcacccccatgccagtcttcgcactagctaccttccaagggttaaattaccttgatgaacgaagccttcttgcaccatagcttcaggcctccccttggctgcaaaacttcagagcaggcagttacccaaagtataatggcaatgcagacccaacttagtacatcatgagttaccatgttgcaatcgcattatctggggggacgacgccaccatggccaagtcattcatcatagcccttgagggcccagctttcacatgatactcaagac

SEQ ID NO: 150543 - DNA, 720 bp, Zea Mays
atcggctataaatgggtcacccttgacccagccatcatatggtatgccgatgcacgcttttgtgtcaccatcacagccgcaaccactaggcacgcggcaggtactggacgcgaccggaccgtccgagcatcatctcagacagtccggttataccgcggaccgtccgacgtatttcgccggaccgtccgaccagatgcaggcccgcacacaaaacactcaggtcgcaccgtacatggccggaccatcagggtacaaccctgaacacttcggccccatcacggaccgtccggtgcatcacgccggaccgtccggatatgttgcggaccgtccgccatcttacgtcggaccgtccggatatggcatgaaccggccgacgtattacgctggaccatccgactctacacgagtccatgcgcagactgcccaagtcgcgccatatatggccgatccgtccgggtacagccctggaccattcggcccgatcgcggaccgtcctattctttatgacagacggtctgggtacgagactacccatgtagcaccatatacggctggacaatccggatatacattcggaccatttggccaggtcacggaccatccgacctcttatgccggaccgtccggatatatgcatacgcagagccgagagctacgcaatacgcgcagttcccgcattcatcgcagcagcattatggtgccccaccagcaacacattat

SEQ ID NO: 150544 - DNA, 390 bp, Zea Mays
ggcagccagtcatgaaaaaaaagctctcctgtaacatcacattactacttgcacaggctgcagcgtcagtcaatcctattaaagctgctttcattcgtcattacggtgacctaattttcggcgcttactaacttccatggctctgggaaaatggagtggttgggctggaactggaacgagtcctgtgctgtaaatttccttccttcctcctctatttccagagaagggcctgcaagtgtacggtcccttcttgttcacaagtccttgtgatggcttgagcattgagcaacagtacttgttgtcaaaacaataatccgccattaaaacgaatactggtgcgaaacagtgccctcgcgaaataaaatttaagagtgtgacctagaagacaaa

SEQ ID NO: 150545 - DNA, 271 bp, Zea Mays
taatgtaggttgcgagcgagtgcacggggggttagggtacggtagtaggaaccaagagggggatgaggttttgaacttggtgttagcttatgacctgttgattgcaaatacctactttaggaagagggaatcacatctagtgacctttcacaatggtcaacactcgagccagatcgactttatccttgcaaggagggaggataaacgtgcttgcttaggttgtaagatgatacttggggagtgtgttatccctttacacaagcttgtagtg

SEQ ID NO: 150546 - DNA, 710 bp, Zea Mays
caatactgattttgtggcggcctcaaccgtagtgcctgccgatgatagtttgtttggttctgtgtctgagtgttttgagtccgatggtgaatctgggagttcgtttccttggacggaggagtcctcggatgaaggcttggattattttgttgcgttggatgtggctgcggcagagacttcaccgcatgtggagggtgccggggatcttcctagtgcgagtactgggtgtaggcaacgaagggtggtgggaaaacatagtgtgagcgaattttcgcgaagtggcaggcgccatcgtatggggatggaccgtggccgtctccaagtagaccgggttggtaaacgagaattgttgtcctcaccgactggggcgagcataggcgagggggatctccggaagctttttgagggtgaggaattgaggataatgctgtttaattacagggagatgggtatcatcccgaaggttgagccgatgtagtatgtgatgccctcgtcgtgtgtatgtaattgtaatttgtacggtaatgtggcatgtttgccgtatttgcacgcctgtgttggtccggctgcgcctgtggacgaatttgagcggagtgtctttttaatgagagacttccattaactcgcttggtgtgctattccagctgcacccttaggcgacttttgcgtggagtgtcttttagataaaagacttcgattaacgcacttgt

SEQ ID NO: 150547 - DNA, 311 bp, Zea Mays
cgcgccgcccctctccgccttctctgcggccgcgccacctcctctctgctacatcgaccaacagctcagaaagcaacgagcgttccagtggtatgacatgatcccacagaacgctttgaggtacgcagcaacagcgacgctccccgcctcggccctccctatttatccctctccatcctccacacagagtagcagaggaaggaggaacgaggaaggttttatagtttggattagatgattggatgatcggatggtagtagtttggattggaagattggatcacatcctacagtggcgtagtccacctctcc

SEQ ID NO: 150548 - DNA, 1192 bp, Zea Mays
gtctgcacgttccttcccaagtaaagaaggcttggagagcctcatatttgttcgtagtttcaaaacagttgcatgttgccacagcggtgagcttgtaattgatgcgttcactatggcagatcgtgagcctttccgcacaacgggtaaaatttggcgaaagtctcctccaagcacaataggtttgccaccaaatggtatgttcgcattttctgctttatgttccgatagaatatcacgcatagtcctatctagagcctcaaagcaatgcctatgggtcatcggcgcctcatcccatatgacaagagaagtccgttgtataagttcagacaacatggtacctctcttgacaccacaaacactactctcatctagatcaaaggggattttgaaacgcgaatgagcagtgcgcccttttggtaacagcagcgaagccacaccagaggacgctacagcaagcactattttttgtcgggatctcaaatgcgtgagtatagcgttccacaagaatgttttacccgtcccaccatgtccacacacaaaaaataggcccggcgagcaagcgagcgcagattcaatcaacatttcaaaaatgaatcgttgttcagcatttagctgcgagacagcggcagcggcagcatggtcacacaacagtaacggttcaggccttagttcgtcgtctatcagccggttgccaaacagttcatcaacacgtgccgataagattggcaggtcataatcagctacgttggcaccactattagcaaacgtatctgctagtttcctcaaaagcaacgtgagtagctgttcatgtggagctgtgtagtgtgggttgccaagggcttctttaagtccacgatgtatgtcatcggtaaagtagatccaatatttgtcgaacagagcacgaacattgcaaacaggacaatgaacgacaatggtaacgaacaactgacgaagttgagacgccgaggcagagactacagcctcatcaaatagaagggtccactcgttgtcaccttcgagcaaaccacgagcttcgcacgcctctctaaatgtctcgtacacagtattttggaaggtccgtatatcaacgaagctcgtcgcgccggacacaaacatcaagagcatgcgtagatagtaaagttccccagctgttgggtggacgtagtacatgcgcccaatcttggcagacgac

SEQ ID NO: 150549 - DNA, 695 bp, Zea Mays
ccagccgccctgttggtggtacgtatgatcgagtactagagctagcgtacctactgccatctttattgatcgtctactccaaaactgaaacgtgctaggaaataattcatgaatggctactaggatatactcctatatattttgctaaaacaatactataatgtccgtgtgtggtaagactattataatatccgtgcgttataatgacaccaaattattcggtaaatgttaggcacaacgattacataaaaacgaacaacatatacattattatcagcctcaatatctcacaaattcctaagcagcacgatgtcaatccccaaccaaacactagacacagtcacacacttatacatggcacccgctacagaaattactcagaccgccaagcgaagtagatagtctaagatgaatcggggaagaataacagacacatgatttcgggtgaagaaacctgcacctttagagtggccaatgaaccacatgctagtggcggcccagtcctcctcaatcccaagagacaacccccctccaccacgcaataactagacgtcaaatcagggacacccatcaatcaatcgcagatataccccaaggccaatccagggcaaaagcgacggcggtcggatctcccgcgggccattataccgagcgtcgatctatccagcttcctctctgccatcatggcctcgcgg

SEQ ID NO: 150550 - DNA, 357 bp, Zea Mays
gtattattgaagtggattggagtgaaaatcaaactcagtcccaccctaatccactctaacacacacacacacatgaactgaaatggatacagctgcacctaaataagacctaactgtggatgcaaatgcatccaaacaaggtctaattgtctctaccatatcatcagtgtaaaactgtagactaaatcaacggtgataaagtagagtgctaaaaatctgatagactgaggcaaaaaagtagagtgtagaacatgatatatctacttaaattctgtcactgaaaaaggatgattacacagtttgtcttcattgcacaccatctcccaaattaaaaagcaaaatcttgaacaacacact

SEQ ID NO: 150551 - DNA, 760 bp, Zea Mays
caatagaaaaaatcataaactgtcggaatagttgagtttgagcttgaaagaaaaggttcctcgaaactccttcctaagaaagtacaatggttgatcattaactatttagattcatgctgcttgataacctactattcttttctgggaggtttaggccggaggtatcatcctctgaggctctgaccacctcctcctccctttacttacaggttacaacttcccaccttttcttcccactcggcgcttgctcctcttcaaggttccattgtcattcaccaaacgattatggttaggttttaaggttttggttcgacatttaagttttgaggggcaggggtttcatcactagtgcgccattggaacttctagcttcatcactcggaccatgcacgcctcttctagttaaataggagtagctagctccgatgtctgttaagaacacctggacagtaggggtggtaatggatcattttcaggatacttcagtcagtggcgctagctactcaagctaactagatggtatctgaagctggagatcctgatacggtaagtggcgacagtatcatgtctctatgtgtacccccacaaatctttagcgataccaccaatcaactttcacaaagcatcatggcactaagatagctatataacatatgtacactagtcagtagctacaaaatgataatgccgcattaattcatctgcaggctgatctcgacgggctccagaagaacattgtacatgcttgcttgtgtgtttg

SEQ ID NO: 150552 - DNA, 375 bp, Zea Mays
ataccttgcttcttcaaactcttgagcgtactcttcaactccattcttctgatacaggttcagaagatgtctcatggccttgggatattcttccactccaaatttggcccaaacagctctgccaaactgcatccagtttcccagtccctgcctcatcttgtacacttgaagccacctcgctgcattcccctccatgtgcatggatgctgatattgcccacaaatcttcaggaacctgataaatggtgaagtattcttggcacttggctaaccatattccaggttccttcccttgaaatctgggaaacaaatatttaggcagagatggatgtcctcgccctcccatcacctgatcttcttcttctcttactctctc

SEQ ID NO: 150553 - DNA, 334 bp, Zea Mays
gttgcgttatgtgatagaccaaaccaagagatgaagccgcatggtagtggaaagacatggagaaggtctaaggctgattttgtcctgagcaaggcccataggagggtagtactagagtggaccaagatgttaatgttccctaatgggtatgcaactaacctgtgtagggggtgaacttatctactatgagagtcctagggatgaagagtcatgactaccacatatggattgaacgaattcttccggcgatggtttgaggctatgtccatgagcatgtatggctagtgcttgcagagttgagctatttcttccaccagctttgtgcaaaggagtt

SEQ ID NO: 150554 - DNA, 740 bp, Zea Mays
tgatcttattgggctaccaggagtaagtaccgttggtctagaagtgattggggtgttacaaagaccttaactgactctgattaaagataggatagaatcaagtttgatcaatcctagaggtagcaaagttagaataggagtcacttaaggtagttgtatccgagctaggctctctatcatgttgtaatcctgatggcagtattctgctatatattcagcctccctcggtctaataggtcagggcgaacaggttaaaactggtgtcgtgttttcttacaaggggtccagttatatttttcatagttgaaacgtataagatatgtatttgggcgttttgatacaatctgaaggaagcacaatgaaacaaatagcagaaacaaatagcagtggatatctaagtatgaatacaattttcttagattatttttaactaacaaaacaacaaggccatgtggttccattcatcgcttgtagctagtatagaagcaagtgggaccattgttttgggcttggggcaaaaggtgctatactatttagaaacttggtcctgagctatcgtcaaatccattctctactgtctaccactctaccttcattaatacctaagaaggttgatacattagatcactgagtggatatggcccacaacacctctggaacaatattgcaaagaaataccaaataacaattatgattcacaagttactaatggcgctaagggcctatttgtttgggattat

SEQ ID NO: 150555 - DNA, 415 bp, Zea Mays
caaaccgccatcaccagcaggaggatttgacacgaaatgggtaaaggccttggaaggaggcaagttccaggccgagtaggcaacaggggcaccaacatttgacaccttgcccctaagtatcatttcaagccagctcaccaaatccacaacaggaattcttctattggtgacccgggtggagtcagctaggcctcggtacaggtaggccgggtatgccctgtccttcaatggctgaatgttcttgaagacaaagtcagcaaccacagcttctgcagtcagacccctctccttcaacaatccaacttcagctagcagaactcctgcctcagccacatcctggtctgtgggggattcggtccagctcggagtgcgaacatccggctgtctccctgaccgtgggggggagagaatttct

SEQ ID NO: 150556 - DNA, 296 bp, Zea Mays
ccgctgcgaagaccggccgcaggaacggcgccggcgcctcggccgccgacaggtcccgcgccaggcggtgcagggagcgcaggacctccccgtcgggcgccgacgaggagtagggggatgacggccacgcgtcgctcatcattggtgctgctgtatgtgccttgagtatgtaacgatggaatccgattctgattacaatctcaatccgattctgattacaatctcaatccgaagagaaggcggtgaagaaacacggatggatggacaagtgagacgagttggagatgggatgggac

SEQ ID NO: 150557 - DNA, 675 bp, Zea Mays
gccgaggaagtcgagggagacgaaggtgatccgactcccgagagcgaaatcctcgcccttggcgaatgtcgaatagctggccatcaaagtgaaaaagtcactttagcacgcttgcgatctcctacctggtgcgctaatcgtcgtggtttcggaaattaggaggacaatagatttgtgttcggtgggggatgcaagcgcggactcactttaaatggtggatcacgaggatccaagctgggacacaggggttatactggtttaggccgaggccctagtccagtgtagtgctgattgttgtattgctcataagtgtgttacaacaagtgtgtttgtgtctagaaggaagattgtcccgcccttttatagctcaagggtggacttcatagttgggacttgtattctactcgggggtcttcggcttgttgcccctaggctgctctagccctcccggcatcgcctgtgtgggtgtgcgttatgtcctgtcctccctccatacgggtcactgtagcttgctcggtatcaacgttgcggtacccgacgggtcctgcaaagtgggcttacgacaaggtttagggttgtgtccagtacaacttaatcttctgtcataccccttgcgtcactatccagcacgcgtaggtatacacccgatatgtggtattgtctcgttcttttccg

SEQ ID NO: 150558 - DNA, 617 bp, Zea Mays
atgtgctctgcaagctaggtggctttggttgcaaaagagtgatgctagcatgccatggaggggtctggaccttccgatacaaccacaggtcaaaaagtttgtttacatctcggtagttacagctgtgggaaatggtgcaaacacgttgttttggtctgatcgctggttagaggggttctacgtttatgaggtcgctccacaagtttatcagaaggtgtataagaaactcatatgcactaggagagtggctcaggcccttgataacagctcttgggtgagggatatcaaacctcccctatctttggttgggttataacaataccttctactgtgggatatggttaatgaggtggttctaaaggatgaggaggatattcactcttggaggcatgaacttcaagtatctatttggctaaatcttgttataagaccctctttagaggttctattgcttttgaaccttggaagagatcgtggaagtcttaggcacaccctcaaatgcaagttattcttatggctagcgattcgggacagagtttggactactgatagattgcaaaagagggggcttcctcacactgatgtttgccatttatgtgaccaagcctaggaaagag

SEQ ID NO: 150559 - DNA, 534 bp, Zea Mays
ccgccgctcgggggctagctcggtccatcgtcatcaatcgttgagtgcgcagctgcgctcgccgtatgccaactcgctagggggactcgccaccatctgagagttccgtgtctggtgttcgggggcgccgtgaattggtcgtcggggcgcagacgcacactcgcctccgctcttcgtcgcagccacctccattggtccacctccgcgccgccgccattggtccaaatccctgttgccgttcggagcacgagctcgacccggtgagcttcaccacgccaccaagtttctcctccgggtcttcgcgggcaaaacggtgaagggcgcgcggcgaactgctcgtcggatcttcaaggccgcgtctcaccgtgggcagggaatcccactgctccgatctcggtgagaattacttctttagattcgctatgttccccgattcgatttgcgctagtcggtcggcgagtgaggatcttgggtcgcgggaacgctatcgccggcaatggcctccgccgtggggtctggcggtgaggccgtcgg

SEQ ID NO: 150560 - DNA, 361 bp, Zea Mays
gtccgaatccgtgaaacggacagtaaccgtgcgggtaagtccctcccatttgaaacactgatgcaggtacttgtgtggacgttgctgtcgccggcggtggagggggaaccaccactggtggtgctcgacgacgacgagatgaactgcgattatgactgcggcgatttggaatccagacaccggtgacaccggtgttaaccagattcaccattaccctgtgaatggcaaagccaatccgattgtcgtcgaggattccttcacggtatgcgcggaggaactccctgatgacggcacggcggatcgcctgaacgacgcgtcgaagagtaatcggtggcattgtacttacagttttcttcgcgtt

SEQ ID NO: 150561 - DNA, 622 bp, Zea Mays
gtccagctctgtccctccgccaactccggaaggtccggagattattcttgggtgaccgctccggtctggcgtcgaacctggagcaacgctgactcctctccctcaggtgttggctcgcactcaccaggccctccaggaaaccgaggcgactatctggcgggagtgggaggcgctcgagatcgagcaccagcgcctcggcgactagtgcacccaactggagaagcgtactaatgcggcgtcctgccaatttgcctcagagcgggccgagcttgagcaggagcgtgaggacttcaaggaggacatccggaaggtgtctgaccgagaggaggaggtgacccggaaggagagaagcttggtcaagaagaaggaacacttagaccaaaaggaggaggctgttacagcgctccatgataagctgaaagcttataacacagtactggagaaacagcgggtcaagcaggccgcggcagaggtgaagctgcagaagctgcagcaggaacttgccgacaaagccagcgacattgctcgcatcgaggagagcctcaaggcgagggaagcttccttggcgaaacgggaaactgacctcacctggcaggaggaggacatcgccttcagggaggag

SEQ ID NO: 150562 - DNA, 403 bp, Zea Mays
gaattaggggcaagatgataaggaattcattaagtatttgtttctaacccaaagctgcaagattttggttgtgggtcctgccacactcagggaatgggtaaatattttagaagctggaagtacatttttttaagaaggtgcacattagacctgaatctggacagatgggacgcggacatgcggttatgcgttgaaatacaccttgtgattcttcactttttttgtctcagcttttatatttacatttgatctgaacagtttcccctcttataggagcatcatctatgcttgtgtcttcgaaatgaatctggaatgctgtcaacatagtctattgctcttgttcatgtccacatgtagagttcatatgctccattaactgtaactcaaccacaatatggtacca

SEQ ID NO: 150563 - DNA, 579 bp, Zea Mays
ggtgtcggacgagtcccttaacccggcagggggtagggttggagggtttccttccttctgctcagtctgacatccttggcttttggtcttcttgcggatttttcttgctggggcgagcttcttcagtttcttgtcatagtctatttttagggtgcggtaagcttcacgggtattggtttcttcgccttcagctattgagaggctctcttgaagggacgccttttcccctgaaagttccctgactttttgctccaggctttccacccgggaggttagggaggtgcagtggagggtgaggtcatcatattggttatcgagggtgtgaaggtatccagccatgtagacgatggtgggatcatcctcaataggatctcctcctgacagggcctgaagtcttttcctccaggtgggggtattcttgttgctgggtggaaagtagcgaaggggggtttcaaagatcactttgttgtagttctggcacagttgacggagggttgttcgggcaacattttggcaagtatctgggaaccggtatccggtaaaagtgacttggaaggaaggatggtttggatagtttcg

SEQ ID NO: 150564 - DNA, 1042 bp, Zea Mays
cttcacgccacaatatcttctcacccaggccatatcttcactcgggactcacacacgacagaaagaccttggcacggtgaagagatgctacacaggatccttggcaagatatgcacgtttaggtcggccaacaggtgtttgaactcgggcagaatcacacctccacgtgttcgatcgtgtgctcaagcgctcggctgcgcactagctgccctctacgcgcgtgtcgtgcatggtcgatgcctgtcccccgcgcctgtgcccggccttgcccgagggtgcctataagtacctctagtgcgcagctgtccacacatcacttcgtcgcatgccccgagcaaaaactccaactctggcgagctctcctccgcccgccatccctgcccgaggacggccactgtggccagcccttcccgacgacccccagcctcgccctatcccctggactgcttccctgagaggcggtgaagctttcccgagcttgagtcatggcatttcctcaccggagaagcgagcgcaacctcacaggacttcggtcgaccgccaccgcgcgtagaccgggtcacacggtgagccactcttcaattccttgcaaccacatcatcgttgacctcccctgaagctccccgagcactttaatttgactctaccgccatgagcaggccggagcacgcaccgccggcgagcccgaccgcctgcgcacgcgaccagcccatctccaaccaccaccgccaacgatccgcacctctacgtgatcgctagagacccccgaacctcacccgacccttcgccggacctctaccgtcgccggtaagccgcgccaccgctttttcttcttcggtcactgttcaggcgaggtaggagcgcgggtaagaggggataaaaagctagggagttaagtgctaagtccttcaggggcacggattaaacgactcagttaggaataagcccagggaccccgatgcaaagtccttttctttaaccttttgtatttattcttttcaaataagcagagaacttggaaaattcataacttgagttttat

SEQ ID NO: 150565 - DNA, 316 bp, Zea Mays
cacaggtcgtcccatctgtagcactagataacgcaagcacgtaggtctctctaaagatcatcgaacataaaactcaatcaaggatacactccctcccggccctctgatgggtgaataatagggagatttcaagtaattaattttagattagatttggacctgtagcaatggcatgcatgtttgcgggtccatccaaaattcaagtgtctcacctatacgctacatgtcagctatacacgatcgaggggagagaaacatgggagacgtttttgtgagcaaaaggagagaaaacaagatgggcatggctgtgctctgt

SEQ ID NO: 150566 - DNA, 888 bp, Zea Mays
tcatcgtcaccgtgcctcgtgcaccacttgggctaatggcgaagagcgtgtcgtgtgtgctctatcttaaacttggtttcattgggcttgttacgaaagctctccttgcctatttcaagtagtatagcataatctattccacttgcccaagccacatgcaagcagttgtagatgtcgttgaagacgatgacccttcaattgttagtcgaccaccgacccttcaagtacttagaggtatgatggtgagaagcttctatggtagagttgttggtgttggccatttggccgcggaaggctgacaccttcttactattgccatcaatagggtccacttagtgcaatagccatgcttgatctaaaatgtgtggcctctgaaaaaaatatatgtacttccatccttttatcctctgatttcgtccagttccttagttgttgcaattatggagcatcgaagttaaggactggtttaaaacaacatcgtcgtggctacttgagggaactattatacatgtaggaggagaaaatggaatacgaccatgctataggggaggagcaccaaactagggaggaaacaaaaaagtagcacgtgatccatttggagaagcaccatatggatatttgtacgtgtatggaggatggtatggttaagtgaaagatggaggggaatcatcgattgtaggagcttcagtggtaggagaaagagcgtcagtggtaggatcatcatgaagaagaggaggaacatccatggatggtctgtagggatacgaaggaggaggaagatatgggtatagaaatagaggttatggatttggggaatagggattgatagaaacacccgctcgacaaaattgtatgggcgaaagatcatcccacacggatatgggtgtt

SEQ ID NO: 150567 - DNA, 529 bp, Zea Mays
catactttgtgacagacttcttctcctgcttgtaggattgcaaatcaatcttcattttctccaggaaggtgaccgggtagaatctccattcaaactgtctgatgaagacatcccaagacaggactcctggtgaggaggagtgcgctgcctgcacgcctctccaccaattttgagcctctcccttcagcagctgtgtgccaaagcgaactcgatctccatacacaatctcgaagacattcatcttatcctccacgtaagttagccaatctatcgccttgaccggagtaccactgccatcaaaagaatccaacttcatgcccatcaactgcatcagagaaagaccactgattggaagaggcacctcggccccgccacctggagcagcacccgcagggacagcgcccctgggcactcctccaccaccagcaccctgagcagcacccgctggggcaacaggaatagcttgcctcagaatggccaactcctgctgcatggcctgcatcgcggctaacattgccgccggactcat

SEQ ID NO: 150568 - DNA, 636 bp, Zea Mays
gcatgtaaggccactgagaactagatctcttaatatccagtatcttatgatcttgataagatgaagcattaagttggagggctaatgcgatttattaattgattttgagtgtggtctctaaagttatcgaggacttttaaaaatgcatttctgagtttctatacctggtatgtggtggtgcatcctatgttcatgtcagtcatatgatgtttagggcgtgttcggagattggcgaaggtgtctagctaggcatctatcccatatgtttgattttgaacgcatgggttggatggacctacatggctggggcatcccagggttggaactaaacaaacccttgttactgatgtggcatgacatcatggtgtgtatttttatatttaacatgtcatttttttcttgaaaaatagacctttttctcgcgctcaagcaaagcagccgcactggcgcaccgcacaccacgacgcacgctagatactctattttagacctgactctacaaatagtattatctatagtgtaaaacaatgttttataacatcatgtacacaatctgttagagacaatctaagtagcactccatggtcatctcgtccgctgtctccttgcacccaccttgtccgcgtgccgctcctc

SEQ ID NO: 150569 - DNA, 288 bp, Zea Mays
tatttggtagggtcaaattgtgtgaaatgatcagcattttgctacctcctgaaggctacatcaggagatgtggtttggcatgctactattttcaccaaaatctgttcgcactatttctaggactgaatgacttgattgatggttcatattattagacttaactaaacagcttgctgtaaccgatgtccgacataaactgcaacttgaactttccacgatttctcatcataatttttccacgattcattatccaagcgagaagggagctggatgatccagagaatccac

SEQ ID NO: 150570 - DNA, 427 bp, Zea Mays
tttgacgagcactgagggaacgaaaagcgcgaggaagacatgctgggtaggctacgtagttctcttcgtgtgttggtgtagtgtaggggcacatacatatgctaccttttcggttcttgcggccgccattggattagaggagcaaaggtgatgaaaaagttcggaggacacacaattttcaaaggtcctgtctagtacactatcaaaataagctagtctgagtcacggctgccattggaggacgggcaaagaaaggtgacgaaaagccagtctgacccacacagttttcaaattaacaatggccttgtgcaactctttcgtgttccaaagccactcctaggtcccagctatttcaatgtaatcttgcatgcatacatagccacatcagtgtacttaaggtccttattggtatttttttttctttcac

SEQ ID NO: 150571 - DNA, 624 bp, Zea Mays
tgtgtctttgttcattacataacgtgttctgagcaacacagaaaactagatgttgatcttcctccacatggtttttggtggagcactaataatgtagtatttgttattcaagctgtctgtttctgggctatttacttttattcgttagtttcttggttgatagttttgtagtaggtgcaatggttgctttttctaatggacgcaaatgattaaacaagtaccccaattgcgttgttctttgggtttggtgtgcatgctcaaatgtcatagtgcactgtatcatcgttatagtatgacttgtcctattgatgctgtttggcccaagcagtggagctttcaatgtctgatctggaagaatgtgaaaaatggaatacctgtcactttcaagtgctcatacagttgtgccttatcactgttttgcggttccattaggtttaaacctcctccccttcttcaaaatgagtgaattgatgagtgggcgtgtgcatatgttgtttgatgtgataaggtgatcaaattgtttatctgcccaactcctaatgtgctgcagctgcctgtattactttcttatggagtgttcttaatgcctcaactagtggtgcatggacacgctggcacatttgt

SEQ ID NO: 150572 - DNA, 809 bp, Zea Mays
aggctcggcctgctgcttcctgctcgagaacgtgtcgtagtgctataacggttcatgttcttctccaagcttggcgtgtagttcgcgaagttgttcaagctgcgcgatctgactccccgcggggatctgaaccgcaccttgttcccttggatttccgacgtgtggtgctagtgctggtgctggggcgttggcctcccgaggcaagccaagctggtttccctctccgtgttcctcgtgctcgatatggaagcactcccgagtcgagtcgtaaccctcatcgtcggagctgtagtcgttggaactgtcggagaggtagtagtcacatgcggacaagaaatgccgcatggccccgggatcacgaagcccggagaagtctaggctaggacccagatcatcgtctgcctcggagcctacatacttcgagttttgagaggtggcaagcaggtgtcgaccacagatgatgaccgagcaactctgcgaggtggagcaaaagatcaaacagacccgcaaggagggagcctaggacgacgttgttggtccacgatgactgtaacatgacacgttgccgccaacccatgtccacgccatgcgtacagtactatcggtgttttgacccgagggtcctaaccaactggtgaatttgtgctacatgtcccggtccggatgggtgatggaagaagacacaacatttatcctggttcgggcaatagaaggccttacttccagcagagggggaatgagacttatattatcttgcacctaagtgtttgtagtagggggtacaagctggttgagagggagtggatccc

SEQ ID NO: 150573 - DNA, 658 bp, Zea Mays
cttttgctgtgatcatcaccgaaatggccgaagacaagagaactgtagaccccacacttgctggtttctacgaggctatggaaatgaccaacgttgagaaaattactgatgaaatgttggctgggctatctaggattccagcgatgacgatagttttgatttggagagtgataacgaaaatgtcaaagatcggccatggttttatgtcaaaaatgatttgagcaagagggaagatgtgaggggtataatccagcgccctatacagtcacacttcggcatcaggagatcgtcgattgcaagtgggaacgaagtgcaagcgtgtttgatggctttcaacatggtgtgtgcttacatctgtaccagggattttgttcaagagcatattgcttataaggtgtggccgctcgttaatgactgggagatgccgaaggagactgctgctggttctagcgaaggtggtctggtttacctgagatacacctatcgctacagaaattagtttgatgagccgaatgatgattggcttgaggctgtcgaaaataccagtgacgagctgttgggagcttatacgaaggcagaggatgaagccataaccactaccttcggcgccgtgaaaagaggaggttgaatagagtttttgaggtaatttaatttttta

SEQ ID NO: 150574 - DNA, 1298 bp, Zea Mays
atgcatttcatcacagcttgttatacccttgttagttaatcttgatggcacggtttatatgctcagatagggcttgctgtctgtacggtgtggtactagtcttgctagcgaatgtggcggagtaatactgtgtgtcaccactcaccaccgtgttttatacttattcatcacaacttgttatacccttgttaattaatcttgatggcacgatttatatgctcagatagggcttgttgtctagacggtgtggtactagtcttgctagtgaatgtggcgaagtgatactgtgtctgtgtgtcaccactcgccagagcttattgaaatgactttcaaatttagttaccaaaaaaagagaacaagctaaatttagttaccaaaaatgtggcgaagtgatactgtgtctgtttgtcaccactcgccagagcttattgaaatgactttgaaatttagttaccaaaaaaaagaacaaggtaaatttagttaccaaataaaaaagagaacaagctcagagtagcgagtgtcatctccacaaagttcagaagatcgcaccggacccaccagtgctaatgtatttcatcatagcttgttatacccttgttagttaatctttatggcactatttatatgctcagatagggcttgctgtctgtacggtgtggtactagtcttgctagcgaatgtggcggagtaatactgtgtgtcaccactcaccaccgtgctttatacttattcatcacaacttgttatacccttgttaattaatcttgatggcacgatttatatgctcagatagggcttgttgtctggacgatgtggtactagtcttgctagtgaatgtggcgaagtgatactgtgtctgtgtgtcaccactcgcgagagcttattgaaatgactttgaaatttagttaccaaaaaaagagaacaagctaaatttagttaccaaaaatgtggcgaagtgatactatgtctgtgtgtcaccactcgccagagcttattgaaatgactttgaaatttagttaccaaaaaaaagaacaaggtaaatttagttaccaaataaaaaagagaacaagctcagagtagcgagtgtcatctccacaaagttcagaagatcgcaccggacctaccagtgctaatgcatttcatcacagcttgttatacccttgttagttaatcttgatggcacggtttatatgcttagatagggcttgctgtctgtacggtgtggtactagtcttgctagcgaatgtggtggagtaataatgtgtgtcaccactcactaccgtgctttatacttattc

SEQ ID NO: 150575 - DNA, 423 bp, Zea Mays
ggaaggtgtaaccggtgatgcttgtgtcattgagaaagcgcttgatgaatttatagaagaaacgtatgatattgggttagcagatgaggaggatgaagaagacaacacatacattgatgatggatatgtagcacctgtggactcatcacgagacgcaaatgatgatgatttttttgtttaaaagaaaactcacagactattggcacacactgaattgaggcaaacacgtacaatcgtgtaactattatatatttcatttgtaatgatcttacaatcacgtacctcttatttttataacacataccaataacagtgattttagtggaaaagcaataatcgtcgtgcagacatattaactaagcaggctcatggtcgtcaattgctcactcactcggtttatatttgagcacaaatgcagtgaac

SEQ ID NO: 150576 - DNA, 527 bp, Zea Mays
gtagaaacgttcgtaacactcctgttatgccacttcttggcagcttggcataaatcattgaaaataagctgacaccagtcaatctggtggaaacgatccatctgctcggttaaaagaacctcatggttcgttattccccagctggcagtagggaacaacaacctattgaacaatatcaagaaaaagcatctgatgcttaaatcatcgtcagaacctttcctcaaacgatcttgttgagctgtaaccccaaaatcttctttcgatagcccaagttcagctctcaaattgttggcaacaacagcttcatcgatgcccaatgcagttcctcccccagcattcggtaaacccaaaattaggtgcaccgtatcctttgttattttcagctcctttccagggccagctcgaattgtcatgtcattggggtcgagcttttccatcagccaagctaagtgtgatctgctgccgagtgcatccagtctcatatcaagaatactagaaaatcccctacgtgcaattgcttgttgttg

SEQ ID NO: 150577 - DNA, 769 bp, Zea Mays
gctgcttcggctcctcttcgatctctgttagaaactgtgcagtcctgtggcgtagcgaccacgagctccaacttggtgtgctggtgtttgcggaaagagaagatccctcaaagactccttggcctctggctcctccagatccgccgtagctattgtacaatgcccaaacgatagttgtcatagttgttcatttttgacctatgcatgatggcatcggacaaattaaaaagagatagcaccgtcaagattttgagctaggcagcccctttatattcccatttgtgatgagtgttggtgatttctttatagtcttctggcatcttaattattctcatacgcgagcacatgcataaacacaacactattattatctggataaataaatggctaatcattttaaagggcattatatgtccctctcgattagtcaaaaataactgccatcatagttcggttgcaagcacaagcttgaagactgaattatagacgccaatatctcttctgaaatttgaaatagacttttggaaatgtcgttgcaatatatatttgtgttcacaagtagtttcagtaagatagtatacctttgttgtatctataggtttcatactattatgatcaaatggtcaaactagagtcttacagtgatggttgtgttcctcccataagacacaatagatcgtgattaattagagtatgaaggggttgtgtcagatcccctgggctagcaattaacatagaaaattatttctgctctatataaataggagga

SEQ ID NO: 150578 - DNA, 321 bp, Zea Mays
attgagggattggtgctgaatttttagttaattgtaatcaaataggtgttagcaaaaaagaaggtagggcctgaatcatttagaaataattgcttttgagtgaacctaaccggcttatctctgaaccacttcaaacaggacactgaaacagatatgagcagctaggccataaaagcagaacccaggatgattgcactatgtctcagcccaattcagcagctagtactgtagtacatatctcattgcccaaccactagtccactatctttgccttcaaagtggagtaagtgatggcccagcaaatcagatctgaatctcaag

SEQ ID NO: 150579 - DNA, 469 bp, Zea Mays
aacaaatgtaaccatcactactgtcaaggcagctgcttgcttacacaacagctcacggctcaaagagggatccatctacatgcatataacaatgatacaagaattaatctaatcataccctgcttggcctcaacatggttgcaaaatgaatcagtaaggaaaaagaacacggctgcatcatctatatgatacctccaagtgaacgtaaaggacaacatcatcgaccattttaatataaatccaaagcaaaccacatgaaaatcaaaatcgcagcaggtataacatgaacaacaaactgtaccaaaccctaactcatgaagcaagcaccataaaatagaacgattggggttgatttcaccttggggtcaaggtcgtagcaacagagacggggcagatctagaagtataggaagcagatcgaccagagacgaagtagatgcccaacaccacggagtcacggcaccaggcgg

SEQ ID NO: 150580 - DNA, 333 bp, Zea Mays
ctctcatgtggtccaacgtaggggaaaagacactggaagggcctgcctttgttaaggaggcagaagagaaagttgccctaatccgcaaaaggctactcgaagctcagagtcggcagaagagttacgcagacaacaggcggagagaactcaggttcgaggaaggagacttcgtctacctcaaggtctccccaatgcgcgaagtcaaaagatttcaagtgaaagggaagctagctccacgattcgtcggcccctatcctatcattggcagaataggacccgcagcctaccgccttgaattgccagaatccatgtcagatatccacaatgtgtttc

SEQ ID NO: 150581 - DNA, 338 bp, Zea Mays
tgtatgagtgtatgaccaattatatgtggacaagattgtgttttgtgtacttttgtgaatgagacttgtatgtggatgtgaatgaacatctgtgtggttaggatttgtttattgtgagcttttccgattacagttaccgtttcccgatcaatttcgagctattttgctcagatttatccgttttcgatataccagaatttaccagccgttatccgtttccgactttcccgtttaccgattccgaccgaacaaaaatttatacgggtgaaaacggtgagatgttttttccgaccgttaccgactgttttcacctttaggtgtgaatgcatacatccacc

SEQ ID NO: 150582 - DNA, 710 bp, Zea Mays
gtgacttcaacatgatcaggagagcaagagagaaaaacaaaggttcaatcaaccgaagagtgatgaggcagttcaataacacaattgatgatctacatctccttgaatttgagctctctgatagagcattcacctggtcaaatgaacaaatgagccctaccatgactaggatcgataggatcttcgcgacaacagagtggcacgacttgttcccctcggctgacattcagtccatgtgcaccatgacttcagaccattgcccgcttctattgcaaagccactcttcgggtactttctacaaagggtttaggttcgaatccttttggcctcagattgacgggttcaacgaggtagtccatcaagcttggaattctacagtaaacacagacgatgccatcctactgcacgtaaagatggttcgcactgccaaagctcttatggcttggagacgcaatacggttggcaacttcaaagtgaagatggccatcattgagatcacccttactcttctggataaagctcaagagaatagacaactctcctctgaagaattagacttcaggaggactcttaaaagcaagattcttgatattacctccgctcagagggcacgtgcaagacaacactctagaatcacctggatgcggctgggcgatgctaacactaaattctttcacctaacagccaataacagaagacggaaaaattta

SEQ ID NO: 150583 - DNA, 276 bp, Zea Mays
cgatcacgagcataaagagataagtctcaccggttatcgcggcgtggagggcaccggccacggtgcagcacggaccgcggcggagcagaggcatcggagagcaattccagcggctacagggtccttccctctcccctgacgcccccataagcttccctgcatatcgccgaaccccaccgtacaccaatcgagcccccagcaacggtatgtctccaattagccgacggcggcgcgacgacaacccatccaccctccgccaacatcgatggtggccag

SEQ ID NO: 150584 - DNA, 415 bp, Zea Mays
gttgaatttacgttccatgcacaatatagatagaacagtaaaactaaggaatacaatttatttaacaacaccataaaactgtctcgatcacaattatacttatttaacaacgaataaaactacatttgccatagcataaaatagtactttatttgtaacatgaacgttttttaaaacagagcggagtactgcatttaaaacagcaacagagcaccacaggtctcgtttcatggtgcggagaacgccagaagtcgtccagcttcccgaggcagcggctgcgtgggcgcttctcgcgaaccgttggccacccacttcctggagaagcgcttgaagaagaagctgggtaagaagttgaccgtttggttcggtttctggcttctgacggccacaatctccaaagaagctgatccaaaca

SEQ ID NO: 150585 - DNA, 1207 bp, Zea Mays
agagggcacgcgtgtcctccttcctcagcgactgaagctcaacatagtccagatcgcaggccctcgccaccacacgcttggcgatgctctcgttccaagcgtgaagggggatcccctccaggcagagccggacgtgatacttgaggtctacagggcctgcctgggtcatcggtagccaccgcctaacgcggatgtcgaggttgccggagagaaattccctgcgctccaaagccgtctccctgtggtgctgatgggagaaggtgacgacgaagtccgctggatggtgtcttgctacggagatgtcgtcggggcgcacgcagaactggtggcagaacgccctcttcatcctgtcggtgctcacctcaggtcggtcccgccccagccaggcgacgacggcgtgggtcgagagcctctctagctctgcttccatgtcgccggtggaagcagcgacggcgaaggtttcactggggcgtgtccctggatcgcctggtcgaggcatggtggcttgaacgagcggagggaagtcatcgctgtggagtctggggggcggttgcggggcagtcgtatgctgggaggtcttggccttgggacagagccaagctttatggtcggggcctccgcatccgaaacaacgcagagggtccctgcaggaggaagcacgatgtcctctgcccaaacaacggaagcatttaccgctcagtcttaccagcaagttgtctctggccgaatttgatggcagcgacggcctggtggttggacgtcttgaatgctcgcgggcaccatgtgagcgcttgcgccggaccgttgtccatccatccagtacatcttcggcgacgtggtcaggcctgccgcagctcgcggttgtcccatggacggaggacagacgcgatgcggtcggagtgaggggggccgcagtgaatgtgggtctactgccagatgcgcgcggcgcggcggagatgcagtgcaggggaggagtaatggcgaagcgcacacgtttggtgggagcgggggtggccggttggcaggggacatcagcgcaaggttctggaaccacaataactgaggctgggcggggtctcctctgtgttcctgccggcggcggaggcagaggtggacagggcggggcgcgtcggccaaggcgaaatagggcttggaagggaggtagcgggctgatctatcgatctgcggtggaggaaagaggtgggaa

SEQ ID NO: 150586 - DNA, 666 bp, Zea Mays
aaccctccaccctaaaaccacacgaaaccagccgtcctccccatgaccgagagagctcccccatgcatgccgccgccggctaaaaccacaccgcgtgggtgaccgaccgtagcaaggtatccggagtgttcgcaggtgaccacggaagcgttctgcagcacattagggcggaatagcccatcagaccgccacgaattcctcgacgtcgttcaatctccaccacggtaccgcactgtcacgtgggcagggcagtcgccatcccgatttgaggtagatccactcccatcctccttgtttcaatctccgcggcacgtaggacgtaggaatcggagtttaaacgcgtgggcagcgaggatggggacctctggcaatggcaccgccgtggtcctgcggggagcgccgccgctcggtggggttgaggaccggcgcgagtgtggaccgttggatgcaaggcgaacggcccagattagatcctgataccggtttggcctaaactcatcccggtcgtccgatgcggatcgggcgcgtgagaagcaaccttaggattttaagtctaggcgctcgatcgttgatccgacggtgaatatagcgtaccggttcgtgataagtgtggatctaatctaggcggtcgatctgtgatcggacggctcaaatccactgttaccc

SEQ ID NO: 150587 - DNA, 648 bp, Zea Mays
aagcaatccaggatcatcttgacacaaactatatcttctataggcttgacaaaaggaccacatcatctacataaatagagagcctaaatttcacattcctgatggccaaatcatgcagcaatcctgtgtcctcagcatgcttgaataagctactaagcacatccatcacgattatgaaaagcataggagataaggggtcgccttggcgcagtcccctctggtgtcgaatataatcatccagagttccattcaataacactcgtgtggaagtggataacagattggaaacaaggccacaccacctgagtccgaagccaagatgagataacacttctaagagaaaggccaaagacaccttgatagagtgctatgcagggccttgatagagtgctaaaccaatatatagttgtcatgaatgaaaccacccctaacaaaggtactttgatttttagccaccaaattctgaacccttaattaattttagttaaaaaataataatagaatccgatcctaatcgatcctaatccggtccgattcttaaatattagtgcaaaacctagaacacattaccacccttaattacactacacaccctaaccacaacaccgaaggcccagcgacccaccctctcacggtttcaccccttac

SEQ ID NO: 150588 - DNA, 289 bp, Zea Mays
tttaaaaatgaagtgaatagaagaattagtgttggagctggaacaaatttgtgaatactggatatcaagctcacagggttggcccgtgaaatttctttcatatttatcacctagacaactgaaacgaaatggaagaacccatcatcctggtaattatgtctgatctatggctccgctcatgttgataagctctccaatcacaagatgtacatgactacaaagcagaacaggaaccaatgatcctcccttgcctctgccaccacaataccccaaaggcggtgatcaccca

SEQ ID NO: 150589 - DNA, 590 bp, Zea Mays
cgaccacgttcccgttggtctcgccgtacaccaacggcgcgctgctcaagccatggacgcccgaggcggaaaagtaccgcgtcggtgtggtgcacgagttcctgaacctgacgctggagaagcgagcgatgatccaccacatcgtcgagttcaaggaggagttcgggctcacgcggcacatgtacgagtcgttacagaagcagaaccgcgctttctacctcgccggcacagagatgaactgggccttattcctcagggacgcgtatgacgaaaatggcgtgctcaaggagaaggatcccctcgtgctgttcaatgagaagcttcagcactatgcgtgtatgagcaagatagattccagagagaccatgattgatactgcaggcttgactgaataaggtcagctttcagttggttctgccgccagaattcaattgtgcttatttgcagccaggtatatacagtttcctcttgaattatatttcgttctttgatgcctatcttttttcaattgttattgagcatttgagttgagtaattttacactgtctgtatctgtttacatgatgaacgacgtcacatttgataataca

SEQ ID NO: 150590 - DNA, 697 bp, Zea Mays
ctatcatgtatatgatgatttccgctcaccatcagagggaaaaaaggagaaggaaaacgattgccgtttcagaaactttgatgcaagaagaagcagaagagaaggcatgtggactgttgctgaagctttgcgctgcaaatgtaaaaagtagtctcatgacacggtgccgacattccatttggcgcctaaaatactagcatcccagctggcagacacagacacgcttctactgctacttacctcgccactcaagtctggaagcagcggactggagtggactggactggctctgcgtctgcggccagcaaacgacaggcttgtaccgatgcgcccattaaagatgctaaaaggagtagagctgaaagtatcgtagccaacaggcttcattactcgacgacacactgacacgcaaataaaacatttcattgctagccacacacgaacacgcgctgtcgaagaaccagaccgaaatgtggcagcagggccccccaatacgtgcgagtctgttcggatactggctctggatgggggaagggttccggatccagaaacgcagcgtacgagtagagctgaaagtatcgtagccgcggtgcacggttttgcttttggcgtccacccgttccggcatagaatcttgacgtacatggtttttcagatcacgagatggtgaaacaagaacagaacaagagaacaattt

SEQ ID NO: 150591 - DNA, 1376 bp, Zea Mays
catttactaaaagctcccttttgtatacatccaaagacaggtaaaactcaagatgtgttaaattcctgtattagtttgtaatgtgataataaggtggcaggctcttatgctcaggagcgggtggcatgtccttttgaacatctagattcaataacagatgcagtcccttaaaatccttgacattgttgatttagtttattctaacagctgcaggaataatgtttgtcacacaatgttccctattgctcacaactgactcttcttccaggccgtgtttgtgttccgattgaccccagtaactgtgatgattttgatcctgcggctgttccgactctatcacaggtatggtccatagagcctagcatgagaagcactaacatttcatatccttctcccaagcatcatggtgcaatgctgatatgctaaaacaagtgcactcatacagcttttaggagagctgaatgctactggttttcagacagatcctgaaaatagtaagtgattgtagccatgctccttttgtgattcgtgtaaaaacttattatttcataaattgcagaagtaaaggcgttctagtgccaagatgcagccttgcgtaacaggctaacatgctctccttttgacaatcctatcgagtttcagattgggaaagaacgtcccttgggaaatccatcagttttttcagaacttccttcctgcacccattgctgaaagcatgcaaggtatggattctttcctatttcatttctgtggcaatgccggcatccatatgcattatgtgaataattgaaacactgcaaaatatcttaagtagcagaaccttaggagcatatattatagttctcttcatcccgcagcaaccacctgaagagaaaaaaaagttcggatgcacacttactttcagttaaactcttatctcatggttctgacatttcctgaggcataactctgaatctttctctgccatgtaattttgcaggaggaactggaaagtgcatatagcgcgaagcttcagcagtccaagaattccttggactggtaaaatctacgcatgtttctgcctctgttttatcatcagcccccgttcggccctccctgagcatccaacgggtaacatggacctggtgctaggtggaatatctatgacgctgccaacccgtgttgcatgcctgggatgcatgcaaccatgtcagtttgaagttgcgtcttaggattcatgttaacatggaacaagtccgagtacatgctttgtggtatttttacctttggattagtttattaggttgaagggttataatgacggtcaaacactcgaaaatggatgcatggagatctgcctcggtcatttcatgcaagttcgttgctcagcagataac

SEQ ID NO: 150592 - DNA, 518 bp, Zea Mays
ttatcgcagcctaatactttttggaggcaagtagcgtgcacaagtcggtccttgttaaaattgaagaacaatccgctaagatatacacataagtgctttaggtccctcagtagccaatgtaagtcttacggagttttatgccaggtgttaatgcctctatgttagacctcctaaaatatggtgttttaagtgacttgtgtgttatccagtttaagttgagaaaaggttaagaaacattaattaacttgctcccacccatgttttgagttgcaatgtctaaatggttcgctaagtcttctgctgtgattagccaactcatgttaaataggagctgaaatttagtaattgttgttttgggctgcacgcactgttttagttgtgttgtttgtttgatgaactaaatcatattttctgtagaaaaatcatacagaagagttgtagataaccttattatcttgcttgtactaaaatttgacagccataaacctgatcgtttaggagttatgctttttacaaat

SEQ ID NO: 150593 - DNA, 325 bp, Zea Mays
tggtgtcgtctccctctgttcctatctccagtctgtagccggccctagcactgcctctgctggcacccaaatccctagatgtcgccctctcgtctctgcatccgtgagcatggtgccgcgtctctatttccccgttagatcgtgccctctgcgacctcgtcggctgcacctccaccgtttggtcccgagtgtcccaccctgctcgtttcctggagctcgcctggcctctagctcgccttcagcatggtcatcgcaccctccctgctcgctgaagacagtgaagtcctagaaccacgcatacatggtgttcgatgaatggttcata

SEQ ID NO: 150594 - DNA, 467 bp, Zea Mays
gacagcttttctttggtaggttcctgcatgtatcaatgtgaattcatttgttttcttttattcatgtttgcttctgtgccatccatcaatctgtgtacactcatatttttttggcattcatggctgttgaatcctgcatgagatgagtaatttttggtgtcttgtccaatgggaaaaccatgggattgtatatttgtttgtttttttggtgcatggaagcaaaccttgtgcaaggttataaaaagtatgtcatatttgcatcaagtgaaggtgcattgttctaaatgaaatattattctatctgttagcaatttcattattcctagaatgtatagtgttctgggtctttcctgcttgatcttctacatggacgatttgccctaggcctgctattttcatgcctatattttcactttttaatatttatcattcttgcgctttgtatcatcaaggttcaccacttgtct

SEQ ID NO: 150595 - DNA, 329 bp, Zea Mays
tcccagatgtcagtaaagaattttccaccaactaagctcgcttcgaccgaggggtccttcgtgtcatcaatagataaagtagcttcggcttgggccaaagctttcacatgatcgcaacctgacttctccaaaatagccgcaattcccttcgcacctgagaaggcgcagacgtccccacggtcatttaaaatctcctcaaaggcttcggcctcgctgctgatccactcaattggcccctcgggatcgccccgtacgaagttgtcttcacttgaatatgcgccaacattggcgaagctagtttttatttttcccacacattctatggattt

SEQ ID NO: 150596 - DNA, 322 bp, Zea Mays
ctttggccatgttgtttggataattttcttggatggctaactgctgtgctatgaggttgagtgccaatgtcccattgattttaattcctggagcaacatggcttaagactattctacaattttatactcctacctgatggtaatgtagtaacaggcttgcatttcttgaaatgggcagtggtacttctagatgctcctgggatgggtgtattatacgagtcttgcaagaaactgctctggttccatacctaataattatctctgtaccaatgtattgggcacttctgtcttttggttgtatcattgcatcgcttgtctcgtc

SEQ ID NO: 150597 - DNA, 374 bp, Zea Mays
atcagctgacttcagtgtaattcaaagccggaacagataaaagtgtgtctttgccgatgatgttaaatagagtaatgcttgattattgctgtcaagtggttgtgttagtaattggaatattgttggagtatgtttccctttatctttccattttatcatctgtcagtgctcgtgactttatggtctctaaatttcttagatagttcatgtcgtaccatgaaatgtgtgtctgcaacattggtcaaccatattgttcatgtcttcaactctatttcgaagtcacaaactgatcacaagttttggacgtgaagcatcgacaggcatcaatgcctactttagcatttcactgtacataagtccatcgacttcacatt

SEQ ID NO: 150598 - DNA, 509 bp, Zea Mays
ggcggcagccggcagctggtcccccaacctccaccccccaactgatttgcttgctctccacaaggcccaccttccgctgcggcgtgatcagctccagcatccgcgtacgcagttacgcacaggtatgcttgttccacccatcaccccctcgtttcatccagttgatttaactgtgcaaggtttaatcaattgaagttatttgatcgtgtggcacttgttgcgatcacacatctcagcaggcagcacagtattgtctccttttggcgaaatgacaatatggcacggtgtgtagtgtcatgtgtgtgctccagcacttggatggaaaatatagagcctgtttttcttatctggttacagaaagttttgctaaatcagtagtgttgctctgatgcttggtttcagtcttactgggctgttctacctgtaaccttctccaatcttctgcatatcgctggacaaaagcagccgaactttaggaccagacagattcatctatgtgccaaaatctt

SEQ ID NO: 150599 - DNA, 685 bp, Zea Mays
ctgaaacagtgtactatggtgaccgcgggatctagaatttatgacagcgatttaatggatcaggactccatcctggccgcccgttatagatctacgtcctagatcatcctaacgtgaaacgttcccccagatctaatctagaccgttgccacagagaccaacgaatccactatcccgacgtcgccccaacgcccgagctcaccggaccgaggcggtgccacccgcttccgcggcggagacaactctagcgcacatgcgatcgccctgaggtgctcccttacccgactagaccttgcaacgagatgcggtgaacaacccaaacacattccccgccatattaccttggattgtgcactgtcgtgctccaccgatgaggaatgcggcgagtacaggcgtatgtgagtgatcatcgggtgagtgacaggcaggcccgtgggccgaggctcacgagcgcataccgaatcataacctggtcaggaccttcgccacgctaagttgctcgacagggacttggtctcctgctctgcctcgaaggtttgttcggctagggcttggtcgtttgcctcgcctcgctaagtttttcggtaaggacttggtcattcgctccgcctcgcaggttgtttggctgggacttggtcatacgctccgcctcgcagggttgctctactgggacttggtcatttgc

SEQ ID NO: 150600 - DNA, 436 bp, Zea Mays
ataagatggaagaagctcaaataaagatgcacaaagaaacaacgaagaacatgcagctcaacattattggatgtgtctgtgatgcacctgataccaccgggtacgagaagcattgtgtcaaagaagagcaactacaaccaaaccagatgtcaggctctatacatgtccaaatgaagcaccggatatggcattgaacatagtaattagggaggattgtaatctgtttgaggaagtccacaaggcaccaaacatgtttggtgaatactagatacacaaagcactggacaaggtactcaaagagggttgcaacacaactagagagagccataatgcaccatacgctcaatctccattagttgccaatggctagctgacatggacacattagatatgtgatgagtgtgttgtaattctatatcacttccaacgactagtt

SEQ ID NO: 150601 - DNA, 373 bp, Zea Mays
caagtatttatggattgttgaatgtgaagtttacttaaatatttgcaaggatgtttaagttcacttcaatacaaaatcaaacacatatcaacattttcaactatttatggattgttgactgaggtttacttcaatatttgctaacatgtttagttaaatacaaaatcaaatacatctacaatggacaggaagtaaagcaatgctgatgttaagcaaactatgttgatggacaagttaaacgaggctaaatatcaaacacggactgtgctagctgtagttccttagtgtccattttgtcttgtgttaattttcagttgttctcttgcaacctatgttgtataaaaggttgactgagttaaaaccattttgttca

SEQ ID NO: 150602 - DNA, 334 bp, Zea Mays
tagagtgcgaccctctgccgaagaagttagtgctttggttgctttgcttggagaaattcctgatgatgaacgacaggttcactttgaggtgcctttggatcccagtgatgcagagataagtgctatgcttgatatgttagccgaggattcttctgataccacccctgctggaacattggcagtggcgcctctcccagaagctagtaaaaccttggacattcagaggcctgccagtgctcgctcgaaacgcccttgccgagccagtcagcctgcttctcctgctgatgggcagaaaaagaagaaaagatgtcttcgccgtgtgtctagcttggat

SEQ ID NO: 150603 - DNA, 521 bp, Zea Mays
tttttatcagtttaataaatatttattattatgtgctatcagtttaataaatatttattatatgactgtgcccgcgggtgtacccgcgggtgccataaacccgcgggtagcgggtttgggtaacatacgctacccatcgcgggtagcgggtgcgggtacgggtttaacattaatcacgcgggtatgggtttgtaatctctgtacccgcgggttttaaacccgttgccatccctagacgagcaaggggctcccaaacatgccttaaagttaaattttaaaaaccttgaccaacaattagtcaaatcatatataactctaggacataaaacttgcataaataaattacacactatttaaaatgcctcaggtgatatcgataatttagcaaataaacgacaatatattgtaaggggaattaagaatgaaattctattttgcataatttgctcctgtataaaatatgcttatcattttaggactaaggaagcaattaactctacacaatccaaacaaaagaaaac

SEQ ID NO: 150604 - DNA, 452 bp, Zea Mays
cttatgcatttttcaaatgatttttacaacatttcttgttatgttttacgctataattacctcaaatcacattttgttgcgtttcacaccaatttatgatacttcttgatgcgttttacgccaatcttatgatacttcttaatgtgttttatggcaacttcttaatcgtgtgatttttatgcctgaaatagtgggatcctttggttgttataacgttatcagtagtttacgctaagttatacacacttttacgcttttttgtgttcgtttttatgcaacatcgtgtgaagcgagatacacggcaactacctcaaatcgtaagcatgatttatgttgactgtaactgtcataaaaaatcatctcgttgaccattgtaacaatatttacgctatatctggcataattgacgctaaaacttgaggattttacgctcaaacatgggttgcccacac

SEQ ID NO: 150605 - DNA, 374 bp, Zea Mays
ctcaattataagcgtaaataccgagtcaattagaggttgatagctttagtactcccttcgtccgcatgaattggacgttctagcctatttagcttgtccatgaattttgttgtgctcattagctaagatcgttgtccgctctccgttagctcgtcagccatcctagcctttcgttgcttcaattcgtttggtgctatttggttggagcagcaagcggtgatgcttgggtaaagttgccgggtagcttttaatagcttttagttgtattgtaattgacgcttaattaagagaaaccagggttacatgtgtcattttatttctcctataatatgtcctaaaaaaactagaacgtccaaatcaaatggacggaggga

SEQ ID NO: 150606 - DNA, 1023 bp, Zea Mays
atcaagggaggacattgtgctgttggatggacaagggtgtgtagaccacttaagtttggcggcttgggtattcacaacctggaaatccttggtttggctcttaatgtgagatggctctagctcagaaaaacacaggttgagaggccatagactgagttcgacataaaagtacatcccaatgctgaagctctcttccaggccttggttcactcttttgtgtgggatggtgctacaaccctcttttggacggatagatggattcaagggcagtctattgcagtttttgccccttacctgatcagtcgtattccaaggagggttaggacaggccgcacggtgcaggaggctcttgttgataatagttgggttcacgatatctctgggagtctggctgctgttgtcatcagggagttccttcttgtttgggatctaattcaagatgttcatttacagacaggagttcctgatgtccacctttgggtgccttgtgcctctgacctctattcctctaagacggcttataacagcttttggaccggtacaacatcttttgaaccggctaaaagaatttggaagagttgggctcctccaaaatgtaaattcttcattggctagcatcactcaaccagtgctggacggttgatagattggcccggcgaggtatggatcatcatgacaaatgcctcttttgcgatcaacacgaagaaacagttcagcatattttgctctcctgtgtgttcactagaaacatttggtggcaggtgttgtgtaaagtggggctgcaatacctggcgcctgggcctgaggacatgattttccaagattggtggagaaataccgaaggccaggtatctaaagagaagaaaaatggttttaacacgttggtaatccttgtggcttggtggctttggaagcatcgaaacacctgtgtcctcgatggagcatccccgagcactagagatatcctgcagcacatccaggaggatgcaacgctgtggggtatggccggggctagaggtctta

SEQ ID NO: 150607 - DNA, 368 bp, Zea Mays
atgagacggacgcttctgccatggatgggttacagggaggctgccactcatattcagctttggctccttggtgccctagtttctcactcagagtttgatgtcgtggattttctcatttgtgagatcgaggacactgttctagatggtctccatgctcgtcgacaactgccttatgctcactatctgtgtcacatctttgctcagctgattcggcccccatagttctagggtactcttgaggcctctcgcctcctctttgggtcctaccgtccagctccagaggatcctgtgccggcacctgccccagtgattgatactcaggccgaggataccacctttcaccagttcgagactcaagtcgtagcagt

SEQ ID NO: 150608 - DNA, 299 bp, Zea Mays
agttcatttgatccagacattctgactttgatttcttggaaatatgctggagcggcattactcaaagctgtcagcggcctttcttgtcatagtgccagcaagtgtcgttaacagtgatctcagtcatgaagtaggagccagtggctacaatcaatctcagatgaattctcgtcatcccgaattctctgtcccacaacaaggtatatggatctgaatcgaaatggctttgcaaatatcacgattacttttagaagatatgttatcgctcgatcattatcattcttattaagtaacctttc

SEQ ID NO: 150609 - DNA, 476 bp, Zea Mays
cggctgatctagttgcctgctcaggccagtgctccacgaagcgcgatctccggctcctccatgccgttctcctccgtcgccgccacatacttccgaaggtccatgccttggcggtgctcgccaagctcctccgcttcgccgcggtgtctcccgctggcgacatccgccacgcctccgtgctcctctctctccacctccctttcatctctgccgccacttcccaccttgcctttttctacaacaccctcattcgcggcctcgctgtctcctcatcgcccagcgctggcatcgagctcttcactgcgatgcgccgcgcgggcgccactcccgacgccttcaccttcaccttcgtcctcaagtcttgctcccgctgccattcgcctggtcggttaccttctgacctccacgcgcaggcgttcaagcatggttgcctcggcgcgggtagcgagcacggccatgtccacaatgctttgctg

SEQ ID NO: 150610 - DNA, 323 bp, Zea Mays
ccagccaccaagaattgctagcaatcgatcaccagtgtgcccgaattccttgtttcccccaaatcctttctccgccaccgtgaagatccgttcgtcgcggccagccctttaccggtcagttcatccctcactctcacttgttcgagcactcttgacgctctgtgatgcttgacgaacccccaattcgtatggagtagctttagatcaccgggaacacgtaccaattgtcttcatcgtccgcggtttacgtgaacagagctcgagagcttaccaagtgtgaaattggtttaggggaatcattcggggaaggtttaatccggtgt

SEQ ID NO: 150611 - DNA, 701 bp, Zea Mays
gtcatgttgaggctatacgtccgcaaaggattactgattcaccgtgcacacctaatttggagagaggaggaggaggcagtgcgaattttggcttcaatcgagctcactggtgaagttgtgagtgcctcgcagtggttcatggacctatttataggcacgttggtccggctaacgatccacggcctcggattacatcgttagtgcatggttaccacgtaaggaagagacacagtgagggaggaggaaggcgcgagtgacacggcggcggaatgaccaagccacggtgaacgccggtgaaatatcccggcccgactctggctaggctcgcggaaccgtgacacgactcaaggttatctccccgcggtcgatcccttccccagatcactcgaacacatccagttctacagtgtctctgatctttatcagcgttcttcagatattttcagtgttctgatctttagtgttttactgaaccgaccccctttcacccttcctttctcttgattcttgttaagaacatggtaatctccattaataaagtttgttcactaaacaacagtctccaaacttactataggatccttgggtcaaaaccgaatgaattcaaagatatggtgcttccaattcagccccattccactgtgaccattcctgttctagaattcagttttagttactcaacacagttctgacaaagcaac

SEQ ID NO: 150612 - DNA, 285 bp, Zea Mays
ggttaagaaaaactaattaacctgctcccacctctgtttttgagttgcgaagtctaaaatacttgctaagttttatactggttaaccaacttgttagatgactttagttaagctcgtggtcacgatgatttacttgttgtagtctaaatacgtatggttatggtcgcggatgaaaagtattagtgctcatgtgaggtctaagttaaaatgcaaattattgtgtgaacaacacttcgagatcaactatcggggagaatgcgttgttaattaaatatggtacttcta

SEQ ID NO: 150613 - DNA, 393 bp, Zea Mays
tcttgtttggtgagtttgagcgagtgggacatttgactacggctcatcagatctggtctacccttgagagattccatgagggcaacgatcatgtgaagaccagattgtttgagacgtacaggcgagagtacgagaacttcacacagttggctggagagaccatcgatactatgttctctaggttctagtcaattgtgaacaagatgtgtgccaacaaggcacaactttcctatgacgatcatgagagagcgctgaaattactacatgctctagatcggagggtttcagaggtgaaggtctcggcgatcatcgagtcgcccaactacgagactctcatcgtggatgagctcttcagcaagctcaagtccacagagattgaccaccagactcggg

SEQ ID NO: 150614 - DNA, 294 bp, Zea Mays
ggaggacattgggtgcaagatcaattgagcaaacttgtgacagcaagtgagaagagcacaacatccgttgagtctttggcaagaaaggaggacattgggtgctccattagagatatcatggcattggtgaaggagtgtggtgcagttctaggaacaaaagaacacttcatagcatctcaagtttttgtcaagagggcagagagggaaatgtttatgactttggacacactggaagaacgcttcaactggcttacaatgaaacatgattgggtcactaggatgattcactaggat

SEQ ID NO: 150615 - DNA, 995 bp, Zea Mays
gacgtgagcacaacccatatatgtgcagtatgacgtttcgttcaccgacggtcaataaccttcactaataaaagagacctcatttcagaatttataaaggacctcaaattttaccggcacggccctgccgctgtcctacgtgttgtgctctcctacctccttttctgtaccattaggactctgatattgttacgcaacgatattgagcctctatgggatagagagtattacgtttggaaacatatccattgcacattcgtctaggcgtcctgaacgtgttagcactctgatacagcgttagactcttgtgagcatgcacagttggacgaggaccagttcaagacagcgtagtatttaggcgattgcctgattgatcagaagtgttgcgccagcactcccagcggcgtaaaccagagtactgtactatgtctgtcacagtccatcttgcatgcccaaacacaaccatggaaagctagaatcaaccatgcaactctcaaaatctctagaatctagagatgacctcggtgactattttcagttaaaaatgcatcgtctttgatgcatcaatctaggtcaaaagttgacccaaagcctgctgtgtgtagcacacacaagattcagaacgcaagacagtgatccctagaatacagtaagcaatctcctgcctcataattaagccgattttcactatttgacgagaattcagaacaccagacatatgcatgggactcaatcagatgaattaattatgcgttccaatggcaaagcaatgaagaattcagaacactagaccgataatctatatccaaggaacaaaacaagacaaacaggatacagcagcagcagacgccattaaggctaacaatttgaagaacagttgggttattgttcggcctggtatgaagttgagggaattagacaaattactgactagtcagctgggaaacagttaattgacaacggttacacctaaggccttgttcggttattcccaa

SEQ ID NO: 150616 - DNA, 714 bp, Zea Mays
acgttactttcaaagactgctcgagcggtcctatcatactatgtccctctttggctggactcctacaacaacagcttcagctctgactcttgctcctctagaaaaatgactccctccttatttttaggaagagcccctagaggagcactccatttggtcgaaaatgtagcttcttctatttccgtgcataggggagaacgggagagagccgtagaagcctctttttagggctcccgaattcgctcggtttttagacatctcctccgtgtttttacgtagagtggcctatatgcgaagctagccttttttctagctaggcgcgtcctagccaagtcctaagtgtaagctgcctctccctatgggttaaagcctctcttattttattacatgagtaattcgacaataagaccaaaatagacaccaactactagtaatatcccgactccttttaaaacattagttttgtgctcatgtgtgacgtgcaaaacgcgtaggtctattcctctccgcttcttgtttaacaatgggtccaatagtctattacaccacatatgggccttgagaaaccatctaaacccaatatgacaagaagccacatgcagcacaacggtactaaatagtaccactttgatggctagaagagctgaaggagctataaaaaaaagtggaccatatgttcacttttcaactcatacgttccttgtcttatagata

SEQ ID NO: 150617 - DNA, 937 bp, Zea Mays
gcacgacccaactggacattcacattgcccacttctttatgcccccaggattgcaaacacttagctaatctttttaacttcaatgatatcttctccatagggcaagaatcctgtaatggctgattccacgatgcagccaccacatccaaaaacccagggatcttaggcccaaaactctcgaaatgaaaccgtcgcttacccaagcacacctctctgactttaagagttaggggacactgggacagtgatatgaaactgaggtagcgttactgtgaagagaacaatcaggaaaagaatcttcccaacctgtagtgcagaaaacatgatccaatttcacaagggtaggctcatccctctgattcgatcaagtaaaccttctaccaatcaaaggaatctcctttagctccaaggaattaacaagacctctgaaattacccaacattgtcctgtttatgttggaaatattcttatcctcctctctgtaaatcaggttaaaatcaccacacaagatccatggccccgcacactcctccctgaccaatcttaattcatggagaaaagcttgtttaaggttgtcctgatgaggtccataaacacatgtgaaccaccagcaagaaccagactcctcctgaaactggactgagacagagaagttcttcacaacagaatccacagagacaaaagacccatcacaccaagcaattaacacccctcctctagtcccctgagatgagctataaacaaaattactaaatccagccctaagaatagacagaatatcaaaatcagagatggaacataatttgatctcctggagacaatggaaggtttgatatcaagaaccagagttttaaccgaatccctcttggcacgatcattgagacccctcacattccatattagaaaacaactatactccataaaaacaaacgaagac

SEQ ID NO: 150618 - DNA, 441 bp, Zea Mays
aaggcctcaaaaggcaccatctttagactggactggtagctgttattataggagaactctgccaaagaaagacacttgtcccaatttttaccatagtgtagcacacaggctcgcaacatgtcttcgagaatttgattcactctttctatctagccatctgtctgcggatgatatgcggagctccttattgcatgggtcccaagtgattcttgtagctgctcccaaaagcgtgccacaaacagtgctcctctgtcagatacaatggtctttggaataccatgcaaacacactatctgatcaacatagatttctgcatatttctctgtcttgtgggtggtatgcactggcaagaaatgagcggtcttggtcaatctatccacaataacccaaatagaatcatggtgccgggaggtattgggcaatcccacgatgaaatccatg

SEQ ID NO: 150619 - DNA, 672 bp, Zea Mays
cttaagtcgtttccgacttaagccgattgctccgttagcagggcatagtggtcaccccgagttaagtaagcgtgtcgattgacagtgaacaatctgagtgcctttgaaacctttttattgatgatattttcctcaatttacagaatacatcgtcgttccgagagccttcgtgatgtacccaatttctgttctgtccatctgagtgaggcgatatgatcccgaccgagtgacttccgctactatgaatggtccttcccatagaggtgacaatttatgtcgtccctcccccgttagaattcggcggaggatgagatctcccactgcaaaggatcgacgccgtatggccttatcatgatagcgccttagagtttgctggtatcacgctgattgaatcaccgtattcagtcgctcttcttcgagtacgtcaacgtcttccaacctagtagcttcagcttctgctatgtcatcaaagattaaccttggtgccccgaacttgagattggcaggtagcactgccttcgaaccataaaccataaagaagggggtatttccatgcagagctcggctgggttgagttctcaggctccagactacatatggcagttctctgatccactttcctgctaatttctcattcttgtcgaagactttctttctgagtgcttctaatat

SEQ ID NO: 150620 - DNA, 337 bp, Zea Mays
ccataaaactggattccaggaatcgtaaacaactttatacatttaaaatgataatcatagggatacaacacgtcgcagatggagtaattcattcaacatcaacgcttgtttagtttggacacaaggaaaagcaaacaaacagatctgtccaaagcatcctcccccttcttcgttcgatcatcgcctgtattttcttgcagcatctggttcttggcgcggctgccggtccttcgtcgttcgatcgttctgctgttctccacacttgcgtcctcgttcttgggcctgtattctccaaaaggtcacccatgcaacttgcacgggacttgtttcgccgatc

SEQ ID NO: 150621 - DNA, 534 bp, Zea Mays
aaaagtggtcaagttaaaactgttgttattaatgaattcttctttctttcagactccaaaccagatagacgacttcgtaaacaacttcttcgcttctggaggtagtggccacaactcaaacgacttcaatatgtgatcaattgactcttgtggcacaacaggagaaacatgttttaaccacgggatatgtggtcgttaaaagtccatatgtggtcgttaaaagtttgtaacgaccacaaaaatgtggtcgtcgatggtcgttaaaagtcccgtcgttaattgtaataacgaccacatgaggattccggtcgttacatgattaacaacgacatatgtgattgtcgtcaattatacagtattaacgaccacaattatcaaaataacgatgacatttttcattgttaataattgtgtacaggctaccattattcattaacgatcatatttgtaacctttagcgaccacatatgacacattaacaaccaagtttttagttctaacatccatgtatggagcattaacgaccaaatttat

SEQ ID NO: 150622 - DNA, 578 bp, Zea Mays
tgcaattctcccaaatgccatggatgggtctgctgaaccaaaaaatccttgtgctgtggttgtagagttgacggcgcctgggtctgctgaaccagttgaagctgtaattctcccgagtgccctggctgctgttgattccaatttgtgctctgcagacgtgtggggtgctgatgttaatattgtggaatcctctagttctttcataaatctgcatgggaggccggggctttcgctgagttgctagttaagtaccaagccgctgtgtttcaaggcctactccagaaggaagaagacactggtggttgaggaattggtgctgtcaccccaattgcaggaattcagaaactatctcgttttgccgacggctcaactgttgcctactcctcttattgttaagcgcagaaagttgatgccaagcaatttcaagccacgacgtagcaggagggttgcgaagtttccccctaagttgcgttctgactctgctgctaaagtgtgcagacttttgggcttttgtgatgagcaggaaaatatttctttccaagatgctaggaagtatgctagtttgtttgatgctgccc

SEQ ID NO: 150623 - DNA, 1297 bp, Zea Mays
tgtgacttattagcgtgtcataattttcccattgttatatgtttatgttatttttcttatattagttgcacagttataggttctctctcatatgttaacttctcaacaaatattttagatattttatatttagttgttagaagttgttaaaagtatatttggtagtctagatattgtgtctcgtctactgtcatatatatccatgatttgccttgtctcttactcatgtgctctatataaactgcctaagggcttaatgcaatacatcaatccttgatggcaaacccccctaacatggtataacgagtttaggctatgacttaggcttccccttctgctgtcgtcgtcgcgctgcctcgaggaaattgatctccatcaagagttgcgctctcgtagttaggatgcatgactaatccttctgatttgtcgcgttcatcgtcgttattgtattgtcaagcttcaacaaatcagaggctcgctggtttctctacatgtcatggtggttgttgggctctcctaccggttggatcatgcctttgtcctttgtgcatgcaatcatggtgatggttgtggggcagacgacatccacgtgttgtcgtggtgacgattctggagaggccgtgtgagcccatgggctttgtcacccttgacccctagggtgctaagagacgaattcaagagcatattgcctaccatgtatttcctatgaaagttggctaggagatacctaagccaaaagatgaggacaacacgaaggagattgaagctcgagagatgattcagttaccttataaattcaatcccttcagcatcttcataaagccgagcaatgagtggctcattatggtggagacagttgctaacaaagttttatgcaactatattgtgaaagagatcatctacttagtgcgatagtgagtggcaataaagagaatacataatcgtgtgatcaaagcatatgacttagaatatctagactaccccaacctcattgtcgatcatgatgctagattgcagaggaaatgcaaagtaagaattatagataggggttgagtgattagtgaaaaggaggctagagggggccctccgacaaagtccttgaagccaaaggcaaaatacaagggtagtgagattgtggcaaaggaaaagttgctagcacccaagcgctttgaaaggaaacaccatgaaggtgagaagtagaaggtctaggtcgaggcctctaaggttgcctcagagaagcctgctggcattgcaaagacccctaccactgaagaacatgtacgagctgttgttgaag

SEQ ID NO: 150624 - DNA, 350 bp, Zea Mays
gttcaatcctatactgccagtttaacagtaggttctgtagtttagtcattttattgtttcgtgatatagtagaaatgtttacatatttagtgtgattaaccaatcttttgagtttctattttcgaccctttgatgttgtggggaatgaactctgctttggcctactttagccttgattagactacataatgttagtccatttgtaatactatcatgcagatttccctgctattgttttttgaccttccaaccaaatctgaaactaatatttctctccatttcttccattagggtaatgaatgcccttttcatcacaatgagggtgcccggatgaaccttatggactattg

SEQ ID NO: 150625 - DNA, 736 bp, Zea Mays
cgtggattgacgggagggcctgcgccgcggatcacaggatgaatccgggtcgtcgcaaccttgtgttcctttccccctgttgtcatacgctcggaccggtgggcgacttccgcgtggcggccgccaatgtcgcgggatccgcccgaaaatctcgctaacgattgcccttaatcggacttggtcgcggagtataagaacaagcgcgctgcctctattgatctcctgcgcgccgcacaaagggaatcgtggagaacaagaagcaagagagaggggggcgagagccgccgaagtaaatccgtcagttcgtcgtcgttacgtcgtggggatcgagcttagaagccccaccgtgccccggggacagtatttgggatctggctgtggaggtttggcgattgggggccaacgacgtcggaatcactcgccgtacctcaagcgccgccacggtgccgcttcgggtcgtggtcggagtctacggctgcttggcgttcggtaagaacccctccattgaattcgccatactctccgctctgcgtagcctgcgtttaaatcgaagttgggcatcggggtcgtctctcggcatgctccggccatggcgccacctctcagcttgggggcgccgccgccttacgctctggtgaggggagagatgagagtgggatgggggaatatgtgcgggccgttggatgttgagtgtgcggctatgattgaatcctgagcgtaccccttcggctaaagt

SEQ ID NO: 150626 - DNA, 274 bp, Zea Mays
ggcgcgtgcctgtccattacgttggcaggcagtacaccatgctgctgcgctcatcatgactcgcgcgttaccgaggaggcaaccatgacatatcaatactatatgcactatggacattatggcgctcggagatcaccctggcgttacaagcagtagttacttccttccattttgcccctgggcccacatgtcggggctcagcatccttgtacgtgcccccttgagctataaaagggagggcacacgacgttacaaggcaagctcacttaaactc

SEQ ID NO: 150627 - DNA, 605 bp, Zea Mays
atttaatttcactaatctcaaacgtcttaaccagggagtccattccctctttgctggtcattgatctgtcactccaaaagttctcactcagcttcatattgcaggatgtgttcggaccaaataggattttgtagaagtccacaatgtaggcgatcagtgctttttgatccatacaaacccccttgtccgtttccaaataggcaattgtgttcttccttctcctcccattagcatagagatgaaaaaatcttgagttagagtcccgtttaacagtccattttctaccagccctttgctgccagaacacctcatctgaatgataaatatgatcaagctttttctctaccacgagtctttttgtccagttctcccagagatttacctgatcttctatcaatacatctatctgatctagctcctagataagatcatttttctctttatttttacccccaagcagcatcctatgccaccctttaaggaacatcctcaacgccgttaagctcccatgccacccttcaatcgaataaattcccccaggtcgtttctttaccttctcggtccatttttctttgactaactcttcaaacccaggctgcaaaaat

SEQ ID NO: 150628 - DNA, 508 bp, Zea Mays
aatcgggtggccctcctggatgagcaccgctctgaagccatatgtggatgcatcacattccatgatgaagggcttggtgaagttcggaagcgccagtaccggcgccgaggtcacagcccctgtgagggcgaggaaggccgtggcgacgtcgtcgttccatgagaatcattccttcttcaaaagcgcggtgaggggagccgcgatggagccgaagttatggacgaacttcctgtagtagcctgtgaggcccaggaagccgcacactgcgcgagccaagcagggttgcggccactcatggatggcttggaccttggcgggatccatggccactccagatgccgagataatgtggcctaggtagccaacggatgcgacgccgaacgaacacttggacctcttgacaaagaggcggtgttggcgtaggagggacaggacggcacggatatgtcgcaggtggtcggcccagctcctgctgtaaattaggatgtcgtcaaagaaaacaaggacg

SEQ ID NO: 150629 - DNA, 424 bp, Zea Mays
aaaaaaaggtgcgtcacaggagtgtaagccccgttctgttagtccaatagtggaccaagtgaataactgtgagacaaagttggccatttaacccagagccggctcccttttaattgggctccacacgtgtctcagccccccaccgaagcagggagagccagctcgtgggccgtacacgtgtccgtgggcgcatcgctgcgcattaaggcccggggactttccagggctttgaaagcccgctcacttcatcctgtgacgcggccaagaatgccaccacgctccttatatacacggtctcatgtacctgaaccggcgatacgggactaatcgtccttgactgggaatgtggcatgctatgcctgtgtccactccctcccaccacctccaccatggcccgaagcagcttatgggccgctcattcccg

SEQ ID NO: 150630 - DNA, 460 bp, Zea Mays
cttaattccaccattcgggttcccaaactctctgctcaaggtgtccgtgcaatacaagaacaacaccgaatgttcccggcgatctaataggttctagcttaatcggctgggtcggggagcatcagggacacacaaggatactgaaatgaaagagcagggggcatgagcggacctggagcacgctgatcacagcgagggcacaaggtgcggtgtttcgaactgaattgggggaaatccgaaattgggtctcgctggtgagcaattggaggcacggcttggtggattgggagcttgactaccttacggacccgacgacacactcaatttataggctccgggggcggtggcctgtgaatttggagttggcgcggtggcggccggagagaagagttgcactggcgcaagcgattagtggctttcaccgtggcgggttcaccggtgatcaccggacatgcataac

SEQ ID NO: 150631 - DNA, 702 bp, Zea Mays
aaaattgtaaggaagggccaaaaggtttgaattagatctgaattcaaattgaatttgaaaagggagaaaaggaaataggaaataaaaagaaaaaggatattgaacccctaactgggcctctgtaccagattcggcccaccagaaaccttcaccagcgcagcccacttcttcagctagcctgcgccgactggtggggcctgcctgtcggtctctggctcgccgtcgcgcggccccaactccaccccgcggcgccgacatcccgtcccatgctgtcagcctcccagacgttcctcgctctcgcgtcggttgctgcctctgccggtgggccctcgtggtcagacttatcctgggcaacggagctccgcgcatggcggtaacgcaccgatagcttcgggccgctcgcgcataccagccgtgtttccgttgaacccccccaccgcgggccataaaagcacccgggcgcgtccccttcatccgttgcctaccctcgcgacacctcaatttgagctgcggtgagctcggcgccataggtttagccgagaaaccgcgctgccgcaccttcgctggcgattaccgtcggtccgcaccagctgggacgctgcggctggcttcgggtgttcacggatcaccgggggacgcgtcggaaggattgccccgccatctatcggccgacggctacccaattgctcatcggagttccgg

SEQ ID NO: 150632 - DNA, 708 bp, Zea Mays
tagcaccaaaaactatattccaacaatttaaacatttagtgtgcagagaaaatgacaactcaagctttgtccaatgctcttgaatgattctgcgctttatgtggaaaatgaaagaagctgtttaaaagagcaaccgctgtaatttaaggggcatataagaccaggaaggttacacagaagcacaagcaggactgcataaggacagggtaggacgcagatagacaaaggttaccgaaccagaagggccagcaggaaacaggaaccagacaccttggcctaggaggccaccaaacctgttctgttgccaaacaatagaaatcagacaatcatcatgagctcaaagggcagacaccaggccgagccatgcccacaaaagcatgagacaggccaacaggtccagctcaaagcttcgactatgccatcaacaaatgcagcagtgcagcacatgaattcctaagccatcatatgatcttgcaagctaaatgcctgcctgttttaccgatcacaattgtattatctcgacctacaaatattctatagtggcatttgataatcgtgcaagccaaatgtatgttcttccaatcacaccgctgctatttccatctagaaaattatatagccgcacacaagcctcatagcaactaaactggaaaacacgaaacaacaaagcaaataatacagaacaacaggttaatggataggcaccgg

SEQ ID NO: 150633 - DNA, 389 bp, Zea Mays
ccaggttttaaaacttttatgaggataactcaaatagtacacctgatgcgcttgatgtgccaggatgatattgttgtactcattgcctttataccttgatgcgtgctttacctccaccatcccgaattcgacaactcgcgtgccaacatgtggatcaaaccatatacaatcaaacgtcacaagtctcaaaggtttgtgacctccaaatgtatactaagttatgtcttgaacaataccataatagtcctccaattctccatcgtcgctatacgaacttgctacaactccgttgtttgttgtagctgcaagtggacgactcacttctagttttgctgttcgaaaacggtatccattaatatcatagcgatcaaattttcttgcggtcaatt

SEQ ID NO: 150634 - DNA, 512 bp, Zea Mays
actgttgaggtctcagaaatattgaaggtgatgattgagtccttcccattcacaccactaagtcctctgggattggaactaaccagcctcttacagaaaaaggaggtatcttcggctgcagaaggaagagatgggggccagaagaaacggcgcattgtgaacatattacaagcgattgaacaaacccccccctttagcttcggcaagcaaagctgccaaactgactgatgtcgaagccactgctacagccgaaggtgaaaacttgcaaccactccgttcgagatcgacaagctgatatcagatgtggctgtggagaaggaggtggtcgcaaccatttcagacaagggaaaagagattgatgaaacctcttcagagggaatgaatttcgaccaacgacacctgggcgaccaacaactctctgaagaggacaaatcagagttaagggaatttgcgatctcgtgtggttaccagcctaggtcggtactctctgacggggtcgatgaagaaatcat

SEQ ID NO: 150635 - DNA, 561 bp, Zea Mays
ttcgggggcaggagattttgcttcttctattatacttcgccccgccatcataccagtatctaaagtttgttgcttagttttatccttaggcacggcagccttcatctcaatgggcaatgaggacctagctttggctctggcctggactttgatagcttcgacagctttcttggtaggagcagggctcaaggcctttgtggtctccatgacagcgtctaacacgctagccatcctccttctcttgggagttgcggcaggagccttttgcactttcggcagttctgcttttgctagtggactcagaatttctggcattttgactgttttttccaattttgattcttcagtcgcatcatctctggctggctccactgtaggcaccttcgacactacaatcgattcttcagcgctctgcatgatgggagcagcttattttgcttcggcagctaaagaggtcccttcgccaaattcaggcactacgaccggtttaatatatcgcggccggtgggtcagaaccttcattttattgcccttcggcacaccagtggtggccgaagcggc

SEQ ID NO: 150636 - DNA, 602 bp, Zea Mays
gttactcacctgtctttcgcaggaacgatagctctctgcccagccaccagttttgagttgtattgagagcaaaaattcacatgctttccgaatgcaaatattgttctcataatttctcccagcagcaactaagccatttatcgcatggagggtcccatagataaaacatattccccaagtgccataccttgcaggtaatttctgatttagttacagtttagacataagggaaaaaaccgataatctgtacaaattagaagatgttttcatacaaaccaggatccatccttgttttgattactctcgataaatatggcagctttgtcaacattttcttttatttctttactgcggtactctgaattgaagtcaccaaataataccaaagcctgcaacactgaggatgtacattcaaccgttctgccaatagatgaattgagtgacttaattagtttgcaaggcaaatcgacatggcagcatgaaattcagatttagaagagtggccgttgttcttacgggtaatcggcgacaatatttcgaaaactctccgcaggattcagaatctaggatgccaaatcaaacaaagtcagtctacatggatc

SEQ ID NO: 150637 - DNA, 771 bp, Zea Mays
atctagaaacaatacccgaaaacagtctcaatgtactgtaggcccgataattcgggtacccgaatttttcgggttcgggtttgggtagcccgttctacccagttttagaccactgactcaggttcactgtagtccattccattagcaaacaatgcaatatttaatataaataattaaatatacaacaaaaacatgcatcacaactgtacaataaacatttaggggttcaaaacttttcacatagcaaaagaccaaaagtgtagcacatcagtttctgtatttccgagaaagaccaaacatcacagtctcagactctcatacagtcgtacaaattacaatcatactcattatcagtttaccgtaaagcacaaaggcacaaaccagaatcgacaactagccaagcagcaagcacgcgtccacaatccacacaaagtcacacgcgtcctgtaatcctgtcctccacagtccacaactccacaggcgccagccagtgaggcaacccaacaaggtggcacgtcaggtgaacagcaaggtagcagcacaccacacacggccacacaacaaggcagcacccagcaacacacgatcacatgtccagttctccactcagtccactgtccataccaccaccagcaaccaaatgaactaatgaaggataaggaatactataccagcagcaatatcaagtcagcaacaaaataaagaaatgatctgcagtaaaaaaaattcgggcctaacgggtatttcgggtaccatggagtgttacccgat

SEQ ID NO: 150638 - DNA, 840 bp, Zea Mays
atatcatcgatttttttttggaatactgatatacagatatagcgatgtggtggttatttgcgggacacctaatattgcataaggttccgtggttttaaggaaaaaggacaataatcttccatatgttagtggcaaaaaaacaggaaactgttaatacataaattttaaaattgatcttgcccaagcaatctgtatcactattcaccttttgcgttttgcatcaatgtaaaatcctgaaacctgtatatggagtactggctgctaattaagaatacattctgataagttttttgcatttcgctgctatttcgatttggctggcattgacattgtgtttcaatattttgttaagtctttaatgacttcacattctgatgtgacaaaatggcctccaaaagacaataattcggtcggtggcctattatcttatcaaaatagccctttttttctatacataagtgctccacagaaaaatcattattctgccatgaaaggccgcatgggtcgccacttgataaatgcatggtttctcattcaggtttactaaaattttggtaatgaagttagggtactctatctgtaccgcatctcaaacccttatataaaaggttcatttcataagttactgcaatctttgctttgatgacctttggtttgatggcaacagtttctggcctattgcttggccttgtttatgaacaatcttatacctggttcagtggtcttagtaattggtctagcaaagcaagcatttattctcagctagactttcctaccgctgcttgttacattttttgcgtcgtcagaagaacatgtttttgatgaatttcttcccttttc

SEQ ID NO: 150639 - DNA, 449 bp, Zea Mays
attattttccaaatcaatctctacatgaacgatccgactaggttacgatctctatgatctgataaattcggtttagttcatataacacaaagttgaatacttacatatataaaacgataaaagatggaaacaaaattagcgcaggtccccacatcacatgttatgcgacatgtgtgtgcgcctttagcatctccctctcatgctaccttcgaaggaatgacaaaaaggagacaaggtatttaggttagttttatcccctttcagttttcatgttcggcacttacactctcaagctttattttataatttattgagtctttaagatctattttagaatttatggttaagtaaatgagctaaatctaatgaactctaacaatcctccaccagatctcaaaaggcacaacataaccgactcttcaaatatcctcaaatgttgtttgtatgcc

SEQ ID NO: 150640 - DNA, 345 bp, Zea Mays
ccggctgcgggtcaccggagaggggacgaagcaagccatcggcaacaagggcctccaaatcgtccaccgtgacggtagagaaaggccacgggtcgcgcggcagaacgacggtcgcccgatcggccatcaccaagcgaaggaggtggcggcggagcggacaaggtgcacggctttctttctctggctattccctcaggttgtggaaacctaagagaaaggcgagcggcagagtagagaaccgtcaccggtccctcttccgaatatataaaggcccaggcaagacccgttcaacacttcgcccgaacccgccgcgaaattcaaaactcgaaggcgaaacattcgttc

SEQ ID NO: 150641 - DNA, 461 bp, Zea Mays
cgaaagggttgttgcttggaacaattttacctgaagataatagctccttgacttgtttctctatctcatctttgtgtaagggggaatatctgtatggcctagaattgacaggaacgacattggggatgaggggaatatgatggtcataaaacctattgagtgggagaccactaggttctgtgaacacatcagcataatcatgtaaaagtgcctacactaggggtggaggtgaagaactgactaggggttccaacatatccataatagccatggcaccaatgtcatcacctctgacccacttagccaactgaattggtgtgatactatgaaaatcctagaattgaggtgtgatgccttgcaactcgatcaattcatcgttttgatagaactatagagttcaattttcctagtggcagttcattggactgtgaggggactgttttggacttcacgtgctgttt

SEQ ID NO: 150642 - DNA, 978 bp, Zea Mays
taaaaaggcaacctggtctattgttaatcctgctgtaaggttgtcaggaaagaaatccttctatccagctaagctctagaaaagtgcctcttcctttgctaggagcagagccctttccaagctaggagaaaccccatcaaaaacacgtgtgtcatgaagcttccacaggctctaggagcatagaataacaacggaatcgaaacctttctgaatttcaaccccaactctttggctccccctctgccgccagctagcaaaggactcatcctcatttgtaggcggcaactcctgcaaattgaagtgatggagaaaaaggaacagaactgcctggcaaaaacacagcttgttagcatgtgatcaattgtctcttgctgatcacacaggagacatgcagccaggtgtggtaggttacgtcgggctagccgatctgctgtccagcacctcttctgcatcactagccacaaagaatttgcatttgtttggtactttggtgcccaagatttccaaatacgttcccaagctccaaaaactgtggatccttggaagagtatgtatggttcataatctaacatatccttgtggcttgacatctcacatttttcttgcacatgaattctaagcaattgtggctcacatcattttgctacattgtttctactctgcaaggttattaaaacgataaaacgctgaagcgctcatgataactttttaactttaaaacgtttaagcgagctttaaaacgtctttttaaacaacatggacaaaatatgaatataacaaaatttcacataataatgtaacatgtccataaccacactaccgcaaatccacaataacacaagttcaagtgttcaactaatagcaactagcaagtagacaaccacaaacaaagtggaatgaaatgtgcagtagtccacaatcacaaacatagcactaaagcaactaaagtggaatgcaatgtccacaaccacaaaggca

SEQ ID NO: 150643 - DNA, 656 bp, Zea Mays
cctcaccaggcgaggcctagcgctgcgacgtatcctgtgacacataaggtggatcaccggggaacccgatatcgacctctgagtacaatgtgcctcagcattaaccgcggacgagacagatacctacccactctagcggtgggcgctacgaccaaagtacacgggtcgcacagtggctcgtgcttaccaaggcaggacatttgaatctctgcgccgcttgggctgctgccatcatggcacccactttagcgcgcgaggtaccaaggtggagggtgacaagtgaggaagacatgacgacgtcgcttgagcatccctacacactgtagcgcttcagcctacgccgcaacctattccagcgctctgccccgattagacgaggcaagggcacgacgggccaggagacgtacacgaagactagaagaagatccatcgcccgcgcatatctagccgatgcgttcacacacacccgagaggccgatggactcacgtctagtgcgtggcgaaccatcacaagaaagggtccgccccttacactgtataaacccccgagcaattcacatagattactcgagggctacatctaacaggtgagcttcggaaccgctcaagaaaagcctttggaactccaaggaattacacaaaggcttgggggctat

SEQ ID NO: 150644 - DNA, 340 bp, Zea Mays
tgcgatggttatccagagttggagacctccctgccagcttgtctcttgtctgggcaatgcgtgtccaaaatttaccgctttgctgaaattcagttatccatgcgccgttgcattgcggccacgtgccttgttttgcttggagctggcaccctcgagagcgttccccgtcgcgatatgggcatgcagctggcggcctttgttttctccagtgccatattgctcggcttaatgaagcctttcgccaccttgtgctcactaggctaggctcgctgtgggtctctctcgctcatgccctcataatcagtaatggtccggtttcgccatccattttgcctaagtc

SEQ ID NO: 150645 - DNA, 580 bp, Zea Mays
ctcgcgtcgacgggtgggtcccagtgcccagtgactgctctcatccgtgtgtggctttatgtgtcactgcatgtggggcccacttgtaatgctcgtctccttcgtcgtcgcgaaccggggtgagcaccaacagactccgtggatctcgcgtaacaaaccccgtcactcaggtgcgcggattccgggggattctttcgccgcagcctgatctccccccgtcatgatcttcgtagaatggcctataagacccggccactgccatccctagccctatgcctagtgagcttgagccgcgctgggagttgcgtctgtcgtagctaccgataggagagagagggaaaaagggtgagggccagaggattgaaccggccgtcgaaacacgcggtgcgcgcgggaaaccaggggcggtgtcaggcggagaagcgctccgcggcgttgcccacacggtggtggtcggctcttcaccgggccggaacgccactgctgatcagtgtcggcgccaggaactctggtaagaaccactcctagctgtttctacttcatttggttgtgccggtcgtgttcctgggctatggtttta

SEQ ID NO: 150646 - DNA, 405 bp, Zea Mays
aattcactatttttgattgctagttttaaagctttgtgatgatctttcaaaaacttggtgaaaatgttaaaattcgaatgcattttagttctaagattttttgggctcaactggcttgaccagctgaacttcggagctgaacttcagctcagctgcttttaaccagtttttttaccaggaccatcctggttaaaaccggttgaaccggcatagtggaccggttgaaccggtctctgaccggtttgtccgcgcaggtctgtccgcgcaggcctgtccgcgtaggtctgtcagctgcaccttttttcagtcgcgcaacatctttttctctcttgaccggtcgcttccacttctgctggcagcctgacgtgcaaattttttaatccggtcgcatcctgcagggcgcgc

SEQ ID NO: 150647 - DNA, 597 bp, Zea Mays
aaagaaactgtgccttgtcggagcatagttggtgagagttgctgttctaggtagttgaactgaaactctgaaagagacatgcaactagtttcaggtcaggttttcttgcttggttggaccagcactggatatacgtactcttacttcactagtgctcatgtttgtctgaagacatgtcgtcggttgggttgggtatccatgccatgttttacctgtgctttgcaagtgatttcaggcttccgttcttcaggccgcggcatgcttcaacccaatctgataggtttaccactgaataattgttgttcatgccttggttttattaaactagtaacctaggggaaagagaaagaaggacaagggaaactggaactgcctgtcatacatgttcagggaattacggattatgcctggatgttgcacacttgcaagttcagtgggaaccatatgactgtaaatgttatattcacattagttaatgtatgatatgatcaactgtgtggtcataggtgaccagattgagtggcttggaagcctatttattgatatttagtcggacacataactatggctgacagtgacagcgatgttaaaccactt

SEQ ID NO: 150648 - DNA, 299 bp, Zea Mays
ttggcgatatgagttggcataaccaaaatcccatggtgcctagactcgagttagctgccggtcatgtgtgttgttccatgtgcgcgggcaagccgccaatgggattgaatatccccgtggaatcccacagaaacctagaggaaaaaatctagctgatatagcgacttggaagatggcgacgagtacatgtggccaacaatgacatgaatacgactacaaccttcggtgccttccctttctccttaatgaccttggaagacttttggctctttaagtccttggttctcctttgaaaatca

SEQ ID NO: 150649 - DNA, 779 bp, Zea Mays
cgatccgggccactcatcaggcgatcaacggcacgcactcgacggacgaaagggtacgcatcatttaatcgggagcgcttgctctgaaatcaacggccaaggttgcaccatcctggatctaatcacagccctcgcctaaagatcccacggtcctagccaaaccgtgacgcttgatcccatctcagtcgttggttgcacaatctatggccacagtgtgcctccccttccccggtggccaaacaccaccgtgaacagggcatcacggcggagctttgccggagccaggcgatctgaggcactgatgtgtaattcccttaaccgaatatacctaaacgacacgggtgggcatacgaataaaataatagctaactcaccggcgacattgacgtcgaggaggccgaccacgatgggttgcagtttccatggtggcgctacagcggtggtgcgtgtccaggtggtacccggagacgatcagcgcagcgaaaagggggagcgccacgaagaggagcaccccgaggccgtggcgggcggaaactactgccaaggcgacggcgtgcgagcgggatccacatcggcggcccatttctgtacatcttcccagcaccttcaccattccagacgagcccccctgctccctctctcttggctttgtccgagcatggcggcgattggtgagcccagggccgcggatcgggtacttataccggcggccatgcctacattggcggcagattctgttgcgcccggagcttcacgcggcggagaagacggacccgccc

SEQ ID NO: 150650 - DNA, 407 bp, Zea Mays
gtccgaagcgctcgtgccactgccatgcaccgtcgtcctgacgagcagcaaggcagcaaggttgtgataccttcacgttgaggatgtaaagccgatttggactcctgcgtaccttggcaagaaggcgacgagaggggtcccagatcggcagatccttatgactccttgctcgacctccacgcgcaaaccgttctcatccagctgtcccaagttgatgatagagttcctcaacacagggatgtagtagactctagtgagcaacatgtgctcaccagacgcgacggtgaatatgactgagccgacgcgagggaggcgtccccaaacttgacggagcctcggacgcttaagtcgagctcggtgaagaactcccgtcggctggtcatgtgataagtggcgccggtgtcgag

SEQ ID NO: 150651 - DNA, 449 bp, Zea Mays
gcctgattgagcatgcttcctttccatctagccagacggttctggattttctcgatcagcggttggacatgaattctctggagcggccgggtgtgaagttggaggcccaggtaatgacacgggaaggtcccctgggtcccttggaatggctggagcacgtggtctaggtcaatgttatcacatcttatcaggtggatagagctcttctcaaggttggtgaccaagcccgaggcgcagccaaaagcgtgcaggatgtctttgaccgccaggatgtcttctctagaggggttgataaagatagcagcatcatcggcatagagagaagtcctcagtttttctatagttagcggaatgggggaaaggatcccatttctggctgcaaggtccaggatacgctgcagcggatcaatggcaaggatgaacaacataggggaaagggggtctccctg

SEQ ID NO: 150652 - DNA, 664 bp, Zea Mays
cgggcgccaacaatggaggtggcggggagagggagccagagggccaccgggagggttgcaggcaggaggggatgccggccggtgggcagtggcggctaggggaagggaggaggagggagaagagaaggtggcttgataccatgttagatagaatagaaaaccctaacccttaattagggaaggcatgtgtatacatattcatagagtatgggctgggcatagtgttttgattcatgacctgagtgtcacctagacattgagccaacccactacgacaggttttggccgccatagcccatagctgttctacaccttacttttatcattgcagcatgtaaattagctaggtgggtaatatttggggagttccatgcagaatgggtataggggaggggaagacttggctaatgatttttgtgtatcatgcctgtcctgtgccctgtaggaagagtttggctaaagaattaatgatattgcgaaaaacagagctgtggattgatgcatgataagagtgcttttggtacctgtcttcgatgttgccatcccatgtgacccagttgtagaaactatctaccatagtgacagattctcgtgtgtagttggcatctctaatgtagttggcatgaaatcctggaaggcaggaaacactttacctttttctgta

SEQ ID NO: 150653 - DNA, 674 bp, Zea Mays
acccaattggcataacttgaaattcatattgccctgagtgagtttgaaacgtcgtcttatgtgtgtcactggaatgtagcctgatttgatgatatccagctgttaaatccaagcttgtaaaccaagaggcttgacccagctcatccaataattcttcaatgatagacactggaaatgacgttttgacagtgatagcattgagatgcctaaaatccacgcaaaatcgccatgtgtcgtccttcttcttgactaacaggaccgaagaagaaaaagaactggaactcgcttaaataataccagcatcaagcatgatggcaatttggcgttcaatttcatccttaatcgctggaggatagcgataaggtcgaacgcgcactggagtcgcaccggcgatcagtggaatgacatgattgcagtcacggattggtggcataccggtaggtggttcaaaaacatctgaaaaattggatagcaactgcaccataggtgtgggcaaactcatttcattgaacctgagcgactccttttcaaccgtagccacctacaccaccgctccaggttgcagaacagccgaaacaccatataaagtaactgatgactgctgataaggaatgcatacccacttgtgtaaccaatgaatgtgcatggggctgtaagaagataaccaatccata

SEQ ID NO: 150654 - DNA, 1078 bp, Zea Mays
ccagaagcaaaaacaaacaagccctagtcgcatgttgtattatttttataaatattgtgttatagttgttgcacaacccaacagctaagctaaaaggcttagctagatatcttaaacaccggtaaaaagcaccttgatacctggtttaaatactctcgtattcatctcaacacatgtggcctgagatgaatatgagtgtccaaacaagatctagaggtggaggctagggagtatttataacacgctcaaacaaaactagttgttgccctgctacatacacatgctggactggtcctgtatgcaccgtagttcctgttagctacggaaaagttcccaccctgaaaatgttggcaaaatgtatcaatctaattgaggtaccactgctcgaaaattccttaaaccaatccagtatcgccacccacaacaaactctgttaaaatctcgtggcactctcaaaaacctcgtatggattgaacttcagcacttatagacaatcatgttgcatctctcttaatagtacggcatacctatcagctcaagtttagatgaaaactgaattcaaatctcttgagttatactccattgatcaacgccataactttcaatcttcatcatacaggatgccaacatattcatcttgattgtagcttgagcatagccatcttgatcatgtgatttgatccaattcaatccatatgaattaatctaatggcatgaaatcagtttcttcaaatgatccaacaatgatttaatcctcctcacaatataacttcttctaacttgaatagtgaaaaactaaatgcaagcactttcttcttcaccacaaccatgtccttcgtttctatatgcccaagccgtcgcttttcctttatcttcacttggtccccacggaagccatttccttgctaccatcaccctttcaagccattccaagtcatatgagtttttaatcgatattaatcatacattgaaatccatatagtgaaaaccattttcatcaatattgattttcttgagcgagctctctaaataagaccattacatatgcaagacatcatgtctcctataaccaactcaa

SEQ ID NO: 150655 - DNA, 396 bp, Zea Mays
cttaagtattgaactgtataattctgtttgtgcaggtaaatactatcttatggattcaggttatccaaatagaaaggggtaccttgcaccttataaggctcagaagtatcacattgcagaatgacaaaatgcgaggcaacctattaggagcaaagaagtattcaactatgcacactcgtcgctatgcaatgttatagagcgatcttttggtgtgcttaaaatgaagtggagaattctgttaagtctcccttcattttcgcttaagaaaaaatccaagataattattgcatgtatgacattgcataacttcattagagacagtgctctacacgatagagactttgatgaactaggacctaatagccttggtcatgatgtatctgtaggtgagagtag

SEQ ID NO: 150656 - DNA, 530 bp, Zea Mays
gtccaaagtagaagcagtatccaaatggaagcagccatccaacgttagtgaagttcgaagctttttgggaatggcaggatattgccaccattttatcaaagggttctccatcatagcaagatctatgaccgagctcctcaagaaagacaataaattcgtgtggatcccaaagtgtgaggaaagcttccagatcataaagcagaagctcacaactgccccagttttgacactgccagatgtccaccagaatttcgccatcttctgtgatgcttcaaggcaaggtttaggatgtgtgcttatgcaaaatgagaaagtcatcgcctatgcttcacgtctactcaagccgcatgagcagaattatccagcacatgatttagaattggcagccatagtgcatgccctaaaaatatggaggcactacctgattgggaacaaatgtcacatcttcacagatcacaagagcctgaagtacattttcattcagccagacctcaatctccgtcaacgaagatggctagaattgatcaaag

SEQ ID NO: 150657 - DNA, 488 bp, Zea Mays
agattcacagaatacagccatgcagggtgacgattatccatggaaaaaggagggggtaagggtggagcgcactgtagcagatttttccactgatgatatttctgctatgcacgagtctggatatttctgctccttcttatcccaaccaccgctctatttcacagtgggacacgacaggggaagaaaatattagagccagatatttcttacagatgataattcagagatgtgcctaaatctgaatatctttgctctcccccatcataccaaagtaggacacggcaaggaggaaaaagatcacagctagatatttctgtatttggaatctacagctctggactgacccacccaacttcaattagtctgttctcttgattttcaattaagacagaccagttactgttaatagaacttgttcccatatcaagggtttataaatttattataagtctcttggacctaatccttatggattacaagttatggtg

SEQ ID NO: 150658 - DNA, 438 bp, Zea Mays
tgttcgtgcttagtttttgcatagctctatcattgctgttagcagcctcaaattttcatcaacgcaagtggctgaacagggtttgccctgcatctagactgcagagtatgttaggtgaagttgatctgttaaagtctactcattagctgtatttcttggcaactaagatttgtatatggggtacttaatttgttaggtgttacaactgatgagaaaaaagaccacactcacatcaagctatagtctttcttttaatatattaaacaatttattgtttgatagtgaagttctgtccgttagagaaagttgttgaatgggaatctaaaaaggaaaaagatgaaaaataagtgggagttgttgcatgatgtgccaccaagttctagctctcactaactgctaacgattatctgcaccatgaatatttttcgataaactggt

SEQ ID NO: 150659 - DNA, 833 bp, Zea Mays
tcactgccaccaaaatacgaaccacccccattttcctagtgtagcgcatatcaactttctgagtagcacccaaaatagtgcctattgcccataaaggaagaaaggagcggatttcaaaaggaaccccataaacattcacccaagccttctgcagataagaaataggctctattttttgattaacctcctgaatcactaagataccttctcctcccaacgtatgaacatatttcatagcaatcatacgttgaagctcaacactgcatgggaacggtactataaagccgtcagcatgcctttggaccgaccaattccacttcactggtataagtcttgagagctctgacttaacgagatcagcagagacattaccttccttcactgtaatgaaagtcgtaacaccatccgacctcggaattgcacccttagatccccaagttgggatttggaagaaaccagactcaccgcccgcaaaaccgcatagagctgcctgcggctttggaccattaaacaccggacactcctcagggacatgattatcttcacaaatttcgcaacaaagatcttcccgtcttttcttccccatgtctgaaacaccgggtgttaacacggcaacccgttttctagccatctcagactgagcgcctctgctattattcataacctccctgtccactgcaccaagtgacgtagcgggcgcaagaaaacgtccaccacatccccgccaagcaccgcgaccacgtacctcccaactacctcgaccgcggaaagacccactgccaggaccggagggacgtccatgtacctgctgacgccgatgatccaccacacgc

SEQ ID NO: 150660 - DNA, 522 bp, Zea Mays
tggtgggacaaactccatcaacgtaatcaagcttcctgaagcacaagaagaaaaataaaattaagtcagtgtagttttattttccaatttgtacaaccacaaccatcttaaaaagcctttcttaataaaactgtgggtggtaccgtcttaccaacaatggtgccaaatgtaaccagcaagaacacataaagtaatgatatgtgaagaaagtagcaaaatataatatatatttggaaacagctcggccccgttcggcagcataggaacagttccaagccaggaactgtttcaagcctatatttagtgcatctggctctttcgctctttctagtacaaaattaatccaattggaacacttttgcctagaacgcttcttctccttgttcggcagcctaggattggaaaaggttgtttgagaaaaaaatatgatttacaggcttacaacttcagaatgtgatagccaaacatgaatcaaccaaaagcatgtatgaacaaatgcaaagaaccatcttgatagcgaac

SEQ ID NO: 150661 - DNA, 511 bp, Zea Mays
cacaggcgcccgaattatactgcgccacgtgtgtgcggccggcatggcatatgcatatgcatatgcagtgattagcaagctacgtagtccttccagatcgtcattatagcaaagcttccttggaagaatcgtcgtactatatacacagtcgtagtctctctccaaaacttgacaattccttaaagctttcttctttctagtgcaaagacccatcttgtgctcaacacaagctagcagctgcaaccacatagccggccagttcccttgcaaggatcactaaacccagttcttctctctcctataactaaactacgccacacggccacaccagtagttcccggcttgacacctggtgcagtgcaagtagaatagaagtagtgcaaccttgagtaatcccatgcgaaaagaaagctcaatccttccaagccacatacactgcaaccatagctgtgttgcttgatggagaatttccttacctgctgaccaaacctctcgaaaatactcgtcaatt

SEQ ID NO: 150662 - DNA, 375 bp, Zea Mays
ggatgatccaacgaggaattaccgatcaaacaccggcgcacctccttaacacttctttggcacccaggtctccgcgtaggcgtagaacaccaggggcgatgatctatctctccttcgacacatcgttcacacttgcagggggctcaagaacctcaccaaggcctatactcggtggaccaaggggacgaggttccacttttatgcaccggggtgggcaaagcctaatcatgaggggaagggtttggttgatccgatcaccccggtaaacgcgatttgttgagatactgaggagattgacacggagttgggaggggatgttgctgacaaactggctccacaattcagtcggcgaacacagaggattcacgtgcatgg

SEQ ID NO: 150663 - DNA, 717 bp, Zea Mays
gtgaatgatatctctggaagtctgccggagcaagttctatttgagtacttcagggtttaggacttgattcaggggattcatcttcatccaggggttcttgattggcacagacggctacccacgtcctctggggaatactccgccaaatctgcatataaacggtttctagctgggtcaactttgttttagccagctgagaggatttggaaaagttgggctcctccgtgttgcaaattctttgtttggttggcctctcttgatagatgttggactgctgacagactagctcgtcggggcctcgatcacccgaaaagttgccctctttgcgatcaacaggaagtaacagtccaacacattttggtttcctgtgtttttgctagggatatttggtttcaagtcctaagcaaggtggggctgcagtctctttcccctggggctgctgtttttgttttccaggaatgatggagggaggctgaaagcagggtgccaaagctccagaaaaaggggttcaactcaatagtgatccttgtggcctggtggttgtggaaacataggaatgcatgtgtgttcgatggtgcctccccaaacagcaacattgtccttcaacatatccatcaagatgctcatatgtggggaatggctggggcagcagacattatgaggctctggccttagcgctgggagtgcttgtttgctgctggtttgtagtagtgtggt

SEQ ID NO: 150664 - DNA, 535 bp, Zea Mays
attagaacgattagaactccactagtccactgtaaccatgaggtaagtgagaaaaacgcttgtgagcaaatcgtcatcgttatattctaaaataaactcaagcaaaaagcgagcatatgcatcaaatcaaggatttggacatgtatggttaagttcgaccacaagaaatccaacactctaatcattagaatcgataatccaattataataaccgtacccaaccctgatttaaacaggcccttccttattttcccaagatgcggcaagcaacgaagactagttttctcttctggtagtcaagcatcatttgctacgaatatctcaattactgtccgacgtatcggatgacagaggtctttgacggtgcatcggctgtgttcacctggccgtcaaagaacatcaacagatcaatcaactttttcctgaattaaccagaatcccaagcttcaaagcagcaaaccgcctcagcgttactcgaatggtaagtacacagcgtgcggccagcgctcccattcagatcgaccgacgcaaagca

SEQ ID NO: 150665 - DNA, 466 bp, Zea Mays
gctacaactgcggcggcaaccgggacggacatgccatgcgatcacgtcccggtaacacctgcttcttcttcttcccctcttcactcacagtctcctcattcgccttccttcatggatcactaaacagcacatccaagtaccttgcgctgatctcattctttttcttacacttcgattacttgcagaaatagcactagctagttggatagagatgcacgcaggtttcagattttttagacaacttgcggcatcacacagattcatttcgcaccagcgcattcaagaaccatccgtccatgcatgcctttgtcattccaccatcaaacacttcttctcaaattcaccaggacaccatgcatgctctagtctgcaatattttggtcagctactagggcaaccagtcaatttctcaaccatgatctgcaacggcatcctcattagacgattcatgatgttttagattttt

SEQ ID NO: 150666 - DNA, 442 bp, Zea Mays
accacctataaatcattactatgcaccctcctccaatttactctagcttcgccattggaggaaggtttgattaattagtcatgcatgcaaacaggttcactcaagattctccacgaacaccttccccagctgggatcgggcacaaccaatgcgtgttttgggacataatggcgagatcaatacccttagagggaacaagaactggtaacagcccccctcctcccaccccgctacacaatttgcaaagttttgtaagcaataatctccatatgacaggcattcatggacgcatttcactgcgatgtgctatatttttatgtttaataggatgacagcacgtgaaggtcttctggagtgcaagggactcggtctatcaagggatgaaatgtcaaaacttctgcctatagtggatgttacctcttcagactcaggttccattttc

SEQ ID NO: 150667 - DNA, 453 bp, Zea Mays
gggagacagacagagagagcggggtggggggaaacccgaagcgaggcacaagaagaggccaccgcagcgggcgggcggccaggcggcgagcgagacacctccacacgtctctcccccttccgtttcctcccgtccctgctcacacctctgtagctgcgcccgaccgaacccctcctaccccggaatcctccccccgatgcggcgccgataagggggcgagaccggcggaagagcggggaatggcggggcgcggcgagaagcggcgccggacaggaggggcccacgaggagcccgaggaggaggaccgcatctcggaccttcccgacgtgctgcgcctgcagattctgagcctgctgccgctcaaatcggccatccgcaccggcgcgctctcctcgcgctggcgccgcctctgggcgtaccgctggccggagccgtcctcggtgagcatccgcc

SEQ ID NO: 150668 - DNA, 283 bp, Zea Mays
gtggagttggtcgggtggacttcagtagttgactaatttctgtggagaaatgtcgtggaattctcatgatttcagttggtattagtaagcggagattttagggaaccaacagatttacttaatatttggcttgccaactctcaatgattcgtttagattgttatctgtcaagcatcgacagattggtttcatattttgaccacgtttctccttgtacagaggcatgcgtgtcaccaagttctcaaatgggaaaaaactttggatctgggacctattacaaatc

SEQ ID NO: 150669 - DNA, 385 bp, Zea Mays
gagaatccatagatatgcaaataagcatttacgttacaatttcatatcactggttgaaggtagtacaatacacgggctcgaacgaagtagtggaattatgaattacaatggtttgaattgtttggtttggtttttgtcccaaagaaaatgggaccaaactaagagaatttcttctacttcaattaaactctaaaactgaaataagatataatattatgaggctggttcaactcaaggaaaatggccatttgtgatttccttctgtctgggttcgttcagccagtaaagtcaagttttggcggagataaaaatcccaccatattatatctcgtcatatcagcaaattttagacacaaattttcttatgaagaaatttgtcacagac

SEQ ID NO: 150670 - DNA, 428 bp, Zea Mays
atgggggaagggtggctctcccttttaaggtggctttctcctctcaagttaagaaaggtgggataattctaagactcacatgatcgccgcccgactacaattaggccaactgggccaattgcgtctttgccaacgggtaatagtggaggatgtcatcatcattgccaccttcttataatgggccctagctctgataccaaatgatacacccatcctaggtgggttggccgaggccaacaaattagggttgcctagagcccaacagttaattatgcacacccaactcagggaaaggccccatcgccccaaaagactagtctaatgggggagggtggctctcccttttaaggtggcttcctcctcccaagttaagcaaggtgggataattctgaggctcacacaatcgccgcctgacttcaactggacca

SEQ ID NO: 150671 - DNA, 363 bp, Zea Mays
aacaactccagtagccaggatctggttgtctactatcatacagaagggatcactaaaaccctatacaatatgttctaagtgtgacctgtgcttcttccccacgtgtttaaccacactctgttcttcagcctagacactactaaaaagtattggatgtagctattggtataacaagtgggttttttgacatgtgtactgtggagcagtgtcaaccacgacactaaaggtaagtagtcatgagctggtttgctctcttcaatgtatgcagctgctatacttattggctggcagagcttaagccagccaactcggccagctgcaatggcaaatcaaatcccttcagcacattaggcaggacagaac

SEQ ID NO: 150672 - DNA, 922 bp, Zea Mays
atagcattctctatcctcaattgcaacgtatgccggcttcacatgattaccactactcatcactcgaagtctgctctcttcatctatcatggcagacacagcctcaccaatggtaggaagactctcctggtgacaaaaggccgctctcctgctctcaaattcagaatccagaatctttagaaagtgggtcactctcctatcctctacccacttatgaaccatctgtgcatcctgtgggcaaaccatttggagaggagcataatgatccagctctccccataaatgctggagctcactagcatattgttccactagtctccccatctgctttactgcatctgccttgctctgaatttccatcatcaccaccacattcccctttcgggggtatatattaatcaaggtcttccatatttgtgttgcagtacgcatggcttccaccctcttgctaacagtgggagacatggatgccaataaccatgcaactatcacagagtttgtcgcatgccagatcctccattccgcgccgagcttatcaatcggctcaacacatgtctcctccaaatagtgctccactcccttgcctcctaggagtacacgcactcttctagaccagcttagataattcttactaccttctaacttcacatcattaggcacaagttccaacttcaactcagatgtacctgtattggccttagcaccaatcaaccctaaccccatgagctcctggatcatacttctcatttcactcatcatctcactctttgtaatccctcctgaaccactgccatcaattgttgtcttcttcgcagcctcttctgtactcattttcacaaaagcacggagtcacacgctcgactcctctctcgcatccgagaccgtagcctcacctggatgtggacctagtgctgcagctgac

SEQ ID NO: 150673 - DNA, 415 bp, Zea Mays
tttattctctgtgaaaatatagggtcaaattcactaatcgttttaagcactttagtatcacgtgcacagaattttcagccttacttttgtaatgagacatatgtgggaggaggtggctgctgagtggcatttaagagctgctggaagaggaattagagtgcctggacaggattgtggtttgtagtgctcaaccgtttgttcctttactggtcggaagatttggttgctaggaatgtacaagtagcgtataagagtgctcaactggctaatgtggccgtaatttcgtagcatggtggcatcaagattcttccaagaagactgattccatgttgcatatttttctcttcagacatgatttctctggctgctcctaatctcccattagattgtgtcttctgttctccacacaattcag

SEQ ID NO: 150674 - DNA, 724 bp, Zea Mays
cgagtgtaaaagcgcaggatggatcataagtataacttttgttgaagaaacgacatctaagaccaaagggaaaaactgaccataaacccacacacatctagatgtcactcttctaaaggatgcaaacccaccttaactgctctatacgcacgtggcacccaagtatcgaaacaaagtaacaaactgtgtgaaccaaagatgcagtatgcatagcctgtccctcacaaatccaggtatctggaacccatcccaacacagacacacgcaccaaagagtaagaatccaccaaccacacatggattctataccggatgaccgacggtaacacagttgttgcaaagaacaaacaccctaacgcagcaagcaccaacggagccgaccctaatgcagatgcagacgacatgagggggtctagcagagcaaacgtggacttacggagtcacagacaatgtctacggggtggcgggcagcaggagcagaccacacgctcccatgacgacggtgggtgcccaaaccaaagtggcgaacaacgacaaagacgggctggagaagctatcggttctaggacctaataaggcgaacatgaattgaggagagagggaagaaaatattaaaagggaggaaagtactcaccgtcgtgcagcacagagcgcggtgttgtttcagccatgcctgtcactggtgaggcatgggagcgagggagatgactactggtatggcgacg

SEQ ID NO: 150675 - DNA, 349 bp, Zea Mays
gttctagggttcgtgtcctccgtctgctagatctttgctcggcttcatgtttgtactggcggctgtgtgacagcgaatcgtattctaggaaatcctctcgaaatctaacctaacctcgcccctaaaaccatagctagggtggtgcggcttggaagccacatgttcggcagtcagtaccaggctgtccggtataaggatttcattacctagtgaactgttggaacggccctcaagaaacgacagcgtgatttttttagatgatccaaagcagctattgttgctgtcgggaacaatcgttgagcttcttctagtcaatgtagagggtgcaatggtaattcgtttgccagtt

SEQ ID NO: 150676 - DNA, 471 bp, Zea Mays
ccaccgtgaaacgagcctcaccgtcgccagccatactccggttagctcctcccctctgctcccttgtttaagcattcacatacgtctgcgatactcgccaacccatccaattgagctaggatcccatgaatcgccgggaacacgaccgtatagtcgccatactcacggccaccgtggccagagctccatagttgatcaatagcgcaattaagttaggggaaatgatcttggtaacctcgatttcatgtccgccgctcggagaacccaaccatagccccaatcggccggtccaggacctcgccggagtctctccgcgcgcgtcgccgtcgtggaccgcccactacgaagaaatagaacctcaagggcctctgtgcaaagcgtcagtgacacaggaaaacagtagaaagaccggatcccagttaatgagaaccccgagggtatttttgcaaagccgccagcgcgggcgcgcgc

SEQ ID NO: 150677 - DNA, 341 bp, Zea Mays
gaacaagatgacggtgatcggcgacatggacacggtggccgtcgccaagaagctgaagaagctcggcaaggtcgacatcgtctcggtgggcccagccaaggaggagaagaagcccgacaagaaacccgaggagaagaagccggaggcggcggcggggaagaaggacgacaagaagtgagcgccgaggccgtctgaatacgtttccggctgatttggatttggatggactctctaataataatgggcccaatacatgatatagaacattacagcccacaagggcacgtggttgcctctctaattagagtagtaccaacccaatacactacttagagggtgtt

SEQ ID NO: 150678 - DNA, 733 bp, Zea Mays
caaaccctcgctcactcagaccgcctgccctccgccgccgccatttgcgccgaccgccgtcatcagggcaaggatcgcggaagcgagggtgattccggggttttgcggagggtttaagcccggaccgctctgttcgcgcatcgaggggaggaaaggatgagctggaagaggcagaagcaggataaggacgagatgaccgaggaatgctgcttcatttgcaaggacagcggccacgacctccgcgtatgtgactctaggtaagtcttcatcgtcctgtatacgtgtgactccacgaccccgatagctgtgtgagtgtgggtgggtcggttctgtgtctatcggttggctctttgggcgcgaaaaagactagaattcatcgcgattgctctttaaccggttgcgtgatttcgtgctgctggcttgttccagcgcatttggatggctgtgcgcaatgcagctaggtagatgttggtgcagcgattctgcgtggcgaatccacctgcttatacctctactggcttgggaaacgtcgcctggttcatcttattttttagtccaattgttgccagcagctttgcagctaattttgcgtcctggtcctttccaggaactgccccaaggcttaccatccacgctgtttccaaaacaaagatgaggtgttcatatgcggtgagaacttatatgctgtcgattttaccattcctatcctgaatgaatggatgcaatgttaatg

SEQ ID NO: 150679 - DNA, 309 bp, Zea Mays
ttctggtcatctaactggtcctgcacgctgatgattggttgaagtctgtggagaagatgatgattggctgaagtctgtggtttatgaccttcatctaagtttcattataccgaagagggaataatgcttcggggggacgaaggtctttaacatataacaaatgtgttgtcttgctctttattcacaataattgagaataagtgaataacattggcgcccacctccggtgaacttgaacgaccaccttcgacaataagaactcgatcaactaccttcgccatgccgccaaagaaggcagtagcactaggg

SEQ ID NO: 150680 - DNA, 481 bp, Zea Mays
tacagatcgtaggtttgatacactaatggagaaaattgcagcagctagtgctaaagcggttccctttttaaataagcatcacaaactcaaatggagcagatccaaattctccaaagaatgcaaggttgattatgtgaacaacaacatctcataatgcttcaacaattggattaaagattacaaagaccttccggttgctgaattgatggataagattagggagaagatcacggagaagctttacacaaggcaggagatatccaacagaatggaagggcgtatcctagcaagtgtgttgcatgagttgaacatgaagagccgagggctgcagtatggaatcatgaggactggtgcaatgtctgctgagatatctggaataacaaaagaaggtaagaattggagagttcctgttgacattgagaaaagaacttgtggttgtggacaatggcagatttctggaaaaccatgcactcatgcaata

SEQ ID NO: 150681 - DNA, 421 bp, Zea Mays
aaataaatgaagaatatccataaccatactgatatccggggcagtaggacatagaaataacactgcatcatccgcgtacagcgagatacggtgctgcatattcctagaagaaagaggctgaagaaacccttcctcagaggctcgctgcacaagcagattcaagacatccattataagaataaacaacataggcgatagaggatcaccctgcctcagtccgcgttgatgcccaatacattcccctggcagaccatttagtaaaatcttggtagaagatgaagctaacaacccgcttattatatcacccagatctgtccaaaacccagctttttcaagacctcgagaagaaaggcccacgataccgagtcaaaagcctttgaaatgtcaagcttgagaaggatacgagcctgcttctgacaat

SEQ ID NO: 150682 - DNA, 388 bp, Zea Mays
acagatttctgaggttgtatctgaaaagcagaaacaagaatagctagcagaggtgtaggctgtgtttggttccgtgcaatgcatgacgcatgagattagtttgtcttgtattggggagccacactcgagctaggttgggtgtacgaaggatcaacttatctcaaccccttggtgaagacagaagtgggcagccccttggtgaagatgtccgcaaactgagacgtcgttgggacatgaagaacacgaacataccaatggcaacgcgctcacggatgaagtggagatcaatcttgatatgcttcgtgtgctgatgctgaaccgggttagtggacaagtagacaacactgacattgtcacaataaactaaggagctcttggtcaagggact

SEQ ID NO: 150683 - DNA, 432 bp, Zea Mays
gttatggttccttactaaagctttaaccaacatgcactaagtggtgagggaggctaaactacatcttcctctcatatcgcttgttttaaagaattagtcacgatcttctaaaaataagttaattacggtggagatctcgacgttaaccatttaaggctttgagcgaatgacttatcataatcaatacaccactactccattagttatcacccatgccactcggattaccacaccaagaaaacttatccatataggagcaatcaagaacatcaaaaagaacagaaaacatgcaatcaacggtattcattatgaaagtggggtttaacaaaacgataatcgatgatattgttcttgacagattgaatctaagctaaaatctgaatcttaacatgggtgacgaagactaaatatatagtctaaagagcatgcaag

SEQ ID NO: 150684 - DNA, 303 bp, Zea Mays
tctagaaccaccatacacaattaatcaacgcattcaccacaatcatcaaatccggcatatatgtatatcgaagcgcttttcacccactagttcgcattttaacttagacaccacatgagcactactaatttttacccgtgtcatttagtgcactaaaattaccacatacattcaacaaacacattcaccacgtaaatagcatcatcacacatgacctcgacttaaccgcagaggaagcgatgactacttcggcatgtcaccacctctctacagtccaatcaatattaactacatcgatcgaac

SEQ ID NO: 150685 - DNA, 624 bp, Zea Mays
gacttggctcgcttttccacttgttgccggagtggtgcgacgaacttccacccttcttgttcttgcccatggttggttggaagagaagagaaaagtgggaaaataagcaacaaatggctagaagatgtgtgaagacaccagtgaggcaggcagtctatttatagaggccagaagcaaccgctcatctcctaccacggtcaccgaacagtcgcaagtattcaataagcaattcaaatcgtctggaagcaagtcaggcagcagacgtcgttttgcgtaacacgacaccatttggactgaggtcaactgcttggacgatatgattacaccccacggtcacgtcaagttactactcaaggacagtttgctaaacgctcggcgtaccaagccgtccctcggttacacccattggggaggggatgtccaagaatttttaatagattttcccaagcagtcacatacatacagtatacgcaatgaatgtatcaagactgaagaaagatatcgatggagatcagaggaaagccaaatatagctactgaagtacaagtctaatcaacagaagcattgaagcacaaagcgaaatgaagaccagccaagagccatctaccagacgtccaatctgtc

SEQ ID NO: 150686 - DNA, 752 bp, Zea Mays
gaagaattccctcatcttttacggagaagccagagtacgtctcaaaggaataccgcgagaatggaattgagaaatgctctatggcagtctacctgggagaaagtcgaactacccaaaccaccctcccttccaagtcaccggcactggacaccgcttcccagacacttgccaaaatgttgcccaaaaagccctccgccagctatgccaaaactaagcagggaagtctccgagacaccccttcgttactttccacccagcaacaaaaatacccctacctggaggaaaagactttaggccttgttagagagagatcctaatgaggatgaccccaccatagtctacatggccagatatctccacacccttgacaaccactatgacgaccttttctcccactgcacccacctaaattcccgggtggaaagcctagagcaacaaatcaaggaattaaaaaaggaaaaggcgtccctccaagaaagtctcgaaatagcagaaggtgaagaggccaacactcgtgaagcctaccgaaccctgaagatggactacgataagaagttaaagaagctcgcccacattaagaagacccggaagcggaccaagagccaaggatgccagactgaacgaaaagaggaagtcccgccaacactacctccctcaaggatagaaagcttgtctgacgttgaggagatgtccctggctagccttgacgatcttcttagggaatttggggacaccttagaaagggagttcag

SEQ ID NO: 150687 - DNA, 1941 bp, Zea Mays
gccacgaggaagcccaggagggggagcaggcagcagtcatggaacacggcgctctctcgctgcagcgcggagtcaccaacttgttcggcaggcggcacgacgagaagcaggcggtcggccgccggggcgagatcagggaggtggacttcttctcgagggtctccagaccccgggaccaggacagcggcggcggcggcgggcgcggggtgtccggaggcggacgtgacgacgtctacgtgagtctccgcggtatcgatcgtcagctactggcgaggcttttgcggattgctgaaattaggcggcggtattgtatgattcctttttgaattgaccaagtatagtgcttgttcgtgcagatcgagctcgacctgctgaccaccaccacagctgccacgacctgcgccggcgacgaagtgatgcagaccaaaaatcaaaaggttggttcacttccgttcgaattcatctttctccgaagatctcccccccttcttctcgccgtcgtttgttggattttttgcatttctgatatatattattttgtatatcatatacctatatgtgtgtgtactgtgtagatagaggcttcagctgtggaagcggagctcaggcgggtagtggaggagaaccggcggctgcgcggaatactggaggagctcacccggagctatggcgcgctgtaccaacagcttctccttgtcacgcagggtcagcaccaccaacatcgactgcatcctgccgatctcatgatcagtaggccatcactggctcatgtaagtgctgtttcatcggattatatggccgatctccccagcgtgtcttctttttcggtcttatttcctttaattattgttggcgtgtcttctttttcggtctttgtttcctttaattgttgttgccttctgcctggattgttgatttcaacgttgagtgggtttcaaattccaaattcaacttttcaattgcgcaattactactagcatcatcacgttacctgagtccgcatcaattgcgggattactactagcaccacacgttagctgatccatctgagtccgcatcaattgcgcaatttttaaattcgcttcttgttcccaatatatatattagacctattatatgctagagagaaatatatttgctaccgagagagattcttcaagatgaagatccgtgcaataatgtacagtagtccacagctaaattaatttgcgtgcgtgcacgcacttccatggtaagatcctcgtcaaattaatcatgtcacatgagcttatgaatgcgtcagtgtagtttactcgatttgattcttccatcatataaaagagtatcctagtcgaatagtatagtcaagtactgatatgatagacactgcacatatataggagcatcggaaacagctagcggatagtactcaccctcccatgaagtccgctctagcatttcgaggctacaaatcgggtctaattaacagtctctttttctcattttttttctttttttccctttcgcgctatccccgtgttctcgttctgtagaattcacgaggcatcgttgctcaccatccgcgcatgggcaatccgcgcggccgtttcacgctcgatccggccttcccttccgccaccaccacaaaacgatagtaccagaccaatatttcatccaaactgagcacctgaagaatccgctgctagcatcattcacctcaaacacacagcgtcgtcattattggtgaatcacagggttttggcacgcacgcacacagcatctaatttgaatattttggttttcggctacggtcttttgtttttctgcggcatatatacagtgacactaattattatgaataatacacagcgactggtacacaccttgctctctcatgtgatcgatgatctgtactgctgctaccccagtagtagttagcatgtgctaatcccatgcacgaac

SEQ ID NO: 150688 - DNA, 433 bp, Zea Mays
caaggtacatcgtgacaagcatggttagcagtgtcaaatttggttagaacttagaactgttaaactggacgatgattatcagcctcgacgacacaagacatattttccgatgcttataaaatgcattttcgagactacgaaaaatccaaagtgtagagaaagaaatgcatctgtttaccaaagcttcagctcgtagtcggtgtcgcgccccttccgtgtttctcggcatcagtgctcttcttcagaaccgtctgccagcattgacggatgctgcaagtttgcacagcgccattgccccttttcagctgcctctctcctttccttttgcaagtgccacacgccaaaacttcacaaatcacggctcctatgaagaaatgatgggtattggccctggttgtttgctgtcgcaggcaacggcaaagagcaagacagc

SEQ ID NO: 150689 - DNA, 324 bp, Zea Mays
ggggggtcctcaacggagactccgctgcagctaaatccaacgccacaaaatagtctaaatcgtcctcaaaggattcatcatccatccacgaaaaagggctccccaattttccaccctctgaagaccacgacccaaagtctgattcccccgacacattaccactaagagacatcgcatttgcatccatcaaaatatcatcactcatagcatcatcagggtttgcttgcgcagacctaaacgctggaacctgcgtagcaaccaatcttcagtagcatacaaaactaacactatcagtctaccccctattacattctctcaacctgc

SEQ ID NO: 150690 - DNA, 694 bp, Zea Mays
tttggatcaagctggccgatgagaaaagtccctacaactttccttatcttaatttctacattgaaggcagctggtacaaggtgagctaccggcggttcgctcacattcttggattcactgatgatgacatttctggtgacaaggtcaaaattcatgattttcggcaacccaccaaagatgaagctagagatcttcatctctttgagtctggaaaattttgggagtccacaaatatgcacaaatattacagatatatcaactctctcagcaagatgaccctcattcccaaagggggtaaccagatgaatattcttggagagagcaaggtcttgctctcattcatgaagcccaacagttcagagagcatcaatatttttgatatgatctggcaggagattatccatgctgcctgctttccacttaagggatgtctacatgcacctttcataatgaagatgattgaagttgtgacgcagtttcgctatgagaaaggtactagacatcaatcttatatccccttctggattgatccaaacaatccagcagggcgtttgaggaaagccccttccagctcccgtgcacacacttctgctggtcctgctgctgctgccggtgcttcgcgtccctcccctggccgcggatctcccacgccacgtggtcatggtcgtggtcgaggtcgtggccgagggatggg

SEQ ID NO: 150691 - DNA, 300 bp, Zea Mays
tcgagtggcatgtgatgaagaagaatggaaaggtagacgaacgtgacgtcctagctggcaggcatgacataagggggtatttttattcggggtacaagggatggcagaagactgagctagctgagtgaggactgtagatcctggatgtccaagtcgttgatgccacaatgaagaggtggtagcatgaagggaagatgttgtgctcttgagtgggtagagtgggccggagctatcacaccgaaggatcacgcgccgagtgggaagatccttcacagagcagccaagagggtcaaattccac

SEQ ID NO: 150692 - DNA, 352 bp, Zea Mays
gtcctctcgccggccttggcgcctgctctctccgccgtgggtgttagacggaggggtcccgctcgttcaccatgcaggagctcctcggtcaggcaccgccacacgccggattcgagctcctccccacatgtcgcaagatgattcactgtgcactccgccgctctctgtcacgacgttgaaccatccaacctcgccaccagcggcgacctcctctttcttgccttcctctcctgtgtgccgaatcgtccctctccttttttgtgctggatttttggggtttttaccagagttgtttcctggagcttagccagaatcctagatgtgtaccccttaaactttaggtctctgtaat

SEQ ID NO: 150693 - DNA, 1049 bp, Zea Mays
cacatggtacctgacgagccattgtcaaccacgcttcctttggacaggtcatacgtagatgctctaaaaggtgtgtattatgcccaacattcctggtaacattcttcctgctttgctttggtgctaccctttctcttcttcctgtgtagtgcctaccctgagaggtcatactatggtggacctgaacatgtatacccatacagccatgctgttttctggttccaagagcgtgttaaaaatgattcctgctacacccagaggaaaattgtgtacaacctttgctgcagaggagggaaagtgaacctaaaaccgtttgagcgtccgccgcctttgcttgctaatcttttgagatttgatggaggtactcgctcaaggcgtttattgaggcttatccggtcctacaattcattgtttgcattcacctctttcagtgcagctatcgatagaacgataaataacggcactgcaccctacgtttatggggtggtgcaccataagattggcaccctacttccacagcgtgggacacaaccataatttgcccagttgtacacatatgacacggaacatgagacctagaataggctagggatgtttgagaccgatgatggcgctggtggccagccagaccctgaaatagcgtcggcgctgctcgatatgctgaatgaaaacaactcgcttgtcaaagcgttctgatacgcgagagagcgccttgagcgtgagggtgatcaaaagataacactcagattgctaggctgcaacacacgccatgatgtacaatacaacctaccctcaaatggcgagatcgctgtcattatagttggcgactacacggctggggaatacacatacgatgttcttgtgcatgatagagagtgtggcctaaaacgtgtttcatgcttgcatccagcatacatgcctttgcaatacccgttgttgtttccttacggtgaacatggcttccatcttggtattaggtactttggtgctggcgatgttggttcatcaaagcgaaaatatgttacgatgcttgagtttgtaaggagaca

SEQ ID NO: 150694 - DNA, 600 bp, Zea Mays
gccagaggcgaggccttgccctccgacgtgttctaccatgtcatcggcacgccagccgtccgcagcccagagggcctacaaataaccaacgacaccgaaggccaccgcatagtcaacctcatcatgaccgaagactggcgagcaccaatcaccctgttcctgtagggatattaccatccaagcgacatcaacgaggccaagcgcctcaagcaccgaagctgggacttcgcactcattgagggccagctttacaagaagggggtcagccaacccatgcttaaatgcgtcaccgagaccgaaggcgtccaaatcctgcgtgaagtccacagcggaacttacggctctcacgtggggcctagggccctcgctgctaaggtgatctgtcaaggcttctactggcccgctatgatctgcgccacgaatcgagtcacgaggtcgtgcgaagcctgccagaagttccccccccccccccccgttcgggcaaccctttgcaattcacaaagctgatcgcccgcacgtggccccttcagcgctggggcctagacattgtcgggccactacccacggcccaagggaacctcaagttcaccttcgtccccg

SEQ ID NO: 150695 - DNA, 487 bp, Zea Mays
acgtttcttcaatgaccaccatagccaaaacatatatattagtgttttctagaaatactgagttacattactagccaatttctagaaaacctaagacaagtatccgtcaataatcccattggtcctcatgtacgtgtcttccaaacactattcatttgttcacagtattttaatgtatgctgaaattgattaatgtaaaagtttcgtccaaaaatttaaccacagaagaatgttcatggattagtgccctatcatgctaggaagatctaccaatgggggtgggtttaaagattgggatgtcactactgcccactcaaaaccgataacaaggaaagagaatcatttgcacaaattgtcccaggactgagtagggactgagctcgcctttgctccatcgtcctaggccgccgaatcgcatctctccccactcaagcagccaaatcctaggacgagaacaaacttgtgctcgcccaaagttgtatgcacc

SEQ ID NO: 150696 - DNA, 391 bp, Zea Mays
ctcgccggcgacctcccctccccggcggcgatcctccggcgaccaagtgcttgtcttctccttcctctggtgagcagccctgcttcccccatgcatcgcttttccctctctctctctctccatttctctggacagtgctcccctctccacccttttgtgcctaaattcaaaattctgtgaattccagtgaatccaagtgatgcaatgtgttcctatgtgcccattgtgtacccctgcaggtttctagctccttagggagggtttcacagcctctaatagccatttctccaaaaccctagaactccgcacaccacgtgttcggtgaaatgccaaaccagccaaaaatgctccaattgaacccaaatttttcaggcaccttcacaatacctcc

SEQ ID NO: 150697 - DNA, 443 bp, Zea Mays
tttgatcaattccagccatcttcgctgacggaggttgaggtctggctgagtgaaaatatacttcaggctcttgtgatcggtgaagatgtgacatttgttcccaatcaggtagtgtctccatatttttagggcatgcactatggctgccaattccaaatcgtgtgtgggataattctactcgtgcggcttgagtaagcatgatgcataggcaatcactttctcattttgcataagtacacaccctaagccttgccttgaagcatcacagaagacgacgaaatcctgatggatgtctggcagtgtcaaaacgggtgcagttgtgagcttcttctttatgatttggaagctttcctcacacttcggggtccacacaaacttattgtctttcttgaggagctcggtcataggtcttgctatgctggagaaccctttgataaaacggc

SEQ ID NO: 150698 - DNA, 334 bp, Zea Mays
cgcggactaggcaagcccgtaggcctcggtcttggcgacaaggcgcggagctgctcgactccattaggtgcgtggggtgagcgaccacggggcgatcagcagcggtggccgagcccaggtagcgaacagatggaatgccggtggcctgggtgactagcagtgggcatgggagaccgacgtccaagacatgggtgtccgtcgcctaaggggtggaagagagagaaaactggagagtagggatggcaatggttcgggtcgggtggagcaaaaactcgcctgcgatcgcacccgtgaaaactaacgaaactcgtccacgatctcacccgtgggtgca

SEQ ID NO: 150699 - DNA, 414 bp, Zea Mays
gtgatggcgagcaagattgcacaatgcacgactgctccatacgactgacctacgaacccccccgcactaccacaaggacatcagcgggagaccagctacagggacccatatgacaagcggatgggacaatatgccataatgggagtacgactacgcatgatcctacgaatggcgctagaggaactacgccagcaaagggccattgaccgagctccctccaagtagaatacacgtcctcattgtaaagtccggctcttgaactataaaagggtagcccccactatccagagcaatactacgatcaacactacactagactagggcacaagccagaaccagtataaacccaccgtctcaaaaagtacgttcgagtccaagtgactcaccattcggagtgagtccgtactaacttcc

SEQ ID NO: 150700 - DNA, 541 bp, Zea Mays
taggggtgttccgttattcttgctgatgaggtcttttcggccaatcttgttgtgatttccttgggggcattcgatgttatcttgggtatggattggttatctcagtatcacgcagttatatcctgttttttggaagacggtgttattgcaagcaccatcgggtagggagggtggtattcttgggaagttccccaaagtactcgttatccttgttggcgcaattgcttcaggatcgccggtcaaggaagtcaggaacctttttctccatggtggtggagggtgaggctgccttgcgggtacaggacatccgtgtggtgtgcgactttgctgacgtgtttccggcagagcttccaggcattactccagagcgcgatgcagcttttgagatcaagctgattccgggtacgcagcctattcataaggccccatatcgaatgaccccaaaggagcaggttgaattgaagtggaattggatgatctgctggctaagggtttcattaggcctagcaggtctccatgggcttccccagtattgtttgtt

SEQ ID NO: 150701 - DNA, 740 bp, Zea Mays
atcagcagcagattgggtacacccattggggtcagtgtcaataaattcagttacaggcatttcttcagcagcaggaaccgaagtaccagcgtcccgatccaaactggatactcgtcggaggcgcctccttttctttttctgctcgtcagcagaaggatcgggctgattggctcggcaagggcgcctcgggcgagtactggcaggcttttgagtatccaaagtggtatcagcctctgggaggggcgctactaccgatgtcccagcaggagcagcgtcagaagagtcctcagccagcaaatcaagcatagcgcttatctctgcatcactagggttcaggggcacctcaaaatagacctgtcgttcatcatcaggaatctccccgagcgaggcaaccaaggcactaacttcttcagcagagggccgcactctaaggcccaaactgccatcagtaacaggaggattcgacacaaaaagggtgaaggctttgggaggaggcaggttccaggccgagtatgccactggggcaccaacatttgacaccttgcctctaaggatcatctcaagtcggttcaccaagtccacagagggaattcttctgttggtaacccaagttgaatcggccaggcctcgatacagataagccgggtgcgccctgtctttcaacggctgaatattcttaaagacaaaatcagcaacaacagcttcagcagtcagacccctctccttcagcaatccaactt

SEQ ID NO: 150702 - DNA, 637 bp, Zea Mays
ttttttttgcgtcgccgcctgggattcctcccccgtctctccacctgcgttccccacgccggccctcacctgcgctcccctgcctcccccgcctggcgtatcagcagcgcgaccatgccggccaatcaaaagagctcccacgcttcccagtacgttctgtccaggccgaagccgccagttctatccagcaacaggtgcggttctctcttggagagagtggttctacccaatcaaaagtcgtttcgtatatgcattcttgttattggtttgaaactaagttgtactgcaaaatggtaaaatagacaattgcaataaaccacaactctcagacgtcaagaattagtttacttggcaaacagttttttttaaaaaaaaatgattctgattctctaggagaatcaggagtatcagctttcagctcctcaggaggattaggatctggagctaagaatcaggagctgaagctgtgccaaacaggtctgtcatctaaaggttcgcaatttcagctccacgattttctagaacacctaatgtcctactccaccaactccactaaatttcgaggagctggagcagtcctaaacaccacctaaagcaccagctttctcaagccccccatatttaaataaaaatgcta

SEQ ID NO: 150703 - DNA, 1080 bp, Zea Mays
acctaaaatgcattgttatgtttatgctttgtatttttattatgaagttgtgatttatttcagttgcatagttttgatttattcatgattaagaaagcatatttcatgttataaacctcaaatctacgttttttggtttatttttcttttttgtttcaaatgtggagatttacatggattttttatgttttgatttatttcaaacatatttgtaactatgatcaatactataagatcaatggcaccatctacacttaaccaaacataggtcggttgcagccctacatcacgtccctacagagtttccgtaagtacacatttcacttgtcgcatatgtatatgcgtggacaaaaagaatctaaactcacttttaatgtagtttcgtgttatttgatgacgttgagagcgatgacttaccaaaatttaagagtatcatagccagaatcgttgttaagttccctagacgtcatgacagccaacattttattctacaagacatcactgtaagtcactgggtcaaacattcaaacaaaaataagtgacgtcaacgtatttctcttactcatacgacgtgcattctgaaatgactaggggtcaaaaattgaagcaatttcataacgcgataatgtccaaagatttgacaccttactccaacaaggatctacatatacattatatggagtggcgttctgtgtaagctggggggcgtatctatttccgaattttggacataggctagaattgaccttggcaactcggactattgtggacccattccacttgccaattcagtccccgccgtatccaaaacatcttatgccatttcatgaggtcctccaacaacctcataagaggtttataggtatgtgcccgtctttctatacagagtataattataccgcactaaaccataaaaaatatactcgaaatttaatccctcacatatgaatgtctcagatgcaataggaattgttattcatttggcgccgttagagcacatcggtggaaggtcgtacagagaggccatactaatggattccaggtcattaatttatagctacaatcttttttaaactgcag

SEQ ID NO: 150704 - DNA, 443 bp, Zea Mays
aggattcgtcctcgctgcgcaggctccatcgacaagccatcgcccagctcggtcggagggaggtggaagaaggtccgtgcaccgttcattccgtgatcgacgataacgattagaagattataccccccccttcgttgttgtgatctcgacccttgatcttagatcgtagggttctgggaggctcaacatgttcgaacatctgtggccactggattgtgggtgcatgaataggattagatcctcagggtagcgtttctttgtccaatctgatccactaattgagtaatggatgacatggattaggtcgcgcataccttcgcgagatttaaaccaggccattgaatcggatcggacggctgagaattatcaataacccttcggtcaacccttattgcaaaagagaccctgaactttttatgaatcaacccaccatccacattagt

SEQ ID NO: 150705 - DNA, 502 bp, Zea Mays
ggaagtttgtcatggtctttttagatgacatcttgatttacagtgctaatctggaagagcattactatcatctcaggctagtgttcaccaagctcagggagcacaagtttttcttgaaatacaagaagtgtgcatttgtgaaacaagagttgaagtatttgggccatgtgatttctagggaaggagttgccactgatccctccaaaacggcagctatgttggactggcctcaacctaaaaatatcactgaattaaggggtttcttgggactcacaggctactacaggaaatttgtgagtgggtatggagtgatagccaggcctcttaccagattattgcagaaacaacatgggttccagtggtgtgaagaagctcagaccgcttttgaggctttgaaggtagctatgtccactactcccgtgttagcattgcctagatttgatcttccatttgtagtggagactgatgcatgtgatctgggactgggggctgtgcttatgca

SEQ ID NO: 150706 - DNA, 435 bp, Zea Mays
cgctgaccacggtgagccaacacacggcggcgcggagaaccaaattgggggaagagagaaattgggaggctctggtggataatccggggcaaggactggtgcaatggatgcgtaattatccaatggagtcgcgggtgcactcaatttatagcaggcttgagcggtggccagtgaatttgggttgggcgcggtggcgatcggagaaggaatgagtcactggtgcggtgattcgtggcattcaccgtggcggcctcatcggcgacgaaccagtagtagagagtggcttacggtgactcactgcgacgtggtaaaatgttgaggcacgcagccttaccggataactgcgactccgatgatgccagcgcgactaaccacggcgggacacgacgactggtccagccagcgaccggattcaccccgtgctggatattctca

SEQ ID NO: 150707 - DNA, 581 bp, Zea Mays
aaattttatagtgtaaaatttagagctcattaccacccctacctgtagggcaaccagtttgagtttgggtcatgagtttgctagatgtttgcgagtcctctgccgagctggtagtcagtagcaaccctggctgatagatacctgtctggcccagttaaatcacagttttacatagtgctttggattcaaatcgcagtcttctgatgtgggttccaataactgattaccacctaaggaattggctgtatgaaggaacagacaagtgtttgaattgggattgggctgcatagtggtttgtactttgtaggctattacttgttaggacctccaaggatcgtgtttctgtccatgtatcggtggctgttggtcccgtcttgttggctagtaggataattgacttgagttaatgtcatggatttgcagcatgccagcatgcttgagtcttgctctgctacataggcagttgatagcaatcttgggtctgggaggtggtaatgtaaagctgaaaataaaagggggatggattattttgtatggttgatctggcctgggttcaggattatgatgacattttaaccggc

SEQ ID NO: 150708 - DNA, 584 bp, Zea Mays
ccctgccgcctgttgacgccttttttggccggtccatgcctcgatgcgggggatttgtggggtccggtcgcccaaaaacgtcgccttgtttgggaaaggctttttttactactattgtctaggtagtgttgtgctgttctggggtaaaattctaggttcctaatcatcgtcgatttggtaatgcacttctttttgctgtcgcgggtccacatgtagccccacatgtatacgttgctgcgtagctcttaattttcggtgtttcaatgccagagatgcccccaagttttgattaacgtgaacatgtttggcggaaggataggtgattagtgtgcccctgtgattttgatgtgtttggttccatcttttaaaaggtccgcagcatttttcttgcaacactacatatttgtaccgcaacagtttgaattgcacgacacatgcacttgatgtgtttgatatggttgtcttgattgacagcattgtacaatagctcttttaacatcgtatagccgaagaaaatgctcttgttggttcgtggttcccttgataaatctagcatctatgacatctaggctgatcgtttattg

SEQ ID NO: 150709 - DNA, 400 bp, Zea Mays
cacccacataagcacaaaagtagttggaactatgtgagtgcttaacctccacactcctttttttgttgaaatagacaatcacatccacacatctgattgacctacaagcgtacaaataagaagctctaggagggaaggcaatctatagcaatggtaacaatgacattgcaaccaacctaaggataaacaatgggaacccaaagaaaacataattcattggataagagtcacagagtctggaagaaaccacatacatatggggtgtcattcctgcatataatcataaacaaaaaaagatggaaccaacaacatactgacagaggtcttaccttgaattaagactcttaatgttgttaatcagttcctatttgaacaactgatgaaattatttttctgctaa

SEQ ID NO: 150710 - DNA, 523 bp, Zea Mays
ctgctgtgcgccgcgaccgcccgttctgtgggttgttcggctggagattgaagagaagagcgatggtcattggatcggtcgtatgcgtccaggattagatcgggatggaggtaggagattgaccgtagatctgcgccgttgatctcacgtcgtgcggtagaaactggatccagagttaattaaatctaggccgttatatgttcatccaacggctccgtttaacccataccccttcgaccgcgtgttttcacaaaagagcccctggttaatgcctgaactaacccgcggtccagtccaggattcgctgtgtcttgggaagttttgcacctagacccctagctttctctgtaatagtgcgcccactccagagacccaggaaactcaataattacatgtagaaattgatttttatgtataaataattgctagaaacttgatttaatcatagaaaatccattctagctccaaattagtatattccagttcctaaaattttgtaataatgttgtttattacatagcac

SEQ ID NO: 150711 - DNA, 447 bp, Zea Mays
cagtcgtggaacaatagaacatgatgttgtgggcttcattgtcgctggcgtaagagaatctgttggcgaggggacaaagacacggcgccagtgttgctggactccaacgagggcgaggcaggctgtaccaaggtgctgatcggaataccggggcgtagcatggttctctggcgtgttgaggttctctagtgacgaggtcgtagaagcacaacgggcgacaataacatgtagcagcaggtgtcggcgtcggcggcgagcggcgcagcaggtggagtccggcgggcgatggcaatgacgcggcgtcacggcgcagcacgagcgtggggagtcccagcgacaaacggcgacagcggcacgcacaggcgatgatgcgaataagtggcgaacaacaacagggcgcttggcggggtcatggacgaggatctccacgagcagcacgcgcatcat

SEQ ID NO: 150712 - DNA, 707 bp, Zea Mays
gggaacttcaccgtggagcacgagcgggtggggatcgctggacctgctcgggcttcggggcggcggacaccgccgcgggctgggaagcgaccactgcggacccgcaccaagccatggatggggttgtccgcatgttcatcctggtaagaacactcctacctaattcgttccggcctcttctacacgtagcaccattcggttttggggattgcactctagggcgcatcatcatctactccggcgaagtgcgacgccgcgggagctctgctccaccgtgtcgtccagcgttcaagtagggggaggcagggagcgcgcgccagccattgattctagtgcgggcggtacggattaaaacgtagattacccccttgtcttgatgggttgtgcgccgtagatctaggatcgtagggccactggcacgcgtaatatattaaccgtagatcttggatcggacgaatgcgatagcgtaccggttcattacagtatggttctaatcatgaccgctgattcagaatccatcggtcgagatcaagtcctaccccttcgccgcaacattttgcacaatagcccctcgggaatcatagattagaacccgccgtcctggtggcattgttcactgagtctagaataatttaccagagagcccctgcagttctctgtattttaggcccggtccagagacttgggaaaataagaaataatcacag

SEQ ID NO: 150713 - DNA, 295 bp, Zea Mays
ggtgaagatgtcgctgatccatcacaaaacgaaagaatcattcttcatcccgtttgacttcggcccggcccttaactatgcacgcgtcgtttgtgcacaggatttggataacaactacacacacgcacgcgtttgtgctccttattattaaatgatgatcgaacttgttgtatgtactttgagttccttgcgtgtaaaaaaatgctccttattaattgagatctctgctgtatacacgtgtatgattgtatacacttgtgtttagttgcgtgtaaacaacctcatcatttcagct

SEQ ID NO: 150714 - DNA, 827 bp, Zea Mays
ctcaccaagaatttggtgcttcatgatcgaagtaagcatattgaaatttgtttccacttcattcaagactacatcagcaacaaatcattggagacgtacttcatgcaaaatggtgatcaattagcaaacttgctcacgaagccgctttcatgcgaacgtctccaggagctacgcgttcagagcgacatcatcaatatcgaaccagtgctacatgattagggatagtttgtcaaggctaatatgttgtgcctagtttctatctaagtttagcatagtggtctacatggtgtcttcctcacaccatgcgtagagtctttttcatttcatgcagagtcatgtgaatggtggagcttggagcccagaaatggtgactatgttcattggttgtgggatggccaccatttttaggctccaagctccaccattcacatgactctgcatgaaatggaaaagactgtgaatagtgcagggaagacaccatgtagaccactatgctaaacttagataaaaactaggcgcaatagattagccttgacaaattccaccctaatcatgttacacgggttccatactgatgacgctgctttgagagttgctcctagagacgttcgcgtggaagcggcttcgtgagcaagtccaccaattgatcaccatttcggacgaagtccatctccaattaccaattgctaatgcagtctctaatgaagtgagaacggatgtcaatgtgcttacttcgatcatgaagcaccgaattttcggcgagggcaagcatagacttgttgtcgatgtagagcagcgacccaacgacatttaatactgagtcaagc

SEQ ID NO: 150715 - DNA, 376 bp, Zea Mays
gcgttcttgtgctgtcgagctatcgagttgagatagttgttgttagcattgacacgtggtcaggtgggcgcaaacactcagagacgaaatagacgagctcaggtgcacgacaagatgttaggtagggaactctagcgtctcgttatgtgtgtcccatctcgctacaagacggtggtatttataggtccatccgggggtaggtggtccaaagtacattactgcccccagacaacgaccacattcttaaaacatgaactatacaacagggtaattatagtgccacagccccctagtagttacgcggacacacaattattcccactgattacattgataggtgggccccgcatggcattaccgcgggcccacaacaaat

SEQ ID NO: 150716 - DNA, 1032 bp, Zea Mays
ttgtctgccttcgatgaaagtgacagtctcaatggatttcatccaagggtacatccaagacagggttgcaatagtcctgctggatggagtccaaccccagaaatcctcgcagtcctcgtggtgcctgtggctgtggccagaaagtgacagcctccaccttggcactatccatggcgactccctctgtagaaatcacatgtcccagataggtgacggttgtggttccaaaggaacacttagactgcttggcgaacagcttgttggctttcagggactccaaaaccgccttgacatgtattaggtggtcagaccatgatgcacctgtaaatgagaatgtcataaaaaaaatacgagcacaaatcgccgaaggaactgtcccaacacttcattcatgagggcctggaatgttgtcggggcattggagagaccaaatggcatgaccaagaattcaaaatgaccatgatgtgtccggaaggctgttttatgcacatcatcggggtgaacacggacctggtgataacctgaacgcagatccaatttggtgaagaatcttgcaccctgaagttcatccaacaattcatccactacaggtataggatatttatcctttactgtcttctcattcaatgctctgtagtcaatgcaaaagcgccaagaattgtcacttttctttactaacaatactggggctgagaaagccgatgtgctgtggcggatgatgccttgttggagcatggccttacactgggcttcaagttcatctttctggagctgtggatatctgtaaggtcgtactgctactggtgttgttcctgggaggagatgaatccggtgatcacagcacctagatgggggaaggccactaggtgtctcaaacactttgtgaagctgctgtagcagacattccatcataggtttgggctctgccttgagtgaccggactgcaggtctcatggaaatgtcccagcgctgcgaacctagtcccttccagagaatacgttgtcctctcctccagaatgccatacatagatc

SEQ ID NO: 150717 - DNA, 456 bp, Zea Mays
cagtgaccaacaagtaaccagccccaagacagagttggctacaccaagaagcaatgttgtagctagaataaggcggagacaccataaaatcaatcacatcaagagtaggcctatcctggacaggatcggtggcaagaggctagtcaaccctgggatgagtcaaaggaattgcactactagatgagatctcgggcaattcgacccgcgtattttcatacaggaagagatgagcaggtcttgtatgcacgaacaatatgttttggaattcatcaggatggtcaaccttttaggccaaatcatccacgccacaccaactcagaacattatcgagtccaaattgtcaatcaatgtactcatacccttgctccctcaaaacatcccacagattagggaggatctgaatcggttgaacaacaagatgatctactcaaccctatatgcatgagaaaaagagcc

SEQ ID NO: 150718 - DNA, 351 bp, Zea Mays
cggtcgagatggccgcagtcagcagcaggtacacaacatcgccaaccagcaccccgctggtgaggcccctcgtcgccaggagtatccccccagggccgcggaaacagaacccgtggtcggggccggggacgtgcgcagcagccgcgcatattttactgcttgttccacggcgaagactgcgcgcaccctacaagagactgcccagagacgaaggccaccagagacaggatggcacgggtgcaacttcgcacacacatatcaacaaccccctcagccatacaaccatggcctcgctccgcatccacctcaccacgcataccaacaccactaggacgtacaaatcgtacctcc

SEQ ID NO: 150719 - DNA, 691 bp, Zea Mays
aatttgagacaacgtcggtggctcaaattgattaaagattatgatttgtctattcattataacccgaggatggcaaatgtggtggctgatgcccttagcaggtccagggttccaaaagtggcgttgcagttgattgctgatctggaccgtttggggatcgccttgtgctatgtcggcaccgctagtgaggagactcgtatgcttattcaatcttccctcatggagagagtgcgtgcggctcagcagcaggatcgtttattgcaggaagctcgaaagagggttggtgatggtaaaccctaggagttctccattgatgagaatgatttggttcgtttcaggggtcgcctttgtgtgcctcagaaattagaggtgaagatggatatattgagataagctcataaaacgccttacaccgttcaccctggcgaaaccaagatgtaccgagatctaaagcaaaacttctggtggaagcggatgaaggttgatgtttctaagtatgtggccacctgtgaagtatgtcagcgcgtgaaggccgagcataagtggtctgcaggtttactgaagccattggaaattctggagtggaaatgggagcatatcaccatggattttgtggtgggtttacctcgttctcctcggggcagagatgctatatgggtggtagtggatcgcttgactaagtctgcgcatt

SEQ ID NO: 150720 - DNA, 314 bp, Zea Mays
ttctcgacatgctatgctgaactgacagtgttaggcattccccaactgtgtacgtaggcgatggaagacagcctcaagagccaagtgatgcagctgaccaaaaacaagacatgaaggcagtgatcttgtaggacagttgaccagtggaggtacataatggtttagcttgcagtgcatattggatgaggtgcagctgttcttggatattttggtataaggaacaaaatagttgttgatggtagttataatcaattttagctgatgtagaggggcgcatatcatattgatatacaagactgagaaagggattggcc

SEQ ID NO: 150721 - DNA, 489 bp, Zea Mays
ctcgatttggattgggatccagtgactttttgtgggagcacattgtagcaaaatgatagatggattatagctctataactttgctgcagaaggatggtttaggtttcacacaaaatcgggagtaaattgagttccaattggctctgtcagtcaagcttcctattgaattcagagcactgttcactatcatcagataatatcgcacggtggataaggttctggaccttgccggcgataagaacgccaccgcggcgtggtcggtcgtcggtggtcgcggtaaagctccttggtaccgtggcaaaaagttaccgaggtggcaaactctggttaaacggcgaccccgtgccctcaccggaaaccgccgcgcggaaagcttgccagcgcatccgcagttcgcgcttcttctccaactccggtcgacggtcctccgccgcgtggcctagcttttctaccgtgtcgccgtgactcccttgggccatcccatcatcg

SEQ ID NO: 150722 - DNA, 358 bp, Zea Mays
cagagaagtagctttttctgaaatgggataattggataaactttttagtataattttgtggagtgttattggtgctgaaaaagatcgagaaagatagatttgtacttgttagtgtccagggatttgcagaggaagcattttttggaaactaacaattccctgatagtgaggatgtcgtttgtccatcaggaaccttgtccttccccccaatacatcttttcttgtttacagtatgtatcttgtttccaccacatgagtatgaccttgtgcatctttttgtcaaatttgcagtgttaatgaatcaaagttggatatgcggtctttggtcaatctagaggtactggtagctcatcttctc

SEQ ID NO: 150723 - DNA, 272 bp, Zea Mays
atggggttatcaacatatgagaaagagtgcctagctattctgtttgccgtagagcaatggcatccatatctgcaacaaggggaatttgtgattaaaacagatcaacaaagtctaacgtatctcgatgatcaaaggataaccacaccatggcagcaaaaagcattaaccaaacttatgggtttgcaatttcgtataatgtacaaacagggaatagagaacaaggtggtagatgctctatcacccgacctgatttccagtctgatggtgctgac

SEQ ID NO: 150724 - DNA, 628 bp, Zea Mays
tcagctagagacctccgggcagcagcagcgccataatttgttccagactttcttcgtcatcaagtatcgacgtgctcgtgttattattgatggaggaagctgtaacaatttggcgagttcagatttgatcaagaagcttagcttgcccacatgcccacgtccgcatccataccacattcaatggtttaatgataccggcaaggttaaggtaacacaaatggtacgcgtgcatttttccattggtatatattctgattatgcagattgtgatgttgtacctatggaagcatgctctcttttgttgggtagaccttgggaatatgataatgatgcacgtcaccatggtcggagtaatacatacactttcatgcataagggcaagaaaattactttgcttcctttgactcctgctaagattgtacaagctgacaaggatagagctgcaaatacaaataatgaaccacctgttaaatctgaaaatcagaaagctattcatttgaaagctcctctaatgcttgttacaaaatctgatcttgctaaaatacatgttgatgatacttgctgctatgctttagtgtgcacatacgctttattttccaatgatgatattgctagcattgtgcctgcg

SEQ ID NO: 150725 - DNA, 763 bp, Zea Mays
cttggatagacggcgacccggttaccgatctcgcgcggttggtgcagcattcgccggcggtgccggtagcgcgagcagtgggggcgcctgtggtgctgccaacggccggtgttgtgtcggggctgccgggggcgcgcgatgtgccgatttggccggggccgccgctagcttgtcgagttccatcaactccacttgtcgggcgaggctcatatccgcggccagcgtctccggactgtggagccggacggcgtggctgagaggcggaagcagaccgcctgtgaacagctggactcactgggattcatcgagccgcccagcgcgaaagaggagactctggaagcggttggagtactcttccacggtgtcggtgcgttggcactccgtcagctcgaagaggggcgctgagcgcaacgccgggccgaatcacagatcaaggagatctttgaatcgcccccatgatggcatgccttcgtcctcctagagttgcatgaaccattcttgtgcgacgccttcgaggttgtatgtcgccatccaaacgcgctcctcggccatggtgcgctgttgacgaaaataggactcacatttgttgatgaagagcctctggtcagacttgccgtcgaaacggggaaagtccaacttctggaacctgggggccgatcctactcccgaggaggctccatgcgaccgccgcctcccatgtcagatgacgaggctgacttcgccttcatggaggccatctcgtccttcatctctttgatctccg

SEQ ID NO: 150726 - DNA, 460 bp, Zea Mays
agttcgctgaggcaaaggagtgcacaggcatagtagccacagcgcagcggtgctcagcgtttatcgtagagatgctcctcctccttccttccctcccctcggcttctctcctgtcccccacctctgcgcctgccataccattaatacctcctccagtcctctctctctctctcagcagaggcagaggcagccatccatccccttccgagttccgccccactcttcccctctccagcttcctcctttttgcccccctaccttccaaccatccaagaaacccacacaaggccaacccacgcccacgccgcgccgcgccacgccaaaaggagcccaagaagctgtgatcctgctgccccggaagaagctgcgcagcagtaccaagtagtacgaacaaattggaccggggtagcgcttacttcccgctgcccggtggcagcagcagaaactcggccatggaggg

SEQ ID NO: 150727 - DNA, 1322 bp, Zea Mays
gaaccctagcaagcagaagccgccgccgccgcgggcaagctataaatacggccctcctgaacgtttctacttccaccatctcttctgtccgccgccgccgccgccgccgctaggaaacgacgtctcgtctcgtgccttcaatctctccttttgccgtcgtcctgtgtttatcgcttgatttcctctgttatcccgctttcttcctctgtaagggcaaatgatgatgcaaagtcatgcaccactctgaatgaggggattatcctctctttgggctgacaaacggacttctacccatttttcgtctgagccttgtgattacatccgatttctttattgtctccctggcttttcttttttcttgctgcttactgtgacactgatcttattgcgtttgattaatggagctgtggagtgatctcggagaactagatgatgtgggtctgccgatccaaccatgatgcggactgaattttatttgaggtcaaatgtaatggattctgatggttctcgagtttatctcccttctgacattggcatatttctttcttccctcgaatgggtcatggagcgaaaattagtgcggctttgtttttgatctcttgctttcaattggtttgttggttagaaagctcaaagaaacaggtgatgaagccaatttgcagagcaaaggggccagataagtggcaatctttgcattgaaggttggccacaacgaaactgcagttctccgtgccgctcagatttctctgttttgtgacggcctcgaacaagctgccacattatcatatcttatatgttatccattttgttttggtttttatcttcttcgtatcgtgtctccagttaaaagctacggaaactaacatgaactacataatacatatgtacagtatgtagcgcatatcgcatgacaaccgaacactacatgccacagatgaaagacagatagtgtcagtaaagaaacagacggtaaagccaatttgcagagcaaaggggccagataagtggcgatctttgcattgaaggttggccacaacgaactgcagttctccgtgccgctcagatttctctgttttgtgacggcctcgaacaatctgctacatggtctcttatctgtgatccaatttggtttttggtcttttttccatcctagttaaaatcaaacatgatgaactatactaaacattacgtgtcgcatgacattggctttgaagcggcagttttaacagatgaattactgctcatcattaaagaacgagttaatatcagtaaagaaccgagtggataaatcagagcagatcagtaaagaacggttaactagg

SEQ ID NO: 150728 - DNA, 304 bp, Zea Mays
atgcagttacatgcatggggatggggagacagaatcattgcagcctaataatcatcattctttgcattgtagctaacccaactcaaagcattacgctaaccgcatactctgaataagccttttccagggggacgggaataactataggcgcgaggaaataggaacgcgagcgatttatagcaggattagttttgcctctggtgagataatcgtaatctaggggacgggaataaccatacgcgcttcgcttgtgacgcacgacggtcgaaactcgtgctttaaaggagtagatatgtggcatgat

SEQ ID NO: 150729 - DNA, 635 bp, Zea Mays
gccaccgctaatcagccacaatcatctaccagcgagcttgaatttccaatttcccccaacctcgttctccgccgccgtgaaacccaccctcaccgcggccagccgtccccaggtctgctcattcctttttcatccctgttctagcatgcttacgtattggtgatgctctccgacccttccaatcgaaccaaaccgcccctaatcgccaggaacacggctgtctggccgtagggttcacggttgtcgtggccagtgctccttgggtggtcttagatgaaattgggttggggaaaaggcttagggtcgatccaattcggtgtctgttgctcggagaactcagtcgttgccccgttcggccggtgtaagtgctcgccggagcgcggtcgtgcgtgaacggcgtcgaggatgtgtcaggtgaagaaatagaacatcaggggcatttctgcaaatcgtcagtgactctgttaaacagtgagagaacctgtttgcgattagtaaaaaccccgagtccctttctgcaaaggtgccagggcgcgggcgcgcgcgggcacctttctgccctagctgggccgcctgggctggattcggcccagtgctgttcaattgtttttctttttcttttatctccagagcca

SEQ ID NO: 150730 - DNA, 779 bp, Zea Mays
tacttaggcataaaaaatataagataactaatcaaacttagattgtccgtcattaaaaatgtatcgagcttaatagatccaccctatcttaaaagatactctcttatcttaataagattcatcttatcttgaaagattcgtcttatcctaaccaccctgcttatctcatcctaaagcaacaaccatgacctaattaatgagatcatatctagtcatatccaatctaatatagatcctatctaacatattatgatctaatctaaagtaagttacttaatgctggtacaaaagataaggccatactcctaattcacttgcgcctaaattggtgacttagatcaactcgaccctacccaacaacttgacctacaaaacaggttacacaactaattccatctagcatatagctattgaaccctctacccatcttgtcacaaacccggatgaagacaccaaaggtcgaggaggaaaggatcaactgcgttaaggaaggataagagtcaagccaaatatggtcttcagccccaactcaagccttcaaagatcaagctagatcatcagatgaatcaagatccacaaatcttggatggagtcttcccttaccctactctgtcttacccaaacctatctatgctttatagacatcttttatcctacatgataaagtggatatacatatatatacccatgccttcataatcacctgctaatttgtgttataaacctgaacaaaacaaaatcttttggtattaaaaccacttagaaactgaaacatagac

SEQ ID NO: 150731 - DNA, 413 bp, Zea Mays
gcgacaaataaaaagaaacggagggagtacgtcttaaaatgatgggagacacatgtaaatgtagaccattctcacgaacaagcttaatacaatagaaatagctgcagcatctacatattttctaaggacaaacattatatttctagttaaggaaacagctaatagaccaagcataaataattttttgaaagaatattggcatgaaagcaactcgttcatttcgcatccaacgttgccaaattgtccaatctatctttagtctatcccacatatcctttagttgtatttttgataactcaattccggtcatttggaaaaaaaaaacttatatcctaaagctttcacgtgcttatttggtcgattgccttttctaacttgctcgaccattaatttaaagactatctcttctttat

SEQ ID NO: 150732 - DNA, 833 bp, Zea Mays
cagaaatgggcaacctaaggttgggtccaatggaagtcacaaccgaccattagcgtggtggagtcggcagtcggtaccaaacggcctggctccaatgtcaatcagtttgcggttggcctgtcggtgggtcgctggagaattggtcagtgttgacctgaatttgttggtatcgatcgtttgtagccacatgttgcgttttgattggtccacgtagtttttaatttcaaattagtttgcaaaatctcaaaaaacaacggagtgtttaggtttattcacacacctcactcttcaatctctcctactattttttatttcactcatatccctcatttcactccaaaccattatcgtcatgtcttgcgtgggctagaatgttaagacgataaaaaacgaggtactcaatatgctagatcaatctatgatagatgctacgataaagcatgccttcaggtcttcagcgaggtggcgtagggcgcaacattggtgctatatcgatcagaatcgtaaagttgccaacgaccagttgatgcaagactttcaacatcccatgtgtctatcctccgatctactttcgccaaatgtactgtatgtggaggagcctatttctttaaatgttggagagattggatgagcattttttctatttcactcttagaaccgatgtacttaacggtagaggtttctcccccataaaaatgcatcgttgtcctccatatgctcgcatatgatagctttgctgatttcattgttgatgttggtcacctatcaaagctcctacaaggaaccataacaaggaaaaaataattaaagcttggataccttctccccttgcc

SEQ ID NO: 150733 - DNA, 1249 bp, Zea Mays
ctgggaagggcctattaccttacttgctacccccgatactcgatttgtaagtactttggtaaagatcttaaaactaacatttagtaaagaaataggtctataatgttgaatagacatagcatctttactttaatgcacgagaataatgtggccaaaattaagtctaaaaagaggtaactcccccttatggaaagcatcaaacaaagccaacaaatcattttttataacattccagaacacctgataaaattccgccggaaagccatctggccccggggccttattgtgttccatctggaaaattgcttctctaatgtcgttttcagtaaacactgtcgttagatatgaattctcatccagagatacttgcgggatatcattcattacagacgagtcaaaagacgcccagatgcttcaggtggaccaaaaagacctttatagtaggaagtgatatgctctttcaaaagtgcattacattctataacctggtccccatttttaagatgataaattctcgactttctatgtttaccacttgccactaagtgaaaatattttgtattagcatcaccttgtaacaaacccttagtattggctctttgataccatttaacctcctcttctcttagtaattctgcaagtctattttgcaagaattgttttaagtcaagctcttgcgctgacaaaacagatacttctgcttttttatccaacacatccaaactgttcaaaattcctttcttttcttttttgtacgccccacttacattttttgcccaccctcttaagtgatgcctaagcttcctaattttagcttgccaattctccataggtgactgacccctagactcgtatgaccgaagttctctaaccatatcgtagaactcgaccctcagaagccaaacaagctcgaacttaaaagaatgttgggaggaactagagtttggttccccagaattcagtaatagaggagtatggtcggaaatgtcacggcttagggccctcacagaagacaaaggatatttttgatcccactctgtggttaccaggattctatccaacttttcatacttaggtctttcgaggttatttgcccaagtgaattggcgaccagtcatctctagttccttaagacatagaccatcaataacgacattaaaaagaaatgaccaccgatgatcaaaattgtctttatttttttcgctagagaatcttaagatattaaaatcaccaccaatcacaagaggca

SEQ ID NO: 150734 - DNA, 1087 bp, Zea Mays
catcaaacaagtctgataaatttctgtatctcagtggaaccatgcctgaactttcagtgttatcagaattttgaaggttgtttgcagctgaacctgaagctaatgttgaaggctgcacctgtggagtcagtggtgagggaggtggcagatgattcccccccgaattctcaccaacttgatcagatgtagttgggtcttggattgcttcatcaggagcattaaattgaaactgaaagactgtagtttctgaattttcatcaggcaactgagtattttgactatcctccagttctccccaattccatcccattccctcttcaaacttaacatctctgctaatcacaagtttgttagtagagggatcatacatcctgtacccttttgatcctggctcatacctcaccattaccattctagcagatctgtctaataatttttcaatactagggccatccttctttacatgtcctacacagccaaaagtcttcaagtgactgacataaggcttcttcccataccaagcttcatagggggtcatccctgtgacacttttcgtaggagacctgtttagaagatatacagctgtagtgactgcttcaccccagaatcttggtggcacactcctgccttttagtagacatctagccatctcgacaactgactgatttcttcgttcaacaaccccattttgttgaggagtatagggtgttgtggtgaagtgttttatgccttgttcagtacaaaatgtagtgaacatccttgaattgaactctcctcctctatctgtcctcaaggctttcaactcgctttctagctctacttctgctctctgcttgatcttgaccagacatgacaaagcttcaccttttgtcttcaggagttcaatccacataaacctgctgaaatcatcaactactaataggaaatagaggtttccacctactgtctgtggtctaatctggccacatagatcagcatgaaacaattctagacccctctttgccctgtaaagcgatgtctttggaaatggtgctctatgctgctttcccaaagtacatgcatcacaaacttgctcaagtctgtccac

SEQ ID NO: 150735 - DNA, 656 bp, Zea Mays
ttaattatgtaaaaatcgtttgcaacttgacgaagcttagcatcagaggcaacagaaacaaccatattactcccagaagtgactctcctaggcggcgaagagatccatacatgcaggttagtccacgaacgaaaccaaagcagcgaagagatccatatgcttcaacacaccagttgaaatgacccactagcgatcaagacattacctgtttgaaataaagagtgaattagacaacttaaaaactaatgaccaaataaatccttacttaaagcctatagaatatatatctacataggtgtgcactgtgatttcactacgtatttattatcctaaacacaaaagagttttgttcgcttaattttaatctgtaccgaattctactgcttctacaatgttttatctctatgaattgcagctgcagccatccgcgtgaaccaatcaggcggcaaaggaactgcgagtctgcgatccacagcatcggttgtgcacaagtggacacataaacatgtatatatattcataggattgaaacgggcaccctgaaataaagtttcatgtgccggttttgcagagtactggccagagctggaggagtctccaaatatgcgaattagggttttgctcttacaagaagatacatggtgttctagaacggt

SEQ ID NO: 150736 - DNA, 346 bp, Zea Mays
gtgaatctcatccatctctggccagcagcctataaattgagcccaggcgctacttcttcaccacatcgcaagcacgagtacttgtacaattgactcactttaaccggagagcttacacagtccgcaaattccctttctccctgttcttaactccgccgcaaagaacccctctgtggccagcattcctcgggttagtacttacccaattgcttcatgttcttgcttgttgttagcctcctattgctctcagtgccaaccaatcgaaattcggccgaagcctttcaccggaacacacacctgctctgtagaacgccgccgagccaccctcaccgtcgacccgctcttc

SEQ ID NO: 150737 - DNA, 537 bp, Zea Mays
gtctaggcttcattggtttatttgaatgggtggtcatgacatttggtctgaaaaatgctggtgctacttatcagagggctatgaatttgatcttctatgagttgttgggaaacactgtggaagtctacattgatgatattgtagtcaaatcggctgagtttagttctcatgtagctgatttgcacaaagcctttgataaaatgtgtcgatatggtttgaaaatgaacccacgtaaatgtgcttttggagtgtcggctggtaagtttttaggatttgtcatccatgaacatggtatagagatagaccctgaccgaatcaagtctattcagaatgtgggacctccgacctgtaaggtcgaagtgcagaagtttctcggcaaggtaaattatttacgaaggtttatttctaacctagccgggaagattgatgccttcacccctatccttcggcttaagaatgatgccgaattcgcttgggggcagagcagcaggaagcatttgatctcattaaaaaatacttgtcttcggctcccgtatt

SEQ ID NO: 150738 - DNA, 328 bp, Zea Mays
attcggcccatgggagccagcgaagccattgtcgaggacggtcgccggtgaagcagcggaggtacataatgatgacgtggttggtcgcttctgtctgcccgtctgactggggatggaaggcggatgacatgtgcagcttagtgcccatgagtcgaatgagctcacgccagaacgccgaggtgaacaccgggttgtggtcggacaccatggactatggcaatgccatggaggcgcacaatgttggtgaagaaggcctgcgccactgactaagcggtgtatgggtggtcgagggcgatgaagtggcagtacttgctgaagtggtcgacga

SEQ ID NO: 150739 - DNA, 459 bp, Zea Mays
gtccaccgcgaagactatccgcgcagaagtcgcctaagggtgcagccggactagcacaacaagtgcgaaaaaaaaccgaagtctaccgcgaagactatccgcgcagaagtcgcccaagggtgcagccggactagcacaacaagtgcggaaaaaccaaagtccaccgcgaagactatccgcgcagaagtcgcctaagggtgcagccggactagcacaacaagtgcgaaaaaaaccgaagtctaccgcgaagactatccgcgcagaagtcgcccaagggtgcagccggactagcacaacaagtgcggaaaaaaccaaagtccaccgcgaagactatccgcgcagaagtcgcctaagggcgcagccggactagcactacaagtgcaaagaaaccaaagtctaccgcgtagattatccgtgcagaagccgcctaagggtgcggccggaccagcacaacaaaag

SEQ ID NO: 150740 - DNA, 342 bp, Zea Mays
taggaattcatatctcaatctgttggtgcacattaggtcatcaaaaagattttcacaaagtagtcaattcaagatatgttgtcaagtcccccctgttcagccaatgcttttgtagaaaacagtttatgatgacgagttggagacactagagccctatctagaattttgtgcatatagaaaaatgattttctatgtgtttgagcaatagttcaggttaaggaccaggcactgctatgttcttacgttttcgatccccctgaccccgaccgttcatttgctttgtaccggaactagagtcaactctggagcttgttccctttggccaaaagaaagaaaatttcc

SEQ ID NO: 150741 - DNA, 437 bp, Zea Mays
ggggagcaccatgaggtggtagtcgtggtcgtgcctggaaatggcctacctcctccaagtccgacacctgctcccatgccatcactaccattgagcgtgagtggtttcctagacgcacactgatgccgcccagatcagaggccaccactgctgccatggagatggtcgccatcgaggacctcaccagcctccccttgtgacctcacgttgactatgaatagccggcctgggtcgctggagggggcatcgattaaaggggatggtggggagcggggcgaggatggcaggggcaatcgtggcagctgtacatggggtgtggacaccgatggaaggacgcgacaattgcggatgtggagcggtgatggaggggtgctgatggaaggggatggcggtgagcggggcgaggatggaggaggcggtcgttggcttccatcaac

SEQ ID NO: 150742 - DNA, 1081 bp, Zea Mays
cacgaagttctgcttcattactggaacgagaaacagcaacttgtttcttagatttccatgcaataagagaggaaccaagaaaaatgcaatagcccgtgacagagcatcgatcattcacatcactggcccatgttgcatcagaataagcataaagctgaagcggactgctttgagcataaaaaagacacctagtggatgttcctcgtaagtagcgtaggacacgaagcaaatgtccataatgcaccaaagttggagtactcacaaactgactcaagatatgtactgcatgagctatgtcaggtctcgtcacagtaagatagaccagacttcccacaatacgacgataccgagaaggatcggcaagaggtgtgccctcagatgagcggagctgtaagtgaagatccataggggtggcagctgtccgagtatcagtaataccagatcgtgcaagaagatcttgaatatatttgtgttgtgaaaggtagtaacctttggtggagtgcactacttcaatgccaagaaaatagcttaggggacctaaatcagtcatcatgaacaattttccaagttgctttttcacagaggaaatgtgttcctcattgtcaccagtaatcaacatatcatcgacatagagtagaagtaaagtacgtccttgtgtggattgatgaacaaaaagagcaggatcatgattactaggtgagaaaccagcagccataatagcagaagcaaaacactcaaaccaagcacggggagcttgtttgagaccatataaggcacgccgaaggcgacaaacagaaccagagggaacctcaacacctggaggtggcttcatataaacttcttcatttaaattaccatggagaaaagcattcttaacatccatctggtgaattttccaagaacgagtagcggctacggcaatcatagtacgaactgtagtcatgtgggcaacaggagcaaaagtctcatcataatctcgaccctgactttgctgaaaacctctagcaacaagacgagccttgtatcgctcaacagaaccatctgatttggtcttgactttgaagacccatttgcatgttat

SEQ ID NO: 150743 - DNA, 414 bp, Zea Mays
cctcgagctctgctgccgccgcacgtgcagcatctgccgcctccgctgcttctacttccgctctcgctgctgccagttccgctgccgccagccgtgcttccctcgccgctgtcgttgcagccgctgctgcctgctgctgctcgctctcgttcttgtgccgcggcgacctcggcttcctgctggcgccgcgcactcgaagtgaccgagcgtagggacatggtgggctagtgaggggttgttgcgtgtggaagaggttgtctcagatgaaaggttgctcgtctgagcaggagaggaaggaacagttggagctcttgctgccgactgagtgtggggagaggcgcaggaaggagatgagcaagagatgtttaggctgcaggatagtttgcctctgataccaattgtaagtagagggac

SEQ ID NO: 150744 - DNA, 675 bp, Zea Mays
ccgtgagccgcgaggacatttgctcgcgttcatggctacccaaggtggtttagcgcaattggacagattcacgagcaataagggacttaacagaggctagaacactaagcgattgggtatgttctaacctgaggagcgctggccacggagaggcggctgttacggtgttcttgagcgaacttggggggaaatccgaaattagtgctcgccagagggggatttgggatgtaggtgggtgcggtagctgctgggatacatggcgaagccgaagggaggctcaatttatagactccgggggcggtggctcacaatttgctcacgacgagctggcggccggaggggagagagtttactggtgtgtgcgataggtggcgaacgtcgtggcaaggccttaggtaatagaaggacggtgtatggtaatcaactgcgacgtggtaagatgaccgacggcgtggcgtaacagcaaagaacggcggcacgccggtgatggccgtgcggacacgtcgccggtaagtggaggagtgaccggacggccactgtgctacaagtttatccacggtgagatcttttcagagtgagcaaaatccacgcggccgcggcaccaatcccggcaaagaggtcgccggcggtgaggttgccgcgctggcggcttgatccttatcaagttactgtacc

SEQ ID NO: 150745 - DNA, 360 bp, Zea Mays
tccgggcgggaggcgccgaccccatccgatggcgacggtggcgtccttgtcggatgctgagctcgccgacgctgagcctgagcgtctacgcctccatgtcaacttgttatctatcaaagcgatcagcaataaattaatatcaacctgtttgtcttgtgtagattgggcatgctatatgcatgatcgattagcccacactgcaggtgaatgaaggagagctgtggccaacgattagcccaccaccacacaatggagaccggagaggtgaccaaccgtgtccagtcccgtgaacggccggcacgggattgagttgagcgggcgggcgaaaaagcagctactttcctccaaacttcacaagcg

SEQ ID NO: 150746 - DNA, 1010 bp, Zea Mays
accctaactcttgacagatggcatattctcaaataacccacccaaataatacaaacttcaaccaaatggacctagaacatgagagatgggttggcaagctataacaagatataaagttgaatacacttggtcgccttatccaagttttgcacactgttgtatcttatgaggacataggaccgtgtgttcaaaacgttctttttgagcaatgtttgctacgggaaatactgaatatgttacaggaactgcttcaagaatagacagaagcattgacttgtatagaacaggtattagagtatatacttcaatcaaatgtacttgctaagcacatgcaacgacaagagaaactgaattagcatggccaaccttaacaagattaataaaagccctttcccaagccatggccttcccgttctcttttcctgttgtttgaaccttgttgttcacaggataagttattacaaatgccgaagcctgcccagcaacatcaagttgataaggagtggggtatcagaatatgtaatatgtttatattactacaaaggtgtaatcaaatattacctcggtaaaattgcttcctggaaaaccacctaaaattgtacttggatcaacaggtgactgaaaagtgctcaaacatgtctcttcagaagtgtaatgctgcagaatacaagataagaacttaggcaccaccaatacaaccagctcaaaaacctaatatggatcctgataatcagtactgaatgtgatgtacaacacatgcctttgccaatggcccaatacaacaacttaagcaccaagcaaaaacgatgacaaacattacagaatccatgttccaataagtagaataatcaatctctaatatcagtgaagttgctactcgaactgtcataaaagcatgtactaatgtgatactttgaagtagagatttacctgaaaacagaatttagcatggtctattccagaatcatcaaactttttaggatccagctggaaatactgcagcattgagc

SEQ ID NO: 150747 - DNA, 401 bp, Zea Mays
cgtgcatgcatgatgcatgcagccgactgaaccgtgcgcatgcactcgcggttgacctactatgactacgcagcgacggcgcagcttctttttcatcgaggcgtgtatcagtgtactgtatggcgtacagcggtacagggggtggggtggcaggcctacctttgccactcgcagcgtcgccgaccatgtcttatgtgacaaagctggacacatcggttccagacttttaattgattaatgtctaaatatagtcatcatctgttccagatttctcgctaaacaaaaacaaatagtgaaaaaaatacatagatcaatgacacggacaccacgctacccactttcataacagcacgagaatttcatagtgaaaggggttgtagtttatatgtatgtctatattt

SEQ ID NO: 150748 - DNA, 422 bp, Zea Mays
ccggctagggttggagggtttcagttttctatacagcggtatctgattccagtgcatctgattccaatagaacccataacaaacacatgtaacgttatcagatacccgaaggaatcctataccgttacactacatcgaaccaaacacgtcgatggtagtactattgctattgtgcccgttactgcctgaaacctgcgtgccatacttccattcactcgctgcatgtctgcatcctctgctattttgagccgctgcagcatgcctgaatagtctgtcattttgctccgcgcgcgcttctgtgctagtaatacaaaggttgcataaggaagtagctctagcattgcacaaggccgtaacttgttacaatggctttccaaaaaagcacccctttttattcacactacgtgattggttcattgaac

SEQ ID NO: 150749 - DNA, 354 bp, Zea Mays
agaataatatagctatgatgtagtttaatcttcacatgaaatgattagatcatgagctgtggtgtgctcagccttgtactctgcacggctagtgataagatagatacgattgataaatgaatagaaagatgctaccaactgataaaatgcttgttcatggaagaaaatctgatgaggaggacaaagaagaaataaaattgttgtaatctatcctagatatgctaaacgtaaactacaccaactgcagtagctctgttcacaatgtttcagaaactctgtccattagctctgttcagtaacatttatgtccaattacttcctatagaaaaatctagaatgtcagagatgtgtgtt

SEQ ID NO: 150750 - DNA, 379 bp, Zea Mays
ataagagcttcctgttgatttgtataacattaattattggcatacttatctttgtaactagcctgtatgtaccaaaaaaggataatggcaacctgttctgaaatcatttactgtattcagcagacaattggtttgcatgttaccttgttaatttatataggtcgccatcgtcatacataacagttgcatcaacataagactatgagtgattgcaagtatgcgtggtgaggccttacccataagcatccgtagattactagatgctcttctcatccattcagagaccctacaaatagtttttacctgagaatgcatgccagcagcaaacctatttatttgtcagtaactcttttagttgctgtccttgtgaacatctgtg

SEQ ID NO: 150751 - DNA, 571 bp, Zea Mays
gcttgagaaggcggaggaagagttcgagttcgactaccacggcggcgccgtcaccatcccctgcgacacggaggcgttcaagtacatcctcgtcgtcatggaccgccaccgccacggcctggtcgacgacggtacgttgcccgcccccgccccgcgtgcggcgtgtgtgcccagggcccaggctgagagaaactttcctttctgagagggagttgggcttgggccgtacaagtctgccgcctgggttgggcctagcctgagtcgtccgcggcccatatatctgattcgtttcttgccttttcgttttggcagatgggaacgagaagcacgaagagcaagacgcatcatcttcgtaggatcgataacaagctcggagatctccggttgaatgcgaccctccgtactagtcacgcagggcaagggcggtacttttaacgagtaaagaaagggtaatgggtgttgtttgtttgtcactatgcaaatgcacgtttggcgctctgtcatcacgatgccatggccgagacgatgttcggttcgtgtcttatttttagaataccgttctagaatctag

SEQ ID NO: 150752 - DNA, 543 bp, Zea Mays
atgcggcaggacaaggggatcaaggctgggacaaccagcagtaattcagtaatcctaggatctatttccttttgagagtttccttttatttacagataaacttccttttattcagagagattagtttccttttattaagagataagttcccttctattgagagagaggctagtataaataggagatgtaagacaggaggaaagatcatcaaagaaattacctagccgtcttccctgtggaagtcggaacctgagctagcctgttttcccacgccgtgaacacggcatcccggcgtccctctcgcccagtcccccgccaacctccagcagtacaccagtacagcttgagggaggtccctggtaggaataggaatcctatcacattcaccatattttcttattttttcaagctcatgtcaaatgcttcctttacactaatattaattgcatgtagcatgattgggatgaggaatataaaaaactacataaccaattcttcattaaaaaggacatcgttcatcgggtattgtgtgctcataccatt

SEQ ID NO: 150753 - DNA, 351 bp, Zea Mays
aggggctcacatcatggcggccatgggggatgaggggcgccaaggacaatgatcactcaacggtgaccgaggagggcgtaccccccggcagcgtggcaccacaaagaggggtgtagcctagacatggtggagtagccacaagagaggccggatcgaggccatggcgagggaggcgagtctggcaatgacgcaaccggcctacacgacgagtaggggctagagacgcgggcttgagggaaaactgacaacgtgggcgcgtgcgcaaggatgagcagcacccaacaaggtagatgaagactggcatcgccatggacaagagcagagcatgactatggggttatagacactgcc

SEQ ID NO: 150754 - DNA, 481 bp, Zea Mays
gtgaccggcgccgacatatcgggcccgcacgtcagccagtgcacttccctcttcgcttccccgcgcggtagccagctctcctccgctcctccgcacaaccggacgactctgacactgacgcatggaccccaccttgtcagcttcagcgtccccccttcggatcccaacagaaccgcggcaaatccgccgccgtagactccgcgcgattccggccaaaccccccatcgcggacttgattctagctataaattactcggtcccgcacccccccatcatccaaacaggaccggtcgggctccatccatcataagctgtgaagaacaacgaaagtagagaaagagagtttagggaagtcggtgtcgccgcttgggactctcgcctgcaccgtcgctttgcaccagtgaatcgattctgggcactagggcggactcgtgggttgtgctcggggagaaatccgggggcgcgaggccccacgtcgacg

SEQ ID NO: 150755 - DNA, 560 bp, Zea Mays
ggaaaattcaaaattgattgggcaccatgattaacacatgaataaacataaaatatataaatattacctgtgatttgacaggagacttctttttaggagagttttttttgcaatgatattatactttgggcttcttttcacggtcggaacttgaggagaaggtacttttaacttctttgagctgatttggtctggaggagaaggtgatgcagatctgaattgacgctttaacgatggagcatccatgaagtcgtcgtcagagagagcggctggagcaggaggttttctttttaaacgacaagctaaagcctttctgcgaacacgatggattgggctggctgtggctcattctgttcctgattttgaggaatatcatcttggtgagctgagctgctggatcttgtacgtctggaaatgtcaattgaaaaaacctcctgactggattcaatagttaatctttttggattactgggcgggcgatcaacagacttcatgactaaatactgaataaatctgtagaaaaaggaagttgtttttaaatactttgatttatgcaagaa

SEQ ID NO: 150756 - DNA, 475 bp, Zea Mays
attctccccgtttctcgtggcatccttggaagcggagctcgagatgttgctctaccgcttaggccagcttgtggattacgctggggctcatggtgcatctttaatcgagcactggataacgtcccggaccacgtttgggacattgcagactttggcgttcattgtggggtcgcggtggcgctacttatggtgtaggtctgcttgggctacaacctttaggatatcgttggtccccttcatccctctcagatgaatggttggaggacctgctggaaggctacaacaacgtagctttccgcatcgttcttagggtgtcggctcactgtggtgtgctatgcctcggcactattcatttggctataataataatgtatgaaaaagattctttctttttggtttctagcattgtggggctttcgaaccccttctctattattctatacaagctcggtcgggtacctcccctctttaagag

SEQ ID NO: 150757 - DNA, 352 bp, Zea Mays
tggatatttggccatagaagggcaatttcttcttgatgttgccatcaacagggtttagacattgctgatatagtaaggagcatatggataagtgaagggtggaagaggaggagcgtcggtggtaggagcatcaatggtagaaggaggagagtcagtgttggagaggtctctggtcgaaggtctatattgactaaataagtgtttagaaattttctcaggataaaaacctcaaggaaagtcgaaggccatcatacctaaagaagcttcgaactatggatagagctaaaacatgaatctcatccaaggcatcagaaagaccttcaaccatgattcatcaaaacttaggaccaat

SEQ ID NO: 150758 - DNA, 344 bp, Zea Mays
cgtatgaagatcgtggggtgcgtgcaacgccacatcgacgcggatgtggtccggtaagcccaccacgaatagctccgccttctgaactgcgtcgaggttgcgcgcgtggcagaggacggcgttgaaccgctccgtgaactcctgtaccgtcgtgcggaactgtagccgaccgagctccgcgaggcgcgaatctcggacgggaggcccaaactgtaggtggcatagctctttgaagcgcacccatgttggcaaaccggtgtactactccagggtgtagtaccatgtctgagtcgcgccccaaagatgataggacgcaagccacgtgcgatctgtggctggcgtcc

SEQ ID NO: 150759 - DNA, 421 bp, Zea Mays
ccttggttcctggtgcaatacctgtgaattctaggccctacagatactcgccttttcataagaatgagatagagaagcaagtaaaggctctcttagaagcaggacttactgtgcctactgtaagtccctttgcttcaccagtactattggttaagaacaaggttggaacctagaggttttgtgtagattaccgaaagttaaatgatttgaccataaagaacagatttccaatgccattagttgaggaaatcttggaagaattggcaggaactcagtatttttctagtctatatctcacaactggttatcacgagatcagaatgggtgcggcagatgagttcaagactgccttcaaaactcaccatgggttgtaccaatttcgagttatgccttttggattgaccaatgctccagcaacttt

SEQ ID NO: 150760 - DNA, 276 bp, Zea Mays
ctggagaagagtcaatcgcggcggccccgttcaatggtctcacgacggctaccgtgaacacgacgacgcacccgcgcgagatggcgacctcctcggcgtctatctatggcttggttgctggcgaggctagtggcgatcttgttgccctccctcaggcgggtgagtcttgcggcgggcgcaaacacagcgggtgagctaatggcagccaatgcaaccggttaagggcacacgtccggcaatggcgccccgtactgtagtgcctatagtggtcagcgc

SEQ ID NO: 150761 - DNA, 653 bp, Zea Mays
gggactgggcgtcaaattccagaaaactcaggggccacggagtaagttttccgtgacacagtgaatagtaataggtggacggcgggttatttaagaaaaagtgcaggggctctttacgaagattgccacggcaaggctacaggcggttctcggccgttggatcaacgaccgacgcgccagattaaacctacgtctaagcgaaccggtaagcgctggcggccgcccgatccgagatctacggatcggatttaaaattcccgaggtggcttcgaatgcgcccgatccccatccaacggttcggatcttcacacgcgaaggggtacgccggatcgattctccaccacacatccctggatgaacggttcagaatgaatcggtcacgatctaatcacaggcgtccattacggatcaacggccctgcgcccttcttcaaccccaggtcagggacggcggcgcagagtttccccacggcagaagtcaccggagttcgacgggacggtgacccccctgctcccccacccatcttcaacgagattcgcaacaagaagaaacactgggacacgccggaggtacttaccgacgttgaagggttacgaagggaggtagccatggccgagcgcagcgcgagttggcggcacccgagcatcgcacga

SEQ ID NO: 150762 - DNA, 576 bp, Zea Mays
atcatcctcctcaagaatagttatcaatgggcaacgttcaaatgcaatcaatcacaggtgtggggtgcgacaaggagacccactatccccctaccttttcattttagcgatgggtccattacaccggatgattgagaaagccgctggcgagggattgcttggacaggttttacctagaggggctaagttgcggtgctctctctacgcggatgacgtgggtgtgttcattaaagctgacaggtcagacttggaggtgctcaaagggattctcaacgtgttcgaggggtgctctgggctaaggatcaactatgacaaaacagaaatctacccaattcgttacccgacaccattatggcatgcgcttatggaggtgtttctaggcaaatactctagcctccccgggaagtacctcgggttaccccttcatttcaaaaaagttagaagaaatgaccttcaacctttaatagaaaaaatcaacaacaggttggcaggctggaaaggcaaattgctgtcaaaggccggtagagaaactcttgttaaagcggtgctatccgcacaaccaatctaccatttaac

SEQ ID NO: 150763 - DNA, 706 bp, Zea Mays
atggacaatgcatatcaatatatatatgtggacctgtataaacaaatactatacagcattatatgcttaattaatcaggcacagccacaaaagcatgcagcattaagcttagttagagagagagagagagagagatagaatagggggagggcgctgcatgcggctggctgatataacaggtgagacgcacacccctcacctacaccatttgtcacagcaacaacaaagacacctatttgggatgggaacctggacatctaaactactgtccgtagctctaaagctcctttcaccaaccaatatttggggctgcaggtgaaggcactcgatcaccctctcatctctctctgtcttctctattggagagagagagagaggctaattaagagtagatggcagcatttagcttggttagattcattcagatgcatctccctctcagtctccaataggcaggtgactcgtagtagtaacttgctgttcccggccggccctttgcttgtgaccttcaacctgtcacttcctctaaacttgttctctagtgcttttctaaactaagaattcatactgtatttagtgacgaaaaatgtgcggctgtttctttgtggagctaatttctttattgttataaaatgcattttctttcgcgtcgtgcatgcagtgcgcgtggtccggtctgatgacgatatcgtcaggaaacctcttc

SEQ ID NO: 150764 - DNA, 560 bp, Zea Mays
ggaataggctaccgcatcccggacccaacctcccacgccgctccttcctgaagccatcaccaagaaatccaatgccacagccagcgtccttccctcccgtcgccgaatcggtggtccgctgtggtgagacggcttccacggggtctggttcttggacgcgctcgcggcgcccttcgtgtcggtccacgtccgctcgtggccaccgccctggttgatccccgtctgaacctcctgcttggcctccgtgactggttcgggtgaagatggacactgcggatgacgttcggtgaaagctttaggcacagatctcgttggccctcgatgtcgtggcagcaccaattactcgcctggagctatggggctgggagatccgccgcgggagttccacgcgccgtggtcacctctcaccgtcgtttggcgcttccggtaagtcatcttctagaagttcgcaaccatgcccacgtcgtgtatcaccggttaggctcgggtatagggcattagaacaccagacttcggatcaccggcatggccgctgccagtggcggaggacgccagaaaat

SEQ ID NO: 150765 - DNA, 693 bp, Zea Mays
gtggttcacggcactggtcatttcaattcctcgcactagttcagttgtaagtgagatctcatgagctcgaaaatctcaatccttggatgtttacagacaacatgccattgttcacttttaatttaattttagtgttctgcagggatcagatatgagcaataataatcttgaggcagtgacactccttataatcttccttcgaatctccagagcttgtgagtcatttagttatgtttatatgtgtacttaactattcccatttatgttttaaaaatatttttgggggtcttacttacctgctatttagaaatcttgttgtaaataacttcatgtgggacagtaccttactccatcttccccttactgacttgtaagttcatccttaccacctactctatttacaagtttacgttcttaaaccaacatttagcaatctttgcagaaatgtcaaaaacaaccaattcaccggttgagtacctgataaactaaaggggatcgataatctccaataagtacctttactgcaacagttgtggtgacttttatttgacacactatgttttgtataaaaccggctcagggcttttttaaatcctagatccgccaccgtccgcaagggtgaagcagctgtccttcctaaggttatgccctttgttcctagttcttctctgctttagtttattatgtatgtct

SEQ ID NO: 150766 - DNA, 836 bp, Zea Mays
gcttgtatccctttaatactcttgtttcaaatacttgcctctaaacttctattgtctacttaaacatttcagtttatatgttcatgacctttcttttgagaccttttcctttttctgttgttaagtcgctatctttcggtaatttctttactcttggtattggtatgctcatctccttgaaatctctcatactctcatcttttttatacctacctttatatcccagtaactgtttaggacatttcagttaacatgtccttgaccacccctatttctcaacggtccatgagcgatcattttatgttgcccatccttggtgatctcgttgttcctttataacttctatcgataatgaattcttacttcaaccattctattgcaccctcacctatcttacccttgattgttttctccacttcgccacttcacgagtcttgccttaactttatccttcgtcatgccttttgttataatcaccttcaccttagacacctctatatcttatttgatgtttgtctcatgcctgtcctttaaaatcacctctcttccgtctcattctgagagctatactttacctatctttaccttggtcgtatcctcttctttggcttgcgagtttgtaacttcgtcctttgttgtgcttttgtttgttattgcctccacctttctctcttgatcttgccttggtaattactccatgcccgttatctaaaacctccaatctcccaccttagttcaagcgtggtctcttacttatctcacccgtggttatatcttatactttaccacttgcaagacttatcttaactctattcttggttgtacctagattcctg

SEQ ID NO: 150767 - DNA, 274 bp, Zea Mays
aggcttcccatcacttcgctaggcctgttcttctgtctcgccaatatagatgtctattatatttcaaggaactcccacgaaagtaaaagcatgataaacaagtcttgcttctgccattattttatctttccagcattctgcagttcacatttttccttgaatacacgggagagctgtgtatctttgtattaggagtgaaaaaagggggtccaatacagactacagaacttcgcctcctgttctggaccaagcagagaggactgccaaaacaaac

SEQ ID NO: 150768 - DNA, 359 bp, Zea Mays
gtttccatgcagagctcgactgggttgagttcttaggctccaaaccacataaggcaactctctgatccactgtcctgcgaacttttcattcttgtcgaagactttcttcctgagtgcttccagtatcatcccattagccctttctacctgaccattagctcttggatgtgctactgatgcatatttgatctggatgctccgttgctcgcagaaatcaaagaattcagagctagtgaagttggatcctaggtcagttatgatgctattcggtatcccaaacctgaatattatgtcttgtatgaattccactgccatggctgaagttagagaagcaatgggtttgtactctatccatttgg

SEQ ID NO: 150769 - DNA, 439 bp, Zea Mays
gggtaacacaagtcatcgtttcttatggcatttgaatcatctaaacgacaacctgacaaactccgagttattgggcgatgaccagaaggaatttgcttgcggggcttatttcttttgaaatgagttgaagcagaggaagactggctagcattgctatacttttcagtgatccctatcggcatgtcagaaaggacttcgaatggattagaagaggttctcttttgagttgagaagggagcacgtgatgatgttgaccttctcgaccgtccaaccaacctttcatgaatagggcgagcatggttggatgtcgagttactagtacatcccaccctactagccatagagtcagctggaagtgccaactctcttcgtttgttggcagcacgactagcgcgcacattaacagcttgtttgacatacttcttgcgttgtgggtttc

SEQ ID NO: 150770 - DNA, 328 bp, Zea Mays
cgcgcgagggagacgaaggcggctagcctgctggttgtggtttcgatggcacccttgccggaggctcagttccttccgaacgatgtggcccctcgtcgaccgagttcgtcgggcgaaactggctggtgcgagcaaaaggcagcagtcgtcgaagaatccgagggggaggggatgcgggcccagccgtgtaggagaaggcatacgaaggcggaggtggaagtgattgagagagaggaatacgggacgctacgttcgcagctctactgaattgaagcacattttcgggtccgtgagcacacgccacgcgtcgacgcagcagtggcaggag

SEQ ID NO: 150771 - DNA, 965 bp, Zea Mays
ctagcctattagcaaagggtctttatacctttttatgccttgatatatggagtttcttcaacgatttcctcattagtgtttgggtccacgctgaagtagatgacaacacgtatagttccgggtgcgagttggtctgaaggcctcggggtctcgttcaaatccacatctagtgactcaaagaatgttacatctggccgctcttgttctattacttcaattgcatcattaatctccttgccaatcaactcgggccaactggtcttgtcctgcgtagccatgatcacgtactatccttagcttttctctcttttgaaactgttataatatcaataagaatcaataatcgagcaacgtcagtgtaatgaatagaaacataatatgttgttttgtgctaatgctatcatactttcatagtaagcatgtcttaatcgaatgcactacataactaccgagctgcaaacagtctattaaaatgctaaaaagatacttttttcaaagcaattactaataaagaaatacatgataacctgtgtggaagaagaacacggtagcctttggtgatgataagtgctctatgtataggtgtgtatatatacatgatgacatttgtattgttgcttggatgctgtcggtgaaaacaatgcaaatattttgtccactattaattaggaaacatgatcatattgcccttttgctaccaataactgtagttatctaccataacaatgcatgctttgacttagtaaacatcatcatatctccttgttcacagggggacagctgaatgtacatactgtacacagcccgtgactcaaacaatatacgtgtaatccaaacgaaacataaaaaagccctagaaatagtggcaacccgctaattcatgtcgttgttgtccagctaaaatttttgaccccacatgcatcgttttctaacctcactcaaatccaacagatgccagacttttg

SEQ ID NO: 150772 - DNA, 560 bp, Zea Mays
cagttacctccatgggaatggagcaacctagaccagcttcttgactctgaagaccgcactccaaggtcgatgaggctcgagacgctgctcgggataactctaaccccacatccggaatgtcagtgcaaacgtccatcataccaccatctgttggctcggacaacagatcttcaggaaccatatccttgagagcctgatcaaaatttgctatggacaactcttgcagaccaacgagtgaagacaaggctggagaaggaatatcactactccccccactgaccaggtagcgtcgtctgtttttccgaattaaggggatttcctcctcttcttcctcatcctcgtcaacaatacgaacaacacacccattggggtcagctctggctggattgcacccattggaatcagcatcgtcaaggtcacacccattggggtcagcgtcagcagggtcacacccattgggatcagctccagtaaaaagttccactggcacttcctcagcagcaggagcagaagggccggcatcctgattcaaacatgacactcaccgaagcctcctcttt

SEQ ID NO: 150773 - DNA, 469 bp, Zea Mays
tttggatcgtgatccattaccacccttatttgggcaaactccctgttttcttgttaagctcaagccatttcattgtctcggccttgggtatgtttgacaatgctacttcatgtcttcactcctgctcatcgtgagcatgcattgtttattacgaattttgtctcttttctttctcgaaagcgcatctcaaaaacgcaggagaactatgtatcattatattaagaaggacaaaagaaagacctaagaaggccagacatgatacaaaggatcgacaccttacggccaccttacggcggtcgggcacaagcatacaaataagaatacatgaaaaaggaaaaactaggaccaccagagggttaaggccatagacttctaatgcctactgccccggccatgccccacaactgagcatcttgctgaatatggagcaggaccaagctgctgcaaggggaggtaccatcaaacacac

SEQ ID NO: 150774 - DNA, 567 bp, Zea Mays
gatggtcaataccaggcggggtggtggaattgatttgcctcctaatcgacacactcggtggatatatagacgaccccagccatagcctgcagagatgaatcctcctaatcctccaccaggcggagttgacccactggttgctgctcagatggcggtgatgcagcaaatggcggacaccatggcagatatgcgtgcacagatgcagcaagaacgccaggagatgcgtcaagaaagagaagagatatgacaggagttgcgccaggaacgagaggagatacaccaggaaaggagggcacaacaacaacaaatgcaacaacaacaacagcagcaacagcaacaagtaccactgcctccacctccaccaccaccagttccacctcgtgataagcaccgggagttcatgagtcataagccacctacatttgcaagctctcctgatccactggacgcagatgattggctgaagtccgttgagaagatgttgaatattgcacaatgcactgaccgggagaaggttttatatgcttctggacgtctgacaggccctgctgctgactggtgggattc

SEQ ID NO: 150775 - DNA, 674 bp, Zea Mays
ctagggttagggtttttcccaatatataatagtttagaactgtggtttacttaaatggaccatttttaagctagaactcatgtacatcagaaattgccacaaaattttgtgcttgttacttctgggtttcatttgtatatgtaatgtaggaacatgattcttgtagattgtaaacaattgcttttttagcaggttgtgattctttcataactgaaacaaaaaaaaaataattttcggtgtgctacgattcttccggagtccatttagtttttacttgctgtctagaaatttgaacactctgcgctcgttctgggcatgctatttttttagataatgggaattcaaagttcctggcctttgtctcaaagagactatagccgaattattacagactcagatagaaacaacactatctgaaaactcaaagaaaggcaaaacatagtgtggcgaaacgagattaaagacaaagtctaaatgcagatccccatccatgatgtctaaaaatctgcattaccaactcctccaatctacgtcatgccttgattattagttcttgatcatcctgtctaagttgtagttgagctcagaactggagccaatgcgtagcccgaaaaaccacctgcaaagaagattttattggagcattatcaaacactgcatcattcctgctcatc

SEQ ID NO: 150776 - DNA, 476 bp, Zea Mays
ctcgatttagtctgattttcaagcgttggacacgatgttcacatgcctcatcttcaatcatgtcagggctggtagacatagagataagagggatcccagaacatgcttggtttctgtctacggtgaagagtatactgaatgattcctgtttgatcgctgaagtgcaccctgatactatgtccaagcaagagctatcttcgtttgtagtcagagcctggtgcttcaacccggagaatctccaacgtacttcagtgcttcacattattgagcctgggttacagatgttcgagaaaagatgcctcacatacaagctccaaattagagtcctgcatgctggttcacacatcacaccagaaggtccccctccatccgcggacggcgataaacccccatgggatgatgatggaaacgacgctcatcagctcatgacccccatcctcgacgtccggttggctctctggcgctgcgcaagccac

SEQ ID NO: 150777 - DNA, 483 bp, Zea Mays
gatagcatcacgaacgatagtgcatttatccggatcacctaacccacggatgttccacgatagcacattacaacttttacaaactggactcatgactgaacaaacagaacaccaaaggagcacacgaccacaatggcagaggggcacacacaacaccgacctaaggagcacaaagacaggcacgacctgacagcagacttagagagacaacaggttgacattacagaccatagaccgacaacagatcgactacagttgtgacggtagagagccccgccactgacagccaaggggagagaagtgatcattccgccataggaggcaccactccaatggagtttgcggcgttgcagcccagccccgcagccctaacaagcttgcgaagggttggcatcgggatggggaacatcgtcctggacaggatgcggtgcttttttgtctccaacttcacggcagcagagcaggtctcgagggattctttca

SEQ ID NO: 150778 - DNA, 419 bp, Zea Mays
ggccaatggactgcgggttgatttccagagaggtgagggtctctttagaaaagttgacccgcgaagggggtacggggagatctcggccgctagatccagaaccgagggtccggattaaatcaagccggcgacgaaccggtacgcgacaggatccacccgatctaagatcgacggaccacggtgccccaaccccagatcgattctgcgcccttagatcctacatccacggttcccggttagccgaaccccggtttctaatctggatcgccgataccccatcccacggctagcattgctttccccaatctcgctcacaccgcggcggcgcagcacagcgacacggcggagcttcgccggggacctgcaattcgacgcctggacgccccaaccttgaaattgaccggtgccaaacttagaga

SEQ ID NO: 150779 - DNA, 626 bp, Zea Mays
gttggtttgaatccgaatgattttggtaaggatgcaagtcaggcgatattctgggattctcatgcggatcctgtgctggaatcaaggaatgttggcttaattagtgcttgtccccgttggaatgggaggacccaacatatgattctcagtcctaggattccttataggccaactgctgggctggctttcttgttctcccgttcaggcaccagttcttctgctgccagggcggtacacatttcctcccggggtgtggctgctggcaccttcgtcgaggctgtaaggaacgcaatggcgccggttggtgatactggagggcgtggaggcagtcgcggccagcatcagtctgagggcgctggaggtttttccaccggtcatcaacagcttgggggcacgggaggacatgtcgctggtttgggactgaacactgactttggacgcggtggttcccaaccagtgttccatcctggttatggtggcggaggccgtccttttggacgtcagggaggtggacagggccgtgctggagcatggcgtggtggaagaggtgcttctgccggaggccggttctacggtggtcgtactttgccaattcagtctaggggtggaggtgttcacagcaggtt

SEQ ID NO: 150780 - DNA, 637 bp, Zea Mays
ctatttccctatcttacatcatttataaccatgcttattatcacattttcttcaaaatgatgtacaaggcaatgtctaactcatagctcaaaaataatttcttctgcttttatatgctgctgcatactaattcttgaggtgggggatgcattgaatgcagttcacaaaatgaaactgcacacaatctgcttactaattctgttgtttactaatgcttactgtacacaaactgaatgcagttcactgaaaactgcatagaaactaaaactgacaaatggcatacaatgtgctatctgaacttcttgaggtgggggaagcactgaatgtagttcacacaaactgaagctgcacacaaactgcacacaaagtgcttactaattttgctgcttactaatgcttactatatgctactgcttaccacctgcacacaaactgaatttagttcactgaaaactgcacaaactgcacacaaactaaaactgaaaatgtcatacaatgtgttctctaaattgaatgcagttcacacaaactgaaattgcacacaaaatgcacacaaaatgcttactaattatgccgcttaccaaaaatgtgtcaagttccattccagaacttaagtggcagacaattaatttcttcg

SEQ ID NO: 150781 - DNA, 1502 bp, Zea Mays
ctgctgtcgaccggtgccttcccctttttctggcccaactcaatgtgttatggcttgagctagagattgctagctagtcaccgctcggaagagggggaacaggtccatcggtcagtcggaggcgatcgcgtctcgaaactcacgatgttcgttcgaggcaaaacagaggtcattatgcctattgcctctaacctcgtgtatcctggctaattgtactgtatcgccgatagggccgatggtgaccagggactggtcgcactacctgagggtcggcgagcggctggtcctagcaaggcaaaaggtcccgctccctatggccttttgttctccttaggtttgagccccctcccggatggtgtcgttatgcgtaagaattctctgagtaacttgtagtcctcatagccatgtcagactgaatgctgatggttcggacattcggcttcaaggagcttttcgaagtgatcaggggttttctcagctggaggccttcctcacgtccagcttatcgtagccgccgatacattggctcattttcatcaccctattctcctcttcatgttgaggtgattgtcgacatcttcatctggacccctatcacgcccagtcttccgtttgcgactaccagtggtggctctctctacgtcctctcttgatgcatggcccgtcgcaatgtcgaaaagcttctttggcgtttgtggggtcttccgtcccagcttatgcaccgaggttttgtcggtggctccctaggtgaaggcgttgataacgttggtgtccgtgaggttgggcaactggttgcattatcgcgaaaagtgtcagatatagtccctcggtgcctcgtccgactactgccaacaatcgttagggtcccatgggtttctcgggcgtacgtacgtgccctggaaatttctaagaaaaatctcttctaggtctacccagccctagatgcacccagggtcgagggtattgagccaggtcaacgccgaacctactaacaatagggggaggttctggattataaaaccatcgcaattcgctccccgcgcatgacacacaagccgatagtcctctagctagggaccggggttcgattccctagtgtacttcgcgatagtgagggcctgtagtgtggtcgtgcgggtgcccgcaggatatggcaacagaaagcctatagccatgacggctgggggcttgggtgtcgatcctcgtcagagtcaaaccggcctcgctgcgccggctgtaccgatggtcatcgtttggccccttccatacctccccgacactccctgggtcaggcgtgctctatgctccctcgcttattttcagttccaacggggtgggatccgctcctggcccacttcagacttgatcagttgtctcatagaggcgtcgttggttgccggcactgtcgtagcgctctagtcaaccctcggcactattgtagaggtgtcgttggtggcaatctctagcatggcgggtcaagtggagctaggactgacgccacg

SEQ ID NO: 150782 - DNA, 489 bp, Zea Mays
ggttgagatcaaggctgtccaacatcgtgacaggtgaagacgagaaagcttttggggaggagaaggagaaactaccgaacagaggaagaagaatagcaaggtatggaggtgtctattctccttttctattccgtttgttacaaggcagtctcgccaatatatgccattcgaatgggtcacacacataatcatgtattacagccaaatcggtccaacaagcctaaactcaagcttcaaatatccagcacgccagccaccagaactactctgcattctcctgttgttcttcagtcacaattgtgacaggaccccccatcgaagaaccatctgcccccaagatcgatactgcagaaaccatgccttcaggacattgaaatcctcccatgatgccatctctggtggtagcctagtccatttgactaaaatttgaacaatagcagaattgcccttcttaacaagttgacgctgcaatatctgcggtgatacaac

SEQ ID NO: 150783 - DNA, 389 bp, Zea Mays
cgcaaccaatcatagcccaaaatagcatcataggcacctagccccaacaccctcatatcactctgatatgtatgcccattagcccaccattccaatgatcgtaccatcgtatcactatacataatctccccattagccacccgcaccttagctgatgaacaaggatacactggcagccccatgcgatcaaccaactgcttgctaatgaaacttgtagagctccccgaatcaaccaacaccaacatcacctgattttgcaataaggctcgcacagccatacattcctcatttgtggtcccagtcaaagcattaagtgacaacataaaattctcctcttcccctttctcctcctgcgcaatctgtgtcaacgtttgctccgagagggtcat

SEQ ID NO: 150784 - DNA, 613 bp, Zea Mays
cagaagggttgaagtaaaaattcattaccaaaggaaattgcaaaagaatttacaagatcaccaaggatgtgcgaaataaaatgaatgctcatggatcatcgagaaacaagggtggtcaagggcatgtaaactaaaatgttttaaattggcattggatatagaagtaagcatataaaaatatgagagcatgtaaggtttcaaggagatgagcataccaataccaaaacacaagatattgccgaaagatagcgacttaacaacagaagaggaaaagggtctcaaaagataggaaggacatataaactgaaatgtctaagtaggcagtagaaattcagaggcaagtgtttgaaacaagagcattaaagggatacaagcatgtcaataccaaaggactagagctcgccagatggtagcaatttaatgacgaagaggaaagaatcccaaaaaagacaagaaggttatggtcaggggcacctacaaagatgtcgcaagcacaagagtgagatcagatctaatagattgagataagtatagaccatactagaataaaattcttttggcaagggggcatataggagcacaacatagaattagtcgagatactaatattttg

SEQ ID NO: 150785 - DNA, 314 bp, Zea Mays
tgactatgatgtgatttggttggtggatttctcaaagtttaaactagtggattagctagtggtatagatatatgtgtatgttctcttgctacagaattgtcctatgatcatggatgtctagctaggagacttgaactttttccctctaattatatttctcgggacattgttactcacagctagcactcaagagagaactcatcgatctgcatttgattttatctattgtttttttcatggatagatcagatccatagcaacattgtgacctgagctattatagatatggtctgaccttagaacaaataaataca

SEQ ID NO: 150786 - DNA, 403 bp, Zea Mays
gcgtggtattggcgtgcagggaagcttccctggcaacgcataagtgattatggacatagtgcaccttgcagcacgggcgtactgtttggcaatggactggacaggcacgccgcctgcaggatggcctggacgccgcctgccagctgagtggacaggtcacaataaatgctgaggcggcacatcgcctgtcagggtggacatgcggcgcgtcctctccgcaataaacgcagagaccgcgcggcacaaaagccttacatcaggctccgcccgctggcttacgtcacgggcaacaagccacgtggcagcatcgggtctccgcctgagcggggagcgcaagcgcacaggataaagcctggacacgtgtcagtaccggacccttgcttaggccagggtatcccctgtc

SEQ ID NO: 150787 - DNA, 1159 bp, Zea Mays
ctttgctagatcatttgatcttaatcattctgatgtatgaggatgcagtatggggttctgcaccttttgttacaaaggtggtcataaatactgtggttttttatttagataattatagatatacttggatttacttcatgaaacttcgatctcagttgtgttatggttattatgctcgcatggtgtacagttgtacacccagttttcaactcacattttgaggttttcattctgattctggttgagtaattatcccacactttttcatagtttttgacctcagaattaggttgttgaacgcaaacactgtcatattatagttggacactcttttgattgcttcttttgttccttctcatttctaggttagcaagtgtcctagtgaagttctattggtactcctagctagatcaccttagagtttttggatccatgtgctatgttttgcttgcacctcatgagcgggctaagctaactgcttagctgagcagggttttcaagggtatagccccggcacaaggcttatcgtcattgttagccttcttgccgcatttgtatttattgtaatggcacctttgttgaggaccatcctttcttttataactcttctgctctggcctcatcttttacgaagtccacgtctttatgtcttcccctatttcagttagtgataatgtcgctcttccaccatctctcttctatgtccacctactattcttgaagctcctccaccagatggtgttgatcctccatatgttgttcattagtctcccccatgtcggctacctatctcccaagtctatacccattgtccttgagttctcactcctaattcctctgccgtaacttgtaacactcttgatgttgatatttctgttaatattaatgagtcattgctatttctgatgagtcacagagtggtcaaagatataatgtatggcatcatgccactattggacctgttgactgttgtcaagtatgatttttcacgtgttaatcgacttatcaagaagcttccagctttccaaaatagtagcttgctagactttgttgcacttgattgtacatgcacttgggatcgtgttctattactgttacatggtgtctattactccctccgtcctacaatagaattcgttttagacaaaatagacattca

SEQ ID NO: 150788 - DNA, 339 bp, Zea Mays
tcttgccatgacatctatcagcagccagccaggatctgttttccgtgcaaagtgcagatgcggtggggatgctgagaccacggcatcacgtgcaggagctcatgtattatgttgctcaagctaatcatgtgtactactaccatctgccaaccagagtacactgcctcagctaagcaacactgctaattaaggactatcacgtgaaagcgctctgctcgtaactcgaattactagattggttggcccctgtccctgttcctgtctaatttcatttagtgtcctgtccttgtgatcattcatggtcgcagcagactctgcgccagctgccttgtttccttg

SEQ ID NO: 150789 - DNA, 632 bp, Zea Mays
acgacacttgaccgaagacttcaatgcttctactgattggacttgtgctcgatggagtctggacttccttcagtttgaccaatctctccctttgttgttgtgtatttattgtgtatatgttgcaggtcgtggtgctctagaaaacctcaaaatcccgatgatacacccaatgggtgtctatccactgaaaggtgtccattgtcttgtctcgaaatagtaaactaatgcgatggggaggtgtaacgctgtgtctgagcggttgactttgattccttctggtgccatgttatgtgaaacggtgccagccacctgactcatttcttggagacttgagccgctattgaagtcttgtgactgttcggcgaatgggcgagaaacgaacggtcgtcttccggctcctttaaataacccactcgcccccagttgccttcgtcacttgcacttgttaactcgtcctcttcccctccctcttcccttcacccccgagaacaatggctggaggcaaaggaggcaaggggaagcatcattcgtctgagggaaagcacaagcgccctctgagccctccatctgaggactttgggggcttggtggtctcggaggaggaattctcctcggagtacgatggctcgctg

SEQ ID NO: 150790 - DNA, 341 bp, Zea Mays
tgacattattttctttattttaaaattgttttctctctactagttttagcaactaatgtttaatttcttttaagttttaattgatggatttgaggtgttacatattctatatatcggggagaatgcatgtaacttgtattatccattggtaggtcctcaatttgcttccaccatttgattcacctaaaaggccaccacccaccagtagccgagcctcagctttttctggagctggcaagcagccctcatggacctcatgtgatttatattcacccaaaaaaagtttttcagaaaagaatttgtatatattttcgtcaactctattttatctctcttgccat

SEQ ID NO: 150791 - DNA, 366 bp, Zea Mays
ccagcgcggcagtccctcgccgccgacggctctctccgccgtgattcgtgtcgccggcgtcgagattagcgcctgggtgttggatagcactgcggagtcgcgaaaatatcgtcgccgtgaataactccgggcagtaaacaatcccggccgtcgtaccgcactcaccacggcggatgtggatatgctcgccggcgatagccgcctcccggccttacgccgcgtggctcagcccctccactgcatcgccgtgaacccttgtgcctcttcgtggctcgtcggagtaactgccacggtagatgccacgaattcacatgcgccagtaccttcttctaccttcggccgccgcgcgtcgtcgcccaaatcccc

SEQ ID NO: 150792 - DNA, 354 bp, Zea Mays
ttagctgtaacttctgctctttctgcatactcccgacccctgagatatttccttaaaacttgcaggcaaccatgccacctatctagaaagtaaccatggactaatttactcttctgaactctagccatttctcctagaccatgccaataaaaccttcattctggcaccactggtcttcaaaaaagaaatatcttggcccgaaggctccttgctctccagtatacaaaataagaggagtatgatcagagccaatcctagtcttgaaccaggcaaagcatgtggtatacttctcccaattatcagtacaaaggattctgtcaagtttaaccaaagtgggagatttatgcttattag

SEQ ID NO: 150793 - DNA, 335 bp, Zea Mays
cttcctcctcctgctgctaccaatcacacgctggacaagtatcggtccactgacagcaacgccgtggaattccgtgctagtacttctttctgttttcatcactgccaccctcgctactagtggtgggaccaatacgcaaccatcttgtatcatcaagacacaaccatcttgtgcaatcaagacacaaatactcccaaatactagtggtgggaccgaccaatacataaccaccaaccagtactacagcacaataccaatcccaagaaacggacgcaaaaaagtctcggtacgaagcgtagtctgacacagcaaacctacgcgcgaaatcttctgac

SEQ ID NO: 150794 - DNA, 750 bp, Zea Mays
gtgcacaataaatttacttgtcggagtgaggttcgaaacactgacagatctaatctagtaacctagtcgtatgggagtccaactctatataatcacaagtgtgcttccttatccgttaggatcctatcatatatcttaggactctgtcttgtatgttgtgattttgtcataactgtttaggactctaacttgtctcttctattccaataatatctttatcatatttgtacttttggggtcctcatattagaccctcaaaaaatcacgacgattgagtctagagactcaaggtaggagatgactatgatgagtgggttctacgcgtcagtcactagctgcgattgagagtccacatgcgtgggcgcaatctcgaggtaaaaaacagattcacagattacgtattcggcccggtttgcctcgggcatggtgaaagcgtggacgacccactgaagtttagacttttttcgaaatatttatttccttgatttattttaattctagagaaatctagaatcaatatttaaaccacgaaaagtatatcttgaaggttccgaaaattctaggaaacattcgaaaggtctattatttggacacgaggaatatgaataaaatatctagagcctataaaaagattttagagccttctaataaatatctaatagcagtaggagaacgagaataattgctagaaaaatttggtaaattcttaggagaacctattcgatagataaacatgttttgaaacatttg

SEQ ID NO: 150795 - DNA, 607 bp, Zea Mays
ctaagcacacgaagtaagtgcccataatgaactgatgtaggagcagagacaaactgactcaaaatgtgaaccgcatgagcaatatctggcctggtgacagtaatgtaaactaagctgccaacaagatgtctatatcgagatggatcctccaaaggtgccccatcagtcggacgaagaaataagtgaagatccataggcgtggcaacagtgcgagtatcactaagaccagaacgatcaagaaggtcttggatgtacttggcctgagagagataaataccattttgagtctgcaaaacctcaatgcccaagaaatagctgagtgcccccaagtcagacatttgaaattccttactcagatacgccttcacatgagcaatatggtctggatcatcgcctgtaatcaacatgtcatcaacatatagtaagagcaacgtgcgtcctcgtgaagaaacaatgcaggatcatgatcactagaatagaaaccacaagccttgatgacagaaacaaatctctcaaaccaagcacgaggagcttgtttaagaccatacaaggctcgacggagacgacatacatgacctgatggaacctctatcccaggaggtggatg

SEQ ID NO: 150796 - DNA, 1123 bp, Zea Mays
caagcggccagccgctgcttgactcgcgcaagccacttccaagcgggcccgttcggtcagcagctatctccgctagttcttctcggggtcggctcgcgcgtgcgataaaacaccgaacagatcccgcgttgcccgtcaactgaatcctccgtgggacccgcgccttgacccccgtaccctctctgttcgctcaatgatgggtgggctctcattgccacggagatgttcgctcaatgatggaagcccttccgttggccgttgcgcactgcccggctcaacctccgccgtatacggcgggattccgtcgagtccgctttgcttgcccctataaaactgaacgccgcatcaccgagcacctgcgcatccatcggcgacaacatgccacaccgtgagggtgaaaccaagagagattggaaggcagattcaatgccgtcgctgccgtcgaactgcgctcaggatgacgtcccagcctcgatgactgctctgtgaggttcgattggacctaacgatgaggtacacgggctaaccagggtcgggcgtcaagcacgacgcggccaattgctcaccggagcaacgatgaccgcggaggacggcacatctccgtgggcggggatctctacgcaaccctcaatggtaagaaccccaccaaacgattcgtgtccgtttccccattgtgttgcgtggccggattggggtatggtgcgcccagggttggatcggtcgctcgccggtgactttcggtagtggtgtagtcatgagcgccgccgctcggtctggctcagggaagaagggaacgtcgtggccgttgatggggttaatcaacggtgtgaattgggggctggatatcgggcagcgggggccgtagatttcgaatctggcggttgtgggttaattggatttcataaaatctgggccgcagatctggggatcagcggtgctcagtgcataccggttcaggaagttgatcgatttaatctgtgtcgtccatatccgatcgcacggctcaggatgctagataccccttcgccatgttcattttactaaagagaccctgaacgtttatgaaatgaacccgccatccatcctaagccaaaataaattgtagccgagcccagaagattat

SEQ ID NO: 150797 - DNA, 449 bp, Zea Mays
gacatcctgcaacccaatgacgttttcatggaacataatcatccggaggtatcgtcttgctggtatgggcgacatggcagttcatatgtttttcatgatgttacgggctggcgttaggcggccgctggtatatactgtcgcacatgcaatgcttgcttgccgggatagctgcgcacttaaagaagggaagtgcatacatagtttagttttgtgctccggcgagggtatgaccaccaccacatacatgtgcggagctctgttgtagacatgtatgccaagtgcggcgacattgatgcagcacaaaggctcttcaacctggccccaaagaaggatgtggtgatgtccacttcggttgtgtcagggtagagttggctgtttgtgggaggatcgctgatgcaaaactggtgtttgatggcatggaacaacacaatttggtgtcctggaatgct

SEQ ID NO: 150798 - DNA, 435 bp, Zea Mays
tgcctgtaatactaacatgcatgtcacagttgcgttgccttcgtgtccacttgtgaggcacaagggagcttaaacaaaaggcatgaagaatctagagtagcagcctgtcaccttaggtactctgcagtctatgaccagcatatattgtgcatatgaccatgtaaaatactattttacacattagattatactatttacataataaagtttcaagctatttgttagccagctaatatcactaggatttagccatctaactagaaacagaaccttaagacttgtttggtcagagttaggatgagatttggtcagatttagccatcctagtaaaaattaaataggatgagatttaattctctctgattcagatataaccgaacaagctctaacttagttcttaaaaaattaggattcctttagtagagctcatgcaag

SEQ ID NO: 150799 - DNA, 310 bp, Zea Mays
ataaggttggtttctaatcttataaaccatttaagatcttaccatgtaagaataaagttccaaagtaactataagcacaggaagaatggtaaacaaagattcaggtgggcaaaacctgagaacagatatttataataaaaccaatgccaacggcattagaactacaaatgtctgacacccacatatttaagaaatactccattgtgatcctgaatcctgacttaccagagaatatagcgaacaaaggaatgaaaattgagaatcaaattaaaactaactagtacgaatgagagccactgataggttatct

SEQ ID NO: 150800 - DNA, 312 bp, Zea Mays
ccgagagtttcatacctccagctctttgaagcgacggatggttttgcccctgctaatctgataggagctggaaaatatggatctgtttacaaaggaagactgtctatcacaggtgttggggattctgtagtggctgtcaaagtgttcactcttcagcatcctggttcttccagaagctttttggctgaatgtgaggcgctacggcaagtgaaacataggaacttgatcaatattatcacctgttgctccagtatagaccctagagggaatgacttccaagctctagtgttcgacttcatgcccaggtacagc

SEQ ID NO: 150801 - DNA, 439 bp, Zea Mays
aaaagcactgttgaaatcaagcaggcgcttgacgtccaaagggaagctcttcgcactgttgatgaggaattggcctctgctgaaaagcagcgggcagaaaccatgacgacaattgagaaacttaatcaaattttaatggaggtagagcaaaagagagcgcgacttgaggaaatgtgttctacttcagatttggaggtgaggaaattagagcaggacttgtgtgatgcaattgcagacgcgagcaagaaggctattgatgtttttcagaaggaaacaacagaactgaatcagcaggctgagcaacttcttattgatttaaatagttgttgatctagcagtaactagggtcccgactgtttgggacgatctatgaatgttatttctctttatcattatcaaacgtttgtttgttttcttcatttaatcatgaacgtgttag

SEQ ID NO: 150802 - DNA, 294 bp, Zea Mays
caacttgtgtagtcttagttggttatggctgtgaccccacacagataacttttttggtaaaatttggtcatatacgcggagcgaaacagagaaggtatgggaatgggaaacgcggcacagaggtatgggaatgggaaacagagaagaggccatggttgtgggacccacctgtcagacgatacatgggaatgggaatggcagcagagaagatatgggaatgggaaacgaggcacagaagatatgggaatgggaaacgaggcacagaacaaagaagagggggaatgggaaacagag

SEQ ID NO: 150803 - DNA, 558 bp, Zea Mays
ttcccatgcctttatttcgcaattgctcatcatagttggttgcgccgccgtgggacttttcccaccgcggtctgcgttctctagtgcccctgtgccagttctgcacccacggtcgtgttcgctgtgtcgcgctgaacgtgtctgaccccttccctaagccactagagccccgccgtggccgccccctcgtctccggtgagccctcgccgcaggaccaagcggcgccaccgcgtttaggtctagcccccgaccattggatctcgagcgtccgtccgagatcgggcggtttagaatttagctgaacggatctaatcctagccctccgatctagatctgaccgctcttctctctccccctcacccgcgcccctgccactaggcctggctggtcagccctccctggttcgctaacaccccgtccccgcctgtcagtcgcgcccgcgcgcgtgttcgcgagatctaatcctatccgtcgatctctgatccgatggtcgagattaccccgtaccccttcgcgtgtaggttttgcttaagagaccctcgggttttaggaaatcaa

SEQ ID NO: 150804 - DNA, 1094 bp, Zea Mays
gtgatctggctaggcgacctcaactaccggatcgctctgagctacacggaggccaagaagctcgtccaggccaacgactgggccgctctcttcgagaaggatcaggtaggtaaaaccatgcaatgcaatgcaacaagcatctggcatttctgttgagatccaaagcgttgagcagctcaagactgaaagggagagcggggtgttcagagggtggaacgagggcaagatcctcttcgccccgacgtacaagtactcgtggaactccgacacctacgccggcgaggacgtgtcgtccaagaagaagaggaggacgccggcatggtgagccttcgcctccccttctccatcgttgctgctgctgacgatgaaaacaaaaacaaaaacaaaatcctgcctgcgcccgcaggtgcgaccgcatcctctggcacggcgaagggatagtgcagctgtcctacatccgcggcgagtccaagttctccgaccaccgccctgtctgcggcgtgttcatcgtcgaggccgcggtcgtccccgacagcagccgcctcgtcaagttcgcctcgggccccaacatgaaagtcggcgcggaggagctcctgctcgcctcctccaagtatgatctatagcagcgcatggcaatccaaagcagcggccctactagagagactcaggaaggctaaccgaaaaaatgatcaaggaccacaccacacgccgttctgttcattgctattacttcaagaaccaagactgctcgctcccatccacagagtaccatcagtacagactacagagtacagcactgatacagcatcttcattctatatatgggccgtgattcatttgattttattaacttaaagttgatgtttttttcttctccatttcaagagggaaacaaaaatgcagtcttgtgcatgtttatgcaatgcccatacacgtctgactggcaaatgaaatagttgcataaatatatggagtatggtattgtgctttctctgaaacactcagatccggcggttccttcgggcttggtcgaccctcatccctttctctcggcattcatcgctgcagaaagcgctctctcccctgcaccggca

SEQ ID NO: 150805 - DNA, 400 bp, Zea Mays
aaccacgctttggcaatacactacatagtatgtacttatgacaaaatggaaaagttggccaaagatacaaaagctagggattgtcctatcccactaccaaccacttaactgggtctgacgtgtcatggcctggatatgcacgccttttgtgttctctatgactattctaataaaccaataatccaccttaaacccaaacccccaaatttggcctccccggaattgctatatcatcccccaagctaggtgaatcttagcaagtgggacccagctgttgaacgtccaacctaactcagcttttgcacggtagtattattctaaattttctaacacatcgccaatcctttcttttactaggcaatcaggcttctaaacaatagcaccaaaaccagacttttcc

SEQ ID NO: 150806 - DNA, 1779 bp, Zea Mays
cagcaacaagtgttaaggatgatgtttgttaccttcagttatttgagcaacttagttacacatgcatgcacttccctatctgttccatctgcagacggcgttgctccttttgccaaaatgaaccgaatacgaaggggacgtttccactccgccatggaaagacttgctgtaatgacaaatatcagattctctcgtcaatgaaataattgcatatgatttttttctacattgacagtgtgatgtctgaaacagccgaaaaatgcgtccatgcttcgatttgcaggaggaaccaccgcgagagatttccgaagtttctgaccccaatgtcatcagcccaggtactgagttcatggagaaggtatcagaagccctcgagtactacatccgtgccagatttaacagtgacccctggtggagagacatcatggtttgctcctgtgctttactaaatgcaatttatgttcttctctctctctctcttcttaaagggaagttcatgttcatttcagcttcaaccattagacatacatgctgaatctaactgcagggtctataaagtattgacaaacattgacttgctgaatctaccaggtggatgttgctgacaagtttaacatatctgttctgaaggtaatactctctgatgcgagtgttcctggagaaggagagcacaagatcatgtctttcatccgtgcgcaatgcagcatggaaggctatgatcccaacactcgacactgcttgtttgggcatgtagggaacatatatatatatatattaatcggttttcttgatgatctcatcatttctaataatgttgtgtatcactgatccagttttcatcatgcctagctatctgtactggggattaactgtgaagaatcattgcaggatgcggatctgataatgcttgctttggcatctcacgaagtctacttctctattctgcgtgaggtctgttaatccctcgtcaatgttaatgtcatgcttaaacatattgcatcacatgcttgataatggtatgcaccgctcctctgtctatactactaacttggccaggatttgtgtaaagttttacctgtcagagtaactccagcactttataatggtatgcaccgctcctctgtttaacttcaacaggatgtgctctaccaaaatcaggaagaaacggaagggaatccgaagaaatcatttctggtcctgctcacctcccaactccagataatgccactcatttcctcattttgatacactaacagtgccatcttaatttccagtttttgaacatgtgggttctgagagagtacttggagattgaattcaagatactggacccagtctgcgagactgatattgagaggctaatagatgacttcatctttatttgtttccttatgggaaacgatttcatcccacatattccgtcacttaagacgcaagaggtaacctttagactattgtaatagcgtagtagaaagttaactttgttatcactacatatgcctttttgctttgttcattactctgaaaataaaagcatagatgtttctctcatctattccatctaacagggtgcggttgatcttctcatcgaagtgtacaaaacaaccttcaacaaaatgggagggtatattaccaacacagacaaagtacctgaagaattccagctctagtcttttatttcatcaatgattacccattgaattacccggtgacctaggttcgttgacactgaaaacaggtcaaagataagtatggtgcatatctggaagtctcaaggct

SEQ ID NO: 150807 - DNA, 277 bp, Zea Mays
gcattgtgctaaacaattttgctgggtaacttggctcactaatttctctccaaagggcagacctattgacgtagggtctagagaagggataaacccagtcaagctttctcaaagtacggagaggctgcttaaacccgtgacctggtgggctgcttaaacccgtgacctggtgctgcaccaggccttcccttctaatttctctccagaatcaccaaattatctctcttcgttgccccaaaaccttgtttttgaacttcaaaatgaaactatacatgca

SEQ ID NO: 150808 - DNA, 372 bp, Zea Mays
ctcaatcaaccccttcttcttcacctccatggctcctcggatggggtcatcaacctccacgcctccccgtgcttctcaggtgtgttccacacttcccattctagacttctcatgcaatctgcatgaaatcaaatgtttgtgtgctcccttgtatgcttttcattgcgcagaaaataattttactctgccagccacagcctgccttatgctcctgattggcacttcctcatcttgctcccagcagaaagatgaataaaaaataaaatagcagccgctaactcatgtgtttaatctaagtttaatcttcctaggtgctaggcagtggtatagggcctacctagcgcgtacacagtgcaagataacaaggttgga

SEQ ID NO: 150809 - DNA, 795 bp, Zea Mays
tttaaataattactttcattacaaatgttctggaaacaacctccagcatatgttggtgaatgagggcttcacagcaagttaaatttttaagaagaacgagaagctgaattatgtaaacatgtggcaagtagggatggcaaaaaaactcatggttcactagcttgctcgactcgtggtcaaattagctcgactcgacttggctcgttaacataacaagccagcttacactagcatttgagctcgttacgttaatgagctagcttgtgagccagtttgtgaaccacacgaccaagcatacgtacacacagttcagattcttctatgtttctctcacattatctcccatctaacttgagcaaggcaaatgccattgatgactgatcaccacacccatgtgagaggcatacttacatttttaagataaaaacattaggacttttcctctgtgtgacttctctactgccatccatgttcccactcatatcttctcactctcacctcaagaagaccatacgccgcctcccaagttccaagtctaacacgtgccaggtcaccaacatgcagggtcgcaggtgatgctctccatcctatattgtcttgcataagtggtgcacttagccttagctcgatcgcatgtcttctctaccttcgtcgtctgttacctatctgcatgttcccaagccgaagacctagaaatatcgagcatggatccaaggatgtcactgaaaagactagcgacattatcttcggcacgtccgatacctgcccacatgttcccaagccggaagcctagga

SEQ ID NO: 150810 - DNA, 528 bp, Zea Mays
tttttttgccttgcctcatcgcaccgtacttggatggtccacatgtcatatcctcactctctctcgcaactgcatctcccgcctgagcgcccacgacgtgtggattctagtaatcgctcgctcgacgcacctattcaagctgcaggcgcccactcgacctcccctcttccccaaatcgtgccatgctccccctaccatgctcacgtcgcgtcatgctggaagacacctcgtcggaaccgtcgcagcaaccaaagcccaccgttgccaggaatccgtcgggtgcaggtgagccctccttccctccccacgtcacttctttcctcccctcccctcggcgaccttcttcctcgcgcagccccatggctgggcgtgaccgcgagtccctgcgcagcctgcctcccgtgctcagcggcgagaatacctaagccagcccctttccttccctgcgaggtagtgccatggcttcccctccccttgctgcaagttgaagacgaaccattcatacaaagaaatctgatgtgtgtgatc

SEQ ID NO: 150811 - DNA, 275 bp, Zea Mays
atgtgggaggcttgagccttaggaactctcccattctgtcctgaggtcttcctccaatcgagcgctggttctcgaggcttctagtgaggacctcaacgagtcgagtttggttggccagaacatggggtaggtctaatggcagctccggaggtgcggtgaggtgggtctcactcccttatccaccgacttctccttcggcacctagggataccttgctccaatccctgaggtggtaggcgtggttttatccgaggccatctgccagaggggagaaa

SEQ ID NO: 150812 - DNA, 633 bp, Zea Mays
gttgcatggagcaatctattgatcaatagatgcaactttgagaaatatcgatctcatcagttttttaaatggctttatgtaacaaaaacatcgacatgttgctcactatagcatagggctagaaaaaagctcaacagtcgcgagcttcgagccaagtcgggtcttcgagcttgttggtgtagcaagcctagtcgagccggctcgttctagctcacaagtagtcctataagtttgggtcgtacctgttgggctagcacgagcccggcacgaaattaatggcacgaagcccggcccagcacgaccaaaaaatactcgagccagcacgacacgttacgcgggctgggccgtgctccagtttttggcccgacggcccaagtagcccggcacgccatagtgggccgtgctcgggccggcccgacacgatttagggttagggttgttttttggactcctcacgtcacgcggtcacaccctcacgcgccgccgctcgctcattttatcacgccctcacgcgccgccgcggggaagcagcaacagcaagctgacgaggtcacgaggcgaaacatcagcaacgtcaagatcaccctcctctgcgccttcgtcacgctcctcgtcctccgcggcaccgtcggc

SEQ ID NO: 150813 - DNA, 497 bp, Zea Mays
caggccgcttcaaatttcgaacacctcgtcggccagggccaccgtataacaccgatcccaacccgagaaaccccaccagccagccagccaaccagccgacagccgacgagcacgagcccatggacgagacgagggagatggatccgggtgcgggggtgcccaggagggcggccaccgccagcgggacgcccaccgcgtcgcgcggctccagcacggcctcctcgtgctcctccaactccaacccgtccgcccgcgcctccgcgtccacgtccacggggacgccgccgtccgccgtcgtgctaccgtgggcggcgcgcgcggccgcgggggacagctgctactaccctgggtgccgcaaggacgccaactgctcgtgcgagatgtgcctcgcgagcatcgacgccacgcgggacctggtgcgcgcgcccgaggcgcgcaggttcttcgggggcgccagggaccggaggctcttcttccgtgaccgcgccgcgggggcg

SEQ ID NO: 150814 - DNA, 397 bp, Zea Mays
ggcggaaccccggcgtccttcggtccatcgtcttgggcgacaactataggtggacctccgccgtgggcgcatgtggtgtgccggtgaatcggcggtggtcctccggcgcggcagatcggcggctgggcgagggcgaccaccatatgacggcttggcggtagatcgactatgctcctccaacttggccatgggcactgggcagtgagcctctgtcgtgggtgcctgtgcggtggctcgttgccgtgtaaccacggccgtcaccgtggatggtggttcctacgacgctaggattggggaatggatactggggaagcaggaggctcatcagggctggcggctgcgagtctgcgaggggaacaggagcaggtgattcaggttaggtcaccgctacagtcag

SEQ ID NO: 150815 - DNA, 324 bp, Zea Mays
gtcatcctagggatgaatgactagataagtaccaagcaattatcacctgtgataagaggacagttaagttggtgtccccactaggagaaaaagtggtagccgagttaatctcacctgagccaaggaaaggaagttgtcatcagatggttattgatagcaaggagccagattcactcgagattatcaaggttgtgtcagaatttccagatgtgttcctggaagacttaccaggcatgccacctgagcggaaagttgagtttgccatagagcttcttcctggcaccgcccccatttctaaaagagcctacagagtgtctggactag

SEQ ID NO: 150816 - DNA, 394 bp, Zea Mays
gtcctgcctgagccgaagaagggaagttgttatcagatggctgttgatagcagtgaagcagacccactagagatcatcaaggttgtgtccgagttcccagatttgttcccaaaggacctaccaggtatgccacctgagcgaaaagttgagtttgccatagagcttcttcctggaaccgcccccatctttaagagagcttacagagtatctggaccagagttagttgaactcaagaagcagatcgatgagctgtcagagaaaggttacatctggccaagcacctcgccttgggccgcccctgtcctattcgtggagaagaaagatggcaccagaaggatgtgtatcgattatcgagctctgaatgaggtcacaatcaagaacaagtaccccttgc

SEQ ID NO: 150817 - DNA, 496 bp, Zea Mays
gttcacgggtgcaccagggtctacgaacattctttgatttaggtagaacaacacccgaagagcgggtcgacggtgagggggggggttacggcggcgttttacagagcaaccgcacgttccggtgaaaggtttcggcttaagttcgattggttggtactgggagcaatagggggctaatagcaagcaagaacatgaaacaattgggtaagtactcactcgaggaaagctggccacggagatgttcttcgcggcggagttaagaacaagggagcgagggatttggggactgcgtgggttttctggtgatcttgagtcgggcgcttagttgctgagatgtgggatacagtgaagaagcaacgctcgccctcaatttatagtctaccggccggaatcggatgagcttcaccggcggtaatcgtgctggcgagctcacccgcacggcagagccacggcacaagtccggtggccgccgtttaaccgggttgcgccacctcag

SEQ ID NO: 150818 - DNA, 329 bp, Zea Mays
aaaaatcatcatcaaactctcctgggatattgggtgcctccccttcttcaccatcattgccaccattagattcatcttcacaatctgtgatttctgcatcatcatgtggaacatcttcatcttcatcttcctcttcagcctctgacacattttgtgcagcaacagaatttctccttgaatacacattatgagctcttcttggtaagtttcggccacgaagtgcttgtgatgctccaatggcattatccacaaggtcccatgtaaggtcacactcacacccacgtccaccttcagggactacatgcaaagaatcagcccactcattgtcc

SEQ ID NO: 150819 - DNA, 766 bp, Zea Mays
tgcatgtatcataaagaataacataacagatctgaacttcaaagtatgtacctgagttacattagtacgatctaaacaatcaacacaatttgttctgacagtgccagtttgctgcgcaattttctcgtctttatcggtcaacaggaagtacctataaaccaactttaggtaagaccatgcaaacaaagcaatgacaagctttcaatcatcaacaaaatacaatattatttcagatctacaattgactctcactactcttttcccttccttagatggcacaagagatctatgtgtcactccattaacatagaggagtataaggcgagccaaatttaaaagaaacctagatctccaaaaaataacacacgcaccctaaccaaaaagggtgggggtggctctatgcatgaccctgacttggacaacaaaactactaagaaattagacaaactggaccataacgacattttttctcaaatacgtaggtgcatatcattataataagaagaaaaaagttgggccgaagcccgtacaacccatgccactgacactgaggttttaaaaccccccaaaacaagaaaaccctctgatctgtcctagaacaggaaataaacagaaactagcggggagggagggtagctactaggaagataagccccttagcactgcaagcatgtcactaagatttgattcgccagccatgcaccacaaactgcactcatgactcatctcctatagtttaaaggagtgtatggatactaggcaaagc

SEQ ID NO: 150820 - DNA, 355 bp, Zea Mays
cggagttgcgcgcttcgcatggggatccgcaagaagccggattatgtctggaaggaataccgcgaaaacggagttgagaagtgctctatggcagtctacctaggagaaagccgaagttatccaaaccaccctcctttccaagtcaccttcactggacaccacttcccagacacttgccaaaatgttgcccgaaaagccctccaacagctatgccaaaactacagcaaagaggtttttgaaaccccccttcgttacttcccacctagcaacaaaaatacccccacctagaggaaaagacttcaggccctgtcagggagagatcctaccgaggatgaccccaccatcgtctacatgg

SEQ ID NO: 150821 - DNA, 410 bp, Zea Mays
aaagactgtctatacaaaaaggcatagtccaactggtcctcaaatgtatcacccatggtgaaggcaaaagcatcttactcgaagtccacaaaggattgtgtggatgtcacataggtcctagagcccttatatcgaaggtcatgtgctagggtttcttttggccaggaatagtcaaggacacactcttcacaacccaatcatgtgaagtttgtcagaaaatttcaacatgaagggggtccttcgcagctaactaggttaatagccccatatggcccctgcaactgtggggcaccaacattgtcggaaataaattgtttgcataccagcttcaaacaattggcgctgcaacccctcacgccgagaacaaaaaggcccacacaacaagcctctcacaccacgatgattgtctt

SEQ ID NO: 150822 - DNA, 322 bp, Zea Mays
taatacttttgctggataggattcgactggaaacatacctactgccacgtcctgagcatcctggattgcttcggcctccaggtgattcacctttacacggttgtaggcctgaccacggactcctggcgcttgctgtggcgctccttgtcttgctggggcattgactgctggcgactgctgagctgctttctttggacagttcttcacccagtggttttgttctccatagtagaagcatgcacggcatcctacttgcgctagaactgcttggctattatggttggttgctggggcaggaaggcgagctgcctggttgctctaa

SEQ ID NO: 150823 - DNA, 791 bp, Zea Mays
taccggtccatggacctttttccagtactctccattcgtgaactttggtgagaggtcatctcctgcataatgtgcactaagaaacatctgcaaccatatgaagaggccacattcagaagaatatataaatgtcatatcattgaatcatctctgagcgctggttcagattgcattccagaacatgataacgattgaacttacagccagcatagtagggccaacatgagaagtcaagttttgcttcagaggtcctcctgtcctgaactcatcacttggagtgatctgccagaagccaattggaggatcgaatgacatccaaccatggacattgttgtactggtcttcgcaagagtactggtacttgtcgtcaaccttgacaaacattataagcaacgttcagaatcagaatgcactcagacacttacaatggataacagacatgtattatatttatctctgtcagggaagcttacctcccctctaagttcagggttgattgggtccacaaggagcacagcctcagggtatgctaatggctgtcctcgaggaggcaaccggtcatcgggcattggcataattctctgcctgtcgtcagccaatgccatgtaatgaaacctgcgattacagcagcatttagagagtttcagacattcaatgaacaagaagaaaaacagtaactatggcttacatgtctttccgcagcttgaaagccaccctcgtctctcccaagccgaaatcaggccatccttccttatgctcatagataccataggtgtagaacccggatgagc

SEQ ID NO: 150824 - DNA, 782 bp, Zea Mays
cttcggcagcagcaaggagagcttgacacccatgttcgtaagctcgatcgagtttatggcgacattgagcataaatgcctcggggccgaacgacctagggcaaagaagatttatgattagcttgccaagagtagtgacggggcacaatacttcctcaaccctggtggctacaaccatgatgcttcggtccatccccgagcctaacgaactagaggcgaaggcgatataccgaaacctctgcaacctagtggagaaggctacggtatagcaggctgagatcgatcggcaagctcccatcggcgcggatagctacaacacgcgcacgacctcgtcttagagcagggggcacaaccctcccagtccgcaaaatatagcatccccgcgaagaaccatatcggggagatccgcaacgctcgacacctcctcaacaaccaccgctggaagtaggaggaggttgagcaggcccacgagcgaagccctatccctcccgggccagggccacgtgccttcgagcgcgtgatccacaagcacagttccctgtgaaggtgagggcgtcaaagaatatttccaagtacgacgggtccatgaatccgggcgtatggttagaagattaccgcctctcctatcgcatggcgtggatcaaagatgaccacctcatcatccagttcctccccatccaccttgtggaggggcaaggacctagctcgaacatttgccagccgacaccattcacaactgggctgacctcaaaaaggccttcgtcaaaacttctagggacccta

SEQ ID NO: 150825 - DNA, 449 bp, Zea Mays
gggtaccagaggatctgagtcatccgatctccaattgatggtgcagattagattcgtgcagggttatgtatcggcgtgcgctcactgcccatggatcaaggatcgatggcccgaaaccgtccacgccacagggcaagcaagggcacccagatctatgatctacggtctagattttataacagcttgattcgctccgcacccacggatagaagatctacggccctgattcaatatcgcgaaaaggtatgctaagatcagatcctgaccgcccacacagggatcaacggtgggtatcggatctagtcaagcaattactccgacctaatctgagccctacgctctgcatctaacggttggtgcatcatcttcctcctcaccctggctcacagaagtggcgctagcaccgcgccgcagtgaacgccggtaaacaggcacatgccaagccaaag

SEQ ID NO: 150826 - DNA, 387 bp, Zea Mays
cgctagaggccctttcgcaacatgtcataacctcatgctcctactcaaaacatacttaatatagtctggactctggtcgtttcacaccatccaataatgatatattacttatttgggtaaaaagatgtcatactattcaatccatattgaaatttccataacagtgtttggcaattgatcatcatttgaatatctccaagagccaaatccatgggcagtgtgggttttccactgacacatgggagagccaagggtcggatttaggccatgctacccaggttgtttgtgggctttgcagttacattaggacaaaagaatagcaaaaagcaccactctcaggtctcacctacctcccatcttcaacatggacatttggatccttcgcga

SEQ ID NO: 150827 - DNA, 505 bp, Zea Mays
tcagtaccctcggtggcgcgaccaggtcctgtagaccctccgccgctacgcccttgccgaccacgtcctctccatggtcgctgactcgatggaggattagctcctgatggatgaggtggtgctttcttggatccatggcaccctcacggccgagcttcaggacatcgttcgagtgtcggacgatactgctcaccggatctagggggtgcccttgaggctcagttcctcggcaaccgccagtctcggattctgtaccttgagatcgctttccgccagcttgctcagcgtgatctctctgtggacaagtattgccgtcagatgaagacgatggcggacactctccgcaccctcggggcccccatcactgatgagagcctcgtgcttaaccttcttctacagcgcgcctcgggctgctccctctgacttcgggggggggggggggggttcctcttcacagcacttcgcccccgccctctggagctcctcggcagcctattggctcccg

SEQ ID NO: 150828 - DNA, 717 bp, Zea Mays
acctgaacattgacatcaagaactaaaataactggatctctatcagctggctgaggcaactcatatgatgcatccgttattatacgtttgagtgtctccatagatccatcatccatttggcaggaagagaaagctttaagtctatctttcccacagcatcctccccttccaaagtaacctttatacaaaatgagttggagaaaacattcttgtacttcatccactgacacagcaccaccaaggatagccttgatgagcattggattgacttcaaattcgaattctgtatccagaccagtgataatcattgatgaggcagtctcaatgtgttcatcagataattgatggcccaacagaaggcatttccagggtccaaaccaagaatcttcaatgtctctgtttgaaagaatgaaaatgatatcaggaaaacaaacattatcttgtgtccacaccaccaaatttcaactttgatatgcataggtaatcttacttcaatgtgttagcaaggtaattgttgagcttcattctatgggaccaccacctgacacgatctgcatttacatcatcaatagtaagggttgcgctggagagggacataaaattctcctcgagtatatttctaaaaactggggctacatagtcagtaattccatagccccaagggcattgccacttatctaaaactctcgttggattgcccaaatctttggtgcagga

SEQ ID NO: 150829 - DNA, 503 bp, Zea Mays
ggtctaatgagaggacagtgatcagagaggtctgaagcattactaacgcagaagacagggacagtgatcagagaggtctgaagcattacttctgcatcctttgagttgcaacaatgtcaagaatagaatctccatttatgctgatgacatggttcttttcattaaacccgaggaagaggatttgagttgcactaaagtcattttagactgctttggtgaagcttcggggctgaaagtcaatatgcaaaagagtttggctattcctataagatgtaatgatgcagaaatgcaggtcatctctaactcccttcactgcaccattgggtcctttccttgcaaatatctagggctccccatctccaagcggaagcttagaagatcagatctgcttaactgggtggagaagattgctgataggcttgccagctggaaggctaatctccttaatttggctggaagaacaactcttgttaattcagttttatctgctattccggtttatc

SEQ ID NO: 150830 - DNA, 421 bp, Zea Mays
tcccggggtggaactggtggtggaggtggaggcagtggcgcttgttgctgttgctgttgcgcccttctttcttgacgtatctcctcccgctcttggcgcatctcccgacgtgcatcctctctttcctggcgttcctgctgcatctgagcgcgcatatctgccatagtgtccgccatttgctgcatcatcctcatctgagctgcaatcagtgggtcaactccgcctggtggaggattaggaggattcatctctgctggctgttgctggggttgtctatatatccaccgagtgtgtcgattaggaggtaaatcaattccaccaccccgcctggtattgaccatctgagttagatacatatggtaagatagtcgaaggaatcatttgtaggcagaatgaataagctagtagttggttatgtact

SEQ ID NO: 150831 - DNA, 653 bp, Zea Mays
cccaccgcacgaacaacttgggtgatgtacctgggctcaccactgcgactgaccgtgggtccctctgctcagcttcacgttccaacccctcgcgtggcctcactgcccatgggtccctcttatcggagccatcctctcctaccggattgtggcgaacttgtggccgtgaatgttgccaccaagcgcatgagccttctagattcctcgctaaccgactcataaatcgtgtgtaaagcccgtggccatggacccccttatccgcagtgggaataccatatatgtcttcatatagcttcaccgtgtggagagctatcgtgccgccacgggtaattcggaaccacaccattgattggggcttggctattgcactacagggatcaatagcgggcctcgaagttctcggtgaagtcggtgggcggcgaggaaccttatggccaccagaattcctcatcgtacatgctgccccgccgtagaacctgttcgagccatagcccaacttctccgcgacatcattgtcagtaagatgcccatggccatgttcgccatcattactgccttgtgtagcattcatcgaatcggtatttgggcgcgtggttcggagtttgggcgatgccggccatggcgcagccgtgggcgctatggtgctgccgcgc

SEQ ID NO: 150832 - DNA, 694 bp, Zea Mays
gggcttctaagttagtagtacactctgtggctatttcactaaatttcttatgtgcttaagcttccgtcaaatccatggagtttttcttagtaagaccatattaaccttgtctatctatatcctctaagatcaacggtgttttcatacaagatttaccgatgtactgctaatgtcctatgccaatgaaatatgggaagcctgtagatatatggattttcattgctttgcagtcttttttgtgttttgtttctaatttttaaataggtcttgacctgccacctccaccttctaatatttaaataggtcatgacaatacacatgagtaagactataggatgatgacttggactactaatatttctgagatttatgtgagaacataataaacaacattaatatttctaggaatgtattatggactctgactgtatgactataccaatatctgtacagagagatcgcccctcgcgtaatagctgacgggcaggtatgcactcctttttgtattgattgaataacttgtagagtggtatattttcaaaaaagtaagttggtatgatgcttgatgtatatcaatgtatgactactctattttctctttgtatttcatttagataagaaacatcaatattcatgctacaacaacaaactaaataatgtacagaagcacaagattctcacttcagggcttgtt

SEQ ID NO: 150833 - DNA, 480 bp, Zea Mays
cgctcaaatcgtcacgcaaccgtctttttcgctcggccaaaacgcaatccgcggcaaaatcgacaagtgcctctcgcaccctcttctctatatacatgtaccccaccattgaaacccccctccatgtcttcttccccaaactgcaacagctcaaactccatggaaaactcccatgtgttgcattgtccttgcgcacaagcgctctcggtgcagagccgtgggaccgtcgctgcatgccctcttccccaatgttgtcgaatacatttccggtgagcaacctttcttctctggtggtatttttcatttttttagtctgtagccgtcgcagtccctcatcacgcccttgcgcgtgcgcatgccaagctacagccacccatggtcggccatggctgcccagccaccacgccccactgacctggccacgcgcgtcgcattggcgagcgccgccacacccgctgctggttgccgacgctgcccagc

SEQ ID NO: 150834 - DNA, 640 bp, Zea Mays
agtccagataaaaagggcacccttctttagcagagcatggaggggttggcaaataataccgaagtggtgaacgaatttcctataatacccggccagacctagaaaactgtggagatcctttacacaggaaggagttggccaatcctcaatagcacaaattttagtgggatctgtggcgacaccggcagcgctgacaatgtgacccaagtatgaaacctgacgttgagcaaaatggcatttagacattttcaccttccattggtcttggtccaagagagtgaagacttgttccaaatggcaaaggtgatcctcctatgaagaactatagaccaatatgtcatcgaagaaaaccaggacacacttccacaataatggagaaagggtgtgattcatggcacgttgaaatgccccgggagcacccgtgaggccaaaggctatgacgctgaactcataatgccccaaatgagtctagaatgcggttttatgttcttcaccatccttgagtaatatctgatgaaaatcgactcttaagtccaaaatagaaaaccatgaagcgccaaataattcatccaaaagctcatcaattaccggcacaagatattttcccttgactgtcaaagcattcaagtggcggtaatcg

SEQ ID NO: 150835 - DNA, 400 bp, Zea Mays
aaggggagggggctgcccagggggcagcgttgcagttagccttagatacaggtcagtggcgccgaggccgaggccatccaggcccatgcctaggctagaggcggccaggccggctgggaccagacaagaggtgactaggctagttgtacctaggacgggggaggcctggccggcagcgcccacgacgagggcggcaaggcaggtagcgctagcggccacgtcaagggtggccaagcctgcaacacccaggccagggccagccgaggggtaggcagctgctgagggtcggggaagggaagactagccgcaacaaggaccaacactagggtataggagaggaaagagggggagagagccgaccggagggagaggaaggcagtctagcaatttaacatttcag

SEQ ID NO: 150836 - DNA, 346 bp, Zea Mays
cgacagtttgtgacgtccctcccccgttagaattcggcggaggacgaggtctcccactgcgaaggatcgatgccgtatggccttgtcatgatagcgcctcagagtttgctgataccgggctgactgaatcaccgtattcaatcgttcttcttctagtatatcaacatcctccagtctagtagcctcagcctctgctatgttttcaaagattaatctcggtgccccaaacttgagatcagcgggtagcactgcctctgaaccatagaccatgaagaaaggagtgtttccatgcagagctcggctaggttgagttctcaggctccaaacaacatacgacagctctctg

SEQ ID NO: 150837 - DNA, 801 bp, Zea Mays
ctttaagccgtgacacctcactaaagtatcatgcaattctagaaaagcactcggagtcatacggaagttatcttgacacttcctgaagtccctcaaattatattccacccattatcgtcccgtcacatgcggcaatgaaggaggaggattaaccaaaggaggaggagtagacaaaccagaagcaaaagcagctagaactgctgctgcacccgctgactagacttattcatacataacatggttcactaacaatctcgattaaacccggaggccacaacaaactaagttcggtaagaaactcgatctgggccaaagaccacacttattatataacagtgcacgcatacatcaatgcattattataacaacacacacaatccaaactaaaatgcaatacttaaaataagctacttggaaaaatgtctcgcactctttatttgttagcctagttgaacctaatccaatggaggcgtccctgtttagtttgcattgaaaagaaagccctcctactcagttcgttgttgcacaaaattagtgccatgcagtacaaatcagtttcttcccaattccatcttcctttaacagccgcatgacctcatcaagttcttgttgtgctcgactgagggttctctagtttttgatgttaatgttctcagaaatattagcaatgtgtttttccaaactaatcttttttcttgggagggctatccaccgcttcttccctaattagccttttggacgatgctctaatattagagctgaaaggttccctgactaatgttctcgactgagggttctttt

SEQ ID NO: 150838 - DNA, 486 bp, Zea Mays
gtttccttttgatcgtgcgcatccaatcgtctgcatcgagggggttgcttgatccggcgaacgtgggaggtttgagtcttaggaagtcccccattctgtcttgcggtcttccaccattcggtcgttgattttccagatttcgagtgaggacctcgatgagtcgggtctgattggctagaacttgggctaggtctaagggtaggggtggaggtgcggggaggtgggtttctctttcttctgtaacgacttccccttcagctcttcgggggaaacctgctccaatccctgaggcggtaagcgtggttttatccgaagacatctgccagggaagagagtcactatcatgcacatgcaaattgttttcaaccaagttattttattcattacaccatcacattacaagcataagattactacaggtgggactacacgagagcgttcttcgaggtactagcgagttccttgtctaaggtgtccccaaatgcc

SEQ ID NO: 150839 - DNA, 794 bp, Zea Mays
ttgtaattcagcttttagtttctaattggttccaaaataaagaatttttttataggtatgggtatatatatatatatacaaccatccaatgtgtaaaaaatgtttttaaagcatggataggcttgggtaggacatagtagggtaaggaaagactccatccaagacttgtggatcctgattcctttgaagatctagcttaaatcctatccttccttgatttgatgaggtcgatcatcttcgatcttcggccttggaatcgtcacccaagttggggacatatagttaagatggcttgtaggtagggacaaatggttagtggataggtcgcataaaatgagtgttgacctggcataatctagcttcctttggggtctagcttgattcctattctttaatgagattgatctcttccttcttgagctttgatgtatccatccgagtttgggacaaaaggtcaagatagatctataggtaacagatgggtagagggtttagtaggtagctatatgctagatgggattagttatgtaacctgttatgtaggtcaagttgttgagtatggccaagttgatttaagtcaccaatttagtcttaagtgaattacgagtatggccatatcttttttttaccagcattaagaatcacccactaggttaaatcatattagattagatagggtctagattagattgggtatgactagattagactagtttaggctagatagatctactaaggtaggataaatattattaggatatgttagaattttttttgagataggatggatctat

SEQ ID NO: 150840 - DNA, 426 bp, Zea Mays
cttgtgatagccacttataaattgactgattaacaagcatgacaagatcgaaaggcagagctccactttgttaaaaaaaggcatgacaaacatggtaaccaaggaatccacagtttttttacaaaatgaactacatgaatgtatgtgactcctaaccatgttcttttggagagattcttaaaatgtgtacatagacacgagctgttatttcttagacctttttttgttgctagagcattttacacatgcatgtaggcatgtacagataaaacttgggggatgtaactacattttattttttgttgcagagagtataatgatattacatagtgaattaaagcgccagaggaagctcgtgaaaaatctgaagaagaaatccttgtggtctaggaccttggaagaggtaaattttcaaccatactcact

SEQ ID NO: 150841 - DNA, 313 bp, Zea Mays
gtacggtccaacgcacagagctgtttggaccgcatcaaaacaaacagagaacactcataggaaacagatccacgcatagttacctccaaactcgatcccaaaatacagataattacatctcgtacaagcattcacacagggggattcaagttaggaggtatgaatcggatgcacatggttagctggaatggtcctgtagttatctcgcatccggtgggaggggctgcagggccgctcctctagccgagcgcggctgcaaggccgctctggccgagcgccaccggccaagcgccggtgctccctgcggttggat

SEQ ID NO: 150842 - DNA, 341 bp, Zea Mays
gtgagctataatgagagaactacctgtatggctgtaaggtcttgtgaaactcaaggagtgtttggtagggtggcttaccctttgtccaggcttagataatactagttttgattgtttggatgcctgactagcttctaagcgaggcttgagcgagccaaaaagagtgttggcgcctacattgccggaaacccttgaggtctgcgtttccacaaagctaggcatgtataagtgtagtggcccacatgttaggatttggctcacctccttgctcctttgtgtctttgtcgagatctgtatccaccatcgacatcttcctcgcgagcaccacaaccacgatcggc

SEQ ID NO: 150843 - DNA, 661 bp, Zea Mays
tgaacctgaactgaacgttttgaggttatccaggcagcaatgactgggtctgcagcccctcgtacaatgaagtttgtgggtcagatagcagacattgatattcttgcattgttggattcgggtagttcacattcctttgtcagaactgcagtggctgagcagttgacaggagtgactgttgttattcatcccttgcaagtacaggttgctaatggatcgcagctctcctgcactcaccaaattgttgatgcttcttggtccatcagtggagtttcctttacatctacacttaaggtgcttccattgtctacctatgatcttataattggcatggactggcttgaacaacacagccccatgctcattcattgggctcaaaagtggctcagtgttccacttaaagaatctattgtcaccttgtatggtgtcaagtcttcagtcacgcaaactgcagttatacaggtgtgcagcatacaagaattgtcggacaaagaacagactatcttgtccagcctacctgccgacatccaggctctactgttccaatttccctcggtctttgagataccctcgggtatgcccccaaccagggattgtgatcaccaggtgccactaatcactggggccagaccagtgcagatgaggccgtataggtatgcac

SEQ ID NO: 150844 - DNA, 731 bp, Zea Mays
gttcgactctgaagcattcagagaattttgcaaccaagtgggaacaaatatacactttgcatcagtcaggcacccgaagtctaatgggtttgttgaaagagcaaacaaaataattttgttagaaatcacaaggtctttagttggattacccaaagggaagtggacagaggagcttatcaaagttgtgtggaatcacaacacatctgtatcaagatccactagttttacaccattcaagcttctcttcagggacgaagcagttacccccaaagaagtcaggttgggttcagcaagagtcatagcttcgactcaagattaatatgatgaacttttttttgaaggatacaatagaagagtcaaggcttgaagcaatcaagcatataaggaagtatcaagcagaaaccattagatggagagatgtgaaagtgaaactaaagagcatagcactaggtcatctcgtgctccgaagagtagctaacccagatataacaggaaaattgcaagtgaaatgtgaaggccccttcctggtctcagctttgaacacaccaggctcatacagattgaaggacatggaaggaaacgacgttccaaggtcatgcaatgccgacgagctttgaagatattacatctaatgccaagctttgacaccctttttccttataaaggggataagtttttttaacaggactaaagatgtaatagttgggcaaagagtacctaaaggctataaa

SEQ ID NO: 150845 - DNA, 365 bp, Zea Mays
gccttttgtttttttgtagtttaggaatactgatcggcatctgaaagtaggaaattccattttactgcaggcaatgtcagggtgtattatgttcaaaactgccccacttgaaaatgaggacaacttaaagataatgtttggacccattgtgtgcaccaacgagacaacccttgttcatggagttgaggatgctaattcatcatctgatggtcacgaagaagacattttttggtgcgggtgaaagcagcacacctaaccccagctctacagttaagggaaagcgtaaggttttgcatgactctcctaaacctaagaagaaataggatacgagggatgaatacatgaaacagattgtcgatgctttc

SEQ ID NO: 150846 - DNA, 303 bp, Zea Mays
ttcgaggcggtgtgatcgagcgcgcgcatgggaacgagggggtcgatcgatcgagaagaagcaaattaaatgcccttctcagctcgattcgtgattcgtgaatgtgatttgcgcgtgtgctgtaggtacgtacgtgtaagtagcctcagtttcgtcctcctcatcctccttttatatgtttggaaacaggatgcctcatatcatagcattctacttcctgcatggtacactgtagttcaaggcttcatgtatatatagttgtattatacatacatgtaacatgtatataggctgcctacgcac

SEQ ID NO: 150847 - DNA, 816 bp, Zea Mays
gatacaaattgagaaaaaatttaagattcaaaccccctcaatctctctcaatctatatggactggaatagaaccgaaccagctctgaaggagaatttacccctattccgtttggaaacagggggccagtgtcccatcccgtgcaaaccccaatagcctaatttgtatgcaaggattgtaaaaacagcctcataaagctcaaaataatgctcacaataatacaacggcaaatataaaatagcctcataaacctcaaaacaatggaaaacttcatatccgttcacacattcaaatagcctcataaagctcaaattaatggaaaacttcatatccatttacacatttaaatgtcctcataaagctcaaaattatgggaaaaaattcatatccattcacacatccaggtagatatcatgtcaaaataaaatgaatacaagcctttttttcccatatgcttcacaaagaaccttcactccggagaatatggaatacaaatcgttttggcattagaataaattatgactttatctcctttttgcaagatacacatagtttccaattgtgagctcacatattgctttattttcaaaccatgtattgcatccactgagtactctacatgtaataagaaaagaaatagtgaaggttgctgaatatagtttgatgagcttgctcctcccatgtccagagaaataaaaaagataggtttgatgagcttgctcctcccaagaacccatatctagagaaatgaagaaataatatgagaacttataaaaagctgccttaattagcagcagcagtcatccaacaacataca

SEQ ID NO: 150848 - DNA, 272 bp, Zea Mays
ggacaacttccctttaactttgaatcttctcataccccggagtggcgataccttcaaatatacatgatcaccctccttaagctctagcagtcttctccgggtatccacatagcttttctgccttgactgtgcagttctcaaattctcccttatttgttggacttgttcttctgcctcttgtataatctccggtccaaagaactgcctttgaccagtttgatcccaatacattggagtcctgcactttctgccatacaaagcctcaaacgagg

SEQ ID NO: 150849 - DNA, 481 bp, Zea Mays
tatacccttagtcaaaaccaaacgttatgcttcatgctcccagctgtaccatgagctgtattgtatatctttggatttaaattttgtgttatctccagcttcattggatgtaaattttgttatgtttgtggattataaattttaatttgtgaacttggggctggtcgctggagtagttatgtcccctccccccagtcacacaaacttggcacatttgactgcatggcttcaatgcgcatctttgatcactaacttattctagaatatattcttaaagtcattcaagagattttttaaagtattttgaatacaaatcgatccatataactaacacattttcaaacttgtagtagtaattcttttaggtttgaccaaatcttgccctaaacgacaagttttgtgactcgacagagtacttgttttgaataaaagagtaagagatgcttttagtatgtagttaaaatatcccttggtgtatgct

SEQ ID NO: 150850 - DNA, 529 bp, Zea Mays
gagtatgtctggtacttggccaacttctgaagcagttgaaattatggttccatcactccgtggtgagtacctaatttgccctgtgatgctataacaaaaattattgagcaagatactatacttgatcacttgatgaaaataaattagctgaggggggccctttccacactgaaattttctagctttgtgatggttgccctgacatgtaattgtgccctgataactgatttgcgatgttccttttgatcaaaagaggtgatgtacctaatttgccctgtgatgctataacaaaaattattgagcaagatactatacttgatcgcttgatgaaaataaattagctgagggccctttccacactaaaattttccagctttgtatgcaactgttagttggaacaatcttttctggacctaaaacagaaaaaaacatcgcattagaattgccaatgttctttagctaactagaatccacagtgcaacatagcaatattgttgggggtatgcttcgtcgtcgaagatcctgtaag

SEQ ID NO: 150851 - DNA, 357 bp, Zea Mays
gggtggccgcgcggccaccccacggcgctgaaatcgtacgcgtccagcaccacaaaacggtacccgggccatggcgagaagtcgtagtaagcgcgtcccggcgacgccgacggcatgcgcagcacggagaccagctcgctccggggtaggttgtaaaggcagtggttgccgagcatgtggtacgtcggcccgccgcggaagccgtcgaactcgcgcaccacggcctgcacggcggccagcgacctgtccttggggcagaagccgtctacgatgtcgccgaagttgatgcagaacctgacgctcctctcgccgttccacctctcgaccgcacgccggaggacggcgatactgtgacgg

SEQ ID NO: 150852 - DNA, 709 bp, Zea Mays
aaatagggttccaataaccttaatcttaccctaatgatcaactattaattggggcataaaaacagcagggaaacattgtttaaatagatagataaaaatactatgagcattttgcaatttgaagcacctaatttgaagttcatatgacaaagttatggattttacaagattagggattaaaaaatatgccttaaatacttagtttgaattaaataaaaggtctgaggccctaactgtgaaaatccagggacggcgggttaatttgcggaaaggcgggggtctctttaagaaaaggcgcgggcgaaggggtatcgggctctaatagccgttggatctcggatcaacgcccgagattagatccgcgggcgggcgcgcgagcgcgcggcggcctgagcggctgacaggcggggccgggcgggcagcgcggggcggctggctgacaggcggggcccaactggcagggaggcggggtgtgcggaaacggctctgggccgttggatctcaggcgaacggctagggtcgggctaggcctaattgaaacagggccgttcgatctgggatggacggtggggattggtggccggctttgtcctctcctacggctagcagaggcggcggcgctcgtcccagcggcggagaactcgcaggaggcgagaggcgctgtaacaccctgaatttgggggtataaaatttgtttgctcatattcac

SEQ ID NO: 150853 - DNA, 982 bp, Zea Mays
ctttgctttcatgaggggttcggaattgtaaggaggaaaaagaaaaggagattatccactaagaataaaatggagtaggaagggataaagacatatgtatctttcaactagtccagtagaacctctgattcatcactgtcctcaacaatacataaatgacattgctttgggtgctcatatgatcacatgagttagaattacaaggaattttttgaacaatgcacaatagatttctaatttggggggaactgtgtgagaatctcaacacctgctacttccgtgcatgagctgcagtcctgcaattccaacatctctgttttctaggcatgttatttgtgtatttttattccaaagaaaaaaatattctacttgtctctgccaccaagaagggacattgaagatgtttcgccatcagattagtgtctgtacaatatggcttgaagcttgaacagatgagttaaaaacctcacggaaatttattatgcgatctcatatttctcaaaacatcatgtgttggtttctgacaaaacttccattcttcaaatggtacactgtacatttgaactacatggttctatgggcatgattcctacaaagagcatctaggtcactcacatgctgcaacaggacaatatctggatctgtctgctagaaagctaatagatttgtacttctaagttattcatcagagtagcaattaaatgtcacttacatttcaaactctactaggtagaatagctctgaagccaaacttgcacgttcgggcttctctgggtccatgccatacatttcagactagcttttttcttcctgctctatgatgagatttaggttaagacagtagaggaccaccatttagtattcctaatggaacaaaattaaaggacaaaaattgcaagtggttgtgttcgttcattgtccttttgtaataaagaaagggtagccttgctttggtatctcattattctaatggggtccctcc

SEQ ID NO: 150854 - DNA, 1364 bp, Zea Mays
ctctaccggctgcaccgtcgcgctgctttggcactgtgaatcgggtgcgtttcacgtcgcggtgggacgtctccgtggctggttatctgaaggctgttttcggtgattgattggaaatggcaaccgctcttgtgtctggtccctcttcccgcctgcgatgccgcggttctactctttttgatttaatttcttttaatgaaatgcgttattttcacggcgatttccttcgcgcgcacgagatgttgagcgaattttcggtgaagtttcgtaatgtgcacgttctgccggaagtttcaaaattgcggcaagaaaaaagaatcagcagattcgagagtagtaaaggttacctagtagtattgacttgttattagaacgttcccgttgacttcccgtctcccgcttgttctgcctaaccctaggcttattaaatccccttgtctgtagctgggcaaacgttgtctttttgttcatctcctgttttctatccgtatgcttcggtgcgtgcatggagggcttgcctggtgggttggtgggaaattacccactgtttgttcaggaggagaattcctgagaagtcgatttattgccattaatctctacctggcatggagtttagactttggatggtctagcatttgtacagatgatgtagagttgtagttgaacagcatcatagtcggttacctggtccacgttcgatctctgggcacgtcactttcagtgtagctgataaatttgatatttcaccggtgaagttttcttgtattataggaaatttgcgtaaccattatgatcaagttgaacatgtcacactctttggacggcaacgggccaaagtcatgcaaaagagatgtcccaatttcctgtcccgccagttcactcctttgtaggtcataccagattacctatatagtcacccaaaaacagtagactgtaatgttcgtagagtgaaatttgaaacatatgatgtggttagggatatgatggaaagctgctaaagatagtcagacccgtttaaaacgcagtaatttcacagctaaaaaaagcagaaatagacaaagaaaagttcccacattccaaacggggcattttttctctggaaccccattggccattgcggagcataagagttgcatatctgacagggttatcttcttcattaacagtacactgataagttatcctcatcttaccaccttacagaaaaaggacaattattagcaggaaaaacaaaatcggtcaccgactgtttgtcctatatgggaacatacatagtatttccatcttgattactttgaggtgtgtattggcattcttcaatttttcggaacaggacagttgtaaccatagctgcatgtgttctt

SEQ ID NO: 150855 - DNA, 355 bp, Zea Mays
ccaacatttcatgaactacgcaaaattgtaagcacaatgcttggacctcttgcttttgtagttttttagatctcagttgtcaaaccaatttggattcatgagtgtggtaatggacctaacatagaccaagcatgatagatgatcagttgtccttgtattgtgttggtggttatctagacgctacctaattctcggcctcagactgaggttgtcatatttcgtttcctgcttgactgtccagtcagcagtcacagtgcatgtttgtagcagttttgagagcaagtctgttatgtgatataattaaagatagaagattagttggatttgggtagctgatgtgtgggacagatgcgaa

SEQ ID NO: 150856 - DNA, 637 bp, Zea Mays
agatagtcttatggcctattattgtttgctagtctgagcttttgtcctacacatccattcttttcgcgtcttcccaaacatatcttactattactattggaaattcaggcatccagccatccactatataaaatgattgctccctatatgtcattgttttttagaaccttgccttttgtgttattgttgatcattagtggggagtcagacatggagcccaggggaaaagttccattttgggttttggcttccatgttgctttgccccctccctcttgcaccatctcttctgtcttatcagatcacatgctgctacagtcaggacagtttggcccagaactgcaaatcgttgctgccttgctatgcagactgcaacttattatttttttgttagccttattgttgtaaaatacgaaatttctaaataaatcttgattttccagttttaaatctctgtacatgtagtgtgtccaccagttcttccagattgaccaaactctgataattcaatctgagcatcccatctctaaccactgtagttttctttgcatcagtcgagacacaaagaaatgattgtgatagggtgtgtttggtttgacttttggatttggctttcgtcccttacaagctaaaagaca

SEQ ID NO: 150857 - DNA, 554 bp, Zea Mays
ctgtgtacagcccaaaacagcaactaataaaattcagcttctatttacttcaaaaattgtcgcgttctagagactcaaaccattctaacactttaccctttgttagtgttaaattaatcaaatgaggactaataataataagtagacttactaattttatacaagttatttcacgtgttagaattaccgtacacaatcaacaagcacattcaccacaataatcaaacccggtataaatgtgtatatcgattgcgcccttcacacactaatttgcattttaacttatacatcacatgaacacccctaattttacccgcgaccataaccatgcgcatttaggccataacaagcaaatcatcgtgattacgagcttaactaaagccgtccaacaattcggctaactagagtaacgacatagcccgctaaataacatacacgtcggctagtccattattatcgcaatccgagacacaacatacactacagcaattttataaacaccatattcacaagtattttcgcacatcgaccaatctatacgaatcgtaaaccac

SEQ ID NO: 150858 - DNA, 917 bp, Zea Mays
caggtgattaatagattcaggttcttggtcacataatggacaactgcttggatgagtgagccccctctttgccaatctgtcagcagtctagcacctgttatgggccaccagccagaggaagaaatgacattttgatggagcccaagttttctagaccctcttatagtggccaaatgtgcaggatcccaggaagagacccttgtaagctgctttcgccaaatactttccatctcgagctacactaaagatatgtctgtcttcaatgagagggtgcagctcaattttggagagatagtcccagagctttaagtaatctgccaaaactccaatagtaagaccacctctaatgtcagatatccatcttctgtttaacaaggcctcatgaattgttctactttttgttatcttctttgggattatagagtatagtctaggggcaatggtcgagatgcttttactctgcagccaattatcaaaccagaaaagggtactatacccatttcccacctccgagacaaggaccttactaaagaactctctggctttacttggaacctgaataggaagccatgtccaaggtcttctagagtcggttttttgaagccacagccatcgcatccggagggcccatccaagctctgggaggcttgatattcccagacctccaagctgaagaggacgacacaccttgccccaagccaccaaacagtgccccctttagcttcctttcttcctctccaaagaaatccctttcttattttatcaatagcatcaagggcccaatggggtatataaattgccattgcaagatacacagtcatacctgtaagaacatgttgcactaggattctcctgcctgctctggtcatcaaatcagctttccaattaggaagttggtcagcaaatctatcaacata

SEQ ID NO: 150859 - DNA, 333 bp, Zea Mays
catctgacgaagctttttcagaaggaaaaggagcccgcaaaaatgaaggcatctaaaccaaaaaggcaaagaatcattactgtgacagaagtcatcgaagcaacaccaccaggagcttcagctccgaaggtgccggctattgaaagcatgacatctactgaagctgtaccttcggaggctgccacagaagaggccagagccgaagctgccagatccgaagatattaatttagaaagcatggttgctgatatagataaaatactactaaacatggccgcggaagaagctgccgcagaagaggctgccgcagccaccgaagagactacggccgca

SEQ ID NO: 150860 - DNA, 597 bp, Zea Mays
atggcacaaagggcagactattcatgtcataagtcatttccaataccatttttagttcattagtgtgacaaaacgcataaacgagagttcggtacgtaacttcatcaacgacattcctctccccaccatattgttcttcacctccactgcctcaagaacacgattgtttctgcagagaccatacatcaacacattgtatggcacaacactgcccttaacaccctcactttccatcctcgccaacaatctccttgcgccatccaaattccttatctcacagtaggcccaaatttcggccgtgtaaacatactcgtccaagtgaatttatattgaagcatttcatcgaacaggtcgcgagcaagagcaaattaccggatcttaatgagagcaaaaagtatctgcaaagcggtgtattgcttcatcgcaatgccggatgagagagataggcgcaggacggtggcaactcgcgggtgcggcgaatccagaggtacgaggatgcaagaagcgtggcggcagcggtggcggcgccaggtcggaaggtggcgagtttgttagcgtgtgagagatacgaaaacgaggaggacgcgaacggggtgg

SEQ ID NO: 150861 - DNA, 721 bp, Zea Mays
ctctctaacaagcgaaagccctagccacccaacctccgaccagtcgtccaggtcaagtgggcgacccagtcagattacacattgcgttgacggttatttacataggtagttatgcatattgaatttatcgtaaacaaataggaaaggaacacgaatcggcccacctagtcagatagtccccaccccatgtctcgctccccagcaaccgactgcacgattgagccaaccctaatttaatccccacgaccgtcgccgcctgctcccactatcaccgtcgtctgctcccataatgttcgtcaccagtgagtgcccccctccccacgcgccagtctacgtaacttaccttcaccttcgccaaactccgagcgcggctacattgcatccacgacgctagatccgtctttgtaactggttcgtccaactacctcgttttctgttcaagttatcttcaatcttgtgcataatccagcaatggttttgtaactattccccgttttgaccgtatagcatccccaactccgggctcatatcctcgcccccatatggttagtaacaccatcaatttatttggtctcgtttttttacaatctcgcataattcaacatcctttcgtttaaatcaatatccacatactatactagtttctggggtaccgcctcatcggcaataagaagcatcgatttgccaattgtacttattcgtattctgaaaatagaggtaa

SEQ ID NO: 150862 - DNA, 342 bp, Zea Mays
ggaggacaagcggtcaaccgtggcatggtggttggctatggtggaagtggacgggagcttaacggttggagaatgcgcatgaacagtttgaggcggttgcaagccctctcggtctgcggctgctctcttcagtgtgaagcctgctggcatcaagaacctcctcaaggtgaggaaccaggccaatcctggagatcagggccaggggaagcagattggaacttgtgcatgtcgtgatggctggcggtcagccaatgggagatcggcaggggagaaatgagagcatcgggaagaaaacccaagggacaagaatgtcttttggcatatgtccttcgttcaccatgc

SEQ ID NO: 150863 - DNA, 379 bp, Zea Mays
ggttttgtccccatgtagttgaaatggggttttacctaaaggtttttaacgaggcaaccaatctaaatagctctttataaagcatggtgatctattttttgatgtctcatctcatgtatggctgattgtctgattttgtatggctggtggtgtaatactgtaatgcttgtatacttgtatggcaatggcactatggctgattgtctgattgtatggctggtggtgtaatgcttgtatacttgtatggcaatggcactatggctaattgtctgattgtatggctggtggtgtaatgatgtattagtgtattgtatggttgtatattgtggtgacagtaatgctgtattagtgtattgtatggttgtatattgtattcttg

SEQ ID NO: 150864 - DNA, 907 bp, Zea Mays
tccagagtagaggttatgagctgggagaccaagggcttctaggtcgatggtactttccctgaaatcagactgaccgatgagattggaatagaaatggtccaccagattagctttgtcagcctggctagtgacaatattatctccatctctcagcaaggtcaccaaattttttcttttccgatatctagcatgcatatggaaatatttagtgtttgcatcaccttcctttatcggtttatccatgttattcttgatcttaatcttgccatcgttctttggaaggaggccaacaacaaggactgtttcttgagcttatttttaagccagttttcagccggagtgagtggtctgtgatcctgagcaatttcaagtctatgcagcagctctcttgccagacaaagctgacaaacaacatcaatcttagcagaatcaaccaaaactctcacaacatcttgtctgaccgaagatttaagtcctctcacatttcagaaaagtattttagaaggatccattggataaactaacagggaaccaactgaacagatgaaaacaagccctaggactttaagtcttctggtgtagaccacccaaaaagagcagctaaggcatcaacatgagactggataagtgggtgcttgaaaagcaaagcatactccattatagcttcacgactaatcccatcagaatcgttgattatatgcaaggccctcatagccttcctggaagccctgctacactaatcttgcatggaaaactcgaatgtgatactgttatgggtgttggcccaggatggaccagcctgagctgggtactgtagcacagcctataccgcccttgctaaagaaggaataaggattaagaaagagataggtgacgtaccaagaagaagaaagaaagaaaataaaga

SEQ ID NO: 150865 - DNA, 485 bp, Zea Mays
attgggagtccagtttgccatacaccgaattctcgtacaacaacagccatcaggccaacatcaaaatgtcaccgttcgaagcactgtacggaagaaaatgccagactcccctaatgtggtccaatgtaggggaaaggacactagaaggacccgactttgttaaagaagccgaagagaaagttgccttgatccgcaggagattacttgaagctcagagtcgacagaaaagttacgcagacaacagacgaagggaactcagatttgaggaaggagatttcgtttatctcaaggtctccccgatgcgtggtgtcaaaaggttccagatgaaaggaaagctagcaccacatttcgtcggtccctaccccgtcatcgcccgaataggacccgcagcataccgtcttgagctaccagaatccatgtcagatattcacaatgtgttccatgtgtctcaactccgcaaatgcctaaaggtaccagaaaaccac

SEQ ID NO: 150866 - DNA, 643 bp, Zea Mays
ttcaaagagaacctcaatacgggggagtggatatttattcttgatagtcacttgattcaaagcgcgataatccacacatagccgcttgcttttatccttcttctcaacaaacaatactggggaagcccatggagacctgctaggcctaatgaaacccttagccagcaaatcatccaattgccacttcaattcaacctgctcctttggggccattcgatacagagccttatgaatgggctgcgtacccggaatcagcttaatctcaaaagctgcatcgcactccggaggaatgcctcgaagctctgccggaaacacgtcagcaaagtcacacaccacccggatgtcctgcacccgcaaggcagcctcaccctccaccaccatggagaaaaagattcccgacttgctggaccggtgattcggaagcaattgcgccaacaaggataacgtgaacttaggggaacttcccaagaataccacctccctacctgacggcgcctgcaataacagtcttccaaaaacaggacataactgcgcaatactgggataaccaatccatacccaagataacatcgaatgcccccaaggaaatcacaaccagattggccgaaaagacctcatcagcaagaatgatggaacactcctg

SEQ ID NO: 150867 - DNA, 538 bp, Zea Mays
caacaatgtcaatacaacgtcaaagtggatacatatgtggcggtgtttgcgatctgacaaggtggcacaacaatagccatgttgcttggataatatgcacataatacttggtgatgtacatcaaaaggcgacgagaagatcacacatagatagttgtacgggctaagtatgcatgaggtggagtgacaacgaaaggagtttgtagaggcatcctgatcattgatggggatgatgaaccgacaatgcagatgtatagacagggtaaccgataagtaacatgggaaggcgatccctcggcatcacatatccgacctggtcgcacaatcaaagacatagattttggtttagttgatgctgaagtaggtatgctcgaggtctatgggtggtgggtgactcaatcctaaccaatgatctagcaaaccaaaggaagatacaagcaacaacagactataaccagttatagtgaaggtcaatgggatagcctaacgagaggtgtcctttggtgttgcacgcgaatccatgcataaattagatgaat

SEQ ID NO: 150868 - DNA, 463 bp, Zea Mays
gtcgtcactttaaatgtttaggctatcatgttactcaccaaatagccattctgataggttaccgttgatgcacagctcatacacaagaaaacactcctcctgcccgtcacagtaacctcttaatgacacaaggttcgggtgcctgacatgtgacaggcttttaacttcccttaggaatgtttctgcatgctcattcttaacaatgtgcttcactgcaacaggccagccatttgtcagcactcctctgtataccttgcctggaaccacaagatgaaccagttgcacaccataaaggacaacatatacttgaacagttaggtttctaagtctcgtgttcttggatgaaaaatatactttctcttgatttatggtatagataccataactgtgaatcaggtattgtgaacacgtacctgcaataccctgtccaatgacgtttgatggactcaagttttcagttgct

SEQ ID NO: 150869 - DNA, 352 bp, Zea Mays
caatgaacacaagaagacagctaatgctaggacacaacactccttggagcacaggtggagcgacattcaaagggacactacgaagttttgtgctgcgtacgacaaagtgataaggttgaagcaaagtggcaaaagcgaagacgacaaggtatacgaattcgtatccttttcaaacatgttagttaccatgtaaacaacggtgggtttaatcaatctaaacttacaggtaaaagatgcactacagatgtttgaaggcatgcacaagaatcagtttaggtttatgaactgttggtacatgcttcgccgagaggtcaaatggacgacctggctctcaagttgtgaaactccacat

SEQ ID NO: 150870 - DNA, 1310 bp, Zea Mays
gcttctggaggtaccagtgcaagtcatttttgttgcaatatgaatttttttggggcgcaatccatgtaggcacgggctgaaatactctaaaccaaactaaccgaactgcaccaaatctttttggtgctcagtggttcttgcggtaggggaatcactaactatttggtttatggtgtggtgtttgatatggtttttgagtaattgagtctttgaagctgaatcaccgaaatcgtcgaatgtccgagcactagcaggcagcctactggctgtcagcccatcctctcacacaatgtcccagagcccatgttatgacttgtccaagattgtatctcctttctccatctccaatcagcatgactgcaaggcagtggccatgatgagtgcacaagcccccatggacacaataggggccaagatgagtgatgagcagatggccctagctcgctcgctactcttcacatccaggagtgtgcaggaggtcccgaggagtggtgggctgatggccacaatcggcacgctagcctctgcagtcgcacagtcagtttcagggccagtggacatctcccttgtttggaccacctagacaacaggcatgcaggcagccaaaggtaatctatgatgtcccagagcccatgttatcttagatgtcccagagcccatgttatgacttgtccaagattgcatctcctttctccatctccaatcagcatgactgcaaggcagtggccatgatgagtgcacaagcccacgtggacacaataggggccaagatgagtgatgagcagatggctctggctcgctcgctactctccacatccaggggtgtccaggaggtcccgaggagtggtgggctgatgacaacaatcggcacgctagcctctgcagtcgcacagtcaatttcagggccagtggacatctcccttgtttggaccacctagacaacaggcatgcaggcagccaaaggtaagcataccggcctgcatggtgagcttggtacctttcctgttcagctctcgaaggttcttctgatctgagtttggggtctcatacattttcttaccttaatttgcttaccacgtgttctttttgataaaaaattaccaccgcatcgcaataaccaaaagaaaagtgtggtttgtggtttttgtttttcttgcaacaacttcactttacaagttctgaaagctgaaatttttcatcaccgatgaaactgaacagaacaaaccaaacaaaccgaatacccagctctaattccaggcatccttgattcataatagctactcttttgcacttccatttaccatgagttt

SEQ ID NO: 150871 - DNA, 347 bp, Zea Mays
cggcgccgcatgacttcaactaggcagataccccatcaacaaaatcctatgatcatagacagatgagcagaagaaagataattcgccagtatgtacaacatagagcaaaagactgactcacctagagattggaaaggaacaacggtagacccagggcaggaggagctggggcatggcttgacgagggaaggtcagcaggaacaatctgaagagcactatctagggtgacctcaaccccactagcagacagcaggctccttgcatctagcttgccgacctctaaggcgacttgtccagttaaagctgtagaagcacgtgctgccgtcgctccatcggaccgaggtggg

SEQ ID NO: 150872 - DNA, 287 bp, Zea Mays
ttagggtttctaaccttgggatgaaaactgggatgttacagcgcccaaatcaacagaagggattgcaaggaaagtggacgtcgagctcacctcggttgggcgtggaagggccgacgacgcctgtctcagggtgatggcctcgacctcccactgcatcatcgtgaccgcgttgttgatgtctaaatagacgggggatcccaaggtggggtcccagggggtggcgcggaggaggcgccgaggcggttcgagacgtgaagcatgaggacatcgacgccaaccaccctgat

SEQ ID NO: 150873 - DNA, 1156 bp, Zea Mays
gcagagtggggagggcgtaagcaccagtcattcgacgggacagagaacaccggttggatgccgcgtgaccatcgggtggatgggcgagggtcgcggtggatggcgacaagattgtacactggctgctcgtcacgagagcgagtcatggcactaggccacacatgtcgttggtaaaggaagaggagggacgtccacaggattggatcaaagagggtgtcgaggtcggggcctcttgggggatgagacgacaaggggaaagacaatctcgtcaaacaccacgtggcgggatatgatcacgtggtgggtggtgagatcgaggcaccagtaccccctgtgatcaaaggagtatctgaggaaaagacgagtggagcagggcgctagcttatggggaacagtggcgaaaatgttgggatagcaggcacaaccgaagacgcgaaggtgctcgtaggagaggttgtgacgaagagggcaaagaagggagtggggtgggcgggtggttgactgccttggagggaagacggttgaggtaggtggcagtgtttagcgcctcaacccggtatcgagtaggaagggaagcctgaaacaggaggcgacacagcatgttggtggtgatatgaatcatgtgctctgtccagcctttctgaggggaggtgtagggacacaagagccgcagttgaacactgtgacggagagaggaaggaatggaggagtcgccaaactcgtgaccgttatcacactggacaacacgaacgttgcgatcgaactgggtggagacccaagacaagaagtgcgagaacgtggtgaacgtatcggactttaaacgcaaagggaaagtccaaagaaaatgagagaaatcatccaaaatcagcaagtaatacttataccccgagatgttgaaaataggtgacgtccacatatcacagtgtacaagatcaaaagcctaagaagccatagaggaggaactatgcgaagggaagacgaacatgtcgacctaactgataggcatgatacagactatcaaaattgtccttgccatagcatataggagatgacagagctgctagatagcttggacatgacatcggacccaggatgaccgagacaatgataccaggtgatggacgaagtagtagcagtcaaggcaagagaagaggac

SEQ ID NO: 150874 - DNA, 2550 bp, Zea Mays
tatctgcttcttcagtcatactacttgacgaagaataacttattatttaatgaagttaaaaccactacgggttaatatgccacacactgaatagtaagtatttccttattttaaataacattctttccgtataactggcttgaacaactgacggatagaaaacatttaatattcaacaataaaataccattgtgtcattgtgtggctggattggattgctctgcggctgcgacaaaaagtggaaccaaccatcattgcatgcatgcagatgcttgatgcttttggtcatgactcatgagagagaatggtcaatggtgtgtgtatggctgtgcacatgcagatgcacttagtctgttggacgcggggacctgaattaaccggttggctgttgtgtgtgtgcgagtcaagcgtttgaagtgttggcagggagctcggcgccatgatctacggcgccgagctcggacatgtaggcgccagcaaagcataaggggtccagggcattcagtatcttggcgccataagtcatggtgtcgtgacgtgttacctcgacgccatgacctatggcgccggcaaatggtctaaaaacgacattaagtcgttcaggggtccaaacgtgaatttgtttcagaaaagggccaacttgtaaaaagttcggcaaaatgtccaggtctgtggccctgtcgtgtttcgggtctcctcgggttcgagtctgggtctagggctttcccagtaatataattcatgttttcgtcgggtctttaattcgagttttgggggcgggtctgcggacgctgcacctgactcgaacccacaccattgccaactctagaaagtgactaaggcttctgccaaaagtcacgatatgccgtttgaccaaggccgtgaggcgaaggaaaccataaaaaaaaccaagcaaactagaaaatgcgtgaatcaacgaacacgtaaactaccccataacatcagaagggatttgccaaaaaaaagtttaagaaacgtttgaaatcatttcgaatttatgtctcaagaactcacggttgtcttaaatcttatgcttgttcaaatattgtagacttcaatgtacttaaaggaagcgcaaaattctagtaacaagctgacgtgcccttactaaatttggttggagaaggatccttaatggcctctaggtaagggttgacttttggggcaacacctcacttttgattgaggtagtcttggctctcaaagataagagaatgtcttttgtggcatcttttgcgccaatgaaacaacattcataacatccatagagctccggattctctgaacattcaactgatctttcatcttctcaataaacttcttaaacttcatcgtgtgcatgtgctccatccgcatcatcctcgtcaccatctacttcctctttggcctctttctccactgggtctgcttctttttctttattatctgttcgctccttgatttcttcatcttcttcgatttctctgtcttctttatctacttcaggatatcaatcctctgataggtaagtaaaaaaagatgagagccttcatctcctcccctctctgcaaattcatgcaatttcttacattgctcccttctcccttatcgttttctcgaccgcttgctgcctgctttaagcctttcagagaatttcattctattataacagtcgtctgaatcctcaatcattggaggattctcctcatctacacctttagtacaagcatctcgtagaataatcctgatctctctgaaaactgctattgatgttcttacgttaacaccttcaagatcttctatccatggagtagctaacccagcaagtatgtttttatatttttcatgctctttttttcaataatacccatattctcggacccagaatgagttttttctatttagaactgacccggatgagttttcgactatgacatccaatgtaggctggtcagaagtcaaaaatgatctgcaaactgcattgtagacacattggatacgtgctgtctcagaaatatgaactacgaagattccaatagcacgtttgatatccctggacttttttcttggcaattgtatagactctcaaacgaatctcttagagcatcagggcccatcctagtttgcccaacgtccgtatctggattgagaaacctatagttctctgcaatatatatatatatatatatatatatataacaatgacatcttatagcatttaactttctatttcaaatgttccatacattccacccctccaacccttaaaatacaggtttcttcccgccagtaacaaagtaatatatcgctgcttatactcaatggtaagaaaaaatgttccacccgctggagtggtatagatcatgcgatcaggatcacaaatttttgatatgtcaaaatgtaagccatattttagccatcatgcacggatgacctcaatcccacacccaacattttttagagaatgattttcagttccatcatcagatttatctaagtatatggtggcttttttactcacttctatatccttgatgatctgaatcgatc

SEQ ID NO: 150875 - DNA, 472 bp, Zea Mays
attaccttgtgttgtttaaagttcctcaagttgctagttaccaccatcgtattcatattgtgtcattgcatttgatctcaacaccctattagtgttataaaaaaacaaaaaaaagaagaagagaaagaagtaaaaaaaaattgaaaaaaattgtgaaaggggattgtgttgcagtgtgttgctgaaaatttcagtttacattgatttggtgagaatctttccagcaacaatttcatatcttttagcacgtcaacacacttggttacgtcaacacacttggttgacagtaccaaaacccaccttgatcagcctcctatagctccactaaaaacctgaaccaggacgtttgacttgtgatcctttcgaccgctctaccacctctgtcgaagctgtcacaccggcaccatcacagtcctagagatcaggaaagagcttgggtaagtaagaggtgagatcgagtgttccacaaata

SEQ ID NO: 150876 - DNA, 459 bp, Zea Mays
gggataacaaacacgggccaacatgtgtacggggcagcgctcatttcatagggattgaacccatctatggccagcacaacacgtacattacgagcctctttggctttctcacggtgaatggcatcaaagtgtttccatgcttcaccatcggatgcgtgcaccatcttgtcaggattgtatcgttttccatttttgtgccatgtcatctgttttgcggattcctctgtcatgtatagacgctggatccttggtatgaacggaaggtgccgtaggattgtcaaggaggtgtcgagctgcctcttctgtccatcaccagagtctacatccatgaacctagaagatttacacttgggacaatactttgcctccacatattctttcctaaatagcacgcagcccttcggacaagcatgaatctgctcatacgtcatcttgagtgcatgaaggagtttctgtgcc

SEQ ID NO: 150877 - DNA, 306 bp, Zea Mays
atgttccaacagtgatgggccagattcagcccagcggcccagttccagggaggaaaggcgcccgcgcgccctggcggttttgcgcagagaccctcgcgtctttgtctaacagcgaacgagccctttcactattttgaggagtcactgacacttcacaaaaagaccctccggtttctatctattcacgatttgaagtccacgacgccgttcgtgcgtggccgtgctccggcgagcatctacgccggccgattagggcaacggcagggtcctccgaacagcgggcacgaaattaacactaccccgacc

SEQ ID NO: 150878 - DNA, 2058 bp, Zea Mays
actattgtaattatagaaagactaaatatggtagtcagcccttgatggtaggctgtccttgattgtaggcttgtacgcctgtgcgattggctgtgagccacctgacctcatacattgtcgtggaatagattgatttattctcacaattactctttcaaaagcaaacttcaggaaggtaatctcaccgcgagtttgggcacctgctgagctgtccacgttaagcaatgggtcagcggcggcgtgggaaatccggtgagaaatctccccaatcccagtactctattccatatcccgacctgagctacacgttgaggataccaaggcgaatcggtttaggaagctctcaccgtaagatgccatagaacactcgacatcgatgtgaggtggatctgcggcgatggtcatgttcaacggcgagcaattgctgcccctccggtgcacgtgcacttggtggctcctcagacatgatcggcgctcacaggcgtggaggcgaagaacgacgatggtggatcctcgtgcactctccggcttcgacctgctccccctccctcaccggctcgccgctaatggctatggactcctcggcatgggcacaaatgaatgaggggttggtggaggctagttgtttatagtccgaagacaaggtccaggcattccacagggccgattacaccgccaccgaacggaatccaaggtaggcggggcggctgcatcgtcgacattctcggccggggtcgttgagacaggaaacttggctatcgagccccacctgccagcgacagtactaaggagcatgtcgcaaagcgaggctgaccggtgggccagtggtgcacgcagtctttgccacgggcgcgggcgtggagagcgctcgcagatgaccaactgacagggtgaccccagcaggcggcgccgggctccatcccccactgggctacgcgcggcattggtgtagtcggccaaaaacagggatggtccgaccaatatccttgttctttttccttttcttttcttttttctatctatatatatactacttaagactccactgtaggcgttcatagtccgtgcgccatgttctgcctcctcccaccgctcgtccgtgccgcagctcccgtcgccgcaatccgtgcctccgccgccgcaatccgtgcccgcaatcccctcccgtcgtcgcagcaacccacactagctctcctgccctcgccaccgcccctgcgcgcccaccatggcacacacggagaaaggaaaaaaacatgcccctcccgatgtcgagtgggcctccatggagacgacacccagatccgaccattgagtccctcgacgccgctgcttactcctccatcgccgtggtgacctcctcgggctcgatggcgctgccatcatcttactcctccgtcacccgtggctagcgcgtgggtttgattcccgacattttcttgcgaattcgggagtgatttggggcccctatatggcgaggatttgagtggatttgagaggaacaagtggaggtcggcgacatggccatcacaagcctcctggtcctggacccctacttccgagggaagaagccgaggggagactacgggacggcgagcgtagaaggcaggctagacgacggtgctgccatcacgggcctcttactcctgtacccatacttctaggggaagaagccagtggccgagagacaacagaccgcgtgaggcagcgacagtacgaggcacgccacctagcctgcagagaggtaaatattatttcaccttaagcaccagtctggtggcaattcgtttaactcatctgtattcattccttagttttgctgtggaaaaatctccaactttgcgttcgtctgaaatatcggcagcaccatttgtgggcacctggatactaggcaaagttatctggattcttcacaggcatgggctaggaagggcatcagtttgtcccatgctcccatggttggaataaataaataatggtaccacctgtaaacgaacggggataacattttcttagtttaaagttcaacagattttcctttgttacctgatgtaagtgcat

SEQ ID NO: 150879 - DNA, 375 bp, Zea Mays
tctacagcaagaagaacggccaagtattctttttcatatgctgacagacccaaatgtgccggccccaaggctttactgacaaatgctaagggatggccatcctgttgaagcactgcaccaataccacttcccgacgcatcagtctcaatggcaaatggtctatgaaagttgggcaaagccaaaaatggtgccgaggatagagcctgtttgatagcttgaaaggcagaatcttgcacattggtccacacaaacaccacatgtttcttaagcaaattggtcagtggcttagccaagatgccaaaattcttaacaaatttcctatagtagccggcaagacccaagaatcccctcagctctttgcatgtagtaggaata

SEQ ID NO: 150880 - DNA, 330 bp, Zea Mays
ggaaccacatgaccgaggtaaccattcaaagctgtcctttgtgcacatctgggaatcaaatctccccactcttccacaaaggttgctgcggaattccgttaggccgtatcgtttctggtcagttgtccatgctatacccggccagccaagtctgttacgatgttactgttcatgtggtcctgcgtcttgaccacgcgcgacatatgtaactagtccttgtgcacattgctggctgcaggctcgggttttctcttttaagctggagctgtggagcatggcagctgctgcacaagatggacggacggacggaccacacaagaatccaatcca

SEQ ID NO: 150881 - DNA, 1010 bp, Zea Mays
tagacatttgcggagttgagacacatggaacacattgtgaatatctgacatggattctggtagttcaagacggtatgccacaggtcctattcgggaaatgacagggtaaggaccgacgaaacggggtgctagctttcctttcatttggaaccttttgacaccacacatcggggaaaccttgagataaacaaaatctcctacctcaaatctgagctcccttcgcctattgtctgcgtaactcttctgtcgactctgagcttcaagtaaccttctgcggatcaaggcaactttttcttcggcttccttaaacaaaagtcgggtccttctaatgttctttcccctacattggaccacattaggggagtctggcattttcttccatacagtgcttcgaaaggtgacattttgatgctggcctgatagctgttgttgtatgagaactcggcgtatggtaaactagactcccaatctctgttgaaggctaaaacgcaggctttgagtaaatcttcaaggaccttgttgactctttccgtttgaccatctgactgggggtgataagcagtgctgaaatccagcttggtgcccaatgcttgctgaaggcccttccaaaattttgaagtgaactgcgttcctctatctgatactatcttccgtggaatgccatgcagcctgactatctccttaaggtataatcgggcgagggctgctcctccaaaagtggtctttactggaatgaaatgggccaccttggtgagacggtcgatgattacccatatggagtcatttcctctttgtgatctgggcagtctggtgacgaaatccatgcctatttcttcccacttccattcgggtattgggaggggttgaagcaggcctgcaggcttctgatgttcggtctttgttcgctggcaggtgtcacatcgggccacatactgtgctatctcccttttcatccctttctaccaatacctggtcttaaggtctaagtacatcttggtggtccctgggtg

SEQ ID NO: 150882 - DNA, 330 bp, Zea Mays
ggagtgtacttgggggtatcatgagagcgtaccttcttctattttgtcatgaagcaagtatgatgctcgttgggaagagggagtacttgttgaaggcagaggcaacaaatccctcatcatcggagtcaaaagaagagcagttcgagccccattcctcatcgatatgcgccttgcccttcttcttatagaacttctccttccatttcttgtcttggtcttggtcattttcattataaggacattgggcaataaaatgactggacttaccacacatgaagcatgaatgatttcccattaatttattcttgttgggttagtccttgcgtccct

SEQ ID NO: 150883 - DNA, 282 bp, Zea Mays
caatctacgcacatacgccacatccatctttctttggaacgagtaaaacaggaaccgagtaagggctaagagactcatgaatgtatcctttatcaagcagcgtctgcacctgtcgctggatctccttcgtctcatctggatttgtacagtacggggcgcggttcgaaagagaagctccggggatgagatcgatctatgctcaatgccacggagcggtggaagactcggtcgtaagtccgtgggaaagacatcaacatactcttgcaaaaggttaacaacagc

SEQ ID NO: 150884 - DNA, 1397 bp, Zea Mays
tttcatcatgctggattccaattgtgcattttatttgagatagaaaattcaaactcaaatttaaaagataattcaattggaaataaaaacagaaaagaaaaagaataaagaaaaggaacattacctgcgctttgggccaattcttttgtcggcccaacttcctaccccgtcacagcccaactaacctaaaccctagacccatcagcgccgtcggctccgctgcagccgccaaacctgttgtaccgacgcgtgggccccaaccgtcatctggacatcgcgcacgccaaatccacctgctggcgctggtgcgtggggccctccggtcaactacttcttctcccctgtaaccgaacgtgctcagctacgcaagcgcgcgggcgaaaccacctccgcgtagcccaattagactccgcgcttccactgtgctactgtcgccgccaggtggggccggatcgctgactcgtcgtcttcagcggattcggttcacctgttgcacgaaaccagggcaagatccgatctctccgccctcccatccggactccctcacaaaaccttgatctgggccgctataaatggtgaccgcgacctcctcttctacttcaccgcgcatggcacccagccaaatccaccgcgaggaagcagagggatcaagcagagtgcagaacgccgctaccgaggacctgtgtatgcatcgtcagtcgagggtcatcgaaggaacgtggagattctttaggtgtcaaggaacgtgatggcggggtgctccgcgcggagtggtgctcttcctgggcaaccttggtattcggaggcgtcagaattcctcgccgacgttgcccaacaccattgctccacccctcaccgtgattgggatcctctactgcacgacgtccggtaagaccgcgcctatatgattcgcgtaactgtatgctatgagtagacgatctagggatggtcgtggggccctatagcgaagaaccgacgggctcgccggtgctttctgcaaccgtgagctatgcgccaccgcctgggttttgtctgagggtagaagaacgtttgtggaccgtggatccatacgtggtcggccaagattagagtagagaaaatcgtttgtgcgccgtcgatcccgtgttggacggccatgatcgtgtgtagcgtaccccttcgtcaaataaatctgagccgtaggatggtagttcgatgaccgagattagatcccatcctcatgaaaccctagccgcaggattttaatcggatgccccacgttgggtaccggttcggagtgaatcgggtctattccgcatcgtccatttgcgattgtgcggcccagatttgatcataccccttcgtgggtatgttttactaaagagcccctgtagttttacggaattaacccgccgtcc

SEQ ID NO: 150885 - DNA, 463 bp, Zea Mays
tagcaagaatgtcgaacgttccatgagcttggagatagaatgggaacccttgatccgaacccctgagtagcagtaacttggacttcgcgacaacgtcatatcaacagcgtcaaaggcattgcagaggcattatggtcctttaatgtggtaacaagtggacatgtgcaattccaagcattggctctgaatattcctagcaacaagaaaagttgcaatgcatactgtaacgaagcacctgtggtactgtagctgcaatccactttgaacaggctgcctcgatcaattgccaaccaaggatgctttgtcagaatgttggccacgaccagtgatttaatccatcgcaccaaggttgcataacagtaaaaagatggccacgccataggtctaacttgaacaccatcaccaagtagcataaattgcatgggtggtggccatggttgcttgtacggcacgacatcccaac

SEQ ID NO: 150886 - DNA, 371 bp, Zea Mays
gtatttcaatatgtgtcatgctcgagcaagaaatatcatagagagggcttttggaaggcttaaagggcgatgggcgattcttagacccccttctgctgctccgtttacagtacagtacttttctgctccgtttacagtacagtacagtacaatctgctccccagttataatctagtaatgcacgcgtgaccgaccccttcagttcttagtgagatttttttacagcccttgctttcattttttgttctttggttccttacagcccttcagtgtcttggaagtatgctatatgtatatgtatttccaaggctggtttattttcccctaaactaatctgtcagcgtcacattatcgtcaatagtaaaccaaac

SEQ ID NO: 150887 - DNA, 360 bp, Zea Mays
ggaaaataatgtgtttccaaacagactctaatgtattaaatctgggggccaaatctatagttttggtggatcagatccacggtagagcgagctggtagcattttggaggaaaaattgaacctatatctatatttttttaatctagagttgacgaaactctatccgtctgatttggtttggtttgccaggtgcgaggctcaccatctgctagtcctgctccccccgatcgatcgagaaatccgtgcttgaacagagtaaaacgattcaggagcagctgaaactgcagcgagcagtctgtgttttccaggtccagctagcgccatggtgccccccttcgggcgtggaaagcagtgccgcaag

SEQ ID NO: 150888 - DNA, 430 bp, Zea Mays
attcaggccgcttcttcgtccagctctccctgatacacccacggtcaccaccgccgtgcaccagagacgatcaccgacccgatctacagctctccgcggcccagacgcccagatggtcgtgcggccgcccaatctctctctgcctctgctctgtacgcacacacgacacggggactacttgctttgacttggcgtatccacaggggagcgatagggctcgagttttatgcgccccgccagtgaagtccgggtccgcgattcctggcggctccaccggcttccgttgctacagactgagcaagaagacggagtcagaggcgctggggtagactttgctgcagcgattcgcggttcaggtagttggtccgagcggaaaccacggaggtgaatcaccggccagagtgccccacacggcatggattacttaccc

SEQ ID NO: 150889 - DNA, 279 bp, Zea Mays
cagacacccatcgacgatggatggtggcagggctgtcctcaccaagcccagcaagcaattgccaccgattcttggccaccaaagctcaacgataaccatcgacacgctcctcaagagaatgcgaagctccctgaccccatgtttcagctcgagcgatgacgttccccagtttccctcgcggcggcaactcttcttccgcactgatcccctcggttctcggtgacgaggcatgacgcgatcttggggcgcccatgttggtagggggctagaggcctcagg

SEQ ID NO: 150890 - DNA, 433 bp, Zea Mays
gttagcaaggcccttttagcagtagaataaagaggctaaaggccttttaggttaatctgtaataggaggttatttataccttaattgcaataaaatgagaacaggctgtgatcaacatattgttgatcagccgccgtcctgccctaatttcttctcccctgctgtcttctcccagaccgtgagaaccacgtcctcctctcatcgccaaccgctcaaggagcggccatctaccacacacagctacaacctaaggagaagagggcataccaatctggtatcggagatgccgggcaacgacgacaacactgccagcgaagtcgcatctgctgcggcgccaaacaccactagcgcagccctggagcataagatggacaccatgatgaaggcccttgtagatctcgccaccaaggtgtccaatctggcgctgcatgtg

SEQ ID NO: 150891 - DNA, 752 bp, Zea Mays
acaagtctaggagctttagatgttagctcaaacaatttcactggttccttggacctttcacatttttggagacttcatgagctcaccatgttggatctttccaacaattggttgcatgtcatggatgcagatgacgataatctagtggatatcagctacctttcagaacttcaagatataaggctcgcatcttgcaatgtaattcgatttccaagatttctgaggcaagttaaatctatttcatatttggatctttcaaggaataaaatcgatggcaatgtaccaaattggttgtgggacaagttatggagctttgcaccatatttgaatctttcacataacatgttcacgggcatgcaacttatcaattcatatattctccctttcagtacatctatggaagtgcttgatcttagtttcaatagattttctgggcgggtccctatgccaagctcatcaggagaagtcttggaatattccaacaatatgttctcttcccttgtgccaaactggactttgtatcttagggacactatttattttagcatatccaaaaataatataaacgatcaactacctccctcaatatgtgatgcaattctggacgttcttgatctatcaaacaacaacttttatggcccaattccatcttgtatcatagaaaatatgacacacacaattttgaacttgaggggcaacaattttaatgggacattgcctaccgacataatgaccacatgtgatctacaggt

SEQ ID NO: 150892 - DNA, 647 bp, Zea Mays
ttgaccgaggcccaacaatttagggttgcccggagcccaacagttcattaagcacacccaactcagtgaaaggcccaatcgctccaaaagactagtccaatggggaagggtggctctcccttttaaagtggcttcctcctcccaagttaagcgaggtgggataaatctgaggctcacacggtcaccgtccgactacaattgggccaactgggccaattgcgtctttgccaacgggtaatagtggaggatgtcctcatcattcccaccttcttaaaatgggccctagctctgataccagatgatacacccagcccaggtggggttggccgaggcccaacaaattagggttgccctgagcccaacagttcattaagcacacccaactcagggaaaaggcccaatcaccccaaaagactagtccaatggggaagggtggctctcccttctaaagtggcttcctcctcccaagttaagcgaggtgggataaatctgaggctcacacggtcaccgtccgactacaattgggccaactgggccaattgcgtctttgccaacgggtaatagtggaggatgtcctcatcagttttgctaaacctaacccgaggtccttctcccaattaaacagtacccacggcggaggaaagggc

SEQ ID NO: 150893 - DNA, 357 bp, Zea Mays
tgagttgcgattatgcagatgtaaatgtttacgctattcattgtatacattttttcagcagaggcttaatgtgagatgcaatccccaagacgtattagtaagcatccagatattaaatgatagacagcgccaagctattgcacggagggggttctccagtattcttgatatgagagttgacgcactcggcagtagatctcatttagcttggctgatggaaaagcttgaccataatgacatgacaattcgagccggcccagggaaggagctcaaaattacaaaggatacggtgcactttattttggggttaccaaatgctggtggagggacgacattgggcattgatgaagctgttgc

SEQ ID NO: 150894 - DNA, 283 bp, Zea Mays
ggcgcaattgcttccggatcgccggtccaggaagtcgggaatctttttctccatggtggtggagggtgaggctgccttgcgggtgcaggacatccaggtggtgtgtgactttgctgacgtgtttccggcagagcttccaggcattcctctggagcgcgatgcagcttttgagattaagctgattctgggtacgcagcccattcataaggctccgtatcgaatggccccaaaggagcaggttgaattgaagcgacaattggatgatttgctggctaagggtttc

SEQ ID NO: 150895 - DNA, 3643 bp, Zea Mays
ttcaattatttcattgtttgtttgtgcagataatctggcaagtaacagggggcaattgaatatgcaaagagatgagacactggacctgccagtggtcacatgtgccaactttacatcatggtggtatggcacccaataccctttccttgcaattgttaatttgttatctctgtaaggttaggaggcactggaggcagcgcttttagcttattgcagtccttgatcacgacattctgtagattcctcattgtctggtcactccataaccactcattgagttctggcatgtcatcaagcaccagctcttctagtgattggaatggcttcatttggctgccactgccatatgcctctgggcctatctgtctcaacattttcaaatgctgcaaccagattgttcggatggagggaagctgaccaagtggtggaagctgctcccatgcatttcagccacttaggaaaataagctcaagattgcttaaccattcatttttaagccaattaggggatttgactcccatccaacccacgatgtctagtctcttcagattttcgtgcggttggagagcttctagcacatcctcttccttatttccatttacctcatctcgatcagatgcccacattagctgcagcacagagagctggcgtttcttgcaaagcattgcttcctttgcctcaattggagcttcgacattctcaaggtttctgatctgtagggatccttggagttctagtaggtacccaagctgaactatactttgtgttttctctctggtaaccttgaaagttggcaacctctgaaggcatttcagcctgccaatgtctgttatagctgaaataatctgattagctgctgtgagattccgtagattgaccaagttgttcattctggaaggcaattttccaagcctacaacctgataaattcaaaacctgtaggtggtagagtttgcacaagaattctggtactgttgcaatggtagtagatgagatatttaggtagcgaagatgcacacaatttgatatgctatcaggaaatcgtcccatcatgcacaggataaatccaacacacggaggcttcttatgttattgagagccactggagggatggagacattaattggagccactgttctgctagtaaggaaaatgagagtgcgtagattcttgtatgggattgtgtcatcaagtgctgaaagtctatctagatgtactgatagatgacgcactgacgatgggattcttgtcctttcatcacctcctattctgaagcattcttcagctgccactgattttgcgagctcataaattacaggtggcatcacataatagctgacaaattctttcttctgtatcgtgaagaatgacttattacatagatcatttatgtattctttcccaatgtcctccaatctcctgcaaccatctgggtgcacaaaaccttgtgctaaccacagcagaatcagctgctcagcttcaaattcccagtttctgggggaagatgctgcaatatgcaaagcattgtttcagctgtggtggtagattgtcatagctcgttcgtagaattggcatgatttcctcccatactgcatttctctgcaagacttgtttccactcatctacactgttgttacgtttcaggtgtccagctaccacctttgcggcaagaggaaggccactgagtgtctcagcaattttccttccaatgttctccagttttgagtcgatggtatgttttgtctcatcaaacacataagtctttatcagggaccaacaatcattaacttgcaaggtctccagattaattatagaggatgattgtagcatctctgctactatacttgaccgagttgtcaaaagtatcttgctcccctttgctccgtccttcagaggggctagcagcttctgccagttctcttgttctattgctattgttttgttgtcactgttccaaacgtcatctaaggcaaggaggaaacgttttgaagcaagccttgccttcaaggcgacttgaagtctattgaaatttgctatgccaccatgcctaaaccgactgctggaagctgactccagcatttcttttgtgattctcaactcgtccaagagagaagtaacacaaatccacatcctcacatcaaagctctctgttattctagcgttgctgtacacatgctgtgctagagcagtcttacctatgccacctacaccaacaaacaatagagacaacagaaactgggttctcgacctgagaacttatcagagcagttaccagctgttgggcttcgaagtcccgcccggtgattctcccgtagggtattgagcttgtcatggcgttgcgattgctgcttccgatgttcctgggtagactgagtacttcacttactccacttgtaacctgctcaatacgctccaacagatttaccatcttattctttacccttgctgatctatcccaacatggttcaaggctagaagcagcgacaccttggctgtgaaaccgggagagcatgaaggcactgattgggctactgctctcgtttgcacttgattcttctacctcatggtggagacggttgtactcaagcttgtctaggaggtcctctgcatcatacataacatctcggagctctcgcatccatggaagggagctgtaggagagtgcgggtaccagctcggcaccatggagaactgactgcgtgcgaagcaaagcaacacgaagcctgtccagctcatgctcgatgccacagtcggccgcccattgccggagctggtaggacaagtatttgtcgaagataacctggatgaaccagccacctatagccaagtaactggagatatccatattgccaattactgagattgatatcctttcttaagacctatagtctctcatatactggtggacaccaggtcaaagtcttccaagtctttgaaggatcttctgcaccatatgttaatggggctacctttagttttgaaagggacacatttgtcagctttattcatatgctggttcctttatgaaccttaatgcacccttttcaactgacccacattacctgtggttagagacttaaatttctaatcctagactttgtttggatctcaggtaaggagcctctgatacacagaaagcatggagcatctgacatcctttggctggattcgtggagtacagtttgtaggagttttggtatgaagaataagtctagatgttttgggtcgagtttcttcgcatcagtttacaggagattccaatcctctctgggttagctaggcccatttggggccactcgtcattttgttgtcagagatcctgctgcctttgttttatccaaatacacatgcagggctggtttagatattggagagcgcgcagtattggttgtcttcagttttgaaactttgatcgctaaaaatggtagaggggtgattgggtgaaaacgagctgatgcgaacggacaacctatatcctatccttgtgtatttcaattggatttgagttaggatacggatagttagaaacctgacaaatatgaatacaaggatcagatatatacaaatattatttggccggacatatgcagatattagatacttgtataataatgtatgaattgctcatcatttaatataatccg

SEQ ID NO: 150896 - DNA, 322 bp, Zea Mays
gatttgagctccccgagttctgctgattggtggacttattctgcctcggatatgggcagtctttgataaaatgaccaaacttcccacagttgaagcagccagttgaggaactagggatggcggggaaatgagcaccaggggcactcggctgatttgtagaagtgggggcagtggcagggcgaatgaaaacaggctgtttgaatggataggagggtggacgagacgaagaacgattttgattgaaaggtcggattaccaaccttgttcgcttctcaggtccctgattggatctgtcacctccaaatcccttggattttccttg

SEQ ID NO: 150897 - DNA, 462 bp, Zea Mays
gcttcttcttcttgctgctgcagaattcttacagagtgaattgtgagcctgactgcctgagaggctgagacgtgatgtacagaactgcccgctcttgcttcttccccgattagagctggacgaaacgaaacgttgtagcttactggttactgcttgaggggttgacctgatgaatcagctcatgagttcttgtttttgtggtagtagccttgtcagaggattttggctatccgtctgtctagttggcagttgcgattttaggagagccgaggttcagtcaataactgaactgaagcctatggcttcgcagcttcatgcacagaagagcactttggactggaaattgtggcttagtgaaaaatagaatgctcaagttgggcttgagaggaaagaatgtatcttggtccgaatttaagttcattcgtgtgcttcagacttttggtttattggcaacacaattcc

SEQ ID NO: 150898 - DNA, 763 bp, Zea Mays
ctatatcactggctcgtcgccggtgagtccgccacggtgaaagccactaatcgtttgcgccagtgcccctcctcctctccggccgccgcgcgtctccatcaaattcactagtcaccgctcaagcacgctataaattgagcactccctcggctccgttaggtaatccagcatccaatccaaccgcttgtgccctcaattactcaacagagcccacgaattgctcttttcccccaaaccggtttccgccacgtgaaagaaccctcgccatggctagcttgttctaggtctattcatactctctgctcttccattttagtgtccttaggttctcctaatgctactcgacccatttaattgaactagactgccctagatcaccgagaacatgtttgttcatctgttgttagcgctgtctccgtggactggacgatttagagttctgctagtgaaattgattgaggggaaacgctagataggtgttgaattacgtatcagccaaattagaacaccagtccttaaatatcatggccggtatgagttcaccggagctcagttctccgccgtgcgacgtcggggacctcgggtcgtaaagaattagaacttggagggcttcggtgtaaatgtcagcgactgaagcaacagtgtcgtgggctctttcagattcttttcaaagctagggtcctcagtacaaaaccgccacacaggcgcgctcgcgtgggcgcgtctgccttagctgggccggctcgggccagatttagcccat

SEQ ID NO: 150899 - DNA, 432 bp, Zea Mays
tcctcactaggacacacacccggcggcgccgtacacccggctcgacagagcgccatcgccggcaactcccaaatcggtgcccgaacgcataatacacgaattaaataggtgctacgcagggagaaggtaagtgcaaacgctagggacgatctcttaccggctaatgatgcgctaaaattcccgtccgcggtgacccgtggatctacgacggtgatggagctacggtgagtaatttctgctccacccgttgcccatagctctaggaaccgaagctcgcgcatcaggtactcctcgccgacctccccgaagcgccctggtcaagctccgcggtcaccaaccggaatcgcacgatgcagatggtccaaaatatctccctcacggtgacgagcacactgttgtatcaatggtcaccagccctagcatgcatttgcg

SEQ ID NO: 150900 - DNA, 811 bp, Zea Mays
gtgaaaagaccctataaaggaaaaagagcgcaacctagctctaagatagatagttcaatgtcttagtttaggtacatcatatgaaattaggaataagaaatgcaagactgcgtagcctaggcctgaggggccatcaagattaagtccttcaaatgcatcttcaaggtctttcatatgtacagtagcatctcaaccatttctggtgccaggtggtcagtcaagagtcagagcactggctccatagggtggagttagagatggcgcatgttggttcctcacggtcgataaagaaattaagaaataaattgagacttaaaagataataacaaagcaaaatcgagactttgcttgtcatagtagagccagagcataggttatgttggcatgagagtagagatggaggaccacgagtctacagtggatgcgtcacagatggagtgaatactagagagggagacaacttctagatttatggtggagagctagagcctgaaggggattgcctcaatgattgttggaggagggtggcggttgaatgcgatggtggctattggagtcggatcatggaacttgcatgacttgcgagagccgagtgagaggagcacgagggtagggttggataggggatcagtcggggcacgacacatgccgatcaaccgaggcatggcacatgcctcccttgttatatactctaactagtacaaagcctgtgcgttgtgatgacacaccaatcatatttgatggtataatggtgcaacgactgtacgacacacaagggcccaatgttgagatgacgcacactagttcctca

SEQ ID NO: 150901 - DNA, 418 bp, Zea Mays
gagcatgcatggtctcgttctacgacggagcatattctgagaaactcatgttggataacagatgttcatcacaattcagggtgtgggagagattctgcatccttttgggtgcgtgcttggtgtttaaacacggaaagggtgtgcagaaaattggatttgcatatccttgagcctggagatgctatccatgagaagagatgcttaacatataagattgatatctcatgtcgcccagttgatctccattcggtggcctcagctactccacctccacctctggcgcccttccgggaatcggaggatgatcaggatcgccatgagcaggatccacatcttcgtcgtcgcggtgatgctggggttgatggggattcacggagacctatccaattccgcctgggaccgcgactccccttgggca

SEQ ID NO: 150902 - DNA, 444 bp, Zea Mays
ggttgctgctgtcccgggggtcccactccacagaggtcacgggtgcatggagtgtgcggagacggacacccaggaggtcgacccgaggaatcccgcaatggtgacccgattccccacggcgccgcgtatctcggattgctctattgcgagggagaagatcgatagcgccgttgccgcagagactgacaagttaaccccacaggccataggctcagcgcgtttgagcggacaagtaaccacggccccgtggtgactgcccagctggagggaacgcaataatgggccgcgagaaagggaattcggcccagggtaaggtttgttattttctattttcatttgttttattttgaatttcctttggtaattccaaacctgatattggaactaaaatttgatttgtagatttatcacatattatattgctcaattaaaagtatcaatttt

SEQ ID NO: 150903 - DNA, 649 bp, Zea Mays
cctcgctaggcgtatcctcttctccatccataacagccatggccaaactccatggccagtcccccgctcgcatgcaccgatttgagctccatggctcaaccgcccatgcagagtcgtcgggttctgttacaaccacccgttctcccagctggccgccaggtgcggactccatgggccatataaagtcgtgcccgggtctcctgttgtgtggtgagtggaagccgagggccgccgcggttgcaagaactgggctgtggtgcacgccgaagcgaaccatgggctaatagagcgaaggtagtgcttggagttcgaaggaaagtttgccagagttcacgtctcgtggggaacttcactgtgtcgacgatggccagcctcgtcgttgattgtgtcgatggccagcctcgtcgttgattgagcatcgcggccaagtctgttgtgaccgggattcttcaacacgttccacctcgaggtatggatccaaatgctagcagcagcatctctcaactacttccgcgtgatgcgatggtgctgggtacgtagatgtgcttccgctctctgctgcatgccgttgtaggccatcctattgcctctcacgccctgaaaccgggtctccggctaaccacctagcttgcggacaaactctcgccga

SEQ ID NO: 150904 - DNA, 508 bp, Zea Mays
atcatcttccttgccaccgctaatggttctccggccatcccttcctcggtgagaaatccctgcctccttccttgatttctccacatttagtcgtaaccggtgtgcagagttcctctgcaatgacctctgctcatagctatggtggccaatttccgcccctctcctcgttggatcataagaaagacgatctaatcaataatcccagggtcagatttcgccataccctaatttctccctccagtttcccttccctttcctctctagtcttctatgggtcttcttccttgtgttcttgtgtcccatggatgtggctgagtgaaaccctataagcacgatctccatgtgcgcacccctccctctctacctcccatgcgcccctactggacggtcgtacaggcccatggcacccacgccccccagctcatcccccttcattacgccccatggccccttattgccacccaacgccatgtccggtgcccctgctccacccgctagcgggccccat

SEQ ID NO: 150905 - DNA, 664 bp, Zea Mays
ttcttcgcggtggcggagaccagtttgggggaaacaagaaattctcgagctctggcgaacgatcgtggttaattagcggtggctggatacttcactgccttacggagctcgtggcggggtcaatttatacccttagtgagcggtgggcgtgaatttgggcgagacgcgcggcggtcagagaaaggggaagttcactggcgcagtgaattcgtgtctgatgccgtggcaattactccggcgatcaacggggagcgagaggaggtcacggcgatgcggtggaagtgcatggacacacggtgcaaggccgggaagcagcggtcatcggtgtacttatccaattccgccgcggtgaacgccttgtacggtggccggaatactttactggccggagttatccacggcgatgatctccaagtgctatctagtttatttggtcacgagtcacggcggtgatggcacgaatctttgcgcagggaggtcgccggcggtgaggttgccgcgctggcggcctgatctgttttggacactgtaccatggcactgcttcatcagtaagcctgacagccatagtttagggccagatttcttccaaatttctgtggcaacacatccagatctctgcagcaatattgtagtgctataaaccaactacaactttgctatat

SEQ ID NO: 150906 - DNA, 446 bp, Zea Mays
aaaagttgtagtacacttaataccctacaaaaaatagaaagagagtgaccccaaaaagatttcaaaaaacccccaaaaaggtcaccaaagagaagaacataaaagaaaaatcatgtttttctcaagttcaaaaccgaccctctttcaaagatcaaacatgttcaccttgttcccaccctcaaaaccttatggcccaattgacaaaatggcgcccaaagacccctagaataccctggaaaagtttgaacccaacccttagccatttgacacgacttggcatggcttttgtctcggtgtggacagctcggacagagccaacttctcacccccatatctctctaccccgaccatatctttgcttggaactcacatcgaaaaggtaggatttggtgcagagaagagaccgtacacgggggttttgctaagatctgcacgctaagtcaacc

SEQ ID NO: 150907 - DNA, 626 bp, Zea Mays
catgtcacgccggagatcctcgccgccaacgacgccgcaccctccacccgcttccacgtcctgtcgttctcgcggctgtcggagcaggccacggagatcctcgcgcttgcgcgcgccgcgcgccagctgaagcccctcatcatcaggccctcctcgcagtggtacgcgtactacgacccacctccaccggaggaggcatcgacgcagcagcagcagcagaaaccggtgctaacggaggccatgtgcgacgagttgggggtctggcacgtctgcttgtcaatgcactcctcccgggaggagttggagcaggcgctggggatcctcaagcccaaatgggttgtttacaccatgtcgtcgtgcatggcggtggaactcagctatgtgaggaagcactgctccctgtcccaagttcgaacctgacgatcccctctggaagttgctagggatatctgatggaatgtctactgttaccagctcggcccaggcagtgctgctgacagtagaagctgtcgagaagctcgaggaagtgttcaacgcttgtgctccctctaatgatatcagccaggcactggaggagggtgcagaagcaacagtggttgatttcgaggtcagagtcgagccacctg

SEQ ID NO: 150908 - DNA, 652 bp, Zea Mays
catctgttgaatttgatcagacctgtttatcgtcatttttctttggaaaagctgtatgctcttgatactaagaggaagcgatgaatgccacataacgaactatcttaatactatttaaagtgaatccattaataactaacttaattttatatttcaaatctataactgaacatagacaatatttcctcttggcaacctcaaatataatctcgaccttgggatgggctgccatttcaggtgccccgtaatgcccaagttctctttgatgttgctctggagaccaaggttgggaatggggagaacaccaaattttggactgatcgttggctgcaaggcagcactgtaggtgagctggcccccctatcttattcaggtggttcctaaacgagcaaggagacaacgtactgtctctcaagctttgagcaacaggacttggattgctgatatccagggtgccctcacagtacaggtgcttgtcgaatacctgaggctctgggagtcagttgatggtgttactttgcaaccttcagtttcagatcagcacgcgtagaagctcacagattcagggatatacactagtaaatctgcatataataccttcttcgtgggttcagttaagtttgcaccttggagaaggatttggaaatcgtgg

SEQ ID NO: 150909 - DNA, 508 bp, Zea Mays
attcggctaactagagcaacgacatagccgctacataacatacacgtcggcttgcctattatcatcacaatccgagacacaacatatactacaacatttttataaacacacagattcacaagtatattcgcacatcgaccaatttatatgaatcgtaaaccactaatctccaaatcgcaatcaccatgcatttacttctccaatcatgaacgcatacatgtttatcatatgaaccgagtacttcaataattatcctaaaacaactaactccattacacacttgtatcacaaacctatttgacttacatgaagcgtctactcgaaatcgtaagcacaatcatacactatatgcgaagcctaatttatcgaacgcacaatacgcatcgtctcgactcgacttataaatatagagaaagcgacgactaccttggcatgtcaccacctctctatataagccaaagtaatttctatctacaacgaccaaacattcatgtcgagcacactttat

SEQ ID NO: 150910 - DNA, 462 bp, Zea Mays
ttattggatgctgaaaataacaactgaagggcatatttgagttgttcacctccaggtgcgatgaagaggatccctgcgcctgccccctgtagcttcaacgagccatcgaaatacatctgccatacttctgcagtctccgggttatctggcacttgttgctcggtccactctgatacgaagtcaactagtgcttaagtctttattgcagtgcgaggtcgaaactcgatgtcgtgagctcccagctcgcaggcccacttggctattcttccaatggcttctttgttgtggagaatatcccctattggaaatccagtgactattatgactttgtggtcgtcaaagtagtgacggagcttgcgtgcagttagaagtactgcatacaatagcttttgaacttgaggatatttcttctctgagggtctcagaacttcactgatgaaatagacgggatgctgcactgga

SEQ ID NO: 150911 - DNA, 895 bp, Zea Mays
gagccaggaagcttcaacaactgcattggtgacaacacgatactcagcttcgatgcttgagcgggatacaatattctgacgcttggaagaccaggaggcaagattgtcaccaagaaaaaatagcatacccagacgtggacctgcgagtatctagacaatcaacccaattagcatcagaattgaccaccagctcagacagagaaggtcgaataagcagacccaaatgtagagtaccacatatatagcgtaggatgcgctttaaagcagcaagatgaggttctcgaggatcatgcatgtgaagacatgcttgctgaactgcatacgaaatctcagggcgggtgaaagtgaggtactgaagagccccaactgagatgtgaaaaactgtaggatctgcaacaggatcaccaacgacaggatgctttgggttcacattaacaggaatggtgcatggcttgcaatcactcataccaacacgatcaagaatctcgagcatgtattgacactgattcatgaacaaattggaagccgtgtactgaacatgcatactaagtggtgtcatggcccaagatccttcatggagaattcttgctgtaaggcattaatgatgcgtcgaagaagagttggtgatgacgcggttagcacaatatcatcaacataaagcaagaggtacaccataacgtcgcctttgtgatacatccgagtcgaagcagatgtgaggcgaagtgactgtaccaggcacgagggacctgcttgagaccatagagtgagcggttgagacgacacaaaatctggatgtgcagaatcttcaaatccagtaggctgaacacagtaaacagtctcagagagggagccttggacgaaagcattgttgacatcaagctggtgtatagcccaa

SEQ ID NO: 150912 - DNA, 458 bp, Zea Mays
gggtcatagagcacctccaatggtccctagagacttctgctgcattcactgctcttttcttacagcctgcaccagtgtagtactgaaagttaacacatgacagcctagtataccaaatgcatacatcaaatgatttgacttacaatcagcaaggcagtaaccacgtaaagaatttcaggtggaaatcacagaaacacagcaatgaatatgcaatgttctgtaggatttatcttgttctttggctttcttttctcttgcataatgtatatctacaattcagcagataagattccttaatatttagaaagaagcaaatgattagaataaggattaaggaatcacaatgtctcgcgctgctgtacatattatacaagaatgtgagaaaacagatgcctctaaactagaaatcagttacctagttctgtccagtgggctccaaactttgtcaatatggccta

SEQ ID NO: 150913 - DNA, 319 bp, Zea Mays
gtcctctaccgaccgtcgcaatgtgttaccctgtacaacacaatttgcatcacacatacaatttatacatgtcgagtattaaaatcgagtaaaacttaccactcgatctaatatgggtgccgcctccacttgggttcccagtctagtggacaggtcatactccgtttcttcatcgttagaagaatcaatgtcggcgtagtcttccgttgtccactgctggcgaagcttacaacgagtcgcaccctggtaccaagcttggtaccgcctgtaatcactgttgttgtgcaactcatcgttggaatatacattctcagcaccc

SEQ ID NO: 150914 - DNA, 353 bp, Zea Mays
gttgtattgtttggagtgatgtacaaaatactacagttatgtcatgacgttttaaaatcatagtattctagaaccatagttttgaaatactttacttccaaacatgtccttagtagcatcataaaaatgtgtacttcaatcgagcatacttcgcacatgagggggcattggaagttggtgaaatttgagtatacttatctcgttttcttgccatagttcatttcaatctcatagtcaattcgccttatctacaccactaattgtccagctccaactaaccatgaacgatacctatctaggtaataaaaatatccagaaatgtcaaaccattttcacgatttagagcaactcag

SEQ ID NO: 150915 - DNA, 445 bp, Zea Mays
gaagtgttgttgatgattagtccacatggtgatcctgttcaatacaaatatggtgaaaccacaaaacagatgcctgaatgcgatggtgtaatttttttctctaattcaagtatggaatttctacaccgagtctcagatgttcctacatcatttgttggcattggaagcatcttcctaataacattactgaacgatgttcatggtcactatgatagtcagagcaaaggctgtgttcaatatgggataactggactgagacaatggtggctaaatgtttttagctcgggaaatagtggtatggcagttcagtcacagttcgacaatcaaagaaaagccatgaacaaattagtgggcttacaattcagaatggtttatgataaaggtaaggagaatttagtgactaattattatgtacagaatatgtggccaatagtgaccattcaaa

SEQ ID NO: 150916 - DNA, 421 bp, Zea Mays
tttagccgcatgatccaaatccaacggtcataatcacatctcacgcatcccagtggtctctaacacacgctctttctcctccaagcgaaggaccattctagatgatgcacgaaggagccgttatgcgaccggttccgtacaaccccagctacccctatccggcatctccatttgtcgtgaaggttctagatagtccactccccgccctcaaacgccgttacctaggtgcttcgtcctcccctccaccccgtcaagagctctcccaagtcccaagcgccggcacacaccgccacctcgccgcgctctacagggttgccgtgcctccgccccggtatggtcgaccgcgccgcggcgagcaactcaactagaaaatactttgccacagcggtgatgaatttccacccagtggttcgtgtcggag

SEQ ID NO: 150917 - DNA, 350 bp, Zea Mays
agccgaacgaactggtgctgatcgaaacgattgcatgcatgcacctccgaaatgccggaaagtgtcgtgcgtatgctatgcatgaaaccattgattttattgttattaattattaggactagttaattagcagtgacctatcattgagcaatccaccaaagtacttactagtagcagagggcaaaactttcctcgaaatgatgaggtgcataagtatgcatgtgtgagaaatgagaatggaaccaggcaaaaagactttgggaaatggattaataattaagtagtggtgacaagggggggcatggatgctgcttgatatggttccacttttttggtgatcagtggctaac

SEQ ID NO: 150918 - DNA, 394 bp, Zea Mays
aagaccatgagtaatatatgcatgcatatgtctaaaggttgttgcatctcagggcttaggcgccaacggtgccaaacaagattgtcattgcagctttgatcaaggggctccgaccaggaccaatggcacaatattttgccaggaagccaccacaaaccttggaaaagctcctccagaagatggacgaatacatcagggccgacaatgactagaagtagagaagggaagaggcctacagatactcagagttgactaggggcttcaccctagacatgtcagaacaattcactatcccatctgaagtgacgacaaaggaaaccacgctcgaggacatcagcaaagcttctagtcttcagggacgcaacaaagttcttacaggccaccaactccaaga

SEQ ID NO: 150919 - DNA, 1577 bp, Zea Mays
taaaaatggtttaaaaatatgtcactctaaggacttgtcaagttataattttcgaatgctaccttatagttatggaatttagacccactactactattgcggcggcacgagtgaaggggaggggtgacgagaatgtgaggggagaggctgggggcggcagggtcgcagggtatgatggatgattcaaataatattgtccattggatttgggtaaaaaagacgggtttatatagtgatctaaaccatgatatgttaagtctaggtgcaactgtttggtggatttagcgaaacttacgggtgtgggggtgatttggttggattggttttgcaaagtttaaactagtcaattatatagtggtatagacatagataccaaacatgagagataagaataatatttaaaggctcttgctaactttgtggcggtggtcccctcctctggtgacaaatttggagggtatgtggcaaggttttatgacatggtggccggaccgagtgtccctatggttggatcttgagtaaaatgtatcagcgattttcaaatttgacacaatgtgtcacttgggtatcagaacctagaaaactagaaaaataggtcgaaaagttggtcgactcatgcaaatttatctaaaatcgattttgctcaaactagatgccaacgtggcatgctactttagagctcactaatgaaagtttggggacacaagttcagagacttaagtgacataacatgccaaatttggggacttgtgtatcagcaggcacatgatgcgtgtgggaaggatttgatgtagcacgtcacatcgccatatggtttgagcaaatccagatctgaatgattttgcactagggtctatttttctagtttcctgagttcagggacctaaataacacatcgtatcaagttcgagaaccgatgatacactttgcttctggatctttgcaagcttggtgttgatgcatcccttcccaatggacaacaatggttagtcattgttgtacgaggtgacggggagggccatcaaccccacttcactctaggtcgcggaaaggctatttgacaacaaaatctagcatctcttctgggatacatcgacaccatgttgcagggcggcaccatcacctcactacttagcacctataggcttagggtgtatttgttttcgcagctcacatatgcgtgattgacatgagcagcgatcgagaaaatcatgattttacttgtgatacgggattttctgttctcagtacaaatcccgtggttgagtcgaagccgcggcgacgagaatcatctgcgctgcaggctgtttagcgagatttttctggtttctcgcgtcactccatcaaaacacggcttttaaccgaaaccacctagtctacttagcaatatctttccactaatggtggcaattttgtgaagtgtgaacataattcgatgggtccggcaaatttagttttataaaaaatagcttagaagaacatctttccaagctctaaacaataatctcctcaactttgaatgtttcttctaaaaattccacatgccacgcattttacttgtttaaacttaaattttc

SEQ ID NO: 150920 - DNA, 462 bp, Zea Mays
tctctactccgccgcaatggccttcgggctccaggttctcgttgggttttagttccgggtgtagtcggtgcgggtggttctggattccgcgtcgggttttggctgaattggtgcgctgggtcgaggatcggtggggcgtccttgaatcgccggtggttctgggatcgaggatcgacgggacacggctcgctaggcgaatgtctggttctgtttcgattttttggttcagttgcccttctgattgaattttgcgcggttcggttcggtgccctacgatcgaggaccaaacaagtactgttcgcttttacttggtgccggtggctgtgcgtgtaacatgttcgattgatttcctactcgaggtagtgagatgctggcgtggaggacatgtgcaacttcagttgggagatgacagctagttatttccaatgttatgtggaaattactgaacatttccttgcgatc

SEQ ID NO: 150921 - DNA, 1037 bp, Zea Mays
ggttggtgttggatgtgatgtaccagagatgctgtgtagttgtctgaaactctgaatcatgctgagatttcagcattggtccagtgtgcattcttagacagtatagttaatcagttatgcctttcacacaaccaatgtatgaaactcaatgacaagtttcatgcatcatgcaacctgagaacaatcacaatgtaatgggagcaacaaatggacacctcaaagtaaacactatgtatagaagctgcaacttccaggttcagtatgtttatctaactcccaagcacaaagcacaatccccatttatgcaatggtgacttgagttgcctttgtaaattgcaaaattgggagttatggacagatacaaagcaatacagattcttaaagaagaaacagaacaaattttatcagtgcttaccttagtggctgctagctcattcatgtgaggatgacataaaaaaagtgccataaacctataaaagtggatgtagtgtcagctgggaaatgtaattgtcttggcaggaattcgatcaatgctctatatggttgatgaagcgcaaaccttgtacagtggtgagtgctgtctatgtcttactgagtcaccaggtcatgggtttaaagcagtctctccatttttgtaggagaagactttctcggtttatcccttctctagatcccactcatgtggaagcctctggtactgaatctgccttttttactttatatggttgctaagtgtttggctaatgtgtcgagatgctgaaccaagacatctgactatactaactgatgtgaacggtctggaagttgaatcttggacatgatgtgcagtccttttcatgagacagggtagtggccgatatacaatagactgaactcaaacttctttatacaagatacattacttcaacgcagtggaatatatcatcagaaatcttacaggtcatgtgttcagttcttgtgttaccaacattgagatgaaaaactattacggtaaacatatcttacaggttatatgttcagttcctgtgttattccac

SEQ ID NO: 150922 - DNA, 474 bp, Zea Mays
cggccgattggggcaacgtctagggtctccaagcgactgacacgaaattggatctaccccgaccatttcccccaacataatttcactaatagccacaaggtttggtctagccacggcgaccgtggacaaggcggaccgatgagcgcgttcccgtggattcatggcggtcaagtacaattaaggggttcgggaagctttagaagagcctagggacgctagaacaatcaacagagaagtatgaagtcacctggaacaggctgaccatggggagtatacactgcacggtgttcttggtggatttgtgaagaatccaaaattagtgcttactagtgagggtttggggatacaggtaggtgcagtagatgctggaatccatggcggagccgaggaggtgctcaatttatagttcccgttgtcggtggtgtccaattccatgaagttgtgctggcggccggaggaaagcaggggtactgg

SEQ ID NO: 150923 - DNA, 279 bp, Zea Mays
atttcgacccacccacccatccaatgtaaaggtctgtttctgcagtgagtttggactaacctgaattgctgatgaccacctgtgcacagctggatcctttttcctttttaggtaaagatctgcctacgctgtcagtttggccttccctggattgccgatggcactcagcaaacagctggatcctcttttctgatggccatcaacaaagatctggatccttttttctcccttccttgcagtagatataaattgatccttacgtaacattcctgtgatgta

SEQ ID NO: 150924 - DNA, 437 bp, Zea Mays
gccaaagttccacggagtgcggggaggcgcccaaatcgtttcaggttttaataactccatttaagcaaggggagtaagggtgaaaatggccggtaacggtcagaaaaaacctctcaccattttcacccacataaatttttgttcggtcggaatcggtaaacgggaaagtcagaaatggataacggccgataaattccggtatatcgaaaacggataaatcagagcaaaatagcttgaaactcacaataaacaaatcctaaccacacagatgttcattcacatccacatacaagtctcattcacaaaagtacacaaaacacaatcttgtccacatataattggtcatacactcatacatgtccactcttaaattttaacacacaacacataagtcttaaaacacgattgttcattcacattcacatacaagtctcaac

SEQ ID NO: 150925 - DNA, 781 bp, Zea Mays
ccatcgaggccgtgcccacggtggaggtgtcggagtccggcgagacctgcgccatctgcaaggaggacctccccctcgcggcggccgctagaaggctcccgtgccgccacctctaccactccccctgcatcgtgccgtggctggagctgcgcaactcctgccccatctgtcgctgccgcctcccctccgagcacgccgagccagcaggggaggtggcgacgccgacgccggcgccggagcaggacccgctgcccgctgctcccgctgatctgcagctccctgactgggctgctgtcggtggtgcagaagtagaagagacgattgtgctgccgtccgtatgagcctgatttctgcaatcttcttcgatgtcccgtcgttaattagctacatactgcgtcttgtattttgctagcaaatgggtcgtggtttaaggccccgtttggttcatgcatacctcatttctagaatttcataatcaaccaaacgactcttgaatttgcattagattttgtcccagaatttgacaatctcactataagtggataatgtgatttacaccggattatgtgtagtattcaaattcttaaaatctgtgtggacaatgaagcgagcaaatggtatttgcttcggctaatggtattttttgttaggaatggaaatggtgatgctttagccatggtaacaccagtgttaaatgttttgggcatggttgcgaccagggtttacaattccggtttttttttaaaaaaaaattgccactccccatagagcaagaaacttc

SEQ ID NO: 150926 - DNA, 379 bp, Zea Mays
ccgacataaaaaacgcgctagacctagtgcacaagtcccctacgggcacgatcggatcagcgaaggcacacagcctcatcatacaaattatagttacatacgtacagcgagggcatcacacctcacattgcttcaaccttcgggacgatacccatctccctatagttaaacagcattatcctcagctcctcaccctcaaaaagacttcgcaactccccctcacctacactcgcaccaactggcgaggacaacaattcccgcttgccagccctgtccacacgaagacgaccaccctccacctcactcactctacgcttcgccaccgcccttcgtcacctacgcccagcactcggaccgggaataacttcagtatccatca

SEQ ID NO: 150927 - DNA, 424 bp, Zea Mays
ccgcgtgtggagggtgttgaggatcttcctggtgcgagtactgggtgtaggcggcgaggggtggtgggaaaacatagtgtgggtgaattttcacggagcggcagacgccgtcgcctggggatggagcgtggccgacttcgagtagactgggttggtaaacgagatttgttgtcctcgccgattggagcgggcataggcgagggggatcttcggaagctttttgagggtgaggaattgaggataatgctgtttaattacagggagatgggtatcattccgaaggttgatccgatgtaataggcgataccctcgctgtgtgtatgtaattgtaatttgtatggtgatgtggcctgttggccgtattcgtacgcttgtattggtccggctgcgtacgtgggcgactttgtgcggagtgtctttgtaa

SEQ ID NO: 150928 - DNA, 271 bp, Zea Mays
ggggcagacagataggaaagacttttagccccagccatttctcacatccatctttcctccagagccatcctaaaaccctaaaccctagactattttggtctttctctcttaacacaagatctcctgcttgtttaggaaaaaactttacatatatgtacaatccattttttaattagcacacatcaagtacgatcatatagtagttttaggcttttaagaaatggcgcatctgatcaaaaaacatgttttaaatttagccaaaacacttgtc

SEQ ID NO: 150929 - DNA, 1246 bp, Zea Mays
tgctgtgtttcaaataacgtaacacagatgtcaaggaaaaggcacaaccccacagatggcatgtcaaggatccttggaagaactgagtaactgttacacaaatgtctgtacacgatctgacctatctaccgagtaccaaggctagtagttttataatggtaaaaaagactagtagttttgctccttcaggggcgatcttctaactgggtcatgccttggtttcttcctaatcacaggtgcagaacttctatcgttagttttctctgaggtaagcctatcattgcatggttcctcctcattaattttctgcgagatccttctcaaatttgacatcatactttcacctccataaattacctccccaatggtatcggttagtccagtcagctcattgaccaactgattcctctcttgaagtacaacaacagacatatcagctgtcttagacttcagctctcgtacgtgttcttctaatgtttcatttctttcctccaacaatttcagcttgtttgcaacttccagatgctgctttgccttttctgacatttcagaagcagtgcgagctttgagttgttccataagattcttcaaatttcttgactgatgcttctcttgcaataaactcacctgcagggagtcaagttctctttcgcactctgcaatgagcatatccttgaaaacagtatcatgcccttggatgacgttaagtgaattcagagtttctgcaaaaccataaagttgattcacctctagctcaacttctgccacttttgttgctgcagcctcaagaaggtgctcgatgtcaacctgaacagattcaacagtttgttgaatatcagaaattgcaatttctttctctgctattagtgtataccgatctgctttctcttgattaaacatttccatgagctcctgctccctgcatgcaaatttctgctcaaagaatctaatccgttcttccagctccagaagttttttgtcggagacctcaacaatttcatagtacctgttcttcacttcatgaatagacttctcatactccatcttgataagacttcccaaatcaagtttctggaccatgttttcctcttctagcacaacgatgcgttgctgaagcttatcaaccatcattcctttatcattaatgataccacataactcctgcttttcttttgtatgacactcatcagcctccattttagcaatgagaacaacatccaaatctctcttcagtacacaattttca

SEQ ID NO: 150930 - DNA, 566 bp, Zea Mays
aactttagtggtgtttgcggggcctgggtcctagccatggggtctggacccgtagggtagcccctaagcgcatgcccacctagtacacatagcggtacatgtctagcccgcttagttccttagcacacagtttagtgttaactgagcaggaatttgctttgaggtagcagtagcgggtaccccagatatgggataccgatagtggcccttgtgcccaccttgggtgaagttccgaaccttcacgtggggccacaatcggcaatattgattcaagcgacctaactgtaataatcgtacagagggggtgtgcccattgttgtgccatccatcaagccacttcctagcatatctgtcatcgtggcttactaatctatggccttcatgcaggataggtcagccggtcatgcatgcgacacttcggcatcgctatggcggtcaaaattggttttgatcgtcgcagtggacccaaacgggtatttattgcacttgttccacatgcctgagcctgacggtccatatcccatctttctgcacctgttttcggcatttcttttgcgtagtcggtg

SEQ ID NO: 150931 - DNA, 769 bp, Zea Mays
tggctgaataaaaaatgaggttggctgggctagcttgtgccaatttttttacaggatcgtgtattgctcgaggcagagtggggacggcaaccagctttgcgggcataaaaattaaagaaatgctgtgggaatcctgcgtcggaaagcaggacctaagatcgtctcaaaccttccaaagatgacgcgccgtctcgaattctcttattcggcttccgcctaatggcatcactgcatacgtactcaaacattcaagcgacgtctgcttttgctacgtgcgtggtcttttctttaaggtatgatacttaattgcaatccatgcttatgatgatgatggtcgttcctgctagttgtcgtcaccacgtattaatgattttccagtgtttggccatcggctcctcgagctaactggccatttttagcttagtttattcgatggttatctcgctttcttcccaaagttacgcgtagggaaagcacagcacgtgtggaaaactcagcccgcgctatgttaatttggcaacctaaacggagttacagattgcggcgcaagtcgtttttttaggctacgtctaacagttatcctatctcattccatattatacatcttaattttaagctccattttacaaatagtactatttaacgtgtaaatcagagttttatgtgaccatatatacagtcactacatgaagttacagattgtgggtgtcgcccattcttatctatctactctttcgctgacgtaaatttctcccaacgcgtgctttgt

SEQ ID NO: 150932 - DNA, 633 bp, Zea Mays
tttcctaaaccaactcaatctcaagcaaactagagaagaaatccttatagatttggacccaccttttctaacaaaccaatcctattttctaaaccaacgcaatctctggttctaagaaatctctattttaactactccgactcatgcgctacagggctactgcacgtgctatagtactggaggtacggttcacaccgggtctaatttgggcgcaacacctacgtggcccatttttcgacgcacacaaaagataccggttataacatgtggaccaaccgttgaagcttattgccctaacattgatgttcatcttgttacatatccacatctaatgtactatgaacccgaattttttgttttttagccccttttgtgacacaaatttacgtttggacccccagaaattttatttgcacgtttggacccgatgctcggcgccataggctgtggcgccgaggtaacacctagcctggagggggctattagaagagctgaagaagaaattattatttggaagtttgcgggggccaagcatcttgccctaattacagctcccattccaggtgtcatgtagggctctagtagagagtccagtaggccttgtttattttctttcttctttttcttctttat

SEQ ID NO: 150933 - DNA, 919 bp, Zea Mays
tgggtgcactgctattgcccctgccctcggttttgctgctggaacccaaccgcatgaaacagcaagctttgaagccagaaaacaagagttcttcaatggaatctccaagcattcttctgggattcttcctgttccgcgagctgaactgcacattgatcctccaccttccccacctgctgctcccatgccaagaagaagtcgccatgttgcgggagttggagtggaatttaatattcatgacctgggaggaagaactaccaggaaagtcatgagatccttgcatattatttccgagaatgagggaattagtcaggaagccttggatgaatatactcagcttttcaagcgccccctgacccgtagtgaggtggaggctcttgctgccctgtttgggtggagagcccctgagttggttccccttcagtaagggtgttgttttctggttggtgctgtaaactgtgtgtttcttaatggatccatccaaaattcttatttggaatgtgcgaggtctcaattctcgtgctcgccaagattcagttagagaattagctctgtccgttaaggctgagttggtatgtttgcaagaaactaagatgcaatttattgctagaagcaccttaatttctattttgggtgctggattttctgaatatgtcttcttgccttcgaatggagccagtggaggaattctggtggcatggaaaaatcacttgagattcacaggtgcgagcagagttgataatcacagtgtctccattcagttccataagcaggaagggggtacctggtggttaacctgtgtgtatggtccccaaggggatgaagagaagatctcttttctgcaggagctaagaaatgttagagagggctgcaatggaccttgggttgttgctggggatttcaacttaatttacaaagc

SEQ ID NO: 150934 - DNA, 481 bp, Zea Mays
cttagatgatgaccaggtgagagtttggcacctttgctatttttttggtattggaatggagggagtgttatttggatgcctttactgattgggttacaagaggttatttcttattcaggctaatctattactccttccaaaagaacagccaatgtggtggtgaaaggaaggtgtcagaggtctgttcgttccatcgtacgtggcaaccaatttgtacatatttacccttcttgtggcctctcatgttaacttctttaatctcttcagcgaccgcttgttcagtgatgatttggttttcttctccttcgccatacgatgtttcagtggtggttttctttctcccacgtcttagggttctcttctttttattgagctttcaccatcactttcattgcttaacccatccacgacatcttgagaagtccttgatgaaaaattagcactgtgattcacgatagatgagtagaagatgctaaagggt

SEQ ID NO: 150935 - DNA, 505 bp, Zea Mays
ctgatttattgggtccctcactggtagtcgttcttctttcatcccttatggatccttcaaaaattctaatttggaatgtgcgaggccttaatgggtctgctaggcaggatgctgtacgcactttggtggattctgctcgagttgatgtggtttgtcttcaagagactaaaatggtggacgtttctcggttccttttattgcggatgctaggaccagcttttgaaaattttgtattcctaccttctgttggtgctagtggtggcatcttggtggcttggaaaaatagcattggtgtttgtgctggcagtagggtggatgaatatagcgtctctatgaattttcattctagcaccagctcaccgtggtggcttacatgtgtgtatggtccacaagggaaccgtgagaagattcagtttttgcaatctcttagagaaattagagctctctgtactgggtcgtggcttgtgctcggggacttcaatctgatattaagggaggaagagaa

SEQ ID NO: 150936 - DNA, 364 bp, Zea Mays
ctatacttgcggctaattgtttccaatgagtgaccaaatttatttctgatctgcctaaacgattgtggacccccacaagcccacaagaatatgccaagagcttccatagtactgacacccctacttggaagcagaccataattttgtaccaacgtgtcatgcaatcgtcgaaaaacagttcttcgcatccgaaacatgtcaaaacagtcgttactaatctccaacgttctttgaacccattgaataccagattcgaccaatgttcttctaggagcccgactgaaatgcctaccccaaatgtcaacagcattaagagcaacaagcaattctccatctgtttcgtcattagatgtgtgtgcatcca

SEQ ID NO: 150937 - DNA, 407 bp, Zea Mays
cttctgtctgtgtttactggacatgggatattttggctggttaagttgaccaggttcagtgaatatggtgtggctacgagctggtgagatattgatgcatgaaagccacatatgggttgctcatataatgttggcaccctcaaaacatttcctcactgcatgttggacaggtgcagggccaccttgccccatattcaggtgtttatagggtaggtttcagcgaggattacctccccgtcttgagctctaccctcagaccacaacaaagaatatgaagttcttgtgtccatactagagatagccctctctccccagccaccaactcggtcagcccttgtgcacagcgcgttatctccctgctagtggtgaccacggccacaacctccttcacctcatagtggccagaa

SEQ ID NO: 150938 - DNA, 277 bp, Zea Mays
ctgagaaggtgcaagaggtgatggattggaagcccccgactacagtaaggcagattcggagtttcctgggtttggcagggtattatcgacgattcattccggatttctctagaactgccaagccaatgactgaactgttgaagaagggagtcaagtataattggagccagaagtgtgaagatgcctttcatacactgaggcagcatttgacaacagccccggtgctggctcaacctgataacaccaagccatttgaagtttattgtgatgcttccgg

SEQ ID NO: 150939 - DNA, 308 bp, Zea Mays
tgtcattaaatcattttctatttttattgagtaataatgtggatctgactgtccttttctgagtgtttaaaattcctttctatttagtgctatctgctgacaaagagtagaattgattcctatgtgcttgaaatgatagcataaattttacatcagatactattgtagcagatatgctagtttaaaccaaacgagattcagatcagcagagaatttatttaacatggggaaatcatttgggtttaaataacatggggaaatctgcaggcaacaactataatcatcactgattcgtatactaataggag

SEQ ID NO: 150940 - DNA, 626 bp, Zea Mays
gagcatcaagtagttgcatttgcatgaggactaacagcgcttcacatttcgtgagataaaagttctttcaaaaagcatgtttgaaaatagcgaagtcatggacgcgcggactgtccggaccttgggggcggaccgtccgcgatcctccagagggggtccgaagtctgaccatttgtgtggatactttgtagaattgcactgcggaccgtccgggccttagggccggaccgtccgcagtcatgaccagagaagggtagcttcgggccagtccctgaattataggcggacggtccgcaagtatcaaactcgtttttggacatggactgtgtgtttttgtagatttgcactacggactgtccgggggaccagtccggacagtactgtctcaggtctcggatcgtccgggatttatagccggacggtccgcgtgtgttatcttctcttgatccgaggctcaggtgtttcaagctgccaggtcgcggacggtccggccttgaagggcggactgtccggaccctccttttgagtcagctctgacatgtttcaaacggtcattacgtgtgcgcagaactgctgccttttgcacataatggttggtttttgatgggggactataaatagaaggg

SEQ ID NO: 150941 - DNA, 1036 bp, Zea Mays
cgccttgctaagatacgcaattgggtgaccggactgcaacaacaccgctccgaccccatgattgctggcatctgtttctaaacagaagggtaatgaaaagtttggtaatgccaaaacaggagcagacactaaagcttgtttcaaggctgcaaaggaagcttcgtgtgcgggagtccatacaaatatagcgcccttttttagtagacccgtcagaggtcgagccaaaagaccaaaatgacgaacaaagcgacggtagtaccctgccaaacccaaaaaactttgtaattccttcacagtcctgggagaagaccactgagaaacaacctgaatcttgcttgggtctgtagctactccggccgctgaaatgacatgaccgagataggataactgaggcttggcaaatgaacatttagtcaacttaatttgccattgatactgtatgagtagttcgaagactgctcgaacatgctgaatatggtcttcaaagctcgaactgtagattaaaatatcatcaaagaaaactagcacgcaacgacggagtaatggtgctaatgttgcattcatggtgcgttgaaaagtggctggtgctccggtcaaaccaaaatccataactctaaattcatagtgacccgagtgtgtttggaatgctgtcttatgacaatctgccggtaacagacgaatctggtgatatcccgctgtcaagtccagactagtaaaccaggaagcttgccccaattcatccaacaactcctcgatgacaggtaccggaaaagatgtcttaacagtaatagcatttaagtgccgaaaatccacacaaaagcgccatgaattatccttcttcttgaccaataatactgaagaagaaaatggactagtgctgggttgtataattcctgactgaagcatgaccaaaacttgtcgttctatttcatctttgatagctggtggatatcgatatggtctgacatggacaggaacagcccctggcactaatggaatggtatgatcacactcacgagttggaggaagaccattt

SEQ ID NO: 150942 - DNA, 541 bp, Zea Mays
gaaagaaagaaataagaaattgaaatagatttgcaatgttaaatagtttcatcatgaaaacatagtaaaatgtatttgcacctgctttgcaaggaccaaatatactaccaccttttatatcctgtaacaactcttccaatttcatatgaaatactcttacaggaatatcaggtgcatctgaagatttctggccagagtgttgaagtccatctacaatttcaagccactttgcattgcatgtaaatgttacaaaaaagtcgggtggaccatggactctgcagatggctatgctatcatggtaattttgtatcatatatcgtcgtccaccaatgtgtgacgccgaaagtacgattgtttttcccatttcgtcaccgtttatgcagcctttactaacaacatctgatataccttgaaggttttctattcgtaatttatcttgattattcagaatatacataagtctattttcatcaatacaggcacgagcatcaactttagcctggtttgatagtgtcccataagacagaaatggatttggctg

SEQ ID NO: 150943 - DNA, 314 bp, Zea Mays
tgatgaggttgtgcgccttcgcgcatccggctatgttcataaaggcgttgcacacttggtctagtacgtttattatgtcggtccggcgcgcctgtagtcggtctttgcgcggacagtttggtgtagggtttagcacgggtggtcttttgaggaagacttcgatttttcgcgcttgttgtgctagtccggctgcacccttaggcgacttttgcacggatagtctttttgaggaagacttcgatttttcgcacttgttgtgctagtccggctgcacccttaggcgacttttgcacggatagtctttttgaggaaga

SEQ ID NO: 150944 - DNA, 930 bp, Zea Mays
gctgttcatcggcacttagtccacgaaaagtgggggagtgcgatcttcgtagctgcacgttctcggagcatagctgagcgagaagggtggtcggtgtgcgacgaattgtgggccggagttggagaccgccgctcgatccctaattgacgtggtcaggtcgcggtgagcacaggttctgtatggtgtatcacctttcgggcgaccccccgggaactgaaatctcggaccccagctggaaaacccacaccctgaacccgccaacatatatccgcatctgaaaagagtccaaaacaaagaacaatatctcacccactgaacggcccaaagcaagcaggcaggcctttgcgccagtaggataaataaataaataaagccaattaaagataaataatatacaacagttgaatcagagaaccgactagaacgacaaaatgaatgaagagggaggggggtaagccatggctgttaagccttccttcgctgagatttttctatccctccaactcagatgctgctctggtcatttgtcaaatttagatgggaaaggaggaataatcttgaccattgaagaaaaattggactaggatagcgccatcagtggttgaagctcagatatcagatgcatactaaggatgaagggatatacatttattcagcacaaccatcaccatcagtagattattcagcacaccaagaaaagcattggcttatggattatttagcattgcgatagatcgtgcagtaggcttagcaccacatcaatctacaaagatacttccggctacctggaaatgcgcgaaaatcaaataatcaggaaactctggagttgcatggcaccacgaaaatgtggattgacatttgataccgaactgcaataatcatcactgctgctggtgtgcgcaaggactgaaaacttgcctagcccaggca

SEQ ID NO: 150945 - DNA, 485 bp, Zea Mays
gaagaattcagagctggtgaagttggatcccaggtcggttatgatgctatttgttatcccaaacctgaatattgtgtcttgtatgaactccactgccttggttgaggttaaagaagcaataggcttgtactctatccatttggtgaacttgtcaatggcaaccagcacgtgagtatagcctccctgagctttcttgaagggtccaatcatgtccagccctcagcatgcaaatggccatgttatagggatggtctacagctgttgtgccggtaaatgttgttgctttgacaagaattggcaagcttcacacctctggactaactcggcggcatcactcttcgtcgttggccaatagaaaccagacctgaaaactttcccaaccagagttctggatgctgcgtgtactccgcactgtccggcgtggatttcatccaatagctgcttcccagtagtcgaggaaatgcacttcatgaggactcccgtcg

SEQ ID NO: 150946 - DNA, 307 bp, Zea Mays
ctccagcctggtggcttcgacttctgctatgctttcgaagatcaaccttggcgctccgaacttgaggtcggctggtaatactgcctctaacccatagaccatgaagaaaggagtgtttccatgcagagctcggctaggctgggttcttaggctccagacgacatagggcaattctcttatccattttcctgcgaacttttcattcttatcgaagacctttttcctgagtgcttccagtatcatcccgttggctcactcaacctgcccgttggctcttggatgtgctatagaagcatacttgatctga

SEQ ID NO: 150947 - DNA, 416 bp, Zea Mays
aaaagcctgcgcagccctagaagaagatgtagtaaaagggagacgggtatggcggccaagctgacaagcatgacagaggccctcagaatgtcccctattacaagaatctaaagtgctagaaagcttggtcatgacgtcaggtcctgggtgcccgagacgacgatgccaagtggtggagaccaggatgggaggtggagacacgctggtggacgacgaccggagtgtgtagaggggcccgacgctgtcacatcgggcgagtggggtcctggtggccagatccttcacagaaaaaccagtagggtcaaactcaatggaacaagaattgtcggtggtgaaccgacggacagaaaggagattgtgagtgatgtgaggggctacgagaacatcgttgaggtagaacggtccagggagaaccg

SEQ ID NO: 150948 - DNA, 672 bp, Zea Mays
agcctctccgttaaataacaagaaaaatttagcatctccagtatcctccagtatgctcccaaactagcccttacatgccattctaggacggaagaaataaggacgtaacgtgcatcatgttaggcaaaaaaaaaaagtccacgtatcctctctcgcttcgttgcaaaagttgggcggttttaatcgatcgtgcagacaatgtgtgtacaaactactcatcacacgttataacaataaactgtcatcgcctattctagtagtatcagatgatgccaaatcaataccaaaaggtaacgaaatgaaaaggacaaagatccctacggatccgcagttcttcttctacaccagaaccacgaaatcaactcgaccaaaaacaacaatgggaaattctaaggaacaattaagaattcgacatatccagaacgattacaaatcacgagtaatgcataaacggccgcgcaggacgccccctccaattgatgaataaatattgcgcagaaggacgaacgagattaccggagagagcacggccaacgggaggggggattggatgccggggcgctgagcagaagagaaaaatgatttggtactgagatggggtggcgacgcgggagagagggttgatggaaatagaggtggcgacgacgtccatgcgggagaaccggagaaata

SEQ ID NO: 150949 - DNA, 433 bp, Zea Mays
cggcgtcgacgtggagcggcagcttcatgaaaggcagcctgaggcacgcgttcgagcaagaagccaccgattccttggcgtagccgagctatatacggtataattcttcttagtgctctcgtaacacagcaacctgttggccacgatggaattgtcgtcatgtggtcactgtggaggttaattgttcaaagcagagggacccccacgatcaaaggccggagaaagatgaagacctatagtgatacgattgttcgttcgtgtgaacatctaaatgtattgttatgttttctttgatttctctactttcgtttgcttggttcaaattttatcccattgtaagtattttttttagatttttgatgccatcgcttggtgacgacgattgtccagatacgtaaattatctaaaagaagagatctagagagagggaggg

SEQ ID NO: 150950 - DNA, 492 bp, Zea Mays
tacaaatcctatgaattgtttttatattaaaaactcattttccaattcatttttctgatttaataactctctggattgggcctcatttcttggaaaactcaggggtctcggggtaagtttgcctacgacacagaaaacagcactgcggactacgggttgattactataaaacagaggggttcttttgcaaaacgtgcggccgaaggggtatcggaagattcggaccgtccgatcaaaattggacgccccagattagatctaggtttccccaaaccagtattgaatcccagccgtcagatcaagatgggcggctacgatctaacacacccaatcgttatccccccttctaatctcggacgttggctatccaatcgacggcgctgaagccatctgcgacctcaggcgaaaaatacacggcggcgtgttcacccgcggcgaacaccatcgccggtgacagtcgattctgccatccatgcccccattcacaaatcg

SEQ ID NO: 150951 - DNA, 412 bp, Zea Mays
gttgttttaagtggatgaaaaacatataaaatattaaaccatactgcttacatcttcattgtctgagacttactacagctgcagagtgtcccttgtaaaatttggcgcatcttctgtttataagcatatttaatcggtgatgacatggatacgtattttatgtttttcccctccatgttcaacaaaatcccagagtgagcgatttatgtacaggtgatgccactgtctggattttttgtgagcaaactgttgaaattgccgtcccattatgccgctggactaattttagtggcctgttgccctggaggtgtgtatgcacttcccttcccttttttttctctctatagattggctactggcacttgaactgagaaggaaaacgtatctgcaggcacagcgagcaacatcgtga

SEQ ID NO: 150952 - DNA, 312 bp, Zea Mays
ggaagctctcccttatgaaaatccacaaataaggccatcagatcatctttaatcagattccaaaagaattgataaaattcagctggaaaaccatcaggtcctggtgccttattatgctccatttggaagattgctttcctaacctcgtcttctgtgaacacagaaaccagtagtgtgttttcctcatccgaaacctgaggaatgtcatggaatgtattttcatctaaagacatctccaaaagctcttctggaccaaacaaccccttataataattagtgatatgtttctttaaatcagcatcaccctcaatt

SEQ ID NO: 150953 - DNA, 827 bp, Zea Mays
ggagaacaaagccaaagaagccgcgaaagtcgtcgagaggctggagtctgaagcttccgcgttgaggggcgagctccgcaaggccaaggagttcgaggagaagctcgccaaagcggaacgggcggtggacgggctcaagagggcggaagcggacgccagccggtcggcgcaggagtggaagagcaaggcggggtcgttggagactcgcctcgaagccgcctcgcagctgaacaaacgcaacgaggagtcgctggcgtcactgaccaacagctttgaggactgcacgtccatgctccaggacaaacagtcacagctcctccagctcgtgagcaaggtggcaaccctggagaaggaagctagcgagtacaaggaacgtttcctcgagaccagcaggcgcctcgaggtcgcagcagaggaagcgtgcgagctacgtgcggccactgatggactgaggtctgaacaacagctgctgcacgaggcgcatcgacaagccgtcggcgccgagaagacagcgagcgcgcgggttggccacctcaccgaaggcaataacaagctgctcatggagcttgccaacaccagagaagagagggacaaggcgaagaaggccatcgaggatttggcggccgcgctacgtgaagtgtcgtcagaggcaagcgaggccaaggaaagggtccttgcgaagcaggcagagctagacagtgcccagcttcagatgtcagaactgaaggcggcgatgaagaacgcagaggaaatgtaccagttaaggataggcgaaccgaactacgagactgaatgcctcaggaagacgatcgagaggatgggttcgg

SEQ ID NO: 150954 - DNA, 394 bp, Zea Mays
aacttcttcgattcaatgaaacggtgcacgagattctatgtggacgaaggggtatacgtgatctaatctaaaccgttgcttcgcggatctgcgatcaatatcctaccgccatcccgatctaatcctagacgcccccaaccgatccaacggccaggaggccttctacctaagcctacgccggcggtgccagagcgtatgccgcggcggcggacatcgccggcgagtgcccaaaccactctgagggccccaaacaaccattcgagcgacgctacacgcagagacgatgagtacaaacacaagggttggtagcataccatcgatcagagcagagtgggccttgcccacggcggatggcggaacaacgactctgtaggagtccagggagcaatttcac

SEQ ID NO: 150955 - DNA, 345 bp, Zea Mays
ctcccagagacaatttgcggtatggactccctccctgtactcgcgtccgcctctatcgtgtgaagcatagtcctgggcatcggatttgggcattcgggccgttggtggctctcgccggagatggctccaccgcgggcggagtgctccgccgtgcctgttcaccaggagggaaacgaagagagagtgcggggcgttctgtgccgtcgatcgcgggatcaacggtccaatttaggctctgcgtaccgattcgggttggcgtagcggtggccgtccgatcgggatcgtgcgcgtctagggcatgttcccctgttttaaatcgggaccgtagatctagaattgtgcggt

SEQ ID NO: 150956 - DNA, 504 bp, Zea Mays
gtgatagcactcaccattggcgcgcttggccgccaactcctccgacgagagtcgcttcatgcgaggtcgtggtgcacccccaagtttggacgtggtcgccggagggagggcctttgaggacgatcgaccggctggtagtgcggcgtgggtaagccgacgctcgtgagcccgggccaagctcatggctgtttggaggttcggtggtcgcttcagctcgacctccgttcgcaagggttcccctaggcctgcagtaaagagctcaacctgctggtgaggcgtgacgtcgtgcgcacgacacaggagctgggagaattgtcgttggtagtcctccacggtgccggtgcgatacaagtccttcagctccgccaagctattgtgtcgcagcggaggcccgaaccgcatgttgatgtacttggcaaagcggcgccacggcaccataccgtagtcgagctcgaagccgaagtaccaatccagtgctgcaccgtccaagtgcagggacgccac

SEQ ID NO: 150957 - DNA, 832 bp, Zea Mays
ctcaaaatgactctgcaactaaagtttggctatgttttcatcaaataacagaacctagctatgctgcatctgagttgtgtcattcaggaaagagcaacctctctattgcctacattaccaacacataagataagcagctgagcatgtagctggacagttgcttgtgttcaacggtcttgattcaaagactagacccaagcatcatgctcttttggaatgctcatgggttcttagatgtttggattttttaataattggtatacttatcaatatgcgtggaagaaaaagtgtgcttactagttactgctctgtattgctccttggttctcatgtatgtgattccgcacttgttgccacttaaaaatcctaactttgacgagttgcatgtattttgattagctatgtaaaacaaggctgcaattattgaaaaaataaaatgtatggccacggtttttttgaaattatctttttgtagcattaatattggacacatgaaaaatttatatcttggtggtgtttgattcatgatgagaaataactgtgatttgattggaactttatttaaataatttagcgtgttataagtggtgaagtctgaattcaaataccttgatttttaaattggtgacctggctccaattccaggattagcagcaagcttgacttaaagttgcatagatgggattccagaagtcatttctagaattttacatttgattattgtatttttctccttacttttattatgttatttgcgcaatgggcttcatacttccttcataattttccaactatcggatgattctttgcttctgtcaaacttatatttttg

SEQ ID NO: 150958 - DNA, 503 bp, Zea Mays
cgctactccgccatacacaaggacgagctggaaagacaatgccacaacatgctggaccacgagataattcgccgcagcacgtcggcattctcttcctcggtgttgctggtcaagaagaatgatggttcctgtaggttctgcgtcgactacagggtgctcaatgctcagaccgtcagcgacacgttcccgatccccgttgttgacgaactcttggacgagctgcataaagcccgcttcttcaccaagtttgatctttgttcaggctatcatcaagtccgaatctttcccaacgacatacacaaggcgacgttccgtacacatgacggtctctacaaattcttggtcataccgttcggactgacgaacgccccggccacattccaggcgctgatgaatgaggtcctgcgagtcttcttgcgtcgtttcgtgttggtcttcttcgatgatatcttgatctttagtgtgttcagttgtgcctgctatcccaacacttctgccaccgc

SEQ ID NO: 150959 - DNA, 281 bp, Zea Mays
gaagagctgtgtgtcattgcactgattccagatctgttgatgtatagagatcttaggaatgtatcaagtgcaaaccagctgttcgccactacaatgctaagtcactagattcgggaatgaaagtaacttagggtgtgattggttggctacattagactgtatccaggcttgcacagtgagaccaatgcttcattagctagtgtgtcagatttttccgtattagataatacatgtttatataagccggtggacaacaacaacaacaaagtcttttagtccca

SEQ ID NO: 150960 - DNA, 981 bp, Zea Mays
tacttttctctgattttccaaatctccggactgggcgccaaataccagagagaacaggggtctcggtgcaataaatcccaagactcagaataatccctgctgtggactgtgggttattacccctaaaacccaaggtctctttagtaaaaggggcgcgacgatgggtataagcagcccctggctgttggatcgcaagcctagcgcccagattagatttattacccagcgaaccggtacacgattctgaccctaagatccaacatcaacggcgcagatcatatttgccccgaaatcaccctcatccgcacgatctgacctgaacggtcctgattcccttgcctccaatcgttacgccaggatccaattacagctgtcgatgaacaatcctatggtacacacgacttcttccctccccagcgctacggacaaaggcgccatgcccgcatggcggcggatcacaccggcaacatggtacgaccgcacccaccgagactatacctagatctgatagcgtctaatcgaagcggaggttaaagcggattcatggatgcactacataccgccactaatgccgatgaagtacccagtcacggaagaaggggatccgaggaggattctggtcgacggcgagaaattgacgttgctccacagcctcacgacccaattgcttggcacatacggcttccccaggcgaagacaatactccaaaagccaactccgagagcagagaccccccagcgacggctatccctggcggtggcgcgaatctctctctctctcaccagcgaggctctcagtaggcgatggcggctaggttttcggtgatttggaacatggcgagcacggccgagggcccttccccaagttttatatgcgccaggaaaagccagcggattccaagggtgcgcgacgaaggttgttgcgcgaattccggcgagcgaccagggagtcgttgcttctaccgcgagctggaggatgacc

SEQ ID NO: 150961 - DNA, 358 bp, Zea Mays
caaggaaaccagcaaagctcccaatcttcagggatgcaacaaagctcttacaggccaccagctccaaggagtagaggacgaagaagcttcagaggaaggttcaactcccaacccagaaggttgttctgtctattctgtggggaagataagggacatacaacaaggatgtgccaagtcatgatccaaaagcaaaaagagatagctgaagccgaagcacgacagaatcagccgaagcaagttgtgcacactacttcatgatgtttgccatatatccctatgtatgtgggcaaccagcaacccacagtattagttgcttcagcaagttactctcaagttgcatgggcttagctaccaccac

SEQ ID NO: 150962 - DNA, 774 bp, Zea Mays
ctctcctcccactgcacccacctaaactcccgggtggaaagcctagagcagcaagtcaaagagcttaagaaggagaaagcatctctccaagagtgtctcgacatagcggaaggcgaggaggccaacacccgtgaagcctatcgaaccttaaagatggactatgacaagaagcttaagaagctcgcccccacaaagaaaatccggaagaaaaccacgagccaaggatgccagacggaaaagaggaagaaagctcccccagcaccagctcccgccaggatagagaatttatccgatatcgaggatatgtccctcgctagccttgatgatcttctcaaggaatttggggacactctagaaaaggaattcggtagtacctcagggaacgctcgtgtgtagtactacttatagtagtcccatgcttgtaatgtattggtgtaatgaataaaataacttggttgaaaacaatttgcatgtgcataatagtgactctgtcccctggcagatggcttcggataaaaccacgcctaccgcctccgggattggaccagggtttcccctaagagctgaaggggaagccgatagagaggaaagtgaaacccacctccccgcacctccgcaactacccttagatctagcccaagttctagccaatcaaacccgactcatcgaggtcctcactcgaagcctggaaaatcaacgtccgaatggtggaagaccgcaagacagaatgggggatttcctgaggctcaagcctcccacgtttgccggatctag

SEQ ID NO: 150963 - DNA, 522 bp, Zea Mays
ctcgccgtcggcgatctctgcgctgcaatctgtgctgtccgccacgattcatgctcagcttgggcatgatattactgcgggcgtgaaaagatcggagggcgagtggattgagccggcttcaccgtacccacttgcgccggcgacatggctgcgcgaccaccgccattgtgccaccatttgtcgcggttatgacacgcctgcggttgattcatctcgttgtcgtaggccgtaaagactcagcagtgaccgccgtagaccgtaaaccagtgagcgccacgttagcacctccggtgacttttccccctttctccctgcgagcgcttccccatccaaattcgcgctcctcgcggccgttctttataaattgatgcctcgacctgttccatctacttgttatgaacccagtgaaccactcctcgcgcccgatcgtccaccgtagcgccctaattcgggatttccccaaatccgttcttcgcaccgccgtgagcaccacctccatcgacccactgtcctgtccctcca

SEQ ID NO: 150964 - DNA, 913 bp, Zea Mays
aagttccctcctcagttcgttcatccgattcgcagttgggttctctggcgatcgcgactcggctgcataagtagcgtgtctccgtttagtgaggtcctgcttcttgcctgtttcttggggtgacttcttcacttgattactgttcctggtagagttcttcgcgattaatagcttccccgttgaacttccttctgaaggatttctagtgaagagttaagatcgcctgatagagtgatagttggttcttagctctaactgacatctagaaagaagaacatctttcccccactttttatgtcgattaatccaagatccgactgtcgactggttaattaaattatcgtaatattagttattagacgagtgaggttgttgggtggaatacttgggctctcggatactgggattgctaagacaagtgtgttcgtagctatccatttggtctcttgtttgtttattggttattgctcagttcgataccttgataaacatccatggaaatgcaatgttccttcgatcctgtaaaaacgaagctttagggcatcgggaactggaaatgtctgtaactatcggacacagttatgcaggctgatgagtgagttgaggaccctcattttgctatactgctgtattgttgccttcttgtttggattggaatataatctccagataatcccatcaagcattctccgtggaactcatgaagtaatgcgataagacctctacccgagttgttcagatggtctgagtagcactcctaaatcccctcgtctgtcaaatgccaaagcacaaaactaaggtcctggccgcggtcgttctcacatgggctatgaccttttccccccctagtatctcctgccatcatgcaaatgcatattgcttgactattaaactaagctgctacttggttcat

SEQ ID NO: 150965 - DNA, 625 bp, Zea Mays
taaggaaaatttagagaaattgtggcttgaacttgctctgtcagtcgctctgaatggggtgattgccatggtacagtaacttgactggatcagatcaaccgcgcggctgccctcaccgccgacggattcctccgccgtgattcgggtcaccggcgtttggattcgtgcaccggacttgtggatagcgccgtggggttaaaagatcgtcgtcaccgctggacttgaagctaccccgatcggccacgacacccctccccttggctcaccgcccgcggtaaagtgctcaccgtcgaccaccgcctcccggccgtgcgccgcgtggctcaacactttcaccgtgtcgccatgacctcctctgaactctccgtagctcaccggagttacggccacggcgataaacacgtgttcactgcacgcggttcttcctcctctccggccgccagcacaacctgctcaaattgatcgccgccgttgtcactccctataaattgagccccacaccagttccgtaaggtcctaagctagttaaccaccgctaatcggccaccatcatccactcatctgctcgaattcggagtttcccccaattcaagcttccgccaccgtgaatccaagctcaccgtcg

SEQ ID NO: 150966 - DNA, 569 bp, Zea Mays
ctgtcccatctggtaacagtaaccgagcacagggttggcacagggcttcatgatttgtcagtaacactgagcaagaagaacaggcatgtcaaatggcttcatgatttctcaggaacaccaatagcaaagcacaggcttaggaaatggctacatgatttctcactaacattaagcacagggttggggatataaatacctaacacattgtaccagtagagattcaggcaatatgttggtactagctaacggtgcgtgaaattggctttgaggtgtccaaggaaacttgcatatgacgagaaccaccgtagaacttgtattagcctatagcactactgtctacagtgtccaaccaacttgtgattgaaaacaactacattaagaaccttagcctcgcgcccagaatagagagacctctgcatcagtgattaccctctatacctgtactctctgagagagcaccaaacgagcatgacagcgatatccggaagagcccaattattcccagtgaacagcgcgagcgaccccgggatgaagcagagcaccccatttccaatctggttccgtgcacc

SEQ ID NO: 150967 - DNA, 746 bp, Zea Mays
tcagccatcctagtttggttagagactgttggttgatccaccattagggatgtagagtcaaccgattcaacaacattttgtacctccaaaaggcaactcttagtgggaagttcaaataagtcatcattcttgtcatcatctagattaaatggatttttgacagaagatgcttgattcattagtaaagtatcatgtttctgactggtagaaaactgatcttctgtacggatctcagggacaatatgcttgttgcagacttcctctttagtgaacccattagtcttctgtatggaaaaaaaatcttctaaagtatctgtttgtggcctctctgcaaaggtgaattctacatcatcgacattagtaacaggagtatcatccatcttggtaacaggaagatcatcctgaaaaccagcaatgggacatctcaaagttttcttgctagaattctcaacaggttgactatcatcaggtacatcctcaacactccagttctatctggggagctccatggaacaatctgtaacagtattatcagtgcaaacaacattcagatcactcccaattgacatagcattagtgccaggattggttattgtttccaactgaacattatctgatcctactactaataatcttggtgatgcttcaggcatggtatgaagaatattctatcttccataaaaccttctacatttcttgagcatgtagactctgattctggttccaaaattaccaggcggggttcc

SEQ ID NO: 150968 - DNA, 1156 bp, Zea Mays
tcactaagcatttcatcaactgtctggtttgttgttgtgcccgattggtaggtaagcactggaggaggatccctgccataaactactcgaaatagggtagtgtgcaatgctgagtgataagctgtgttatagcaatattctgcccatggtagccactcaacccatgcttgtggacggtctcttgtgatggaacagaggtacattgcaatgattttattaacaacttttgattggccatctgtttgtggatggaaggttgtactcatccgaagtttgacacctgatagtttgaacagttctcgccaaacgttcccagtgaagacggggtcgcggtcactgacaatagactggggaaaactgtgaaggcgaatcaccccttcaaagaaagctcgggctacacttgttgttgtataggggtggcttaaggcaatgaagtgtgagtatttggaaaatcgatctactattgtcaagataactgacttgccatgcacctttggaagcccttctatgaagtccatggatatgtctgaccaaatctgggagggtacctcaagaggttgcagcagcccagctaggtggagagcttcagttttgttttgttggcagactgaacatgccctaacccaatcccttaccaaggatctatctttgggaacaaaaaaatcggcccgtagtcggtgtaatgttttctggattccaccatgaccagctgagtgggctttatcgagtatggctggcagcagggatgaattaggcggcacaaagatttgtcggccatgcagaatgagcccatcgaccatccgccatggttcagtgagggtgccatctttgatctgagtacaaatgcattgatagtcttggttagaggtgctttcctgacacaactcttcatacaaatggaaggtggggctagacaacatggcgatcatgtcgtcggtagtctaccgtcgtgacaaggcatctgccactgtgttgaatcggcctgctctgtattccatggtaaagtcaaacccaaatagtttgttgatccactgatgccgaggcactgttgacaatctctggtcgatcatgaattttaggctgaagtgatctgtgcgcactgtgaatcgatgaccccagagatatggtcgctagtgatgaactacctgaacgagac

SEQ ID NO: 150969 - DNA, 543 bp, Zea Mays
cccacctcacgcacgtcctcccgcaaaccatttcgcgcaagcccgtgcgtagcctacctgcggccgtccctagtcgcgcccgtcccagcagggcccccactggtcagctctgttttcttctccctcgcaaccacctctgtgcgcatgccaaggaaatcccgtccacgtctcgtgggtttcgcatcaaccgctcacacacccctattcaagcgctcggcgtcgctgtctacaaccccatcttcaaaaaaactcatccacgccttgcagtcgccacgcccgcgctttgccttgcagttgcgcgcaactacagcgtcgctacgtcgcgcccctagaggcctcgtcgtcctgctgcgaaggtatgacgcctctctctcctcccccgtgttcccctctcctcgcgctgcgcaaccgtagcatcctatccgtgccacgtcgctgcttcaggtcgcgctctgggccgtcaagaagcccgcacggcgtgcacccagccccctcgccgtcgagccttagtgcccccagatgcagccccgtgtgtgtcatggc

SEQ ID NO: 150970 - DNA, 504 bp, Zea Mays
atctgaagctgcagatatattcacacgccatgttcctttcggtcgtcctcttggtcgtttgaccactagtttttgtgaccgctcgcatgtcgatgtgttgtgtcctgtgtcatataagccacagttcctgcattttcttctttttctgtctatctcgttggaagtgtcggggtggaacattttcgtcaaccggtaataatttatttctgcttcctttcattgtcgacactggtggtgcagacgctgagacgacatcaacttctgctcctagtggtacaggatcagtttgatgcactgtgcttggtatgtcgtcttgcagataaacgtcgtgtggtatagcttcaagcactaccagtccttcttgtatcatcttcctagcgatttgcatggcctatgttttgaagtaataaaatgcgaagaaatcaataatactcagtaatacaacccgaaataataagtaaatactcggtaatactcagtaatacattcggaagtgcttagtaa

SEQ ID NO: 150971 - DNA, 584 bp, Zea Mays
aggaagaccagactgcgagttggaatcattcggtcggaaggcaacagaaaaactaatagtaattgggtagctcagagccatagtttctccaacattgccctcaacaacctgaacagactcaacaatccacaagtcacgtgaagcaggaatagtagacggatcagtacaccaagcagagcatcgaaagcaggacaaatcttgcagtgccaaggtctcctgatgcacctgatgaatccaagcataggggctaagaatatgttccactgtactagtttcccaggcatgaacagggatgcctccaatctccagatcaaccaagaatggcaaggtgactcccgaggcgccaagaaaccttgcccaacgcttacagataacagaaaaagaggcagttctgatgagaggccaacgactgactaggaggtctgccatggccagatcaggaagaatcagcagcagattacttgcagagatcctgcggatgaccagtgaattttcattgatattcaatcttggagccagaagcgcagcaatctccaccggaggaatcacaaggtcgctgataatggttaacaccaccgcagtcc

SEQ ID NO: 150972 - DNA, 563 bp, Zea Mays
gcgttgtatactttgtctagtatgttttgttatgctgtgctggtgtgattatagttcggctgcgcccttaggcggcttctgcggggatagccttcgcggtaggcttcggtcttttgcgcacttgttgtgctagtccggctgcacccttaggcgacttctgcgtggatagtcttcgcgatagacttcggttttttcgcacttgttgtgctagtccggctgcacccttgggcgacttctgcgcggatagtcttcgtggtagactttggttttttcgcacttgttgtgctagtccggctgcacccttgggcgacttctgcgcggatagtcttcgcggtagacttcggttttttcgcacttgttgtgctagtccggctgcacccttgggcgacttctgcgcggatagtcttcgcggtagacttcggttttttcgcacttgttgtgctagtccggctgcacccttgggcgacttctgcgcggatagtcttcgcggtagacttcggttttttcgcacttgttgtgctagtccggctgcacccttgggcgacttctgcgcggatagtctt

SEQ ID NO: 150973 - DNA, 588 bp, Zea Mays
ggatattttgcataagtcagatcatcttggacactgagcgcttccattggtatctgttcctcatggacacagagacacttcttaagttgagacacatgaaatacattatgcacatcaaatagattatcaggtagctcgagttgataggccatctctccaacttgcctaaaaactcagaacggtccaatatagcgaggggacaatttgccgttaaccttgaatcttctcattccatgaagtggtgacaccttgaggtacacatgatcaccttcctcaaactccagtgctcttcttctattatcagcgtagctcttttgcctggtctgagctaccctcaagttctccctgattatacagacttgttcttctacctcttgaataagttcaggtccaaagaactgtcttcccctagtctgattcaatataaaggagtcctgcatttcctgccatacagagtctcgaacggtgacatcttcagactggcctggtaactattattatatgagaactcagcaaaaggtaggctcttgtcccaactactactatgctaaagggcataagctctcaacatgtcctccaatacttgat

SEQ ID NO: 150974 - DNA, 553 bp, Zea Mays
atgggggtaaagcccagtgggacgtcatcgcgagggtgatcttttgaattgcatgtctaaatgatgccttcgggagtagggggtcttcggttcagggatgtttcctgttgattgcccatgtttcattgttctcagctacgacagagagagtggcgttagcgaggacttctttgcctttcttttcgacgagggttgccttcgtagcgtcatctagggaggtgctggctctagtgattactttttccggggtcatcatgggtttggtttttcatagcacgaatagtggcaccaaatgttgtgaccagctgacacttggacaggtgtgcccaatcactcggggaaaaggagaactgaggtgcacaacgaaatagtaggtagggaactatagcgtcttgttatacgtgtcccatacgtgtacagtgcatggttgtttataggtaaccaggcgggtaggtgggtccccaactacagttatacccccggttacctgctacatttccccgcaacgagatcgttacaatgtggtgaagtacagtaacttagacacactctg

SEQ ID NO: 150975 - DNA, 1261 bp, Zea Mays
gggctttctagaggtgttggtttaggtggtgttacacctgaatgagtaccagttgacaacagaccaggtgaaaggtgatcctagatcagaagcatatggttcagataaatcttcatacaccgcacctaaattcccaccatcaggtattgttccttatccgggaatagtgtaaaattccactacaagcacatggggtagcagattcatataagatcttttattccacctctaagatcaattatcttcaaatattatatctcaaaattatgtagcttcttggctataggatcatataacctatagcccattgtcccagtctcatagccaataagcaccatcattgtgaacctctctgacaacttggaaatgctagggccaactttcttgacattagctacacacccaaatgtcaaaaggtgatgtacctcgggtttcttgttatgtcatgtttcatagggtgttcttccttggaggcttcttgttaggacacaattcaacaaatacactgccatgtccaagaacttgaaagcctcatcaacatgtatcatttatgatcatcaacaataagtaggaaatagctcttaccccatggcgtcttcagtctaatctgctcacgaagatctgcgtggaacaaatcaagtggcttgtcagccctataatttgccacttgtgggaacagatctcgacgttgttttctgagtgcacatccgccatagaattcttcctcttgattcattagtgacagcccttagaccatccctttcacaccgagttgttggagtgaccaaaaattgagatgtccatagcaagcatttcatagccaagcctcatcatccgcctttgccaccgatagacaggagccgcaagctgcatcttcaacaaatacaaataattcttgatatgaggtgctcgagtcggtagtgagcgcttgacatcaaacaaactgtagaattcatcctcaattacgatcttgcagctagaagtggttggaaggtgcatcacatggatgtcaaatcagcatttctcaatggagactttgttgaggaggtatatgtcgaacaacctcctggatttttttgtagaaaaagggaatgaaaaggtgctcaagctgaagagagctttgatgggctgcgtcaggcactcagggcttggaatgcaagacttgataaggagctctcttcaaaacttggttttgctagagacctacataagcatgtagtatatagacttattgttggccccgattgctggaatgcacgac

SEQ ID NO: 150976 - DNA, 798 bp, Zea Mays
ctcagattaaatcgcgcaaacagcgaaccggtacgcaacggctgccgtgcgatttaggatatacggcacggattttatgatcgcgcgatctaatccagagcgctcatcaacgaactgacgcaccagatccgcccagatcaaaatatcccagggaggtcaccgtagccaaatcctgaccacagctttgacatcagacggctgctgtgcatcttccacctcacgccaaagcacgatgccacaggatcttcgcccgcggtgggatctatcgtacgggtcttgaggtcactcggcacccaaatcctatccaccggagtgcaagcagaggtagcgggcggaaacagtggtgttcttaccagttcttgtacgccgcgattcgcagaccatcgtccatggcatcccgcaactccacagtggttgaaaacaaactccaacgcgaccaccagggctggcgcggccacacgcaccactatcgcgaggaggagacagccactggcgcgcaggagcattaccatccgtctccctgaccgatcccacgaccaagcagacgggatggtgcgccacggaactccctccaatgtcgaccgcacgcagccacggaactcccaggcgttgtgcgagttcatgggaggtgctccattctctatcttctctcgatcgctccctgttcggtctccctttcaggtttccccaagctcggagttcatgggaggtgctcgatctcacagccgggacttgggggtgcacagggaggagggaaggagcaggccttcatatgccccccgaggacgagcctaatca

SEQ ID NO: 150977 - DNA, 1168 bp, Zea Mays
gttctgggtctactcttaggaactgcttacattttttggtctataattgcaccatttagagctttcttttgttagattaatgctatgttatctaagtttctacagattgtgcagaagatctgattcgggtgggatattttaagttacatgcatgtgtgttttcagctctattttaaccatgggaacgggactatttggtttcaataaatgtctggatttgaaatgtgggggtgaaaatttctctgatatattcactttattttggcactggctcctgactcctgatttctgaccatgtaaccacacagaggtttagtactaaacatgactaaaccttgattcctacagtcagactgctaatctgctgtattgggctgagactctaagcctgaaaaagcttcacttgcatgggtatttgtgttatctttatagctaatatatctttaatctgttttcaaatttatgtatgcccatagttgattagttagttggtgatttggatggttctggagtatttggcttgtagcatatctgtttttttaatgaaagagaaggtatggtggtgtgtttgggacaattacctgcctttcatgggtgaggattagtttgattcgcaaaattgggtctcttacaaccctatgcaagtgggggtctacattagtgattaaattggacaaaggtgagctgcaaaagtgaaattaaggttaagtaggtggattaatgcaggttaaattctaatgtcataaccttgtaaagcacacatcatggaaaccagacggcatcttgtattcttagttcatcctgcattcctgcatcacacacagctgaccaaacagaacactgacttgtatcttctcttgttcaaaccagtttgggttgaggctgtattttactggagtcactgctacaagtagaaattgaaagatagctattttatatagaagaacaggataggaaaccagaggtgcttgtaccaaataggaaatactactgatattaccgaagttacaattcacttgagtaatacataaattatccatgaagttatatcccaaaacctgatctagcccttcaaatgcatatatggttcaacatgagcattgcacacctaatctgagtcctcacatataaaagaaaaagatttgtcatgggacttgcaggccgggag

SEQ ID NO: 150978 - DNA, 335 bp, Zea Mays
tgaggctcgcgaggatcatgcatgtgaagacaaacttgttgcacaacataggctatgtctggtcgggtaaaagtgaggtactgtagtactccggctaagctgcggaaatccgatggattagaaacaggagcatcagtagctacagaaacctttgggttgatgtcgacaggtgtagaacagggcttgcaatctgccataccagcccgatccagaatatccagcatatactgacattgtgaaagaaagaggccgccatctcgtcgttgaacttgcatccccagaaagtgatgtagatcacccaaatctttcatagcaaactccaactgtaaggcctg

SEQ ID NO: 150979 - DNA, 278 bp, Zea Mays
ccttgatttgatgaagccgatcatcttcggtctttgttcttgaagttgttatccgaattagggacatgtagttaaggtagattcgtatgtacccaaagtagggtgggaggcggttatgagttaaataagtttaagcactgtctgtcttgttgttttgcttctaggttggttggataagttatgtaacctattatgtaggtcaagttgtcgtgtagggcttagttgctctaagtcaccaatttaggcttaagtgaatttggagtatggccttatccttt

SEQ ID NO: 150980 - DNA, 527 bp, Zea Mays
tgctgctcccgttccactccacggcaatcctcttcgtcggcaacgtggtacgctcagaatggacggtagagtggggtttattcactcggatatactagttgttcatccagaaaatcttcaaacaaattaaagaatatgcacatgacattagaagaagggcacatactttgcgtggtccaaccaatcttataaccatttgctcgtaaatggcagagtggagatagtgcacaatacccaagaaaatgtagtgtatggttgataactgagattatttcagatagcacattatccaagacatggaatacgaactgtttggatgtctagttgataaattttatctcgtcctgagaaactgcaggtaaccaacaatgccttagaaaagtcagagaattgggagattaacaccaagaaaatgttattcctgtagcccaacaaggccgagagatattatattggtttctaggggggtatacggtacatatattatccaagcatccgattgtccgaagaggttaatcatccgtaga

SEQ ID NO: 150981 - DNA, 300 bp, Zea Mays
cgccgctgctgctcgctcgcgttcttgtgccgcggcgacctcggcctcttgctggcgccgcgcactcgaagtgaccgagcgtagggacatggtgggctactgaggggtcgctgcgtgtggaagaggctgtctcagacgaaaggttgctcgtctgagcaagagaggaaggaacagttggagctcttgctgccgactgagtgtggggagaggcgcgggaatgagatgagcaagagatgtttaggctgcaggatagtttggctttgataccaattgtaagtagagggactctaactctcatca

SEQ ID NO: 150982 - DNA, 619 bp, Zea Mays
tgtgaagttgctaacatgttattgtattaatttagcttttgcatatctatatcgttctacaaggtctcaagctttttattcttaattatcattaaactatatgaaggttgttatccctatggtccaattgatctcagcatagtaaatgtttcacttacctggaacatatataaatctgttttggaccagtgtctgaaacacttagcaatttatctcagatatatgtaacatgctcttctcattattctgactcatgaacattggaggtattcaaattttgcattttcgccttatctgtatgcaccttatttgtgcctttgcaagggacctttgtgctttacctgttggtaacgcccttctggactctactctttttgcttgctagggcgccacgaagcgcgcttctttttccagtgttacttgattgtgacagtggagaatgtcttgttcccgtgcggcgagtggcgtcacccgaacttgtgcatttgatgttttctattagatgcttgaggccatcgtctttgtgtcattaattaatggccctctgctcctgagatgtttgtttgtctcttctatgtcatatatttgtttaatataggttgaatcattcatgtctgcc

SEQ ID NO: 150983 - DNA, 481 bp, Zea Mays
gaagaaattatttttgtcaggtgggagacgacatgaagggagaaattcccacatatagaagtagagatagatattaaatttgacagttgcagacaatgtaaattgcatcggtgacatcgccatcgagtccttttgcggacaaaataagtttctagcttagtatattcgattttgatatctcacaaaagtaaactcaactcgggatccagaacgtcttcccctttccctcggctgttcaaccacgcatcggtggcggtgacgcctcgtcttccacactctcatttattcctgtctcactttctccaaaggcatatggcggcgaaaagtcacaacagtggttcgaggggcttgtcaatgggggaaggtgaaggtggcggcgtaggtgacagtggggtaccacggtagcggatgacaagtaagaggcgatggcctgctcgatgtcctctatggccacttgctcgacaagatatcctctattgcc

SEQ ID NO: 150984 - DNA, 575 bp, Zea Mays
tggagggcctcaagattaaattagcaaagagttaagcctatgccctcgtcaaatctagggtaggtctcagggcatgaagcatcgggagcgattatctcaatagctgggccatgcggctgcttcttgtactgaaatccttaaatgcttcttggtagaacctacagatatgatcttccttgggtgctaataggggtccttgggttcgtggttggattgcttctacaagcaatcccatattttttgctagatgcctaataaaatagattctgaatatgtctggttggtacttatgcatttcatcgtcgcatgtgtcggtaagcatcgtgacaactaggtccccaagacaactaagtgcaatgagaggattaaactaggctaggaaaaagtgatccatcacgacagagctgattcataccatgatttatgtattccttgggtcccgtttctagaccttgtcattatgctcatgcaaggccagttgccatccattattacctttagctcagaaggcgaagcatcgatagcagccacatttcatgtttgcactccttctgatatgatgtgttatacctcat

SEQ ID NO: 150985 - DNA, 486 bp, Zea Mays
cgcgaaaccacggcgacggattttgttcgctcggttctcgacgatggcagtaatggaggctcgggtcgttggtggttgagaggagagcggaggcgaacccggtgagctttatacccggtacgtgcccgcggtcgcagggcggagccgagtaccttcacggccgagatccacggagtccgcgcggtccgcccgacgcgttcggcgaaatcggcttctgttacagcgcggagaggcccagcttgcaggcgagtccgccatgtggggaccaccgcctaatgaccgaaacctaactacctcccctggagacgcggacccgtccgggaatctcggcacatgcggagtctgcgcggcatcacgacttcatttactcacgccagcgcgaggaagacggagatggagacagaggggatagagctgacaatgtggggcccatgagccattgactgaacgcgcgcgcagcgcggaaagaaggcgggtgtacgtgag

SEQ ID NO: 150986 - DNA, 920 bp, Zea Mays
cgcgtatataaaaagaagggagctggctcaagaggtgaggcagtctcagctgtgtgagcctgcaagagtaattaacttgtctactactgagttctcaccccctcctctcccatctcattccaaacttgagattatggccatttcgtcgaagaccgttgctgtgtccatgctgcttctcagtgctgtcttcttcgtgctgctctccgcgccagctcatgctaggaagctggggacgatgagggcgcctaccagcagcgtgcgtcgtcctccggcggctccatgcactccaaggagtattctgcaggaggtcgctactcagaccgaatctaccactactccaggtcacagccccagcattggccacaacagccctccgaattgaaatgctctctgcatctggaatcatctgtaccccgagcgagtatatatatcccatgcttatatatgtggtgtttgttcccttgaaatcgtatggtttgtttgaacttgaaaggcaacctgaatttttttgtttcttttctcttttagaatccaccaccagtaaatccagagcatgcatgcatgtggttcatatgctttattttttcccccacttttgtgtgaaagacttgctaaacatgaggaggccaggggcggtgtagccgtgtgtgtctcttctgtaaggtgttactcgatgctgtaaacttgaggaggtgtattgtcacctgatcttgtttaaagttttgatctacctttttgtgtgtatcccttcgattcaataaacatcagatttgtgccattcaaaccggaaaacaacaccttctgtttcgtgcatggcttttctgtatctatgccatgtcttggtcctttgtgcatggcatctgcttgcacgtacgttttagggcttccccagcgtgccatgttggtgtgctgcccctaac

SEQ ID NO: 150987 - DNA, 629 bp, Zea Mays
gattttatgaatattatccactgactggacctcgcatcaatttccagagagtgcagggggtcattgcgcaaaataatctagacacagcacactgtgcagtggacggcaggttgatttcactaaagtccgagggctctttagactaatgtgcccgcgaaggggtacggtttgatcccgaccgttggatcagacttgggcgcgccagattagatctggattacatcgaaccggtacgcagtgaggaccgcaggatgaaccatcaacggcccagatttaatgaaccagctacgagtgtccaccattcgattccgatcggacggtgcataacctaaagcgcgaatgggtacctcagatctaatcggggccgttcctagtggatctgacggtgcacggtcctccccccaacggaacacccacgcacgacggcgccgccccgcacgctcggcggagcacaccggcgaggctgcaatcggccgttcccgagcgccatatacaaattgaaccgagctacacgtagaggaggacagcgcagagagtagggaggtgaatttaccgaggattgggtacacagtcgggctgaccacgacacgaggcggcttgacggcgttccgcccactccggtgatgaat

SEQ ID NO: 150988 - DNA, 497 bp, Zea Mays
cgggtatttctagagcttatgtgctacccactgcggatggcagagagcaaggagacgtggtgacaggtacgatttcagttgattcgtttgtggcccatgctatttttgactctggcgctagctattcgtttgtttcggaggattttgtgtcgtgggctggtctttcggtgcagaggttgggtcacccaattttggttagttctgctaatggctccattagtagctgttcagtttgtcaggggtgttccgtcattcttgctgatgaggtctttttggccaatctggttgtgatttccttgggggcattcgatgttatcttgggtatggattggttatcccagtatcacgcagttatatcctgtttttggaagacagtgttattgcaggcgccgtctgttaaggaggtggtattcttgggaagttccccaaagttcacgttatccttgttggcgcaattgcttccggattgccggtcaaggaagtcagggatctttttc

SEQ ID NO: 150989 - DNA, 811 bp, Zea Mays
gtcgatgattgcatgcaggttactgttcctgccctaaaatttggtaacaagttaccccatttacatgtaggttattatttctgttctgtttatagtactcctttattgcaatgcttgaagattcatcgtcgcatggtatacaaacccatgcttaggttcaagtagttggaatggtttgaggatatcgacctgctccacgcccatttgctcgcttcgtgatctaaagacgtcgtggagggggaggggcttgaaattacgtctgccaccatgaaaacaattaatccatgcatatgtgtgtgaaccagttcaccggtgagagcaagtcggtgccccttccacatggcagagaagaagtcacaaaaggtttacacatcgaatttgttctcatgttcttcaggagtatgaatatcctctaggtggactctgttgcaatttttagttccgtgaatttgtttattgcggtatctatagcctatgtgatgtttagatgatctgactcctggaagacgtcctaattgggattaaggctcgaggtaatttaggtattggcttagttccagttctaggcaacatagtaattcccatttttcttataatgatgtgaatcttaatgttttgacaatatgatattagaacaatcattttattctaacatttttcatgatatggtgtgtactatacaggcaagagcaagtctctaatcttttttaacgcaggctacatcagtgagacattgcagctcatacgagtcttgaaagacgtcctgattccgatgaaagctcgaggtgatttggatataagcttagttcca

SEQ ID NO: 150990 - DNA, 751 bp, Zea Mays
ctataaatcttgctcggtagggccacccacagccgaagctgcatttttttgggtaaacacagccgaagcagctctgcaccacccgtcatcaaatgaattctccctgggttgagaaaggatggtgaggcccactcttagtatgtaaaaccagaattggcaggaaactagacaataagatacgctgagtagccttgtgttcttcaacacagaaggggcaaacctccggatggaccttgccgcgccaattgatctgctgttcaatagaggatatgagccacaaatcagaggaagaactggcatttaacaggtgcccaagacttccctatcctcttgcaatggcaaaagtcgacagcacctggaaaaagagcatcataggccgacttggctgtatattggccagataagcaccatacatgcttatctggcatatcttattggagctgcagctcggcaatcaaatcccacagtaaggaaatcagcaagggcaccctctgtcaaaccagcaccaacaccattctcttgtttgctcttttgagcaccaattcaaagaggtataatacaccataagcattcaatcccatcctctcttcgattaataatgcacctaaaaacttgctgttttttcccactaaaaaactacctttaactatatttttcctgaggggtaggaggatacttccacctatcttgttctaactgtactaagctagcatcctgttcctttgccttttatgcttctgacctgaacatt

SEQ ID NO: 150991 - DNA, 423 bp, Zea Mays
gtctgatgcagcggataagaaaccacgcatacccttttgatctttgtgtgctagatacgttcctaccattaacttttgatcagtagtaattgtcatattctcaagcctttgccacaatattgcatcagggttaacaaaggcataggcactggaggtggtggcttcttaagatcatttcgaagttctaccaaagtagcactgagttcatctactacctttgttgtgcgactctttggtttcacattcctcttcgctggtactccctctccttgtgggcgtttcagtccagaacttgacaagctatgatcatctctttgagatggatgatgattgggagatggtaaagtgtcagaatcatcacctagatcatgcacaggctgaggatagttggagaagtcactgcacacatcatcattgaagtca

SEQ ID NO: 150992 - DNA, 418 bp, Zea Mays
cgcaggaaaatggataagagaattgccttatgttgtttggagcttgagaactcaaccaagccgggccctgcatgggaacactccttttttcatggtctatgggtcggaagcagtgctacccgctgatctcaagtttggggcgccgaggttgattttcgaaagcatagcggaagctgaggccaccaggctggaggatattgatatacttgaggaagaacgactgaatgcagtaatacaatcagcgcgataccagcagactctaaggcgctatcacgataaggctgtgcggcaaaggttcttttcagtaggggacctcgtcctccgccgaattctaacgggggagggacgacacaagctgtcacccttatgggaaggacccttcatagtagcagaagtcactcggcctggatcgtatcgc

SEQ ID NO: 150993 - DNA, 698 bp, Zea Mays
cggggatcttcctagtgcgagtactgtgtataggcggcgaagggtggtgtcgaaacacagtgtgggtgagttttcgcgaagtggtaggcgccgtcgtatgggtatggagtgtggccgtcttcgggtagaccgggttggtaaacgagaattgttgtcctcgccgattggggcgagcataggtgagggagatctgcaaaatctttttgagggtgaggaattaaggataatgctgttcaattatagggagatgggtatcatcccgaaggttgagccgatgtaatatgtcatgcccttgccgtgtgtatgtaactgtaatttgtatggtaatgtggcctgttggccgtattcgcacgcctgtactgatccagttgcacccgtgggcgacttttgcacggagtgtcttttagtgagagacttcgattaacgcacttgtgctatcccggctgcacccttagttgacttgcgcggagtgtcttttagataaaagacttcgattaacacacttgttgtgctattccggctgcacccttaggcgacttttgtgcggagtgtcttttaaataaaagacttcgattaacgcacttgttgtgctattccggctgcacccttaggcaacttttgcgtggagtgtcttttaaataaaagacttcgattaactcacttgttgtgctattccggctgcacccttaggcgacttt

SEQ ID NO: 150994 - DNA, 414 bp, Zea Mays
tcgggtctcctgggtagcgagcttccatgttctggccttgttgtacaacttgcctgaaggttttcttgagtgtgagaggtgagaagccaggcgcagttcctagttgcatcccttgccccttatgaagtggaatggaaccaggagcgggctgctggtaggtagaactgtaaatgcctgcgctctgcgatgaatgctttacagatatgccgcagctacgagaggcactggatttactcgtgtagccattcctagggcacagtctcgccctatgcccggtatgcaaacagagtcagcaacgcgtagcagccgagcagcgaaaagcgaagtggtttggtgaaaggcagttgaagcatttaccctgaagcttcgatttgaacagtctggctcccattgcatcgatctgctgcagagatt

SEQ ID NO: 150995 - DNA, 1302 bp, Zea Mays
ctgaccgtgtgtgtctcatggctgacaaccaggccgtggttaccaccatcagccccaccgttaacatcctccttctggacctgaccgccatcggccttgctgccattcacattttctcctctgaactgttctctgtcccattcttgttgcgatcaaccttccctttgggatcacccaaattatccttatctttcctgctgccttcttctccgtcctgatcaaaagcaagcggcaccgggacaccatccaccaggtgcttctccacccagtaatgcacttcataaataactctgttgatctccacctcaccagcagaggggactgcttctggatcaattacacccaccatcatccgacagatgccatgcttccggaagaattccatgtcaacctccatagtggtgccaagcgtagacccaactccccaaatatgtggataagtgcacagtgccgacggtagaccatcaaactgtatccaaacgtcagtaagagtggccttcactcgacccccggatgaactagccttgaactcaagaattgccttctgagacttagcctggaccggaccccattcgatcatcctttgcaattccgctgctgcaggaaaggaagtccgaaacacctttggggtgatttgatccacgttccatggaccaagtccgggtagcagcctttccaactctcgaatcacattgtccaggctaatactcccctccaccacttgtattattgccaacctgttctcattgctacccttagtgagcttcttgttggaggggatgtgaaagaaaccgccatttttatggcaaaaccagctgggatagcatgcaccttaggagcgttaaacaccggacatttcagcttgatatggtgtcagtaccacatacttcgcagaataactccgctgtacactcgctcatcacgtggcctttcccgtaacacctatggcagtaccccttgctattcagcttgccctcctccttggtaccttccttctccttgttcacagtaatcttcttctcttcctttgctgacgctgaaggaaggagtggtccagcatttgcactcgcctgcttgtgatcggcggccctgggctccccaacagccttctcagcattcataccttgcaaagcagtgagtgcctgctggagaatcgttgccagtcccgcctggtcgctaacaccagccggcacgatcgtaccactcgacgaaccgtgcccagccgtgttccctgttggcggctggggaaagcaggaaccgccaccatctgtctgcggtctctcttcacctcttccacctgct

SEQ ID NO: 150996 - DNA, 500 bp, Zea Mays
gtgagattgtgcgcgtgttttacactaaatttcgtactcatttacgatgttttatctcacgttttacgctgaaatcattcgagccagaacccgcgcatgatcggctgcacgcgattttcacgccgtaattttgggggtcgtttgctgttacaaaacagatataggatttacgataaatttcgtactcatttacactgtttagatcatgttttacgctggaatccgcccgagcctgaacccacgcacgatcgggtgcacgtgattttcacgtcgtaattttgggccccgtttgctgttacaaaacagatatatgatttacgctaaatttcgtactcatttatgttgttttagatcacgttttacgctggaatccgcccgagccagaacccgtgtacgatcgactgcacgcgattttcacgtcgtaattttgggctccgtttgctgttacaaaacagatataggatttacgctaaatttcgtactcatttacgctgttttag

SEQ ID NO: 150997 - DNA, 415 bp, Zea Mays
tgaaaagaaagaacgaatcatttgggtggaggactcatttgtgaaaagaacttgacgtgcaggcggtggtatgcaaaataacaggactctctatttcatacgcgagatgtgttctagacggccaggatgatgagtttgcatggtttcacttgggtcttggtttgcaccagatacggagccatcaataaaatgatacaaacccgtagaccttttgttgcattctatttttgttgccacattaacaagttagattgcattatgaatacattgatcccttctttgcaaacacttagataactcatttatgtatccagttattgcatacattaagtgcacaagcaaaataaactcaaaggtttaaattctccaagcataaaatgtatctttgtcgaatcatccttatgtgaaatatcat

SEQ ID NO: 150998 - DNA, 433 bp, Zea Mays
tttttaatttgacaccaattttctgtgaatatgctttaatgctatcctgatatgccactttgcaatatggaggcactccagttcttttaaagttttctccttcagccttcagaatgtatagaagggtcgccgaacttatgcaggaattagctatttcccttttttctttgaatcatgttcatctttgcattagcactttctattttatcagccattatatggagcaattagctatttcctctttttcttcattgaaccatgttcatctttgcattttataactgcagtgtcctggtcagatcctctgattatcactttacacatttggatgtgaaatgggggaaagatgattatgaattcattaagttttcgtttctaacccaaagctgcgatattttagtcatgggtcctggcacactcgtagagtcatgga

SEQ ID NO: 150999 - DNA, 396 bp, Zea Mays
tccattctcgccttaacgccctgcctcccacccctttccccgtgcacgcaccccgtccccaatccctccgtgtcagcctcgcccgtacacatgtggcaagcggccgccacccgatggcgcgtcatcgcgatccactccccccctctgctcgccatggaaggccggcgccgccatccgaaatctccgtggccacccgcacgaccgcgcgatcgactcccccacgcccgatctgctctccatggaaggtcgtcctcgcgttctgctctccatggaagcccaacgccgtcctttagaaatctctgcgcccacctgcgcaaccacgcgatccactcccccacactctgctcttcaatgacatggccgccgtcgcgctcctcctctcgccgcggagtgtct

SEQ ID NO: 151000 - DNA, 569 bp, Zea Mays
cgggcgttgattttccagacttctagtgaggacctcaatgagtcgggtttggttggatagaacttgggctaaatctaagggtagctctggaggtgcggggaggtgggtctcactctcttctctaccggcttctcttttagctctttggggaaaccctgctccaatcccggaggcggtaggcgtagttttatctgaagccatctgccagggggagagagtcactattatgcatatgtcaatttcaaccaagttattttattcattacaccaattcattacaagcatacagctactacaagtcgcactacacgcgagcgctctctgaggtacttccgaactctttttctaaagtgtccccaaattccttgagaaggtcatcaaggctagctagggacatatccttgacgtcggacaaattctctctcctggcgggaggtggtgctggaggggctttcttcttccgctcagtctggcatccttggctcttggtcttcttttggattttcttcgtgggggcgagcttctttagcttcttatcataatccatcttcagggttcggtaggcttca

SEQ ID NO: 151001 - DNA, 589 bp, Zea Mays
tagtcctagagcatgcatgattattttagtttggaactagcaatttgcattggccagtagtaatgcctaataaatggccacagtcatgcacccaaccctttcgacaaatggccaattcccccatgaagaagcaggccgaacagaaggcagggcgtggttttttgttgcattgatgataggcgccggccggccgccgcaaaggaaatctactaagctagtgcaccggccactagctaacaagtttctgcaacttgttgtcttgttccgtgtcgtgcactggccagaactttacctgcccgttttggtcgatttaaagcggggagccggtaccgaaattttgctacatgaggccgcacaagctagctagtttgcataaacagacgcgcgcgcgtgcggcttttcgctggctgtgctgccccttgcatgccatggcccatggcccatggagagggcagcgccggcatcttttacagtttcaacttgccatggttactttaatcggtcttaaatttctgccacaaatacgtactcactcacatggtggttaatataaggattaacttttgttcagcataaaattacagaccct

SEQ ID NO: 151002 - DNA, 351 bp, Zea Mays
caccttttgtgtcatccagactgcaagtaatgtaaaactactgtcgctagcttcaaccttaaacacaggtcaaaccaaacctactaacttcagcacaatttggttgaccaagaaggttttagcaccttcttctaattcagataaacatagtataattttagcctgggaacctatctttttgtagaatttaaccaaccaacatgggaaaatgttggtcactgtatgtagcacatatagagtttttctgaatatcacatgaagtcaatacccttagtaaataaccttttatctatcatcgaatggccaactaccaaccaaatttgaccagaaccacacgagttatcagtccac

SEQ ID NO: 151003 - DNA, 378 bp, Zea Mays
ggcagagtttcctcccgaggctggggccgacttcgggcgaggcggagttctcctcgaggctgcgactgtgcctagatgtcacgtgtcccatccggagtttgttgagaacagtggccggagcgggggagtagtgcccggtattcacgagcgtgcgtcatcgtagtcaataaaagtagatgggactgcggtcccatcgtcctctgttgactgcggtgtcacatggagcaaatatttgtatcgttgcatttaatgcacacatcttcatagttctcgagaacttttggctgaggccgatttcgaggctggccttcatccgagatgccctcgggcgaggcggaaattactatccgttaaagggggcccatcgggcgagtcaag

SEQ ID NO: 151004 - DNA, 645 bp, Zea Mays
gtttaacttatccttttaaagctatgtacagatttaaggtctccctaatcccaagcttacagtacgccttcaatgtaacaacatatatttcatttgcttggtaacttggctgcttaccgcggtcagggttacttgtactgttgcattactccatatcagcagactttttttggtaaagctgaccattcaaaactaggcaccaatgcaatatatcatgattgaacaatttaagttatccagttttatttgctttcaacgccatacttaaactacgtgctttcctggaaatctggtgtatggcctttggatccaacaaccaattgtcctaaaatataatgcatggtctttggagtatcattttcgttgtttcttagtggtaacttggctgcttaccgcggtcagggttacttgtactgttgcactactccatatcagcagactttttttggtaaagctgaccattcaaactaggcaccaatgcaatatatcatgattgaccaatttaagttatccagatttatttgctttcaacgccatacttaaactacgtgctttcctaaaaatctggtgtatggcctttggatccagcaaccaattgtcctaaaatctaatgcatagtctttggagtatcattttcgttgtttc

SEQ ID NO: 151005 - DNA, 444 bp, Zea Mays
gtatgataatatacattggacagcgatatctacaatagtaacgtatgttatgacaactttggataatgtgatcatgatataacgtataaggaggtccgcttgcacttaaaaactgtttgcacaaccgtcgttgccgagaatagcctgggagagtttcgggatgaaaatttagatacaccatattctagacaaatgttgcctagaaacaatgcggtgaaactaacaaacttaattagttcatagatcggattaatatagtgactgaagttgaaggactacaattgtattttactaatatgtcgttgtgtttgtttgattgttttcgcgtttgcagcacttaggctgtatccaatgaaaatatatccgatgcacatatgaaacacatgaactaacagagtttacaaaaaaatctgaaaaaaatcatacatgttcttttcatcctac

SEQ ID NO: 151006 - DNA, 366 bp, Zea Mays
cgcggagttaggtagttggtccgagcggaagccatggaggtgaatcttatcagccagagtgccgcacacggcacgggtcacttaccccggtcccggtgcctgcgcgctgattgagagatggacggactcagttgcgcgaagatggggaagaagataagcgcgatagagggggcccacacggtggtgtctagctgagatggtgcataacagggaggaggcagctgacgtattgggcccatgtgtcattcacaggcaaggagacgagcgggctcgctagtgggctggttggtggccgagttggtccggccgaggaggaaaacgacccaaaatctgatctggtctctcactttttccttttctattttc

SEQ ID NO: 151007 - DNA, 457 bp, Zea Mays
ccggcctgtttcgaatattcgaactcaatccatagtactagaaaagtattcacctgatattcgtccacaacacagcactattaaaatttaaaatacacaaagaacgaaggcagcatcggaggagaaagcttctccgccagccagcctgccagcgtcgtctaatgacccgggcgacgatggttaagcggttaacgatgaacagcatctgattatccaagataaacagggtagctttcgcttaccagcacggtcggcgagctaacaaaaatcacatggacgatgacgatgaccaagtatattgtgtcgctaaggccgacgacgaattcaagagtcaataatcgcgcgcaattcttcagaatttgctttttttttgtttgtattcgcatttcacaagatcggaatgcatggcgaaaagagcagttgacatatgaacatatttgatggacatggaattaag

SEQ ID NO: 151008 - DNA, 281 bp, Zea Mays
tcgcattaccgcgatatactatactaatcacgggtgaatcaacgggataagcatacgaatgaaatcaagacaggtcgccaagaaagacaaagaacgcgtacagtccgaatactcgacgcacctgctcaccgtgccggaagcataataatggccgcttttccgcatggcgcatctcactctcaccggaaagcagcaaccagtttccagccgtgcaccgccctaacaataataaatccaccgtcgccgcagctgagacgaagacaataaatagaatgctaaac

SEQ ID NO: 151009 - DNA, 579 bp, Zea Mays
ggcattctgtgaatttagtgcagggtttatttatataaaacaaaataaagaagtgatgtgcgggctctactaataaggaatcatctgctcttgctctcacggaacatgtagagtggatagcaacgacaatatgcagtcacatgccaaagcagcaaagctagtagagcgtctgctaacaaacagtcgatcaacaatcatgcagcaacggagtgagagtgcaaccaaaaaataagcaaatgattgaccttatcagttcaatgctctataatgaattgaatgaagcatgactgcatgagagtaccacaagcgcagtcagctatcgatcagaaacttgcactgggaacaagcgtgcagcaggaatatggaacgagggcgcattcaccattttatgatgttaccctcgtttcggactcggtagagaatgtcactatgcccgtgtccttgctaccgcgagtcaaggtcaatggttaacaacagatttgaaatgaaataaaaaaatgctcattcgacaaaaccacctaccattcagagcaaacaccagcagcaaaacatctagtaaaccgactgagcagtgaatct

SEQ ID NO: 151010 - DNA, 357 bp, Zea Mays
ggtggaaggatagggccactgggtgaccggaatttcgctgccgtgcaatcggatccgctccaccccgtgaacagcagacctcgacactccaatcctcggtaacgagtcccctataatgttcaccaccattagcgctatgtgtattacacttcgaattagcgctggagtgtcagtgcgggtggggaatgcttcgccggcatggggcctcgccgtggcggcgttgtggccgccgtggtgggctgtccataggagaagaggatgcttgcgccgtccgatcctctgcggatggttgggattagaagccaggtatcggttcggacacgtccgcttgagaccatcgattagagatccgatggt

SEQ ID NO: 151011 - DNA, 686 bp, Zea Mays
gaacctgattaggactattctcaatataactgggaagacaaaggatacagttaaagctagactggatttaaaagatctaggaattatgaaggagctacaaatcaaagagagtggaggttcatgtgagatgcctcatgctcgatataccttgtccacaacacaaaagaaggccttttgtgagtttttaagagagataaagtttccagatggatttgcctctaacatatcaagatgtttaaatagtgagggaaccaaggtacagggtcttaaaactcatgattgtcacattcttttgcaaagaatattacctgctgctataagaggatttttggacaaggatatttatgaagcactagcggagctagggaaattttttagggaattgtgcagtagaactctcaacaaggatgtgttggctgaaattaagaaagaaatcccaataattttggtgaaacttgagaaaatctttcctccagctttctttgatgtgatggttcaccttgctgtacatttacctgatgaagcattgttgcgaggtcctgtgcaatatggttggatgtacccaattgaaaggaggttgtatactttgaagcggtatgtgaggaatagggcacgaccggaaggctcaattgctgaggcatatattgcagatgaatgtttgacattttgctctagatatatggatg

SEQ ID NO: 151012 - DNA, 457 bp, Zea Mays
ctcaggggcaagacgtgcattgctaccatggcgctccactctgctgcagccgccgccgctctctcggccctcctgatgctctccttctcaggccttacgctctccgacacgacgccgtccacgccggtgtcaccgtcggccgcgtgcaacgccaccactgacccgaccttctgccggtccgtcctcccgccgcgcggcaagggggacctctacaagtacggccgcttctcggtggccgagtccctggcgggcgcgcgcatgttcgcggccctcgtcgaccgctacctcgcgcgccaccggcacctctcctcgagcgccatcggggcgctgcgggactgccagctcatggccgacctcaacgtggacttcctcacggccgccggcgccacgatcaagaccacggacaccctcctggacccgcaagccgacgacgtgcacacgctgctgtcggcgatcc

SEQ ID NO: 151013 - DNA, 405 bp, Zea Mays
tgacgccacggagaagaaaccgacgccattaattcgcattatggagttaaacgtcgaccgttccttctacctctgctctctctctctctctcttttcctataaatcgcgggccgcgtctccctgaggctcacagtcccgagctcctttctccctgcacgcgagtagccacgccgagcgccgcatttcaccgtcgccagagcctctgcgccatcctgtccgccgtctgcgccagtgtccgccgctgttcatcgacgccaagacgctcctgccattcctcgccgttggagccgttcaccgtcgaccggaactccaaagccgacaccttgttccggccgaatccccctgtcgctaagcccctgctcgccgatcttcctctctctgtacgcaaagacccaaggtagaag

SEQ ID NO: 151014 - DNA, 627 bp, Zea Mays
ttagtatcccgcagcgcgccatcgccagtttgggatgcccgtgtgccagcactcgccacattggtaccattgtcggtgaagactccattaacagcgtacgtcggctcctaacagcgcacgccgacggtaaaagacatcgctaccctcacattcattactcagctccccgctcccctcgacgttcgaacaaaccctaacttctccctgtttttgtccaccgccgccgccattgaatgcagcttcagcactgcaatggcgtttcgggggaagaatcgccaggtcctcgaggtcgatccggcggacgatcctacagctgaggtggccaccgccttcgatcgtctctccgtttcgcccatccccaatccgtctgcatctgccgccgtcgttcaggtctgttctccttatgccctcgacaacagtggtacccagcagcctcagtcatcgtccactcgtgatgccaccatggttcctttacctcctgcaagtgtgctggtaacaacatctttcagctatattggttcatctctgggattttttgattgtgtgtagtagtaatcggttatataattttgttttgcagtcttaccggtaccaagaggtccttaattgccttcacgacgccattaa

SEQ ID NO: 151015 - DNA, 578 bp, Zea Mays
caggagtaattccgaacaatacaatcagtaactaaatttagtttaaataaataatcttacactagttgtgtgtctgctggggaagggggccaaaatgttaaatcgatcaagttaagcataacatgaaaatgcgtatgttatgtgtcgaggattactggagggattaaaagaaccattggagctcttgctagtgtctttattgatagattgtatctttttttataagtaagggatcactagaagtaatgaattgagattaacatactctctacataccatatctattagacgaaagagagaagaaactttcaaatgatcaaatttaatacctaggtgacttatgggcacaaaactgcatcttatggatgtgagtgaatgctgaacaatatctgcaacccctcttccaagccctacggcccacagaagagaatacatacagatagaaaggtctgggctgcgcctccctcaaaatataggtaatgtctatttcaattgaagcttgaaactcttgtggctgtgtggacagcttctttagggtctgatggttcctgtctgggcgagaagctattgacaactta

SEQ ID NO: 151016 - DNA, 500 bp, Zea Mays
tgaatagtgtccttggatcaagggctattaatgccttagtttgtcagtttataatagggagtactagtcagttcgtaccaagttgtctttattgtggtgtggttggttattgatgatgaagaagcatgcctctctcgcaacaaatgtctcatcattatcattcccaatgcatctgattaactcattcatgactggaccatgagcttcgtttcgcatatgattgcgtgtgttggaatttcagaactgatacaaacgactcggcccttaattgcacatgatgaaatgccacgtcttgcaaccttcacttcggagccatggggcttccagatgatccagaggcaggagggaatggggcgtccgcttgagaagcgaggacagaacagttgatgccacaagtttgttcccatcttcattttcatagcataattcaatccgtgacgatgtggtatgcgagttatttctaataggggattgtttttgcccattcatccttgttttca

SEQ ID NO: 151017 - DNA, 665 bp, Zea Mays
tgttataatggacatttatacccttacactgtttcttaacgtcacgttctcgtttcttcattttctctgtcatgtgacagatgcatcatgttgttgcagctgcgtgcgcttgtgctactgtccagccattcttttaatagaacaatgcatgctactgtccaggtttcgacaaaccaaccgtgattggttccaggttgtttctagatttatgaatatggtcatgacagccacgtaggaactagaaaactgttactacattgcattctctactgaaacaccgaaacactaaatactgacagccatacaggaacctgcagtgttgtcaactaatgcataattttgacagcgttttgtcttaattttgataggatccatacatagtaaaatagtgctcaattttgatagcacacagttcacagtcacacaatttagcatccagttcatagtcacacacaatcacacaaaaggcaaactaaacgaatttcatcaacatcttttctttttgggagtaagctttttcttcttggtataattgtttcttgttggggttgagattagagcacttggagttgcttcattttcaacacttggaggtggtgcaggtgcacatgtggcatcttcaggatgtgttagtccaccttgtagacctacaatcatcacttggc

SEQ ID NO: 151018 - DNA, 301 bp, Zea Mays
cgccagcaatccccactgctaggagctcggccaacagccatagaatccaactccctgtgctccatccggcctcctctgctcgcgctccccattctatgaagcagcgcgcagggagcatggtcttttccctccatggccggatccccctgcgatggacgccgcgcaggaagccaacgaccctccccacgctctccttcctcctccaacggcgtcctccccttcgctgctcggcgcccacagctcctttctcccatggcgcagcagcaaacctccatggccgcccatctgttgcagaccagcg

SEQ ID NO: 151019 - DNA, 306 bp, Zea Mays
tgcgaagcgtagagtgagtgaggtggatggcggtcgtcttcgtgtgggcagggctggcagacatgaattgttgtcttcgccggccggggcgagtgtaggtgagggggagttgcgaagtctttttgagggtgaggagcttaggataatgctatttaactatagggagatgggaatcattccgaaggttgaaccgatgtgagatgtgacgccctcgctgtaagtgtgttattatgatttgtatgatgaggctgtgtgcattcgcgtatccggctatgtctataggggcgttgcgcgcttggcctggct

SEQ ID NO: 151020 - DNA, 572 bp, Zea Mays
ctagaaatcaaggcggaaacaattatcaagtgcaacgctctggacagcaaagccagagaaataatcagagtcagaaccaacaaaggagcaactctcagaccaaccagaggtctggtgggagttcacagaaccgtcaaggtggcgccagtaacatgcaggccagaaacaacgcacctgtccaacccaatggctgtttcaagtgtggtgagctaggctactatgccaacaactgcccaaggcgcaaccagcagataccccagaaaagcaataaccagagaaatgaccagaacacccccgctcgtggatctgctcagaacaagactccgcagaaccagagcagaggaagggtcaatcacgtcaccgcagaatcagtgcctgaggatgctgacatagtgtatggtatgttccttgttaactccatacctgcatcagttttatttgactctggagcatcgcattcgtttataactgagtcatttgtggaaaaacacaacatacctaagtaccctcttaagaagatattacatattagttcaccgggaggtgacatgaaggtcacacactcatgcccc

SEQ ID NO: 151021 - DNA, 1000 bp, Zea Mays
gcattagcatggactgtagagaacatatgcaattcccttttccaaggccctggcaacaggtgaaatgtattctacaatccaaaaggggcttaacaagccttgctttggtacatattcttccaatctctcatcatgcatggggcaaggatacagcccggatgaggtcgtttcaggcgtacaaaaggctaggctttccttttcactaactacccaaaagttaaacccgtttacagacaatgtaccttgatgaagaagacaaaagacgacaataagggattcagcagtcactacttacagagcgattgtaattttgctcgactatacgtgcattcatccacagcagacaacactacacccttataggcctctgcaagtatacaaaacagctgctggatacaatgacagtgcatttaatttgattactaacactgatcttaccctcactcttgtctgcctattcataatagtcactgttcttgccgcctgaaagtatatgtttgatcagaatttgagccatatataggagttattactttatcactaatacaaagaatgtttcatcacctagtctttcatgcatgaatgcatgctcgagaacacagtttattgtgctgccatctcaaaagggctaatgttagttgttatcatgctaatgtgccagagatgaggtgatatgttggcatgcaaagtcctattttctgcagtaaaagggaggcaatctatgtctgcagtcataaaatgagttcggatgacagctgttgtatttcttcagggggttgaaatgctcagtgcttgactgcttgtgcatccgagcagcaacaacatgcacacaaaataaaccattgtcatagttagagattcagtgggctgctgaaatgggctgtccagacctccagatcaggtcagctccatctcgattgtgtgaaacacataggcagaccagaatctacagctattcctttttgaagcaaaatgtcccctagttgggattcgaaattta

SEQ ID NO: 151022 - DNA, 533 bp, Zea Mays
cctataccttcctcacaagcatcagtctctacctcaaatggaatctcaaaatttggtaaagccaagactggggtttgtgtcattgccactttcaatttgtcaaaagcctgttgagcagcttcagtccaatttcacaattgctttccctgtagcaacctagtcataggcttggcaattatcccataatgcctgacaaactttctatagtacccagttaatccctgaaaaccccttaactcagtcactgaactaggtacaggccaatccaacattgccttagtcttattgggatcagtggccactccatccttggatatgatatgacccaggtactgcaactcaggtcgaccaaagacacacttctttctcttcagataaaacttatgagccctcaaaacagagaacaccttccttaaatgttgtaagtgctgaacaaaatccgaactataaatcagtatatcatcgatgaaaaccatagcaaacttccttagaaaaggctctaaaattgagttcatggcacattgaaaacttac

SEQ ID NO: 151023 - DNA, 372 bp, Zea Mays
aatacaaacaccagacatggcaccgaataggtctggtgcatgttatagctgatgggcccaaaatacatactccttgagttccctatcccatgtgacgtccagtgctagcgacggaacatccagtgagcactagtactctagaaactcacatcatatgagacatatttgatgcacaccgagcagcgatatgtgaggctaaaaactgttaagaaaatagccttgtgttcggtgcaccaccgctcatgtattgtgcatgcaaaatggctacaccgagagcactcttatctttttagagcagagttggcattttcagagtgctttccataaagattttatgttattctctgaatgtatcacttagacctatatgtg

SEQ ID NO: 151024 - DNA, 916 bp, Zea Mays
cccctcaattaattgtacaattccggtttgggaattcactgtccacggcaacggcggaaactgagaacacaccgacgtgttctgagctacccagagcgatctaattcaattcaaagggcctacaagtaacaggggacttgagagaggcttgaacatcacgcagaagagcatgagctaacctgtagacgtctggccacgacgaggtgttcacgggtgtggaaaattgatttggggagaaagaggaattagagagctatggtggctaatcgaaggcaggagcgggtgctctggcttcgtgattacctagtggagctcacggcatgctcaatttataggacccgagggcggtggcgtccaatttcacaaaggtgcgctggcgaccggagagaggggaggagtcaccgcggcgatctatcgtggcgatcactggttgaggagctacggcggtcaatggtgagttgttacggctagctgcgaggtggtgaaatggtcacgacatggaatgatcatggcgaacgacgtatattacgacgacggccgctcgaccacatcgccggcgcgagtggataggtgacagagcggctacagggttctgagctcatccaaggtgaagattttccatggtcaatcataattcacgcaacagagggcacaaatcgcggcaccggtgcgaatccgagcgcgtaggtcaccggcgaggaggggagctgaatctgtgatctttgtcaggcactgtaccattgggatcccattctgggcgcctgacagagctgaatgaaatgccttattctccaattcctgtgtgacaacatgatcttcggcctatagataaattgttgtcctgtaatccctctctaactttgttatagtatccatattgaaatagtcacaggatcctactcaaaatcaatctgca

SEQ ID NO: 151025 - DNA, 880 bp, Zea Mays
ctcgcttgctgggggtggagctgggcttgccacacagactgctgcatgcgctggagaggggctcgaccatcgcggcgcgtttgcaggggtggagctaggcgtcgggcgccaccatggctgtgtaggcgagcagctgatcgtacgcacgggatgggtgcaagagcttcgtacctggatgacagctgtaatcacgtcctctctctttccgacgaacacggtgatacgaacggaagctggaacatggtgtttgcatggaaagactatggcagctaccggacgggaggggcctcggttcctatttgtagcccagagacggtgggctagcgtccggctgctgtgctatggaggccgatggtgaatgcacggatcgacaggactcctcgtggccgcactcttcggcgccggtgagagcaggaccacaggttcgtcttccacctcgggtgttgagcgacgttgctgccggtcgcatcctcggcgccgccagtggaggacggggcggccaacgagaacggtttggaaggagaggtgcctgcgatttggttttatagcccccagcgaagcctggcatcgggttgtttgttggcgtgcacaacggcaacagactccgcgtttctcgcccaggtagatgcgatgtggtttggggatgaagatgacagggtgtattgatcgataagaggggtccgcatgccatagacacagcgtaaaagagagaaaagaaaaaaaagttgggctagaaagcatatgggctgtacgtgtcgaggcttcaccttttctaattatttttttattatttctctattttccgttttcttctcttttctgttttagttttcaaatttcataattcatttttttgattcagttttgaatacaagaattc

SEQ ID NO: 151026 - DNA, 676 bp, Zea Mays
agccagggaaggagggaacaggcgcctgcaactcatcaaccgaggaattcgggagaggagcggcatcaactgttccacctcccccaccaggagtaatacgtggtcccaaccgtgcatgaacagaggtccggaccgaagagaactgatgatccggaaaatgctgcctctgccgctgatgtttgctatcccgatcatcatcgtcatctggggaggaaaacagaggttgttcctcaaccggcaaaacaacaggagtagtcactttcactgaaatggagtaaatcaatgtgcgagggaagcaggatccatcttctccaatagacgtcggttcttcaacgtggagatcgcagcgagaaggcaagcaatccatagagaaaccccaagccttcagtttcagaactgacaaatccgacccatcaacagcacccggatgtaatccctgaacaatgcagtgtccaccgagcagatgctctgccgtatcaatcccccagaggtgtgctggaatcccgccaagttcaatatccataagcacagggagggcacctccaccagaggccgacgcctgacgagaccacctcctaagatgcagccggagggggggtatggaaatggaatttccaccagccaaggcgcgaacagcgtgatccacggaggggaataaaaccaggtacgagttgga

SEQ ID NO: 151027 - DNA, 526 bp, Zea Mays
ttccttctgccttcttcaagcctacaagatttctgaatttatcatcagtttgggacctttggagttggaagcgtgttttttctcctttttcttcagcgattcgtagcaatgtacgttgattggcctgaatgatagtgaagctgtatagaatcagtgtaaccgcaactagatgcgccaaaatccgacattctctccaaattgcatgcacgcctttaaggtgaccggatgaattgtgtgtggcgctgataaaaaccgaaactctatgtggaaacattcgtcgtgattggatgcccacctgatcgcgtccaaaaccaccacgtgcattgaccatgtgcgtgtatgtgattggtgggccgagcacagcctgcatgcacgggcgcagcctagttattttcttacatctcggtctgcacgcgcagagatttgggggagaggcttcgctggtcacccaggctcgtaccggcatggctcccacggacacaacatccaatcatgctgattgatattgtagccgtcctaaaaaaag

SEQ ID NO: 151028 - DNA, 540 bp, Zea Mays
aggagttctgctagctgaagttggattgttgaaggagaggggtctaactgcagaagctgtggttgctgactttgtcttcaagaatattcagccattgaaggacagggcatatccggcctacctgtaccgaggcctagctgactccacctgggtcaccaatagaagaattcctgttgtggatttggtgagccggcttgaaatgatacttaggggcaaggtgtcaaagttggtgcccctgttgcctactcagcctggaacttgcctccttccaaggcctttacccatttcgtgtcaaatcctcctgctggtgatggcggtttgggccttagagtgcgaccctctgccgaagaagttagtgctttggttgcttcgcttgaagaaattcctgatgatgaacggcaggttcattttgaggtgcctttggatcccagtgatgcagagataagtgacatgcttgatatgttagccgaggattcttctgatgccgctcctgctggaacattggtggtggcgcctctcccggaagctagtaaagccttg

SEQ ID NO: 151029 - DNA, 734 bp, Zea Mays
ggggagtctttcgctggatttttctgtcggccttcattttgaagattggatttttcgcaagtttaattgtccgattaaccctctcccgggcaaatttgatcgccatgcgttcctccttgtcgtttccttcggcagatgttcctcgcggttgtgtgaagaatcggtgggtcttctgcttcaatccttcattggcggttctgcgaagcttttcaggcccctccagctattagaccgggttttccgtttttcgctttcttgcaaggaattgggcttcacagtttataggcgccattcatttagttgttcttccttcaaagcttatctccatctttggaattctggcgctcccaactggatcaaagaatggcagctcttttcggaggaagaatcaaactcttggactatggtttcccgtggccgctctgcgaaagcctcctatgctgatattgctcgttcatccgttctgtctggcgtgatgttggttcccctgggtggacaggtcaggtctggttgtttgaaaccccgttcatcggtgttcaatcggatctctttcccggtttgtcgtcattctgatcagccggccgctcattcatatcctcgtggacagtttgataaacgtgcttattttcaaaatcgttcaaattcgagttctggtaatctggcgaggcctttctcctggtcttctttgcggagcgctcgggcgcgtccttgggcctcgcgtaaatctatttggc

SEQ ID NO: 151030 - DNA, 2484 bp, Zea Mays
ggggaagtaaaaggtaggtagcccgaggctgtgtgacgtttcctttagaaacctccattgctggctccccatcctcttcctgcttcatggtttcacctgctgccttctccttcctcgattgccgcagctgctatgggaataccatctttctacaaatgggtcgtcagcaagtacccaagcatcatctcccctgtgaaggacgaaccagaggagtgccctgatggcatcatctacgacaacctctacctcgacatgaattgcatcatccattgctgcttccacccacaggaccagctaacgcatgcagacatagatgtatccacacacctcaatccatgcgaatctggacggtataaatgtatgtgttgactgactgacacaccgttgcaggtgcgccctccgacgacggccaatgaggtgttcgagtccatgttcgagtacatggaccgcttgttccgcatcgtcaggccaacaagtctgctgtacttggcagtaggttcgtgcatagattgttacacatcaaactgaactgaattccgtgtttggtttgaggaacaaattctcacctctcactttttttatttggtttgtgaaatggaatgaaatgagttgatccatcatcatttcatttcttatatactaataattagtaactaataatatgaggaatgagtttattctattaccgcggtgtacattaacaaccagcaacaagtgttaaggatgatgtttgttaccttcagttatttgagcaacttagttacacatgcatgcacttccctatctgttccatctgcagacggcgttgctccttttgccaaaatgaaccgaatacgaaggggacgtttccactccgccatggaaagacttgctgtaatgacaaatatcagattctctcgtcaatgaaataattgcatatgatttttttctacattgacagtgtgatgtctgaaacagccgaaaaatgcgtccatgcttcgatttgcaggaggaaccaccgcgagagatttccgaagtttctgaccccaatgtcatcagcccaggtactgagttcatggagaaggtatcagaagccctcgagtactacatccgtgccagatttaacagtgacccctggtggagagacatcatggtttgctcctgtgctttactaaatgcaatttatgttcttctctctctctctcttcttaaagggaagttcatgttcatttcagcttcaaccattagacatacatgctgaatctaactgcagggtctataaagtattgacaaacattgacttgctgaatctaccaggtggatgttgctgacaagtttaacatatctgttctgaaggtaatactctctgatgcgagtgttcctggagaaggagagcacaagatcatgtctttcatccgtgcgcaatgcagcatggaaggctatgatcccaacactcgacactgcttgtttgggcatgtagggaacatatatatatatatattaatcggttttcttgatgatctcatcatttctaataatgttgtgtatcactgatccagttttcatcatgcctagctatctgtactggggattaactgtgaagaatcattgcaggatgcggatctgataatgcttgctttggcatctcacgaagtctacttctctattctgcgtgaggtctgttaatccctcgtcaatgttaatgtcatgcttaaacatattgcatcacatgcttgataatggtatgcaccgctcctctgtctatactactaacttggccaggatttgtgtaaagttttacctgtcagagtaactccagcactttataatggtatgcaccgctcctctgtttaacttcaacaggatgtgctctaccaaaatcaggaagaaacggaagggaatccgaagaaatcatttctggtcctgctcacctcccaactccagataatgccactcatttcctcattttgatacactaacagtgccatcttaatttccagtttttgaacatgtgggttctgagagagtacttggagattgaattcaagatactggacccagtctgcgagactgatattgagaggctaatagatgacttcatctttatttgtttccttatgggaaacgatttcatcccacatattccgtcacttaagacgcaagaggtaacctttagactattgtaatagcgtagtagaaagttaactttgttatcactacatatgcctttttgctttgttcattactctgaaaataaaagcatagatgtttctctcatctattccatctaacagggtgcggttgatcttctcatcgaagtgtacaaaacaaccttcaacaaaatgggagggtatattaccaacacagacaaagtacctgaagaattccagctctagtcttttatttcatcaatgattacccattgaattacccggtgacctaggttcgttgacactgaaaacaggtcaaagataagtatggtgcatatctggaagtctcaaggct

SEQ ID NO: 151031 - DNA, 592 bp, Zea Mays
gtatagtacaacgctgggccattgcttgaagctaaaaaatctcaccctcgacctccagacagcagcgtacgacgcccccactttaatcgcagtccatgcgccaagatcacccgccttaaattcccccgtatacgaaatcgttagatctccctggattagcggggctgtatctctctcagtatctgtgtggacaagacaacaacttcaagcgtggttgacccaggcaataaaccatcggtggttgtttagaagcattgaaagctgggtgggagccaaccggaaaacgctgctgctagtaaactgttccgtgcctgattttgttctcacgtggtttgttgcccatccaagtttcagttagagcactcgttcatccattcatcttctagatcacttgtcaagattgcaggtatcattaacacagaatgctttacacagaatgcagcagcggttgttcgcttcctcttgtcagtccctgcctctcaccccttcgtcaggctcgccggtcgctatcggacgccgcgatttccttgctgcgccatctttcaatcaagaaaagacgagtccacactgtagcatagcatccgcaacagcg

SEQ ID NO: 151032 - DNA, 587 bp, Zea Mays
aaaacctcacccccgggaggaaaagagtgcgggccagaataaaattgtttttgcgaattacaagggcgagctggccctgatgagtcaaacaaaaaatttgtggagattatcaatgttccaggaatgctccaagtcatcgccggatggcgttgcgagcctgtatgcgctgggggatgccttcgtcttgacgatgaaagggccctcccacctgggctccagcttgcccctagactctgtccgagctgttcggacgagtatgaggtccccttcgctgaattccctcgggatgactgcatggtcacaccatgcttttgtttgggcttggtatttatttagagcatgtagggcgaagacgcggtctccatcgatgagatcctttgaagtgggttcgtccacgtcggggacagctgacgagactgtccgtggggacccatgttttatttcttgtggggtcatggcctccgatccatatagaaggcggaagggggtgaacccagtcgccctgcactcagtcgtgtttagcgcccagaccgcttcaggtaacaaatcggcccacttgccctttttctcgtcgaggagcatcttct

SEQ ID NO: 151033 - DNA, 619 bp, Zea Mays
tggtagggtataaaggtttgatatatgggggaccgctgtagagcgtggagatataggaggaaagagaatgctaacgtgacacatgagtgggatatagcaccaactcagcagcagcagccattgcgcaaaaggtggccgagagagagggattggattttctccgcatctcgtatatccatccatcatatcataggggccgccggcatggttggcaataatctcgaaatccttgtggcgacgtgtacagtacagtgccgaatgagttgaaagaagcaatacgtacgtacaacacagtacacgaatcaggcggatgcatgcaatgcaacaactgtgtgtgttgtgcgaataaagacgttgcagctaccattgcaaagtccgcagtggctatgggttgtggctgcgctgccttgaaaggaaaggaaggtactactgctgtctggcatggttgcttgcgtttagggtacgaggttagtttaagctggacaagtagtcatcatgccccagctgtgtctctagtctatcctcccaatgcaaggtgtcgtccgtgctctgaaatctgaataccatgtccgtgaatcttttctctttattatcccctatatatatattgttgtgcatc

SEQ ID NO: 151034 - DNA, 553 bp, Zea Mays
atgatatattgcattggtgcctagttttgaatggtcagcttcttaccaaacaaagtctgctgatatggagtagtgcaacagtacaagtaaccctgaccgcggtaagcagccaagttaccactaagaaacaacgaaaatgatactccaaagaccatgcattagattttaggacaattggttgctggatccaaaggccatacaccagatttccaggaaagcacgtagtttaagtatggcgttgaaagcaaataaaactggatagcttaaattgttcaatcatgatatattgcattggtgcctagttttgaatggtcagctttaccaaaaaaaaagtctgctgacatggagtagtgcaatagtacaagtaaccctgaccgcggtaagcagccaagttaccaagcaaatgaaatatatgttgttacattgaaggcgtactgtaagcttggaattagggagaccttaaatctgtacatagctttaaaaggataagttaaactgcttcacccatgtgttaccggccatgcaaaaaaggataagaagatggcaagtcttg

SEQ ID NO: 151035 - DNA, 481 bp, Zea Mays
gctagtctccctatcggaagttaaatcatacgacatcattggacaaggaacctcagcaccatagagtaggatgaccggtgacaggaaagggccacatctgcttttcccataccagccagataaatgtcaacaagacatgtaccttaaacgaaagggagatcaaaaccgaaccttctttgtattatccaatcacgtggcatctatacttcagtcaaggacagattattattacgatcctgtactgctaatgcattgtcaatgacacgcctcaatcatgtgtgtacagtaatgtatgtatacatgtctctcgagtagccgggtgagggtacactagatttcctaggcaattcaatttgacagcgacggacggcactggttcaacttattgaccacaacttttttttcctgaaactttattgatgttaacttgatactcgactgtactaagtattggagcaattgaagtcacagtcaccattta

SEQ ID NO: 151036 - DNA, 293 bp, Zea Mays
atttacatgacggctgactcagcgtgtccagcgagacgacaggtatcgtgtattgggcctgcgaacacgatggcccagtctgacaattccagcttcggcatcatcttggtccatctccgcatcttatccatcttccatcggaactctatccggctgctgatcctcctcaacatgttggctcacgtgttgtctgctgacattccccctatcttgagtggacgcttgcccccaagcgaccgcacatggaaagcgacgacggacatcacattcatcttcccaagaatccatagcag

SEQ ID NO: 151037 - DNA, 707 bp, Zea Mays
tggtgaggtgatgagaattttagataccaaacagtcggttgatcaacaatgaaattccaaatagctagttcatgtggcggtcctcaaaatttctgatacttatgttgaatgagttgcacgatgcccaacgactagtttcaaggttggtgctatatatactccgttagtcggccatttgaggggtgttagagttatgaaacatatcaagggagttgagactatacattatctcttaccaccataacacttagtgttctcacttggtgattagtttaatgtaggtgttttttgaagttcttacactagttacatcaccactaaaaatgcttgctctattttatgcctagtgttagtgatatttgcatacttattgctcccttagtgcttgcgtgcaacattattgtacttgaaaggacttgtagtattgagacatcacactaacctttttttggtgtgaccaccactagtgtactagaggaaatgagatccatgatttttagttggaagttcaatagcaaagacatcggggagcagtctaagagaggttgtcttggagacccacttatgtgtggtgatggcctagaagttatccacaaagttatctaattgagagcttggtccttgcaagtaattctaatgaggactagggggacatgagtgtctcaataccgttggaaaaatatcaaagttgtggatgggaatttgta

SEQ ID NO: 151038 - DNA, 458 bp, Zea Mays
agcagttcaaatgacaccaatgtagtgcaagtaatggaaaatggtatgtcagccaaagtagtggaagcatgctcaactgggcaatcgatggggatgacttgggaccacacgaatcaacatcttatagctccccctccaagaaaattctctcaccaagctcttttgtcacatgcacactaaaaattagggttgtacaaggtattgtttcatcaaatgtgacctcacagatctccacaatgtagttagtttcaaggttaagtatacaataagctctaggatatagtgcataaccaagaaagataccatattgagatcataactcaaacatgtccatcctaccatgttcgagtacaaaacacttacaccctaaaactgtaaagtggcttttcttgggcactcgtcacaatcgcaagtcgtaagttttgttcaagaaggcttagagaaaaatacgattaggc

SEQ ID NO: 151039 - DNA, 787 bp, Zea Mays
attaagtcatccaccagaagtataaacctgattttttcggaaaaaggatcgaaataaaaaaaattcgggtcaacggttcacacggtcataattggaagagttcgagttgcttgattgcttctgcggatgcgcttcccccatcctcacccaaaacctaccggcaaaacctacagcccttcgtctcccacacgcactctgccactcatctctaggttgtgtacgatcatcagcgagaggagctccctcgcttatttgtctctgaaacagacatcattgcttcaggtattctccaggttgttgctgatgcagaatctatattttttggtgcttgaatttttatctctttttactaaattgacatttcatctggattgctcttacccaattgctgctttacaaacgactgaggaacaatctgtttattgaaaatacggaggagattcgatacctttgtattatgtaggcttagcatatttatgtgcttcccaagtccaaacaatcacgatcatctgtaattttccccacaaattcttaaattttatgaaccctaaaattcgtggatttgacttgtttataatattatattttgtgcacccccacattaattattgtctcatataaaggtgattttgtatagttagggaatgaagggagattccagcagacaaaatagcttagaggacaactcacaaatactaagtgcatttccaagggaaccaaagctagaattcctaaaaaacatcacgaaagacttctcaagtgaacgagtgattggacatggtgtctt

SEQ ID NO: 151040 - DNA, 603 bp, Zea Mays
cgccctaggcggcggcctcgccccgtgcagaagcagctcgatgtgagtccccccgctctccctccgaagcccgacgacctcctccgtccctttgccctgttccagggacccgtatgtgatttcgtaaaacattgcgtccccagatcctattccccggctcgtggctgtcggagatcaccgccgagacctaccgcgtgccggacggccggtgagagaccgcgtcgccggcccatcaaggagcaccgtggagccgtcgtcgtcccgcccatggacgagggcgcaggaacccgaaaggcgaattgggcaatcacaatccggtgctgctgttcattctctctttaactcgtcttctgctggtcatgttgccgtgagctaatcagctagtagtagttatcagtaattgttactattaattaattgattgaataggatgctagtagcagtcccaggaagcagcaagtgactttatcagcttgtttatctttagcaaaagtacgtaaggaatagtcgatctggtaaacttttgttcggtgcgtgctgcgattgccctccacctccatggtcggtacctttctccacacacaacacaatcgctgtttcgtg

SEQ ID NO: 151041 - DNA, 294 bp, Zea Mays
agaagactgtaaagcaagctgtgagcaaggcaaagggtcgagcctatgatgatctttaccgaagattaagttcaaaggaaggggagaaagatgtctataagatagctaggatttgggaaaggaagacaagggacctcaaccaagttaaatgcattaaggatgagatggatcaactcttggtgaaaggacaagacatcaaatagaggtggcagaggtatttgacaatcttttcaatggtgagaatgagactatggacatccaattggatgactccttcgatgatttaaatagatg

SEQ ID NO: 151042 - DNA, 541 bp, Zea Mays
gcatattcaagaggcagaagaacaagtccgtataattcgagagaattggagggtagctcaaaccaggcaaaagagctacgctgacaatagaagaagaccactagaatttgaggaaggagattatgtgtacctcaaggtgtcaccacttcgtggaatgaggagattcaaagttaagggcaaattgttccctcactttattggaccattcagagtttttaggcgagttggagagatggcctatcaactcgagctacctgataatctatcgaatgtgcataatatgtttcatgtgtctcgactaaaaaaaatgtctccatgtccccgaggaacagttaccaatggaagagctcagtgttcagggagatttgacttacacggagtatactatcaagattcttgatacattgactcgatttacaaggaataaagtgacaaagatgtgtaaagtacagtggagtcaccatggcgaagatgaagcaacttgggaaagagaagaagagcttcgtatagattttcctcacctttttcctcgttcttccta

SEQ ID NO: 151043 - DNA, 643 bp, Zea Mays
caaaatttaggcagcaccggacgccgaccacggatgtgagcggcttcacgacgaagcgcgatctccgacgaagaattgcccacgccacaccgccttccacgcctaattgccggtagggaatggatgcatggttgcccccacaaacgtctctggcgctaacttggtctccgtaggtggattcgccgagatgcacatgtggcggcggcgaaccgagacggcgcccgcaacccgcactctctctccccgagtatagctagcggttattccctatacaagtcatattgcgcacgcactggccaggggattcccatacttgtagccggggcgtgggtgagctcgagctggaatcgcggtaccgaactccacttgcggcggcgcgacatttgcgacatgctatgtccgagcgatggtgccgcggtatatacgatccagaccgcgtacgtaggcgcgccatgcgcggaagtcgttgacgattacaggggcgtgggcagcgggagacccggccggtaagttaggcccgcccagacgtccacggcgcgttatttgcgcgaagacgacgaccggtgagggagggtccactaacagagaggtagaagctgcgagatatcgctgccatgtggggtccaggggccagtgaactgtg

SEQ ID NO: 151044 - DNA, 521 bp, Zea Mays
cggaggtagtgcgacctgtcgacctcaggtttggggcaccaaggctggtattcgaaagcatagcagaagccgaagctaccaggctagaggatattgatgtgctagaggaagagcgattgaacacagtaattcagttggctagataccagcagaccttgaggcgctatcacgataaagccatacgacaccgatcctttgtagtgggagacctggtccttcgccgaattctaacaggggaaggacgacacaagttgtcaccaatatgggaagggccgttcattgtgtcagaggtcacccagccgggatcataccgacttactcaaatgtatggtacggaagtggggaattcatggaacatagagcatcttagaaagttttacccttagcaaggcctcgaaagctatcggaacaacattgtactctataatgggagaatacttcatcaataaagttttcattttcaagggcattcaaactgttgactatcacttgacttcgatttgattggacttggaatcaac

SEQ ID NO: 151045 - DNA, 576 bp, Zea Mays
aaaacaaatttttgtttagttagcgtgaacaaatctagtgaaaactaggttttgatctatttttctgtcgatacttcactgctcaatccactcttcacctgagccatttgattctcttccctagcgcaagcccagtcgtggctcactcgcttcttcggtcatcgactgaccagtaagtcggtgacctaatccgcccgctgcagcgcaccttaccttctcatcactcatcagctcgtcgactcgtcaggatcctgcaggcaacgttgatattttgcctcctagtccgcgccagcagatgggcaagttgttggtgagaccgtggcgtcacctgtccctcgctaactcattagagtcccaccgcgcggttgcaacacgacaatgggtgtcgcttgccgtcaccgtcatctatcgctaccttgcctcccgcactcgctcctcctagctgtcgtcgtctcactaacgccaactcacgacaaattcgatgactcgccagaacgacacgttgatgcggctgctccgccctagtgcctcatcctcagtcagtccacctattttctctctctagctctccttttg

SEQ ID NO: 151046 - DNA, 491 bp, Zea Mays
tcgcagtgctacggcttttatgcaccatagcgaagtccgactgagggcgatgttgccagaattttcgggcgaaacataccgaccaatacgcaccataatcggaacagaggttggtgggatctggaggggataaatccgatagcttgggcccatgaatcagtgagcagaggtgaatgacacaggacccgcgcggtccgtcagtagagagctgcgaggacgtgaggtgcgcgcggcgaggtcagctgacggcaggggccctccgatcagtgagaccgcgcgcaggtgggctggccgaggtaaagaagaagtgggccagaactgaggcagtcggcccatgtaggtcttctattctttttctttttatcttttctccctatatttcaaactctagtatttgaattcaaatttgtttgtgatttcaaacccaggttaaattcccaaataatgttccagtaggaagaattataagcactcatatatatttttctttg

SEQ ID NO: 151047 - DNA, 515 bp, Zea Mays
ggggtttctccagatcgctttggagcttggacatgcattcgaggggcgtgttgatcggctggttcacctctaatcgctcgccggagtcaatcctcggcggcagaaccgcacatcgacgtggtcaaccgtatctgcttcacaaaacccggtagggatcttctcaattgattcgtttccctctgtagaccgtgtaggaccaatctgattagggggtatggctctggggtggcggcttggccgactccggcgggtcctccgccgcggggaaggcttgcgccgctgtcttggtggtcgtaatgagggagatgagctagagccgttggatcggaggggaacggctgagattagaacccgtgtaaggcttaggtcgggaaatcagatccgttcagatctgatcagatggatcaggagactctagtgtaaataaaatccacgccgtggattccagatcctggggccgggattacgtaccgattcgccggatgtatgatctaatctgtaccgcctgtttctaa

SEQ ID NO: 151048 - DNA, 401 bp, Zea Mays
tctcaggtggcacatatggtgctcaacacatgtccactgtcttttgggaaagctaagcgaaccaaaagcacctggtacaaggcattagcaacctgatgtgtaaacattggctctctaagcatcctgtcatacacttggatgataacgcttcagtgaacaaccattcaatgctttaggtagctcatcaccttgcaaagtctgtaacatataagcattatcagatactacctatgtgactctgtaaggatcttcctagctttgggaccacttgccaaacttccggtccctgctcttcaatggtcagattgttttccagacactgtctcctacttggaatgacttagcttttaccttcttgttataggccttggtgactatgaccttgtgcctctcgatctgcc

SEQ ID NO: 151049 - DNA, 552 bp, Zea Mays
gcgtctttggggactggtctccgctcgcgtttttgttgctgctccgtgtttcgggggacttggtgtgggattgggggaaggttttggttcgggaccgatgcgccgccgtcgttggatattatgagacctcgcgcggtcgtgctggcgagctgagatccgcgcagtcgccgagggatttcggcggctgttggctcacgtcggcgatctagcagtagagaaatcctactgaggcagcgatctggtgtgccggtgttggcggattgggatgatccatccgccggtccttgactctgggtcctgggtgctcgttccatgttgaattggattcgagtattcgatcagctggttcggatggtcttatgtgacagtgcacgctatgagctgccgatttgtttgtatatatctgaatcagagattaggctgatgccgctgctatagcttggatggggaggatattggactgatgtatgctgttcgttgtagttccaggtcgatggtaatagagttcctgtgttgctagcccttaattctttgtttcattagataattgac

SEQ ID NO: 151050 - DNA, 525 bp, Zea Mays
ggagtggtggccagctcaccggcggtgaggatctttaccgagccatgtttatctgatggccacgacgcacgaatcgcgacgagcggcgatcaacggtgagggaccaccggcggcgagcaaagggatgggatcttcttcagttactcgttactgtaccatggcaagcgcttcatcagtcgcctgacaaccaaagttgaagctgagtttcctctcgacttcccataacaactccaaccaagatctgcagcaaagttgtaaagcaacatgccctctacaatcttgccatctgatgttgccccaaaaagccactgcatctggtttgaaattgggcttgaagttcagggcaagaatctgttagtctgatattcagacagaaccagactgacagtccaacttgggttgagattttctctatttttttcataaggacatggcttgaacccttaaacaaagttgttctcctatgattgggctatcaacttgatgtggtgacctagggcaaaaaccctatgctttgaaagttac

SEQ ID NO: 151051 - DNA, 307 bp, Zea Mays
ctccaggagcgcttcgctcctttttccattggaaaccaaacatttataaaataggaatggaacagctccatttttctccgcttctcaaccaaacacaccataactatacccccttggttttatttggtttcaatccaaaagagaatgaaatctttggacaaagtaggataggacgatttctccctgatactttctgctttaagttgattctgctgctctctaaaatagttatacttcagattttaaagcgatcccttgcttccaatacacgtaaagcagaaatgcatgctttgtagctaaagaaaac

SEQ ID NO: 151052 - DNA, 326 bp, Zea Mays
ccgaagacaccggcgccctgcacgccgtgtccgagccagccgctccgaccccgcgcgtccgtttcttcttcacaatttattggaacatcgctgcatccgtttccctcccctcattcctcctctccccattatgagcagaaaacagcagcaccattgatggccatgaagaacagccgaccctttctctcccctccctctctctataaaagggcagcgagtctctccgttctccctacccaagctcgcccccatctctctcactctcctcgccgttagagccaccgccgccgtcgccggacttcgtcatcgccggagctgtggagttc

SEQ ID NO: 151053 - DNA, 1226 bp, Zea Mays
cagaagcattgtgcctccaaaatagttttttaacatatagtttgtataattgatttgataaaatacactagtggttcttaaatatgtctcatggtataatataggtccctaaattcttaaaatgcactgccggttccccaaatttgttagttacttaagtgtgccacttgattttctagttaccataatcagcataaacttgcctatatggtgtgaaaaatggtacctgacatgtagtttacacgacaacaacaatgaccatgatcctgttgtcgagcatggtgaccttttggtcccaagttaaagtgtaaagtgccacataagtaaatatttgctaaatagtgtgattaggatcccagtgacacactaaagtctctctttagttgttttttctaacctgctctctcttctcaaaaagccaaccaaaggggcggaaacctataggtgcttttggccaaaagcagctttccctccagtacaaaactcacagcagtccccccctgctttctatggccatggaaaccataacttcaaagaaattacccacctatcactggttatgaaaataccgattcatttttccccttgtgttcccatctgtgtgaaaacatcacgaggaatggtgagcccgatgctaaggttccttctgccagcgcctgtctccggtcgcacgccgccaccaggctggcacccccacatgaaatatggcgcccccaggctgtcctgctgtctccacatcaaatccgttgaccagtgaagttgtatgtcccatacctgcagcacctctaggaacgggaagcgaccaagtccggtatcttgcctggagctggctccggaagaggttgagcagtgtgaggttgttgaggccggcgaagctggtgggtatctcgccgttgaggttgttgatggagaggtcgagcgactggaggctggcgagggcgtcgagctccggcggtatcttcctggtgagctgtcgatactgaggagccaaggaagagcatgttgaggtgggcgagtcatgcgagctccaggggatgggccccgtgagcgtgcagctgttcatgtccaggcggatgagcgactgcagggtgccgaacttgggtgggatcctgctgctgtactggttgtagtagctgacgtgcatggctctggtgtctagattggcctccaccgctatagatggccaaacgggcggcccgacacggcacggcactggcacggccagg

SEQ ID NO: 151054 - DNA, 371 bp, Zea Mays
acgacgtatatggcatagctgaagaatatggacgatgcaatgaccaatagctttgttgagctggggcaaacctttcacccaaacttcttgtatttgctttctttcttgtgtttgcctttgctccacttcttccaaaagcatcatccttacctggatcttgagaactcccattagatgcccacgtcatgcctcccatctccagctcttgtgcattgagtttttctagcctcttgtgccagattgataatccgagtgggcttctcggttgtttgggcatattgggcttcttaagttcagatttagtacctggactatcgctagctaatttctctattgtttgggtactgctagtcaaagtatctaatacttcc

SEQ ID NO: 151055 - DNA, 565 bp, Zea Mays
acttaatattatatagccaaaatctctgtcccattttttctgtctcgtccatttgtgccgtgcaagttttattatcgcgtttctgtttcatgcttgttggtctggaccctgctcggccatccgcgtttctgttccctgctcactcggttgttggtccggctccacggactatgctcggcggtgcggtgcttcttttttccttccattactcgacgtttccgtttcatacttggttgttggtccggagtccggactttgtttggccgtccgcgtttgtgtctcctatttgctcggctgtgtttttgtttcctgcttcggtctccacttggcggtacggtgttttgttctgtcttccgttgctcggcttagcttgtttttccgctgctggcttagcatgtttctttcgtccggtgtttcatcttctttggtgtttttcttcttatttttcggcttttcgtcttagttttttcttccattgctcatatattcttgttattttctcgttttgtgtcttaggcttatcttccttttctcggctcaacttgttttttgttcggtgttcttt

SEQ ID NO: 151056 - DNA, 290 bp, Zea Mays
cgcccattctatgttgctgaagtcgaagcacatgtgctcacaatcaaaaagcatggaacaagaaggtatagtttcttatccccccattcgacctaacagaattccttggcttctgtattctcactaaagcaaaaatatatgtctttgcatgtactcgtcaaagctgataattagtttccttgttgtcttattgattgatcctcttgatttccttcttttgccgaacctttttaattgttgtggaaggagttttttgcacgggattgtatacttatgatttatgcaaaatc

SEQ ID NO: 151057 - DNA, 502 bp, Zea Mays
acaagagcgattacctttaaaaaaagataatgcacattgtccatattacctatggattgacgaatgttaaggtctcatggctacttggtcgtatataggtccagattacctatggactgttcttttctttattgttcctatatatttgctgtttggaacaaagaaaattgtgtttacattcccttatatatttgctatcatgtacaaatgcttagtcagtagcagttacatgtgttttgttatacattagttcatagttagatacttactaatataattcttatggactgttctttttttactgttcctatatatttgttgtttggaacaaagaaaattatgtttacattcccttatatatttgctatcatgtacaaatgcttagtcagtagcagttacatgtgttttgttatacattagttcatagtcagatgcttactaatataattcttaattccatgccttttgttttgtacaaaagcctcatgttgacaaagccaat

SEQ ID NO: 151058 - DNA, 580 bp, Zea Mays
atttatgccccttgtactcctcataggagagaggaatttctctcttggttttccagcattgagattgatgataacaaattatggatctcccttggtgactttaatatgatcagatctcctgataaccgcaacaaaccgggtggggatcacctcagaatgatgagttttaatttggcaatcagtcagctagggcttcaggaaattcccctcaaaggacaagcctacacttggtcaaatatgcaacgtcacccacttctcgaaaaacttgattggtgctttgtttcacaggcttggtcggtcacctttccagctacctctgcactctcgcttcctagaggaacctcggatcatatcccttggatggtcaatgtccaaatcaatgttcccaaaccacccatctttagatttgaaaattattggcttcagcttgatgatttccactctatctttcaagactcttggaatcagcctatctttcaaccagaccctgctaaaaggctcatggcaaagtttaaaagagcacgcaagcacatccatgtctggtgtaagtctctccccaacttaacaaaattgattgata

SEQ ID NO: 151059 - DNA, 669 bp, Zea Mays
ttcttgtcaaagctctgtgaatcaagtgcatgaatgagtccctagtcctctcttggatcctcctgcaggttttgagctccctttaggagggtttaaccacctcaaataggcatttctctagaactctaattcaccgcacgccacatgctgggtgaaatgtccaaactagccaaaattgctccgattgaacccaaacttttcaagcaccttcacaacaccttcaataacatattcgcgcaatttcacgccaatctgatataccaggcttcaatttcacccaattccctgtttcgagcgatcaattccaagccgagtgcctaaatttcattttctttgcctaaattcaaaccaagcacacacttcactcatatttacccatataaacctattcgtgaagtatcggctcaattccacgtcatttcatacctcaattcgaatttcaaacctcctatggcactatttctcgttcaaacgccgttttcgtgtcgtttgacctctcgatcgccatatctctcgttttctgtgccataatactttgtgtatgtatttattcacatttcatatacttatgactatgtgactaatacgtgctcatctcttctgtcattttagtgaccttgcctgcccgtgagccgtctcctgccctgcctggattctctccctctcgtg

SEQ ID NO: 151060 - DNA, 808 bp, Zea Mays
atgtcttctcttcgatagtttgactccgcttctttagcatctccttctctaaagaatgattaatggatggaattagagaattcataattttgcgatgtcaggtttttttgttccaatgttgtgagtgtgactgaattatgaaaagattcagttgagtaattttaagatctgtatgagtttctgtcttgtccaattgttttaactttagcgacttaattagcgaattactgggcttttccacgtacaaacagggccatgtgttttccttttatgaatgagacttagatgattactaaatcaattttactaaatgagtattgttctaggggaaaacatagcaccgcaaagtactgaaaggatcactgtgatgcactaatgcgtgaacttttttatcttctataccaattcagcgcctcgtcaattatcaagttttgcttcaccttttgattttttgttccctaggttcattaagcatgtttacataagtaacttgcttcaaacatggtaccgctatttcgcaaaaatatgatgattaacttttaggagcgttgatcatgtgactctgacctttgatatactatttgcacctgtaacttgcaatttttgatagtaatcccacatgctttctttatttcagtattcataattatatgtggatatgacgctagaaatctattgtatcataaccataatgttttagactatttgttgtatagctatttggtgacgcaacgaatgtgaacatcacagcgatgaatcctttggtgttgccggtgtcggagtagccgccgttcgctagactgtatat

SEQ ID NO: 151061 - DNA, 432 bp, Zea Mays
aattttaaagaaaatgtcatatagaaaaggtttgacaccaacttcaatgatggggggaatcatagcaacactcttcacatgaactttgaacctcacaatttctttagagtttaaagagttaatatccacttcttccactgccccaatagtggatcccaattcacaaatagcctggtaattctgaagctcttccggcacattctcagccacaatccacaccgaatgcagtttggacttaggcttagcctgagaactccaagaagaaacagaaattttggcacccgacaacttcattttcaattcagggaaattaatcatctcatctaacctctcttgagagggaaatttcatgaggaagccagaatgacacttagtagctttccaagtgcggccccaaggaaagtgaaaaccgaaatccttctcaagatcctc

SEQ ID NO: 151062 - DNA, 882 bp, Zea Mays
gcttacccttgattttagtgatgacagacaaggaccagaatgatttagatggtgtcccattcccatgtgcttgcaaactttggggtatgtatcacatattggtttttctttaaaataaaaaatgggtgtttatttgtgtgaggtaatcagtgattatgatgatcacttccctcatgttagactcaagcattctggttccctcttcatgtatgttggtcaccatggtggttcatatgcgaagaacagcttcgggaatgtgtatgttgcattaatctctgctgattattgtatgataagtatttgctatgcctgaagcttcatgttttcttatgatgctctttgttctaggcagtctacaggctgtcgttgagaaaattctatgctagatatatgtttttaggagtagaaaggctaggtcagttgcttcaaacatgagttagttgcaactattgaccacttacagttatggtgaccatgttttttttatcggatttctttgatgacaatctgatgtgattcaaaagctataacctcttttctcccaggtggttcttttcatcgacttgtaactttgtaagtaatattggtccatgaagtgtagttcgtgcacagcgcatcctgcttctggttgcgtagtaatacactgcagtgctacttttggttgcgtagtgtgagactgagctctagcttattagcttgtgacttccttgattttctatttctgcagctgcttgggttcagttatctctctcccccgtatgccaatgaattgacttaaatcaggctcaagtgtcagtttaaattaacccttggtgtgcgagcgactctttaatatatgttctatttatctatcaatagctgcagaaaaccctggttattttt

SEQ ID NO: 151063 - DNA, 444 bp, Zea Mays
accagttggaggatcagtagtgcagtcgagtccttcccatgcaaaagcttttgcattcaacatgctttcaattttctagcagtagttttctttcagtctttcagtttttatatttgtattttttccctgtcaaatcatttctgcgatataattgcaactgtacaatatattgtgataccttgtattttacttgatcaattgacaaatatgcttcactatgtatacatatgaaattttagattttacgtgatatatcaatatgaaattgatgggcctaagaaattctcagaattcagagaagtattgaattgttgccggacttgcttcttttgtttccttgttgaattctgttgtatatggcagggatcaaccgaatgaatattttgaggcagggattaaaccatagagggattaaacccccaagggaattaagtgaaagggagg

SEQ ID NO: 151064 - DNA, 435 bp, Zea Mays
atctgtcctaaggtccggaagttgctccttgcgagctctttctataagtctggctgtctctgcgtccaggcgttgagccttgcatatgagatcttctagatttggcttgacttccaggctaccgttgtctcccagacatgcatttagctgagctgattctttcttccaatcttccagaaagttggttcctttaatcccgaaaggttttcggctgagggcgtctgctaccacgttggccttcccggggtggtagtggatttcgaggtcataatccttgatcaattcaagccatcttctttgacggaggttgaggtccggctgcgtgaagatgtacttcagactcttgtgatcagtgaagatgtggcatttgttcccgatcagataatgcctccatatctttagggcgtgcacgatggctgccaattccaagtcgtg

SEQ ID NO: 151065 - DNA, 908 bp, Zea Mays
accccgtcgctgctactgcgctgttgggcccacgcaccagtcgcacttaaaccacccgcgcgcactgccttctccctctcgctctcacgcactgacatctgggcccgcgttgccagggtcttcctcatcccgcggacttcggatgtcgttgccgccgccgcgcaaattccggccagctggtgcaacggcttgccgaaccagtagtccgcacggctcggtggataaatgcgcaggccgcgctcctctttccatcctaccttcctcccccatctgcgcgcctattgccatactcgtcggccaggagctcccgctgtcacataatccgcacctcgccgtcacccgaagcctaggatcgggccaggaacctgcactgagctgttgtgaggctttccgcgacgctatcaggcggaatcgacgacggagcgactagtaattgctcaccggagtgtgcggggtaccgccgagccgcctggacgcgtgggcagggccgtcaccgcttcataccgaggtaatgcgcccaccaacggattcgccttgacctcctctacgcgtagcgctagggaatcgaaaacttgacagctgggcatgtaggttggggagctccagccatggcacttcgccgcggtgagcacgccgtcgggcttggaggtgttcggggaaggaggacggtttctgaccgtcgatgcgcgatgtgcggctcagatcgaatcagacgtagggattaggctggaactcaccgtggtcattgatctcgacgtggacggttacgattagactcagctcttcccctttggttattctgacccggaccgttggatctatcttgagcggaccggattagatcgtggataagctatttggttacatcggacccgggccgtcagatcccgatctagcggttggtgctg

SEQ ID NO: 151066 - DNA, 611 bp, Zea Mays
actactcactgcacagtccaagaaacgcctcggcctccacacacaaacgacagagcttagtcgggggaacatatcttacaatgggatcttgcccaaattcgtgaagatttggagccactagacgcttcaaagcgactacactgagctctgccacgtgcttgacgccgtgcccatggggctgagcacactctggcgctcttccacgcacgccccgagcacttgtcagactgccccttggctacgcccgctcgcacctataaagccatcctgggcgtgcgacacttcattccgcacttcccctcactgtcccgaccaagttcttagctccagcgagcgctgcgccgcccgccgagccacccgaacgccggccaccgcgaccaactcgcctcagccaccccgcgtccacgccagctgcttggttagcttcaatagagccccgtgaagcttcccaaaccctcagaccgggtgcaaccccaccggaggcgccgaatcaccctctccggacttcctccgcccaccggagagtgtggaccaggtaagccactgcaccattttcaaatttctcgtgcgcactacttccgcgtcacctggtaaagcttcctgaaccgacc

SEQ ID NO: 151067 - DNA, 536 bp, Zea Mays
attcgggtccggggcttcatgtttttgtgaggaatacatgtgtggtgttgcggtgactggggtaccgtcggtgcgcttagaatcgctcgcctgtgttcttcttccgccgcgtcgcgtggacaactgcctctgcaccatcaatcgccgtcgggtaactactctacttgccaagctttgtcttcgctacgtgtattccggtttagatcgaagctttaggcgcgggatcaggtaatgggggattccggcgatggcgctccgccgtgggggccctggtcttccctccggccgtggtctgggggtaggagacgttgtagccaccgttacctgttagatgtgcggctcagattggaaaccagttatcgattcggacgcgttcgcctgagacattcgattagtgatccgagggtagggatcagatctgggcattgtaaaaccctagccgttgatctatcaacatatgcccaggatcagagggggaaatacatcgtttcatttaattaaatcagcatcgttgattcccaatccaacgcatagca

SEQ ID NO: 151068 - DNA, 488 bp, Zea Mays
ctacacacagcaacgagacaatacacaccattgttcaataaacaaatcacttggatctatgcttattagcatcattttcattagagcatgattatgatgaggtgctctaggaaacatttgacttccttgacataggcttagaagcacctcgtgccctagattgagaaagattgtcttctgatagtgattcctccaaaattttgcaaagcatatgtaccaaattcctaatcatcctcaaatttagggtaggtgtcactagagttgatgtggtgcccgagaaagatttccccctatggcctccaagagcctgctttagcctgtcactacattgcagaccaatgactgataaggggctttagacgatttcttttgtcttggggtgcaacgttgatcagctgtgtctctagtagagtcctaatctagacacgttgatggtatgaacatatgagaacaacattgttaccgactcaaggcaaagaaaatctcat

SEQ ID NO: 151069 - DNA, 420 bp, Zea Mays
ggagagcttcgcatctttgtattaatagaagaataagaaaggggggagagaaccccattacagcacacacaccgctagagactaactaaggatcaccgactaacatggaggaaacacgacccacaacgctgttttaagccagcaactcatcgacttggaggaaggacagggccttggctctagtcaaggaccagagcaccgcctcttccctagccaccataagggctgtgaccaagctaggattacaaccataaaaaacacatctattcctatgcttccaaatggtccaagcacctaggatcactaaagaattgaaaccttttctcaaaagatcagatgcccgagagctgctagacttccaccacgactcaaaggaatcctcatgagctggacacagctcctgcagccccactgaactaa

SEQ ID NO: 151070 - DNA, 369 bp, Zea Mays
aagagagagctttacgaattactcaagaaagaaatacaatctgcagcaactagatgctcgacacacactggacaattattgcaatctgcagtatgaaacatccattttgctagctgggtgagctcgtgagtaactgaattctgctccttttgtgtgcttgaggagagataggcatgtgcgtctagagaggacctatccctgactgcgaattggacaccccaaccctcaagaaggcacacttgggtcagattgcaccaacatcatcaagcacctgatcaaactaactgctcagagacccagctatagctttgttatccaggaagcactagaagtagcagatatactcccagtagttaggatgcaattgtg

SEQ ID NO: 151071 - DNA, 891 bp, Zea Mays
ctgaaaatatgaaaaagtatggacttaatgttatccaaacgaaaaactgaaaactaaaatgtatggactggatactggaaactgtatttgatcaaagcagagtacggacatgaactgaaacaatgatgtccgagctgtttgtagggatatttgttcagctatttctgcttggtgtgttatccaagtagtaaacgaagtatgattgatcggctataatcttgtaacaaagacgtgctactactttaacaccccataatttataattgcttattaacacagaataaacacccacgcctaataatgaagtaggaacatgtatatattagatgactaacaataatgaagtaaaattagaagtactcgtaggtcaaaacattaaacacccactaccatacctccatattattggtccatgggatgatcgctctcggcatcacatgccagtgttgccagagtaagtgctcggtgttctattagtaaactgatggtccagaatagaagagaaagttgttcggtgctgattggtttcgcttagctttccgcaaagaagtttttaagtccctacagtcacttgtgtatatgatatgcacagtttagctaccctcggtggctctgttaacaatcgattttatatgctggatatgcctagtagttactcatgtgagattcttgcagtgaccgccataatacctgaagaagcatgactgatctttgtggcatagaattttatagtaaagcacacgcttcttgcattcgttgtgaaacaaaaggattcatgcatgttcatctcgtgacgctttttccctccggtaccaaacaaaaggattcatgcatgttcatcatgtgattgaaaatacaccgattcttgttacatatagtgcatatgtttca

SEQ ID NO: 151072 - DNA, 448 bp, Zea Mays
tcgtgcctaggtggcgtgttggtttggctaaccaccatgcatgtcactggcacgacctctgtggcgcgtccttccggcgctctgccctaggcggcgggatcctgcaagtcatacagtttcctttgcctgactgtcaaggtgacccttggctaaaagggtggatccccacattgttttgtggtggtccccaccttctaggcgccatccttgcccctacacttccgcataagtatactggagggtgctcgaggttggtttcgcttaccgtattttcgcgttgtgagctagccctcttgatcgctttgtcttttctcatctctcaactgtttcctaagcagaaggcgtaggttcgacccctacttggctcgtggttttggagtccgggggacaatagatttgtgttcgtgtcgccgagggtagaattaggcgttgagcaacgaagaggcat

SEQ ID NO: 151073 - DNA, 1836 bp, Zea Mays
gcaagaaccagctgtccggcgccatcccgcacgagctctgccggctgacgaagctccagtcgctggcgctcaacagcaactcgctgcggggcgccatcccgggcgacattggcaacctcaccagcctgacgaccctcgcgctctacgacaaccagctcagcggcgccatcccggcgagcatcggcaacctgaagaagctacaggtgctgcgcgccggcgggaaccaggcgctcaagggcccgctgccgccggagatcggccggtgcaccgacctcaccatgctcggcctcgccgagaccggcctctccgggagcctgccggagacgatcgggcagctcaagaagatccagacgatcgccatctacaccgcgatgctcaccggctccatccccgagagcatcggcaactgcaccgagctcaccagcctctacctgtaccagaactccctctccgggcccatcccgccgcagctcggccagctgcgcaagctgcagacggtgctgctgtggcagaaccagctcgtcggcactatcccgccggagatcgccaactgcaaggacctcgtgctcatcgacctgtcgctcaactcgctcacggggcccatcccgagcagcttcggcacgctgccgaacctgcagcagctgcagctcagcaccaacaagctcaccggcgtcatcccgccggagctctccaactgcacgtcgctgaccgacgtcgaggtggacaacaacgagctgtccggggagatcggcatcgacttctcgcggctgcgcaacctgaccctgttctacgcgtggcagaaccggctgaccggccccgtgccggcaggcctcgcgcagtgcgagggcttgcagtcgctggacctctcgtacaacaacctcaccggccccgtcccgggggatgtgttcgcgctgcagaacctgaccaagctgctgcttctgaacaacgacctctccgggttcataccgccggagatcggcaactgcaccaatctctaccggctccggctcaacgacaaccggctttccgggacgatacctgcggagatcggcaagctgaagaacctcaatttcctcgacctgggcagcaaccgccttgtcgggccgttgccggcggcgctgtccggctgcgacaacctagaattcatggacctgcactcgaatgccctgtctggcgctttgccggacgagctgccccgcagtctacagttcgtcgacatctccgacaacaagctcaccggtatgctgggccccggcattgggttgttgccggagctgacgaagcttaacctcgggatgaaccggatctccgggggcataccgccggagctcggttcctgcgagaagcttcagctgctggacctcggcgacaacgcgctctctggtggcatcccgccggagctcgggaagcttccatcgctggagatttcgcttaacctcagctgtaaccgtctctccggggaaattccagcgcagttcggcgagctggataagcttggcagcctcgacatctcgtacaaccagctctctggcagccttgcgcccctcgcgaggctcgagaacctcgtcatgctcaacatctcttacaacacgttctctggtgacctcccagacacgcccttcttccagaagcttccgctcagcgacatcgcgggcaaccacctgctcgtcgtgggcgccggcggtgacgaggcctcccggcacgcggccgtttcggcgctgaagctggccatgacaatccttgtcgtggtgagcgctctcctcctcctgacggccacctacgtgctcgcgcgctcgcggcgccgcaacggcgccatccacgggcacggcgccgacg

SEQ ID NO: 151074 - DNA, 345 bp, Zea Mays
gtctgaactcttctctgattgactgcaccttcctctgttcagtctttttttcacacattctagacaagggcaggccaaactcaactgagcaactttgctctccaactatagatcttcaggttgattataatatcccagggccaaaaacatatggatcataagttataatgccctaaagtcaaccacagttcactgaattttagtttcagttagcagaaacttgagagcactttactgcaggttttacacagcaccaaactcaatactccacaagaaacttgttcaccatacatagctcttcaaatttgctatagcaaccttgggccaatgatgtatggatcccaa

SEQ ID NO: 151075 - DNA, 306 bp, Zea Mays
gtccaatgggggaagggtgactctcccttaaagtgggttcctcctcccaagttaagcgaggtgggataattctgaggctcacacggtcaccgtccgactacaattgggccaactgggccaattgcgtctttgccaacgggtaatagtggaggatgtcctcatcattcccaccttcttaaaatgggccctagctctgatactagatgatacacccagcccaggtggggttggctgaggcccaacaaattagggttgcctggagcccaacagttcattatccacacccaactcagggaaaggcccaat

SEQ ID NO: 151076 - DNA, 314 bp, Zea Mays
ctcacctaaatgcacagacacacagtaccaccctgacaaaaggccaagagcacaccaaaactcaccagaatgatcaatttaaattattgttgcaatacatagccaccaagaatacttgacaacctgcaaaagagacacaacatccttgaatgagcagaaattgcaaaagaaatgtcaaagtaaaaataaaaatcagcaaagcaaggttacaaggcaaccgcagcaggttagctagattcagggaaaggtttagcccatctcatccagtttctgcacctgtactcaagcacagacaaagggtgactaccattcac

SEQ ID NO: 151077 - DNA, 318 bp, Zea Mays
ggttgctaaggcgtagtgtctttggaaggctgtagtcgggccgtgaacgtcgtctcctccccaatcgagttattccacaccctctcatcgaaagatgggcattcacccaacgggtgcacatcacataagccagataaataaagattgggattgctcaactgattctatggacaagtattgcacagccgtccgaaaattagaagacatgtttgaagggttagaattccatcacgtggaaagagaccgcaatgtagcagcagatgcattgtcgaagctgggatctagtcgggcacaggccccacccgaaatcttcgtcca

SEQ ID NO: 151078 - DNA, 487 bp, Zea Mays
cttgagatccgtctttgaccagaaaggttccgaagcgtagaaagtctggttttgccttcattagacaagaccaaaagtgggagtcaccaattttccaatccacttgagccagtgattttgaacctatgtatttattacggagcaattgttgccacataccatcagaggtaagcaatttatacaaccatttgctaagaagagctctgttcatagtgttcaaatctaggattccaattcctccctggtcttttggttggcgcagaatagaccatttagtaagcctatactttttttgttttcatccccctgccaaaagaatcttgaacggaaataatccaatttcttgataactcctatggggatggagaagaaagacatcatatacatcggaaggctactaagaactgaattaatcaaagtcagacggcctccgatggagagatgtttccctttccagctactgagtctcttctcaaagcgctctcca

SEQ ID NO: 151079 - DNA, 444 bp, Zea Mays
ttggtagagtaggatcgatgtacccaaccagatgctctcttagaacctaacctgaaaccatttcttatagtgaaagtcctaaacctcaaaaggtctagtttcactttcattaatctagtccaaaaatgggaatcccctgatttccaaaagacatgggatagtggttttgcatccaattatttgttgcaggtaagttgttgccaagtttcatcagttgtcaaaagtctataaagccatttacttggcaaagtcttgttttagatgtggaagccaagtctataaagccatttacttagcctaattcctaagcctccttgatctttgggatggcacataatgttctcccaagttaattgtattgtactttggtctcagctactggattaggttccaaatttctcttcttgtaatgaacacccgactatgaaataacatgcatcgttc

SEQ ID NO: 151080 - DNA, 604 bp, Zea Mays
acgtcaatgataagctgcttgggatgcttttgataatgattgagaagcatctcttttttcctttccttccacaaaatctagatacgatgatggcaagggcacaggtagtacaataattttgaaggggcgacaaggagccgtcacatccgatcgagcagcacacagtaccgaaacataaaatatctgtcacgctggcgcaaaaggtacgtaagctctgccgcctctgctcaatccaaggtgtggataatcctatcagtggcaggcttgcagggtgaggctggtgtcattcaacaaccaatcttaaattaaaaaacgacgccagtcaccgggctcacgcccgttagctaataattcagtgccatcgctaattaattgaccgtccgcacactgtcacagcagaactcaaatctcatgtggtgcatcgtcaaaaattttgtggtgatgcaggtggtacaaggcagatacatattttcagtcgtggaacatcgtatcatcccataatttttttccacttctgctacatttcaggtatcaagttttttggactattttatacaccatttttatacagtcgattaacataggttttttttgctttttataa

SEQ ID NO: 151081 - DNA, 282 bp, Zea Mays
tagagctcaggcactgaacttccatgccaagaaaatgatgaagaccgaggtctttcatagagaactcctgctagagagcactgatgaagcgtctcaataaaggttgtcaggactatgtcagcaatatagagcagaagatacaccatatctgcaccatgatgatagacaaatagagagttgtctgtcttagcgccaatcaaacccaactgcaaaaggtgggaagcaaatttgttgtaccaggcatgtggggcctgctttaagccatacaaagaccggttgagc

SEQ ID NO: 151082 - DNA, 477 bp, Zea Mays
ttcgcggtctatcccttctcaccccttcggatctgctaagcgtgaggcacagccgcgtctatggtctgcctggctggtccctccctctccgcgcgcgacgcgcctctccaggtccgaccggcgtcgagcgcgccaccgtgggccccctcctctgccttagatgacaacatttggtgagtggtgatgcaactgggcagagtggtgaactggtgtttgacgcgcttgccgacgagttgcaaattgggtgaggatcgacttctcatctgcttgttcttaagtctgaaaattcactcatagttcatttgtgttgtgttttttagcccatagcttttagatgcctggtcattttggagatagtatgggggtcatgtaggtttttggtttagaaaatggtacttaaatgaaagcaaatgagataaaagggtaactttgtatagacaaggaacattgtccagcactagacaggagagatcatgt

SEQ ID NO: 151083 - DNA, 575 bp, Zea Mays
cttgagaatctcatattagggtttacatgtttaaaggagttttagtgacatcgaattatacattgctcattttttccacaggatttttgaaggaattatggagttgattaaggggagtgttgaaaatcattattggtgaccataactgtcatcggtggttacttaccgaagggccacacctcttctgcgaagggaccacaccctttcaacatgtccattcccactgtatataggtacaaagagatcaatgcaatatcaaagttccattctcgattccctttgtgacattacatgaaacaagcacattccaatttctggtttttcaatacacccacagctggaaaatgaaccagttggctaaagcgttcgattttagccgaagatttgcatgcagaataaattatgttggctttgaggatctcgggcaatatgaccagtagagtaatcgtgctaaaaaaaaacaagcaaacaggaaacgacacaaggattcaaatacagaagctgctaatagatggaacggtagtaatagaagaaaccaaataaacagtgttatgtcaacaacacagggatgccac

SEQ ID NO: 151084 - DNA, 1681 bp, Zea Mays
aaattaatatatattgtcagaacctaaaaaatcatataaagcttgcctccatcagagtctataaagaagttatgaatttctgaaacaggaaactatcggtgtgggattgtaatatcaaccaacagggacgctaaggttccatggcgattcataatacgaaaggcacagatagttatgaaggtatccatgccccttggtaacatgaactggcacgtatagtcatcaagccatccatgtccattgataacatttcaggtgtttctctagcttatgttatgatccagcaatggtgcactatctgtgacacttccatttttcctgcagggatgtcttttcatagtagtgtgatatgttcgactactcttgattcgttactgatcttgaaatagtagtaaaaagccccccccccccaaaaaaaatagagtgaaaaatatttaagcagcaggtcaacttgagctactggtcacataattagtgtttattgagaaaaaagtgcattactgataaggataaaaccagatctaaaccaagactacaactttatctacagcagactcattgagaaaataaaagacgttatcacaagtaagcagctattttacaaaaaaaaacacacacacacacactcctacagacgttaatatgttgtgttgttcactctagttatttaaaaaaactctacctgcgaggagagaaaccaccccacagcattgcattaagaagaaacttaggccgagaaacaccccaaaggcgaacgcccaagacacatgcatgtggccatgggcatctcgctgcaggtggttcacatgcatagctcagggacagagccgacgagggttgtttttgctcccacaaggagtcaaatctaggacctgaggtgctaccaaggcacatgtaaccactaggctacagacccgttcgccagttaaagttcaatgaagctatgagataacccatatagagttactactgcatgggagatgtgtgcttcatgccaagcaaaatttatacaatttctgaccaaagaatgataggcagccaagacaaccaaattaacaaaacagtatgtctcaaggtatcgcaatagaagcttacatacatgatgagcacatttggcaactttgatagttctggaggaatgtagcctgacaagttattgttatccaataatctgcaaattaattgtgttctcaataaagtataaagactaatgatgcaaatatgcaatgtcagaaacttacaggtgaacaagtgaaggtaatctggataactcaggtgggatttgaccgctcaatgagttgttgttcatgtgactggatgaagatagaaaattcattagggtacgtattccttgataacagagatacaaaccatattatactcacaagtgcttggttttattcaggttagcaaatgatttaggtataagtccagatatatggttctgatcaatctgaatccgattcagattaggaaggaagccaatctcctctggtaaagagccattcaattggtttccattcaggagcctgcaaatgcacaatgggggcaccttgttatagagcagaaacaattgcgtgaaagaaataaaaaaaaaaattgcaaaggtcatcccatgctacataggatgtacaacaatggcacacatgccaaaaacttgtaccagagaaacacctttaaa

SEQ ID NO: 151085 - DNA, 425 bp, Zea Mays
aagcattatagagagcaataggcaggaccatgatattataagccaaatatgtggtagtggatttggataatctaaaatccaattggagtccactagtttctttggataacatagatgaggtctatttggatttagacaacaaaaacaagcaaaacaatttctgcaatagttgctcatgagctgagcaatttgtgtaaacaaattataatacatcttcagctatcgtaagtgcagctacatcgtattaatctggaagccggaatgcaggaagaaaaaaatactgcaaacaagctaatcgtgttgcaagatagagacagtccattaaatcatattacttagtcgagaatatcaagtattataagtttctgcgtagtatctacaattaatcaaaattacttctctttggcatctctcttgcactgaat

SEQ ID NO: 151086 - DNA, 318 bp, Zea Mays
ccttcccataagggtgataacttgtgccgtccctcccccgttagaattcggcggaggacgagatctcccactaaaaaggatcgtcgtcgcacggccttgtcgtgatagcgtctcagagtctgctggtatcgtgctgattgaattactgtgttcagccattcttcttcgagtatatcaatatcctccagcctagtagcttcggcttctgctatgctttcaaagaccaaccttggcgccccaaacttgagatcagcgggtaatactgcctctgacccatagaccatgaagaaaggagtgtttccatgcagagctcggcta

SEQ ID NO: 151087 - DNA, 657 bp, Zea Mays
gcgtcttcctgcctcaccagcccgtcctcatcggccttgggcgttggtgccgttggaagcggtgcctcgcagaggactttcaaggacgtgctgctgctccctccgccccagccgactgcccggcagtccctccctagacctccgcacagaccgaaatttgcggtggtgcaacgtcctggaacggtgcgtaggcctgttcctgaccgggagggctgggttaggttcgaacctcgtcgacgtcaacttcccccttcgccacctccccgtcgatcgatccctgaggatctccggggtaggtgttttaactgtctggcctcctctcatcgggcggcggattgccgacgttcggtgcgctgcttcaagtgttgggggctcggacatcgtgcagttcagtgcaaggttcgtgctgcgccggtgatcaaagctttagtttcggtgtgggatcgtcttggccctcagctggttcacaagcctttggactttcctagacgcgccatggagtggcgcaaggtctcttcgccgatcccggccatccagaggtccggtgtggctgatcctaccttgggtggcacgaagaaacgccgccatcgtacgcggggtcgaaggcctaagaccgcccccgttgcaccttcggaggaatccagtgaagttgcacct

SEQ ID NO: 151088 - DNA, 495 bp, Zea Mays
agaccgtcacacctcccttaaatttgctcaagcttcaccagtgaccagtgtaacgtagcacggcaaaagattttgtgttgctagcactgtctactagactctacactgtggttaagcttagctccatttataacggaagaatgcagcatcgttgccgtagttgccgctagttcagcaccttatgtatcgagtttcctgatgatgttgtacgtagggtgcatgttctattaggggaggcatgaacatgacgtgttaaccaaccagagaacccgtcaaagaagttcctagctaatcctgcagctagcgtcacccttagcgcatggttttatatatttgcctagcattcgttccattcgctgcaccccgtcctgtctatctctgtcatgtgctagctgtgcatgaccggttccgcactactactatactataccacgcttacttttactacttgggaacaagtgaaacaaggaagcagtctaggtgcgggcattagcg

SEQ ID NO: 151089 - DNA, 425 bp, Zea Mays
gcctccctgaactttcttgaagggtccaatcatgtccaatctccagcacgcaaatggccatgttataggtatggtctgcagctgttgtgctggtaaatgttgttgctttgacaagaattggcaagcttcacatctctaaactaactcggttgcgtcactctttgctattggccaatagaaaccagacctgaaaactttcccgaccagagttctggatgttgcgtgtattccacactgtccggagtggatcttgtctaatagctgtttcccagtaaccgaggagacgcacttcatgaggactcctatcgcaccccttctatatagtgcaccccctatgagggtgtagtgggccgactgtctcgcgatgcgttctgctgcagccttatcatccggttcttcttcattccttatgtacctgatgatag

SEQ ID NO: 151090 - DNA, 1560 bp, Zea Mays
ctagcaggtgatattgttctgactggcgctagagagcaggaccaatgctagtgacaatgttcattgttacttgttagtgagccgcacgacaggtcccgtggtcactatggcaacgaggacttttgtagcttggcgctgacgagcttgaccgtggtgaggtccagctgaggactttcttattgaaggcggtgaccatcgatggtggctatcaagattggtcctgggcattgggggtgacgccgaagaataatagaagtgttattttgccatgggaagggtggcacttccgctgaagccgtatagcggttctcggcttgctgcaattgttgtggttgatcccgtgtgatcaaaggcatgcagaaagatgatatctgcctggctactgctgttggctaggactttgtgcatatgccatcttgctatgttgcatttgatgaccatgacgtctacatgtggggcacttcaaagattcgtgtcccttgtatcgaaggttaggaggacatgcgacatcttgtttgtatcactggtccggtgactacaacatgattgacccttttgtaagtcttttcgttgccttttattttcgaagtctatgctagacccgccagatatcatgtttattatgccgtgaactgtcgattgttggaagtgaccttcatctttgggaggtgggggtgtatgatttgagggggagggtggagttggatcctttcttggtgggatagctggggtggtagtttgggggaaatgagggtaaggttgtgtgttttggtagtgagggggattgctgttggtatgaagtgtgggcgatggtctttgtcggctagtctggaattgatctggccattctttccttggcctctttggtgacggggcaatccctagttgaatgcccgacgtcctctccatggaagacacaatatgaccttcgctcttgtttggatcctctgtcgctgcctttgtcggccctcgccccccttgttgagtgcttggtatgctcttggttgcaaggcgtcccttagctaggttgctggtgatgagtgatgctattgatttggggttgttggcggtattgcggctgctggtttcttgtccaggatcgctgttggcttgcggagtgtcctttggcttccgctgtgtttctagctttctgtagtgcaactcctcagagcatgcaattcttttgaagagctggtacaactcttggagtgacgggtgggtccttggtgcagtgactgtataagtgtcgtgctcgaaggtcgctgatggcgtaatagactgcgatgtggtcttcgatcgatggcagttgtgacttgagcaggaggaatttattgtagtaatctcaaagactttctttctcttgctgcttgcagaggcaattatgcgagggcattggtgtctggctggtagccttggaagttaaggaggaatttattttgaagggcccgccacgagtcaatggataggggtggcaatcttgagtaccatgtcaatgctaggccttctagtgctatgatgaaagacttcattgttgcattatcgttccctcctggtgaagcc

SEQ ID NO: 151091 - DNA, 457 bp, Zea Mays
cttcggatagggacaatccttgatgaaatgcccagacttcccacggttgaagcagctattagatgaactgggtagggctaggaaacgagtaccaggggcactcggctgaatattttgagtagggatagctgttggacggatgaagactggttacttgaaaggatagacgggtggacgaggaaaagagcgatttgggttaaagggatgaatcaccaaccttgaccgcttttcggatccttgagaggatccctcactcccttcacatccaaacctttttgtcttttgctacccctaattctttgcctccatcgagagtgttgtgctcacggccctgctgaaagtgagatctagacacatggccatctttcgctgtagccaatcattcagacctctcatgaaacaattcttcttttttaggtctgtgtcaacttgctctatagcatactaggagagatgg

SEQ ID NO: 151092 - DNA, 358 bp, Zea Mays
cccgagtacaaggatggttaggccataggcacatatagatataaatgtgcatgagcccaccaacagaacacatccaccaccacacgaccattaacaacctagcctaacctctaaagatgagttggcgggtgagaaactcatgtagaggggaggctcccgccacactccaaaaaataccctcattctccacattttgtaggacagtttgaacacaagacattttatcttcaaaacacaaacattccgatgcttccaaatctcccaggcgatcaacatgacgaaggaattaaggcctttccttagctccttcgtaatttccttgaccattcagccccaccagcttaagaatctcttacca

SEQ ID NO: 151093 - DNA, 2370 bp, Zea Mays
ttagaatacaaatagaatatatatcagttttatttctaggctttagtggactggtggtccggtggacctgcttagggccatcccgaaccacccgcgggctacgccactagataacaagttaccatagacatgtgttgcggttaatccagacctgttatggccttatgtgagatacgtcatacctacgtctttaatctctactaatataaaagcgagattttctcccttcgtgtgtctcccttacacatcggctagctaccaccacgactcccttccaccgcaaaaatttaaaaaatgaagcgcggggcggatgtccaagtagcaagtattgggatctaaccactagagttcattaccatttgtgatataaaaagaataaatattgtaaatattatattatacaaagtatagatattgtaaatatatgtatactaataatttagaaataaaaaataatcatgtcacactaagtcggctctgtgggctaagaaggcggccctagcaccgcccagttctcagatcgaaacgacacaggtccactttgaatcttggcgggctagtttatgccactattaaattggtcgtgcctcggaccggcccgccagacacgactcgtttcgtcatctatagtccagtacatccatcctcatagtttctgatctcgtgagcctggaaaaaaagcaagagaaaaaactttatcacgtctcacccccacaccatatacctcgccacacgtctctgcctctctcctcaccatatcgtcgtccgtcgtctcaagggcaaaatcgtaggtgtaccatgaggtgtagcccactccgtgtgatccaaaccgtggagcacgcatttagatccgcgtgaggcgaactactgcatcctgccgcacgcgatagggatcaagacaataattcagaaaatccttgtcggctaggtaccgaagggaataagtatgtcaccgaagggaattaataattctcgtcagtattaggctaattctttccgatacatggctaatgaggagtggtattagtgattaattaattcccgtcaaccaccaaagagaattaattaatactcgtcggtcatgtgtagtcgacatttaacactagactgcgcaaactcctgtcggtcccgcccttggatgacctggattataagtacgtagatattgcttgtggccaacggcaattaagacattatccccgtcggcttagatagctgacgggaattaccccacgatcaataactctcgttggctatggtcaagccgacgggagttatcctatgttgttgcaaaccagtagcctattttactaatttctcatctaaccacacaaacaacaagcttatattgtatatcaattcccatacatcacaaacaccattcacaattcacatacatcacatcatcaaatacttcacattacaaattcttcaaacaaacacatagaagcacatattcatttcaaatcacaacaacgagacaagttaaatattttgttcaccaaagcacataaaatttagtttaacacacaccattcatcatccataaccaaagacaaaccacaagtccaaatataaaaaaatagcatacaatggtttagggacaaccacttggatggttcgagctttggtcactgccaccaccaggaggagggtacacaaagagggactcaacaaaagtcgatccagctggttcagttacactcccacccattcctagtgtagcctatgtaagaatgcaaatatcaacaagttaagtatacaaatgtatcaaatcataagaatatttcgagagttacaaaacgtatctggtcttcagttgcaggtatatatgtgggggtgatgattgttgcatccccgatccctatttaatcgacatttgattaagtttagatacaattcatgtgttgctataataactagatgaaattatacattagacaatgttataatagaatttgctaaagattaccatattttaccaatttctcatacaattcacacaaacaacaagaatataatgtatatccatccacatgcatcacaaacaccattcacaactcacttacatcacatcatcaaatacttcacattacaaattcctcaaacaaacacatagaaacacatattcattttgtcggtgttttggaccaggggtcctcaaccaactagtgaaacgatattgcgtgccctagacccagatggtgatttgagttgacacaagcgatttatcctggtttggactacgagaggccatacttccagcagaggtgggatgatgcttatattactcacacaaaagtgctcgtggtaggggttacaagcatagcgggagaggggtggatcctaagtcccagctggtgattgagg

SEQ ID NO: 151094 - DNA, 3656 bp, Zea Mays
tgggccatgcactgagcaaaacaatagttttacacatttgaagttatccacaatttgatgctaacataatgaataaggaaaggtgaaacgttaacgcggtaccactacatagcattatttctcagaaaaatgtggttagtgtttgacactaaactttcaatataaggtaacactatttagtccctgaatgattgaatcatagtttagttaatttggccctgactcttaaggatgcagatcatcaggaaagatttggtacagtttactccaagttcaaatcatattccaaaatgtcctatcctcataccaacaatgagtatgtgggaacaagctcctcttgcttgcgtgccacggaaacatagattttatacatgattctgatagacaaatttctacagaaactggaaaaaataaaggacagaaatggccaccaaaaaaactgacaccagtaagtatgttaaaccattcacacatgactggtggtaaaaaatattgtaacatgttggacatgttaagcagtcagaactcagaagcattaaactggaatttcaaatcacaaggctaccttttccctctcaagactgactaatcgtgcttgagccctttcaacttcatccatcagaaggctgacttcaacctcctttgcagctcgatcctcctctggggaaaaaaatgaaatgcttcaattcactataacctttaaaatataagtcacaaagatgatcatgatcacactggttggaaagagacctgattgagtgcgaagctcaaacaattggctttgcgccgattcatgtagcttttgcatattctttacactttctgtagcttgccttagttggtcctgcaatgaccgttccctacaagtatggcaagccgaaggtcaaaatatacagtatgagtcatggtacatgaattagcctttgatgtcaggcaagaattctatatggcagttcaggtgataacagactaacactctaacagagcgatttttttcatagatgtagtatagcctcttctactaccttcgaaatacatgtcattctacagtttctagggaaatttagccaaatttccaatcttacccctacttaatttcataatttaactaaattatccacatgcatatctcgtttcccgtgctgttgcacgtaagcagtcatgcacgcaccaattagaagacacaactgggtaataataaaatgagagtaaaatggccgtatgattgaacttcttagttcttgtggccaactctaaaacagcacctggtttgatccaaaggtagtactacagatgattttgcatacctatctttcagggcttctagagttttctgactatcctcagccatgcttcgctgcttcatttcaaccatctcccttactttctcctccatctaaaatgatacaaatggtaataaagcgaaaaggtacaaagcttgagagatcgaattggttattataatttatctggaacgcttttttatataagtttggacccctgttgtttataaaaattttgactcctgactgcatgcttgctattggtagataaaggaatcttctaccctctatactacatttagacaacactcacatagaaacatatttctacaaaataaaatgtagataataatgtgatgctcaaaaaaaattacaacacattaaaatgggtagagatctagtattttaattggaattattatatggataatgtcaactcttatgattgacaaagaaataggacaagaagaaactcttatttgtaacaccaatgtcatataaaagtaaaaaaaacaaagacatgtacgataaattaatagtagagcatataactaaatggtgacagaagtacagaaaagacctgctgttccagttggcgattacgctcttcaagtcgcctaattgttgcctgctggttcttcaagtgtgcagcttcagcacggtattcttcaagctctagtttcatcttacggttctcagtctccagttcagacaatttctggtcttgatcctgcatgaaatagatcattaacactagaattgtttattaaacccacctatcatattcagacaagcctcttgttagataaactgattcaagatcaagcaaaaaaagtgaagttgaaaattcatgatgctacggaggaaaacagaccacgtcatatttttcacaaactactatcatgtttttttttacattttgataacttaccgtgatacatttatatttctcaatgttaaatccgcatcatttgttgcacaaaaaaaccttgcatttttcgagtgtgggaatacagctgggtgatttagtacaaaataggtgctatacaagaattttgatcatataaagtatttaatatgttaggtaaattataataagatgatatctgttgcttcatgttcatgatgatgtgcaatctttcagccttgaaagagtaaggacttcccactgtgcatttgtgattgggagtacaagagaattgaattagaagaatgcaagtatacaacagaagaaaaaattgaaagaacatacagtcattgaagcaagagctggatatggatcaggagcttcatagagcttctgatagatgttgagaaatgcattttctccaaactttgctctctttgtgaggttatcaacttcctcttgataactcttcagcaaagaattgagtaaactgagtttctcatctgatgatgcctttttgaaatcccgtgtgttctcagcaagcttacgcctgttcttttgactagtttcttgattctccgcaatctttaaaccttgctcatccaatccacttctttccttctccaaatcaaaatctagagtgcaaaagaagccagagttagaatttttcaccactaatatgaagtgaaagtcacataacagtcagtgtggccaaataaattacaacatggaaaccccaaacactgaaactactagtgaatggtttccaggaatatcagaatgccaggtttgagatgaagagtagcattttttgcattcaaactgcatttgcgtatttctgctagtggattgctgagtaatgtagtcgagcacaagttatacgttctcatagaagattcagattaagactcgaagctatttgacaaagtggacggagcaaatgttagagccgatggctgtggctatggaaatggcaaatgcatgtcggcccttcagggtaatgagtacgatctaaacatcgtaattagagaaaagtcgaaacatcctattcaactgatcctggagctcaccaactcaaacctacaccgcttactcgacgagttcaactaaaaggtcaagcaaggacagaagcacacctttccagaaactgcagacgacggcaagcggcgatgagatcgtcgctgcggtagacgactgggacggcggtggcgggggcggaggcggcgagcggtcgcggtccgacgcgcccgcttgcgccggcgagggctccatggggatatgcgcaggggttcaggccttcgcccttcggggatctggacacctggatctggcgggtgggcgggatccggtggtgggacggacggcgaccgggcgacgacgctctgtgaggaaccggtatatatgtggcctgcctttcagaaatcaagtggtttcgtgtagttgtcgcaggtcgcagagatgggttg

SEQ ID NO: 151095 - DNA, 772 bp, Zea Mays
cgcacatgcgcgcgcgcgtgcacgtaacatgatgcttatcgggacaccgacgccacgccaccgaggccgaacggcagggagatcggtcggcgtcggggggcaagcgccggtgtcgttgtcgtttgcccggggcgctcagcttttgggtgagcagggggcgctgaacgcgtgatggccgcgccatgtctccgtgactgcaaaaggggcggcgcggcatgacgtggacgacgagttgatggatgaatctgcttggtccccgagaaagcgacgatccgccaatcgccacagctccggcgcaacgcaatcgtcttccacccacagaaccacccccccccccccccctcgagatgaaatcggccggagttgcaatcagaaagagacatgggtgaaaaggctcagctgtcagctcggctcgcatcgcattgagtggccggcccccaatcacgacgagcgcacggtgctacagtggcaacctatcctgccgcggcgataatactctgcccaggcagagagggcggaaagctgtggcgcattgaacacccgcccccgatgcccaccccgcgctgcttcgccgttgccggcggcacggtctgctacacactcactcacccaacaaccaacaaggcagccactaattgcaggctgctgttgctgcttgcatctcatcaatgtcaggatagaattaaccacgcacgcccccagtcagatcgttgggtcgacggaggaccgccattaacgcgcagaggtttatatacacgggttaatgccgtcg

SEQ ID NO: 151096 - DNA, 405 bp, Zea Mays
taatgtgctccctaattcacaatatctgtccaatttattaggatttacttcttacagtatctctctgttgggagtatgccaatggtttgagcaagccattgaaaaggagactagcatgttataacattttttctgttagttacttcaattctcttatcaccactacaattttgaatgtgatctatgtgctagcattatagcacacaaaattcttggtgcagaccgaatgtctgtccagtacagctgcagaacatctgcaatgaaatacactatcctgttaaaagtgtaagacataaacttgtcggatactaccttaaccccgcttgaaagtagccaaatttgttcgtaactctatccatgagtaatgcaatatgagttcccaacacaaaaaatgaaagtgtccca

SEQ ID NO: 151097 - DNA, 693 bp, Zea Mays
gacccaaagtgattagacccaaagtgattagacccaaagtgttactgctaccggtgctttaaagccatcaaataattggactccacgcgccagggactccacgctctagctttcagccgccttcagccagggactccacgcgccagccttcagccagtgactccatgcgccaaccttcagccagggactccacgcgccagccttcaggtgatccttctgactttggctagcttattctctctgattatctttggtctatgttttttattccgagccttcattttcagtgttgggttttcctgcaacgacgtttgatgttcttccaagtgacaagaaataactcccagcaaacccaatggaagctcctttggaatatacagagcaataacaatcaaatagtgttcagtgcattcataatgtatgataatacaaccacacaaaattggactaacatgcatggaaaatatgaatataaagctttgagacccatctaaatagctgcattcacatgagtagttgtctggtattaaaactttgcagatatgtacaacgctgaggcgatgaatgggttgggcggtccaagtacataatatctagtataaagaaattcgtttctatcagaaaatggattcattatgtttcttttacagacaaaaaagaaaagtttagagttaaaaactatagacaaagtgc

SEQ ID NO: 151098 - DNA, 621 bp, Zea Mays
ggccggcggggcgctggacgtgaggacttccgtccggacgacaggcgcagtggggatttccgtcgagaggaccggcgcggagggcgcgatcccgctggtggcgccttccaacggcgccgcaactggcgaccagagggccgcgaccggcgtcggcgggacgatttctacgaccgtgatcgctacgaggatcacaatcaacggcccaaactgaagtttccatcgttcgacggtgaatccgatcccctcccatggctcaacaagtgcaaaacctattttcgggggatgcgcacactcgacgacgacagagtgtgggtggcgtccctgcacttggacggtgcagcactggattggtacttcggcttcgagctcgactacggtctggtgccgtggcgccgctttgccaagtacatcaacatgcggttcgggcctccgctgcgacacaatagcctggcggagctgaaggacttgtatcgcatcggcaccgtggaggactaccagcgacagttctcccagctcctgtgtcgcgcgcaagacgtcacgccgcaccagcaggtcgagctctttactgcaggcctgggggaacccttgcgaacggaggtcgagctgaagcgaccaccgaac

SEQ ID NO: 151099 - DNA, 380 bp, Zea Mays
ctggcctgagcagcttctaggttcttcctgattactttgacttttcttttggctttcgacaccaggtcgggtccaaaaatttctctctctctctccgggctgtgaccagttgaggggtgttcgacaccttcttccatacagggcttcaaaaggtgccatcttcaaactggattgataattgttgttataagcaaactttgccaaagagagacacttgtccctgttcttgccgtaatcgattacaaagccctcagcatatcctcaaggatctgatttaccttttttgtctgaccatcagtttgagggtggtaagccgaacttcttaccagcttggttcccaaggactcttgcaattgctcccaaaatcgagctatgaattg

SEQ ID NO: 151100 - DNA, 685 bp, Zea Mays
caagctccagccttatgtgcaaacatcggtggccactcgagcaaaccataaactcagttttaaatactttggtccgtatcccattatccaatgcattggagctgttgcttacaaacttcaactgcccccttcagctaccattcatccggtggtccatgtgtctcagctcaagcgttcggtgggtcctcaggcagtgagtgcaacccttcccgatgctaccactcatcttcaggttcctctgcacattttcgaccgtagggtggtgcttcgcggaggcaaatctattcggcaggtgctgattgggtggttagactccgatgcagcactttcgacttgggaagatgaggaggctttacgtgtccaatttccatcagcgccagcttgaggtcaagcggcttctcaaggggaggagaatgtcagcataccatcggcttcagtacactttgaacaccaatcggcaagcgcatgaacgaatgaagttgttgttggaaggatgggccgccgcgtgcgcagtcctaatacgcgggtgacgggagccgaatggatgacttgactaatgggccgtgggccgtgtccagtatattgttgtacaaatactcgatgggatgctgctaatagagttgtcgaataacagaacaatattcgtccattccttccgttcttcttcctcggacctctcctgctc

SEQ ID NO: 151101 - DNA, 304 bp, Zea Mays
gtgttaccatcctttggttttcctccatgttgtaggccttgatttttccgcataagataattctttatttcctacaacatcaataacttcctcgagatgatatgagtctaagatgtagtagtttgaagaataaccttgggtcaatcacggatatagattattgaagattgatagcttgaatggactctctcaagcaccccaaggcttcatatcatctcctcctacaaatcttgtcaagcatattttggtccccatcgcttgatgggtccatcatggttagtcaacaaagatttaggaacccaaa

SEQ ID NO: 151102 - DNA, 673 bp, Zea Mays
gttcatgacgatttggtgcggtctagcttaatcaaatgggtctacgagcaacaggaggcttgagggaggctagaacaccaatcaaagaagcttgaactgacctgcagagggctggccacgacgaagtgttcacggtggcgcggaaaacagatttggaggaaatgcgaaattgggaggctctggtggatggtcagaggtgcgagctggtgcactaggtgcgtaataacctagcggagctcactggggcagcaatttatagactccatcggcggtggcatccaacttgaagaagcgatggcggccagagagaggggaaatgcactggcgcgggttatcatggctttcaccgtggcaaagcctccgacaatggacgggctccctactacggttcactgcaacgtggtaaagctcctaggcacgtggcacacggacggtaagcggccaacaccggcgaggagcatctcggtcggccgcagaccaagtgggtacggtgaactatctagtgaccgggtccgagccaatccgggcgccaagatcttttactcccctcggttatccactttgcgttgggcacgaatcgcggcgaccggcacgaatccgggcgcggggtcaccggcggcgaggtgtgctgcacctaagatattcttcagacactgtaccatcagaactccat

SEQ ID NO: 151103 - DNA, 646 bp, Zea Mays
tatatcatgaggccattgaagtcacgcttttggttctttgggagcggggaggatgtagcttcccactagtcttttatgctggagaagtgagtagggttagcctgggccgggaggctcaagccctcccaaactagaatctgatgccacaccgcacgggcaaaatggcaatgcaaatagaggtgggggccggtctccaaggggccattgcagagggagcagtttggttggtgcggccaaccccaagtggcaagattgttagcagtaaggagcttgtcctgtagaagaatccaagaaaaaatcttgcacttttgctctgcccgtgcccgccaaacaaaatcagaaataatgtggttgtacgatccgatgaattgtgcattgtaggctgattttaccgtgaagacaccgtcggggttccatttccaggtaatggagtccgacacctatggttggaggtggaaatcatggagtctaaatcagagggagacgaattcctcgatctgcaccgtggaggtaatcttgcctcacaacgacctaatccaattcccgtcattgatctcaatggcaactgacttgttctttcttgagactagctcgaagaggtgtggtgctaggtttcttggcgccatgccatcaagccaactgtcgt

SEQ ID NO: 151104 - DNA, 662 bp, Zea Mays
tccaaatgtttcaatacgtggcactacaacctctttttaatcatgttgtatctgcattttgtacaattatcataccaaatgttgtttattttaaggtacctctggggtaatgatcaatggtggacccaaccgaaaaagtatagtctgaagtctgaagtctagaactagaaccctagaactctgaagtctgaacttaagtactgattactgaacacagaatcacagaatcacagaagactgagagacacgtaccttctgaagaggtgttcgtctctggtccctggtgttggtcacttgttttcaattgttgtgaattaaaaacaaggcaacacaatgttaaacgttatatgaccttcgtcttatcaagcattatcttttctcaaagataaagactcttggacgaaggtcacgatgagtataagattactcataaacaatccttcttctaaggttgttaataagtaagagtttagaacaaaaagcattcatgtttaagggataagcaaataacgtaggataaatgcttcatcgggtttagggtgatagagacaatgtgtaatgagattcttggtaattataccaagaaagaagaccaactaatgaccactgctttcggcactcgattacacattgtctctatcacctccagccatcgtgacctt

SEQ ID NO: 151105 - DNA, 854 bp, Zea Mays
cttggtttagtttgttattccatcctcttggtttcgtttgttatagcattgttttcctcttggttcatagttttttcatgatggtttgcggaatttgatttagaacaatatctaactgttaagtgttatctgttgacaacaaactatataggttctggcagaaagaagacccacgacatcttcaacacagataaataacctggtaagtgttatctgctttgccatatcttgctttgctttgaattgataattcattacttcatgtctgttagcaagtagatgacataaaatctgtccattggctgtagttgacctcatatctgttgaggtactggttgtacaatttggtattttctgtatatggtcctgttagcactgcagtgtttgatttttgtttgagctgtatatgacttgggctgtctgcatcaattgtgaaactggacagatcagactggactgtcctgtgaagttttttggtttttgtttgaacagtgttcctgtagcggcttagtcttgatttcattttatttagagctacaatatcactctatatgttttcagattttatagttctcctataagtgttatgaactttcacgttacaattgcaattctgttagccataactgtcagccagccagatgaagagagtacatttcaatggagcccatgtcttccatatgcgtttctacatattttctagaataaatcccatgcttgtatagacgccgagaatgctggtttggtatgtcttgctgcagatgcaaattatccaaaaggttttagagctgtagatattaacatatggtttctggttctaatttagagctgtagttatgtcttgctgtcttttg

SEQ ID NO: 151106 - DNA, 375 bp, Zea Mays
taattcctcagacccgaccatggcaattttcgtcgaaggtggccaacaaggtacaacaagatgggatggatgcacgaaggaatagcggcgctcggtgtttatacccgtgatgactccgtaacggctcgagaagaggtgaagatccggtcggtggagcgcgcgatgcgcacggcgtctgttacgggcagcaagcgaaggagaaggagcagctggtggcgtgggaatctggcaagggggtccgccctgccagagacagcacacgcgcgaggagtgctggtgggtcgtgcgggggaagaaagcagatatgggccgaaatgggtgtgtgcggcccacgatcagggtttgttcttttcttttatatttcctgctttattt

SEQ ID NO: 151107 - DNA, 310 bp, Zea Mays
ttcggtggctgtgatgtcaaatgtcccatccccattgagctattactttttagcgtcttgaattgtttagggtttaggatttagggtttgatattgtgctcaatacactgttaaacttggatggcttgtaccatatacaagcaaccagtttgcaactgattgcctcattgccgtggcggtggtgtaccatatacaagcaaccagtttatttccaaatgaacaatcctattcaaaagttcatttagagtaggatgtgtcgtgttgatattggggcaaatctgagccgttcaacataatatttctctttcta

SEQ ID NO: 151108 - DNA, 288 bp, Zea Mays
aatagtgcaagcagcagtggttgttacttttgattgctctgttggtagaacatcagtggtggattcattgggatggagcatggaatatgacctggaactagactgttggtattgggctatcggggtttggtataaatctggacaggaatacaggatgtctggttgcaaacatatggggttaaatttttaggaatccctctccatggaagccacagggatctgtactcttgtgacatgctcggagatatcccccaacattggcaaactcccatagttacttcttcctcc

SEQ ID NO: 151109 - DNA, 304 bp, Zea Mays
ccgccatgctctagtcactcactcagcagcagactcacttggtagcagaggaggcccattaggtagccatccagtagcagatattcaagcagatgttgtcgatgtttcagactattcaggaccgccaggacacccttcagcagcagctcttggcagacagggcagagcatcgtgcgttcatgactcacatccttcagcacaccggtgttcctattcctccagtacagtctgctccgcctccttctcttcaggctactactgtgctagccatttagtaaggacccagctacactcctttggtcga

SEQ ID NO: 151110 - DNA, 356 bp, Zea Mays
caattgtgaagtgtgccaagctatatgtgtgcaatgggaagtttgatcagtttattatgaaagaagatgagagtgtatccgatatgttcaaccggttaaatgagatagtgaatgaaatcaagagacttggttttaatgtaccggatgtggatttcactcataagttccttagatcacttccggagaaatatgagaccattgtgacaatgttagtaaggagtgatctatctacaacttcttcaaccgaagtattgggggaaattcttactcaagatatattcaagaagtctcaagccgatgctttaagtttggcaaagaaagtgaaaaatgaatcaattgctctcaaagctaaagcc

SEQ ID NO: 151111 - DNA, 283 bp, Zea Mays
ttttcctcttgtgtgactacccgagagctttccatttgcaacttggcaataaaattcttctttttcctgaaacgggcaagctggtggaagaacgaggtgttagcatcgccttcacgaagatataacaccgggtgcgcagccgggcaatggttcgttccagggaagataaaccaagacaatgcaatttgagttttttcctcaaccactcctcactatcagaaagctccctggaatccctagcaacttccagcctatgcaaaatctcttttgccatctcaagttg

SEQ ID NO: 151112 - DNA, 725 bp, Zea Mays
tgcatcgtgatgccatgttcctttgttttccccccatccgtgcgcctttttcacccccgccgcctcgtcgctttgccgatcgccatggcatgcctcgcatgcacagcgttactgctgctgctgctgtgcctatgacaggcgggctccacttgcgccattgctagctttccctctgctttcgcatgccaatccatcgaatagcctcctgcttttgcgcacgccctttcgctttgcagtccatgagagagagagggagagagaaaagaagagtagaagatcccttaaaacaactcgatgcgaatgcgaacgcgatgaagaatctttgttaagcaaaaaagcgcttggatgtgcatggcctctgcactgcacagttgttatcttgggatctgcagcgcatgccacactgttgatgtcatgattgcctgacggctcattgctctgctctcatttgagctctgcaggagagtcccaggtcctaactggctttgtttgacctacattagcggcagtaggtggcgtgagattaggctgcctttattttttgcatccatcacatggtgctagaataagaatatctctgtctgtgggctgctctttttataaagagcttcatcagatcagtgtgagatgtctgaatgtttgttggttggtttcatcactcaggcctccgggcctcagttcatcattatctcagattggatgcttttgtttacgcttatcccgat

SEQ ID NO: 151113 - DNA, 325 bp, Zea Mays
agaagcgcggcttcagtttgccgcccaccgcctgaggaagagacgacgccgcgcgctgacgtagtcgaagcagcgcccaatcaccgacttgataagtgacatcgcagtgcacacggtcgtagtggcgcttctggtacgcctgtgcctgctccagacggtagcggatgtccgccaggaactccgtgcgctcctccatgctcttggcgacggccggcaccctggtttccccgagttcataggactggatggagggaggatcacgcccgtagaccacgcggaatggggtgtcccgcagggacgtctggtacgccgtgttgaagaggaa

SEQ ID NO: 151114 - DNA, 1567 bp, Zea Mays
gggctgttgccatttcttggattgctaatggctctaggggagaagagtttaaacaattcatataaaattgaggacaaactgtctacctcatagttctctggacgtctttcaacaagtgaagtacttgtaagaacaagcagacgagagacagaatcaccctgttctccaagcccaccccttggtccaacacccaaacttaagctctcaatattagcagtgccacgcgcagcagaacgtaatcttgttaccgaccactctccatgccgtgtttcagcagctccaactgcctccatagctgggaaagaagtccacatacaagtaaaatcagagaaaaccatagtgggctcacaggtaacaaataaactatcactgagagttttaaatcctttattatatgagacgaatgtagggtcggcagcatcaataaatgtgtaacgaaaacatgagacaagtgcgaattttgttgatcaatgtggagcttgaaggtggcattttacctaattctcacagttcatttgtgttttgcaagctgccaagttacaaaacatatggatggaaaggcaaaactagaggcatgataatgcagtgagaacatcaagtagatatataaaagtattgagcaagcatcttcatccttatcaacatctaaatagattctctaataaaatagagtacatctaaagttcaccatcactagagatctgtctacctctttttgctatgaagtcatccgctttcattgattgtgagttatccacagatagtgataatccaatctttaatttggcagttttcgtctgaaagatgaccaacaaaggaagttacatagaactacaaaaaacatgtatcactggagtggaacgaccaaaaagaacaaggtcaaaattgtgtaccatatgcgatataattgcagtgtttgtagttcctgaagcagccataaaagcttttgacttcctaccataaagagggcatagcacaaaccctccaccttcagaagtcttcctcccatagctatcccccaagagtacaattgccggagaattcatatctctgaagtccaagcaccagcgtatatcaccagaagcctcaaggagctcaacacccacaggagtgaccttaaatttctacagaatgttcagatacaagaaccaaagtattagacatcatgtgatgataatacaacagtatttctttcaatacagcattatgtgagtaataagttatcaaagatggtctccgcaatcagctaggtatctaaataatgaccatagaactggtacactacaatcatctaccacatccagtcacttatatatgacatttcgaacaacaaactaaagttaaaagcaagccagacttgctgtctgaaacatcatatggatctgactggagggagtagtatttcatagcatgtcgttattttgagcacattttgtggcactatttttcatatagttaaaaaatcgcaaacaactgaacaagaatgaatgtgtgaatatgtgaattatcttcaatagttctgcttgaacttgtagcctggtgctatgagatctggtgaattatctta

SEQ ID NO: 151115 - DNA, 405 bp, Zea Mays
ctgatctaatctcgtccacacgactctgcatctgtcgttcggttggatttcgtctctgtcgctggagaaactggatcttcttcggcagggtcagcggaggacgggttctcctcccgttcgggctgccgcataggtcttcgaacatcggaaatggcgtcgtttggtcatctcttttgctcccaaccaaaacatcagaataacgttttcccgtttctctcctgtcgttgatgtttcggatgcccctcctgtttctttaatttcattccactaatgctcgagacctcataatggatgctggattgagataaatggattttaagtttccaagaaaagaaatcgactccccctgctctaagcctctaaccattcttctggcacagggacggtatccagtgtgaaagttgc

SEQ ID NO: 151116 - DNA, 422 bp, Zea Mays
tgatgaatcattttcggctatgctttttgaatgaattcgataagtctcgctgtaaccatccgatggcccgtgtttgaagcacctagatgcatgcctctgaattttagtaatttcagatctgttggtttctagcaggagacagaacgagcaatgaagtgaaaaatcaaaatatgggaatttaggaaaagaagatggagaggctaccgacgaagttgcaacaaggagccaacgaatcttgatcatccaagactacaggaagaactagagaaaaccctaataagttccttagctacaattggttaggtccggatcagcgaatgtaattttgatgtatacacccttactatgattctcggtaatttataagtgttcaaattttgtctgtcaccataaatatctgaaagaggatatttatttctacc

SEQ ID NO: 151117 - DNA, 1153 bp, Zea Mays
ggtaattggtgcttgagacaaatgctctaattacaaacaattatctcttttttgttaactaggatgaattcaaacactcatgtggaagctcttgaggatgatgtccttaatgctaatgaagatgagagaatgtttcctgagtttgttgaaaatggtcatgcacgtgggtatgacatgcttgcacaattcgaggataccgatgatgaagagagggaggagaaccttaccatgggtgtgcctgatgatgtagaagatgaggatagactgattgttgattgggatagagaaaatccaagtctagaagaaggcaatacttttccaaccatgagagattgtaggaatgcactcgcaacctattgcatcagaggggaatacgactttatcattgacaagagttcgcccaagagatacattgtgcattgttggtttgagcggtgtaagtggaggatgcatgcctccactatgaggaataacactattgttcaagttatggtcaacccttttccgcacacatgcccaagtgccgaaagaaaagtgacgcagagggcagccaagagcaggtggtgctgtgatgcagtgttacagtgggtgacagaaaatccttttattggtccaaccgcacttattaagaagattcatgagaagcataacattcaagtgccttacatgagggtcttctatgggaaacaaatggctcttgataaaatctatggtccatggaaggaaagttttcaactattgtactcatttaaatccgaagtggagaaggcttgtcctggaagtgttgtgcagattgacaagcacaaagtagtgtacaatgtgaaaggtaaaactatggagaaggaatgctttcggagagtatttgtttcattcaaggcttgttggaagggttttttggatggttgtaggccatacttggcggtggatgcaactgttttgaccggcaaattcacaggacagttagtggctgcttgtgctatagatgggcaaaattggttgtatccagttgcttatggtgtcttggaggttgaatcatcagagagctggacatggtttatggagaatctgcgacatgtcattgggtttcctaatggattggtcatacacacagatgcttgcaaaggtttggaggttgcagtggatcatgtgttcc

SEQ ID NO: 151118 - DNA, 520 bp, Zea Mays
cacaaatggtgacaaggccggctcgtgctcctaaactcggttgccgaaggaggatgtgttgtacaacatcgtcgcctccaattgaccacccacacatctcttttctcgatcgtcattctttcccgacaccaaatgtcgagcatgatggaggcattggagcacacgtgcgcgatggtggcgttggagcccaggcgtgtggcggcagcggtggccctgctcctattcagattaagccacacgagattgattgctgctgaagggaggcctccccagttgaatccacatccatatgcagagtacacagccgcatccggaggtagctaggtaccggcatccggcacccactatcgcaggtgccaccacagcctcctgttttcatgaacgtaaatgccatttagggactgaatcagccgccaccaggtcatggggcaagattggaggactgccacatgtgcttgaaggcattgttgcctcacgcccactctgatctgctggtgaatgagtatggcaatgaagtgca

SEQ ID NO: 151119 - DNA, 422 bp, Zea Mays
gttgaagagccggaggaggtaagggttataagggacgacccatctgttgtccaattcacaacctcgaactgtttccttacgcccatcatcacgacgcctataaataggatatgaatcctttccttgagacgttgcattgctaaaagctctaggataatggtttttgcatgaagcacgacccttagtgcatgggcatttaggatttagcaacccgcacggtccatgcatcatatgcttgataaccatcttgtatagttcagggtacttcttcttgtcagggatctcagcggagataaggagatcatactgatcggggcaagttagcttgtactttctctgcatgatgagtaggaaatggacatgaggcaaacctcgcttctggaactccacgacatagacataagcccggatttttccaagaa

SEQ ID NO: 151120 - DNA, 279 bp, Zea Mays
aggcggaggacaacgcgctgtctacgaccttcagaggccggaagaagaagaggttgaatagagttttcgatgctattgggtttgtgtaccctgattatcggtacccgctgaaagggcaaaagagaaagagtgccacttctggaaaaggagatgtttcagttgctctaagtgaggccgcgccaaagaggaagagggtgaaggtccttactcaccgaccgcgcttcatcgaaccggcctcagtgcccgaatttggtggtgagacctctatggctattgaag

SEQ ID NO: 151121 - DNA, 356 bp, Zea Mays
gcctaattggagtccttatttgaaccaagacgatagaagggagaaggaagaaatcagtttaggcacctagtaaccaaactcaccttctctcccctattccccttgtttttttctctaggatgaagaaccctctgcctaatctacagcaccaagggaattaggagaattggaatgaggggaatctgttttgattgagggagagatgaattaagtcccaaaccagaggatccccagcaggactcctaccttttgaaagagatgagaagaacacccccactcctcctatcgttggggagggaagaatgaacgtggtggaggaagagaataaagtggagagagggagaggaaggattttc

SEQ ID NO: 151122 - DNA, 1060 bp, Zea Mays
attagtgcaatgggttttcaattggctagagaagtcaaaagtggcattccttggtgaaacaagcacgatgctaatcctttgtccttcattgcaaaccgattcatcaaaatacaaagtctagggactaataatgagatatgacatatctatctcaagagtatcatcaatctgatgctctacaacaaaatcagctatgacctggcctttcatggatgccaaagattcataggccaaatcatattctataagtgcataagcccatttaccaattctaccactcatgattgggtttatcagcatatgtttgattacatctgtttgacacaaaactgtgcaagagctagataggaggtaatatctaagcttggtgcatgcataaaacaaacatagacataatttctcaataaaagagtatcttattttagcatccaccaatcttcgacttagataagttatgtaatgctcctttcccttgctctcctaagtcagaacaacttcgatgaccttatcttcagctgcgacatataacctaaaagggaagccactctttggtgctttcaacactggaactaaatataagtaatcctcaataagatcaaaaacatgatgttgctctgctcccaagtgaaatcgacattatccttaaatagaagaatgggagtaaaagcatcaaccttcccgacaagattagaaatgaatctccataactaacttattttgccgagaaacctttgcatttcaagcttactagtaggtgctcctatgttccgaataacctttattcgattgggatcaacctctatgccatgttcatgaatggtgaatcctaagaattttccagccgacactccaaaggcatatttgtgcgggttcaattttagcccatacctatgcatcttatcaaaggttttgcgcaaatcgactagatgagaattaaatgcttccgatttgactactatatcatctatgtatacctccacaatgtttcctaataactcaaggaagatcaaattcgtagccctttgataagtggcactgacattctttaacccaaatgtca

SEQ ID NO: 151123 - DNA, 663 bp, Zea Mays
agcgtaaaacatacttagtaatttccatagtcggctaatgagttagtctatgttaaatatattttatgtattcatcgtggtgtaggatagagtgggtcgaagatataaattatgagacatgtgatttgtgtttaaggacgagatgtgcgaataatcggttactgtttcacatgtctagtcgataaatgtggttataaataattgtgctcgacataaatgtttggtcgttgtatcacttcctctatgtttataagtcgagtcaaaatgcgggatactagtggtacgctagacgggtggtgtccaaataaattaaccggtcgatgtggtagttgtcgtgagtgatttattgttagtgagtagtttaaattacgagctatatgaggattatgttagaaactagtaggcggcgtgtaactgcgtttgtatggtgaataataggtcggtaggtattgttggtgtcagtagcaaatgtagtcttatggagttttacgccatgtgtaaatgcctccacgatagaccctaaaaatgtgctatttaggtgactcgtgtgttaactaattcaagttgagcaatggttgagaaacactgatcaatcggctccaacccatgttcttgagttacgatgtctaaaatggttcgctaggtcttctaccgtgattagcc

SEQ ID NO: 151124 - DNA, 1191 bp, Zea Mays
gccatccttcaaggctacattcagctatggccctatggtcgacttctgggtaccagtgtgaggtgtttgctgttgataatgcacttgcagttttgactttctactatacagaagccaatattagcaagttgtgtccatggttgtggccttgtgggtctgtcaaaggaaccaatgtttcttgatttcaatgatggcactagcaatgacactttcctgctggcaaccaacagaattgtggaccaacttccatcatatattactgcatgtagccttcatgctaagaagttcagtatacttgggaccttgatgcacccttcgacatatgctggaaactgctgccgcttgatgaaggattctttcgtaccagtaaggaactgcagtctggagcgaattggttgagcttgacatattcctcgtcctgtgagccttttggtactccaaaattgatcagtatggaagcaaaggggagcactggagttagcgtattaaaattttgccttgacctgtccagaatcatatggggttcaggagccaaacttgtgcactttttgcgtgctgattcatttgacgtcttcaagatgtgttccagtgacgccatacgaaatggatcggaactaaggcatgatcatttcataccaggaaacaatagagatatccaggggacaattgaagtaacaatggatgtctctgcaaaccggctttaagacaagatatctccaaggttttcgtacagctgcttggggcaatcagcttctcaagaagagggtaatgacaggtatttgcatcaaatgggctacctctcgtgtgggccatggcccattcgcctgtgtaacaaatcgcagcaactacaagaggagagacatcagcaagggggagggcattcagttcatgtcctattcttcttctagctttgcactcctcctcatccttttctcccctccttccctagttctctattccttcatatagattgctctgctagcttcagacccccctcctccccgagatcgtgtaatctgatttgtatctgaataagctgttctgtgaactaatcgacaagggtgctagcttcagacctcctctccccagagatcgtgtaatctgatttgtattttaattagctgtgagtctaaggatttttcaacttggctcaaatgcagtgagtacatctactagagaacctggacagct

SEQ ID NO: 151125 - DNA, 1473 bp, Zea Mays
cgctgcctgcccccttcgatctcctgctctctttccccttctctctctatctactgttcttgcttgagctgcgatcctcttcctgaggcgcgggcgttggatgtgatacgtggttggctccgcgccatctcctccggtggcgatgagctccaagtccacctgctgctgcttatgaggtatggtgcttgcgagacttgtccatggttgcttgcttcgttttgcttagagatgctctcgccggggcagccagttgggctggtatccaagcaacctaggattggtagaattcgagcagtttctaccagtttccaagctatgtgattaaatcattaaagtgccttttcaaaattatcttctccatgtagagatagagatgtattttcagttcatgagttgtacagttcctactgaagggagacctacaacgtgctgaaattctgtgttcaagaccatgttttttttattttattatatcaactataataaatttgaaattactttcatggaagtgatttagtggagtaatctagcatgagggttagttccagtggaaattcatcaggagtgtatcttgttgggatcaagtctgtatttcctttcggtgagcgtttttttccggtccatcatctataacaacctacgatcttgtttcagatcttgctgaatgaattttgtggtttttgagccatcctggtaaaccttggcatggccagtggagagacaaacgcagggaacacccagaggtgtgcttatctcatctttaccttgaaacacactgtttgttttttctagttctagttactactggaaggctcttcagtgtttttttaaaaaactacccactgatgtgctaactgcgagacttcaagatttttgtttacagaaatcttttgctatttaagtagctgtcagaaatcttgggagcactactatatagacattttaatataaattgtgagtgctggtagccttatcttgtctttctgtttagggggaatacccttccaaatggtgacatctatgttggcaactttgctggtttagttcctcatggatttggaaagtatatgtggacagatggaactctttattatggcgagtgggatacaagcaagatgagtggtagaggagcaattcagtggccttcaggtgcttcatatgatggagatctttgtggaggtttcattgacggaacaggcagtttcaaaggagttgatggatctgtatataaaggttcttggaggatgaatagaaagcatggaatgggcacaatggtttacgccaacgatgatacttacgaaggtttatggaatgagggcttgccagatggatttggtaaatatacatgggttgatggcaacatctacattggactttggaaatctggtaaaatgaatggcagaggagtgatgcaatggacaaatggcgatactcttgactgtaattggcttaatggactggctcatggaaagt

SEQ ID NO: 151126 - DNA, 454 bp, Zea Mays
tgggtcccattctgtcaatgatgggataggggccgacgaatcgtggtgctagctttcctttcacttggaaccttttgacaccacgcatcggggagaccttgaggtagacgaagtctccttcttcaaatctgagttttctccgcctgttgtccgcataacttttctgccgactctgagcttcaagtaatcttttgcggatcagggcaactttctcttcagcctctttaacaaaggcaggtccttctagtgtcttttcccctacattggaccacatgagaggggtctggcactttcatccatacattgatactggcctgatggctattgttatacgagaactctacataaggcgaactggactcccagtttcggtcgaatgttaacacacaggctcttaataaatcttcgaggaccttgttgaccctttctgtctgaccatctgtctgggggtgat

SEQ ID NO: 151127 - DNA, 382 bp, Zea Mays
gacgtcggtaacaacagcaagcatggtgtagcatgacaagtagcccgcacggctctcgcgacgtcagggtggtgaccaagcgcaggcgcagcgtacgccgacgagcactagcaaggggattcaacgaactataatgacgtgtcacgagagattggaatcaacaacggaaatggtgcggtggtgtagtgtgtgcaagaagctcaagcaagaggggagcaggcgagtagagacccgaaggactgataagagagtgtggcgtggtgagaagcgcggacgggtctgctcttatagttgagcagaggaaggggagagggcgtctggtgccagcttaaaggtgccttgaaggctatttgctgtggtgttgaatgtcgtgattgaaatc

SEQ ID NO: 151128 - DNA, 422 bp, Zea Mays
aactggcagtacaatttgtgcgatgatagtctcctgatgctttcaactatgtagtttggttggtgttggggctcaatattagtaaactacatatactgtagaagttggacagtgttcttttgctgctctagtaaatacaactacaaacccatgttgtgtaagataacgctattattgctagttactctgagtgctgattatttaacctggcgcatgtttattggttaggcagaaaacagttggcacttggcaggatgtaccttaatggataggtaggccacataattgatttctggagaacacaaggcattttaaccattattttactaatcccactccttgattcctgagcaagaggaactcattaattatttgatttatttcattgtgattgtcctgctacatccatatgcttgtacatt

SEQ ID NO: 151129 - DNA, 403 bp, Zea Mays
ggagaagaagccggctgggctcgtcgcgtcgtgctgcggccgacgctttgccgttccgctggaaggacgtgcacaacgacctcgccatcccgtccacatcccaatactcaaagcgagaggccaagagccttctaggcgctgccgttttctttctatttttcatttccttattatttagctgggaatctgcgtcttctacgaggcggttttcctgatgcatctaccttccactaacgcattattttctgcaatattgtttctttttgtgcgctatttttatggcttcttcttcaacgatgtttgcctctgttttcggatttcacatgatgcatctaccttccacgaatgcattattttttgcaatattgtttccttttgcgtgctattttctatggctttttct

SEQ ID NO: 151130 - DNA, 499 bp, Zea Mays
cgagttcagcgtctcgttcccggcgattcccggcgagccgtcttaccagtggagagagctcttgatgatgtacaggaactacatggcaggcgctctggacgagcaggtcggcgcgtcggtgaggcagaacttcatgtggaacctgcacgacagctgggggttcgtgttcaactcgttcagagcgctggaggggaggtacctggagcagcctctcgaggacctgggcttcaagcgcgcctgggcagtgggccccgtggctccggaggcggacgccgcggttgcccgcggcgggcaggcaaccgtcgagctcgccgatctcagcgcgtggctggacgcgttcccggaaggttcggttgtatacgtgtgcttcgggagccaggccgtgctgagccccgccgtggcggcggcgctggccgaggcgcttgagcgcagcgccgtgccgttcatgtgggccgtgggcgacgccgtggtcccggacgggttcgaggcgcgcgccgcg

SEQ ID NO: 151131 - DNA, 434 bp, Zea Mays
gggaacgattctatctgggtgataatcgaccgtcttaccaaggtaacccatttcatcctagtgaaaaccaccttcggaggagccacccttgcccagatatatcttaaagaggtagtcagactccatggtattccacggaagatagtgtcagacagggggacatagttcacctcaaaattttggatgagccttcagcaagccatgggcaccaagctagacttcaacaccgcctatcacccccagtcagatggtcagacagaaagggtcaacaaggtcctcgaggatttgttaagagcctgtgtgttgacatttgacagaaattgggagtctaatttgccatacgcggagttctcgtataacaacagctaccaggccagtatcaagatgtcaccgttcgaagcattgtatggacgaaagtgccagacccctctaat

SEQ ID NO: 151132 - DNA, 1639 bp, Zea Mays
agcacgtccagtagctcgcgaaaaacaaggggagattagagagggtatgcagatgtagggaagagagaggcaacgtcctttttcatggccgcgttcgtgatccgttcgtgatccgctagatggatctacagtgcttcgcaaccctctaaaacgcgtatctgcgacgctttacgcgagcagggcgagctgttggactcagccttatctagtcaacgcatccactcacttcctttcgtcctcctgctctctgtgtgtgccacgcaagcgccctatccaccattagagtcgctcgttctacaacgacgtgctagctagccgatggctacgaccacgaaaccactcagatcgtccgctgctctgccgcacgggtaagcccccccccgtctactggtaaatcgctctgttctcccaatcatctggtatccctagctagccattagttgtcacagttggttcccgctaagcccatccgccggtttaagtcggctaatcgtgtgtttgcgtcgattagccactccttgaagccaattaattactcccccagtagctgataagctggccggtgtagtagttaaggtttggggatttcccctttttcacttcaaatcttataaattatcacggttacttactgctatttgcaataatgaccaacagtgcttgcaataatagctcatattactgatattttcagggatgctggatcggatcgatccagtttaggagcattggaataacatatcttgtattcaagtgcaagtattgtaaggaacaatggaaggagggcggtgctactcgttttagacaataccttacatcacgtggacgaaatgtgcaaggttgtcgcaacgttccgtcggacgtttgcaattactttcgacgggagcttgacaagggacaatatagaagggaaagcaagaatactggaggaggtatgaaagttagcattggcgggttcacctcaatgatgacgatgttgagttgcaggtcgcattacatgctttaagagatgaggaggaacttaggaggcatgcttgcgcgagtagtggcacgtatgagagggtgatggctcctcccatgggggtgttcatggcatgtttggaagaacaccttttaggaaggagaaaccacgcatggtccgaccaaggattgataaggcctcgttttcgaaggcagtaaggaatgacgtccatttcattggtaagcctattggacccccgagtctggtagtgatagacaaggttcatcttcaccccttcttccctatatcaattatccaattggtgaagtgactcagtaacccatgaggtgggtgtatcaatgggaggagcctgagtactaaatattaatggactcatggagtacgacttctgcgtggaccagacagacttggacggagtacaaaggaatgttgatgtgtgagcaaggtattatattattctcatcggaagggtataatgtgacatatgatcaatggaatgcttacccgtgggcatgatgttcaccggagggtgtattgtatctttgatgctattcatgaactatgaaattgtggcattaatgtatttgcacttctaaatattgtgattggacttgtgataagatatggaccatttttgttgaatttttgtaatcataa

SEQ ID NO: 151133 - DNA, 395 bp, Zea Mays
ggatggattcaacaccaagtgttattgtataagcaacacaattgaaatggtatagaaacaatccacatgacatgtcatgaaatgtctgtagccataacacacctctgtatattaataaatctgaaagctgactcattgacgaatacatcactggccaagaacatggcacactacagccagtgcactcgtacgaagagaggaaaagcagcatgctaggctagcaatacgtgctggcacatcttctatttttttataacaatagggaacagactgaaaattgaaaaaaatgatgtagctaggaaatctagattagtagcagctgctagttaagatgtctacaaattcctatatcttggagcatcaagcctgaattctccacggaagcacaaaccatc

SEQ ID NO: 151134 - DNA, 528 bp, Zea Mays
ttcacgcccaaattgttccatcctatctaatcatgtaataattgctgcaagagaggtgttagtagcagcaagtgtttgttccaatgtggtcaatgtgttgttggcaacaatttgtgctgtttctaattgaccaatgcgctcattggttacttgaacatcttcgttgagagcatctgtgtgcaaccttacttgacgttcaaaatgttgaatgatgcccgctgttcgtggagaatgtggaggccgcgcatttgcatcctcttccatggttagtgcaaaagagatacaaaaacaagtaatgcagcctagtagttgctaggatgtggatggataaatactgcctcactagcaagaaatcaagctcttacaaattctcaccacacaatacaggaggtgccgacaaacagcaaaaacaacaacaacggtggcagctagcacaacctggtggtgttgtagaaaaatttgtggatttataggtagctgcaatttcaatagttccaaggaatagctagtaccacgttagccacaaca

SEQ ID NO: 151135 - DNA, 436 bp, Zea Mays
cattggtctaatctaagtgtcactacagtttttacataagttagttcactggagaacagacttatccgccttcagtaatgcatttgttgtgttcttcccactaatactggtactaagctttttgttatgctgatgtcataattaacgatagggtggtcacttggtcactacgcgtgggccacgaaatttcgtcatgcagatgtaagtgaaaacttcgtcatgtagatgtgagccacgaaacgcgtcgaactcaggtggcgtttggttgagcacttgtaatggtaacattaatgtaaataaataacattggtatctattaccacgagaatgaaaagcgctaattgtttggatagatatggtaacgttttctatgggcagtgcgtgcggccacacttgccgtttccgttgcaggccgtgtttgcgttgcgtcgatctg

SEQ ID NO: 151136 - DNA, 515 bp, Zea Mays
ttcatctgtctcagcggcagtatattcttgaggtccttgaacgtgcaggtatgacagattgtaagccatgttccactcctgttgacacaagtggcaagctttctggcactgagggtcaatctgtcactgatccgactcactatcgaggtctggccggcgcactacagtatctcactttcactcgccctgacatttcatatgctgttcagcaagtttgtcttcacatgcatgatcctagggaaccacattacatgttgatcaaacgtattctacgctatctacatgggacattggatcatggcctacatcttcgtcccatggatgtctccacattggttgcctactctgatgctgattgggccggttgtcctgacacccgtcggtcgacctcggggtttgctgtttttcttggtgataatcttgtctcctggtcatccaagcgtcagcctactgtgtcccgttccagtgctgaagcagagtaccgtgcagtggccaatacagttgctgagaccacc

SEQ ID NO: 151137 - DNA, 293 bp, Zea Mays
ggagactactggaatttaaggagggtgatcacgtgtatctgaaggtgtcaccaatccggggtatgaggagatttaaagttaaaggaaagttgtcccctcgcttcgttggacctttcttgatcctaaagcgagtgggagaagttgcatatcaactagagctacccgatcacctgtcagatgtgcatgatgtattccatgtgtctcagctaaagaagtgcctcagggtacctgaggagcagttaccaatggaggaccttagtgttcaagatgacctgacttatgctgagtacccc

SEQ ID NO: 151138 - DNA, 1198 bp, Zea Mays
gcatttgcaaccctaatgataaaaacttcacatacgactattacctacttcatctgggttcgtggtgtatctttcggtctgtccaataaacttacacacagatacactgacaacacacacaaactttatccgctcctaactgacaacatcagtttacgactgacaagttaaccaacgactacactggtcatcaaacggcaagaaaccatcctcgacttcatcacataccacatgccagagcccagagcacatctacttggagtttggttacactgcagcaagcacacggagaccactagactacatctgctcaacaagagtttctttatattcctcacattttcctctagtagcttccagaattggtgtagcacatgataatattttgtgtgtgaacgacgaatcatcgcaagtggcaatacgcctctatgttctacaatggcttggagagttggagtgaggttcttaacaattgagtgatatgtgacaaagctcgaactgaagttcttcgtttcccaatcagccactagggacaacgacgtcggatcttcaggtaaccaaacttcccagctcctggagacgacccgtcgaaaagaatgggcagatacccggtctcagccttgtatctgtgctgaatctggaagtgcaggtaattatcggtctctgtcatcgtgataaaacccaaacaccaaatgaacaaaggctagtccgtggagctacctctgcaatctcttcactgctcctggcgcagttcttcccaacaacacatactgtgccgccggagcctccgccggtgatctttgcgccaaacagactagggcttccgccttcggatgtcctcctgtgttgcacttctcgtaccaggttgactagtctgtcagtcccatcagaaccgaggccacatgcgctgtagctgttgtggcactgccagaaacatgtgaatcaaagagaaacatcaaacacgtcaaaggtatgcaagtagcagtacaaagagaagaatgttaataccagcaaagcacaatttcctcaacttaatgtttgcacagtgaaccttgttgtgcaataagagtagagaaagatacatcatgatgagcagagagccagagacccaaattaattcacctggtacataagttctccaagggctgacagctgctcgtctgtattacctgcctctaataacgttttgaaggcctac

SEQ ID NO: 151139 - DNA, 599 bp, Zea Mays
acagatgtcctagaagtatgagtaggtgttggtaagaaagagtagggtaagggaaagactccgtcccagattgtggatctttgattcctttggaggtatggcttgaatcttattattcctcaacgagtttgatctccttcttctcgagtcttggtgtcttcatccgggtttgggacaagaggttaagatggatctgtaggcaacagatgggtagagggtttagtaggtagctataagtttaatgagattagtcagaatctgatttggtcgtttgcttctagatgggtgggataggttgtataacctattatataggtcaagtggttgtatatggctgagttgacttacgtcaccaatttaggcttaagtgaattaggagtatggttttatccagtattagtaactcacactagattagattatattaggttaggtaggatcttgattagatgggatatgactaggttagactagataatatctaattactttggattagatcacagttgttacactagttcgagataagcaaagtggttaggatagtatgagataagatagaacatagggtgaacctattaggataaaatagaatcttt

SEQ ID NO: 151140 - DNA, 502 bp, Zea Mays
ggagacagagacatgaagttgataatatacttctcagtttgtccggggaaagaaaatcttgtcaactatgagcatgaaatgtttgttagatcgcaggtgaactcagagaggttatattaggcaattgggtcagttacttactttggcatcatactgttaggccttttcaaactgtgagttgcatctattagttatggatgtgtggctgggtcaggggtgacaattggttggagtcaagttagtcttacggaatacagagtatttcactaggaacccatctgttttggtgttgcatttggtactacatatgccacttgtgactggctattttgttgtggatgggattctaggaattcttatttagttgagccattcctgatttgactttactagccatgtacatagatcataatgctttccttgttggaatctccttatgccaggaaaatgcctcgcaaagttgtatctggacccgactacgatgatgactatgatgagtatg

SEQ ID NO: 151141 - DNA, 710 bp, Zea Mays
taagagtccctttgttcccacatgaggccttcgatcctagggagctctaggcacaacttatcacattacttgaggccagaggccttagggatccgaggactaatagagggcactcgagaccttagaggtttgaggactagtagagagtctcgggcttctaagtgtttatcatgaataccctaagcccttaagggctctaacttttagatcattcatcatgagggccctagagtatgtggtcctacttagatcattctagtcgggggcacctgaaggcacaagacccaaggttttggaccattgcaaactatggttcttgaaagtaggggagtgtcgcgaactttagagtgcctcaggatgtcgagggccttgaggcctttgattgttctggtaggacatggtataaatatcttatttctttggagtgtcccgagatgaagttccctagagggttaggccccttggccaaaggcagagcaggttctcggggcatgaggccttaggagcgatggtcctagtagttaggtctcacaatcatttcttagttaggtctcacaatcatttctcataccaaggttcttgaatgtgtcctggcatcatccggaggttagccttcttcatgtgctagcaagatcacaatacacaagattatcttttacatccacaacccatgtgagatagttgtgtcaacctagagcgagttattcaaa

SEQ ID NO: 151142 - DNA, 825 bp, Zea Mays
ggtggttacgatgatcgtggaggtggtcactttggtgcttttggtgaccaccaatttgctggtgatgatggccaccgtgatcagcgtcgtggtgatccagaacgccgacgaggtgaagatggtctgggcaaagttaaagtgtccatacctgcatttaacgacaaggaaaatgctgattcttattatgagtgggagacaaaggtggaacaaatatttgatttgtatgagtaccctgctgagaagaaggcaaagttggcaacccttgaattcaaaggttatgccatcacatggttgaatcaaatccgtgcagaatatcatcgtgtgggacaggatcgtatcacttgggaagacatgaaaagggaaatgagacgttgttttgttcctgcatattattcccgtgacttacatttgcggctcaaacgccttgtgcaaggtactcgcaatgttgatgaatattttcaagaaatggagatgtgcctactccgtacgggaattactgaggatgaggaatctacaatggctcgattcttggttggccttaataaacccatcgctgataaagtggacatgacgaactacacaaatctaacagaattggttcattttgctaaaagagcagaacgacaacttgctggatcttataaaagccatgtttctttttcagcacaaaatagttctactccatggcgcaattcacagcagccaggctcgagggcacacacaccttcatctcatgcagcttctacaccatctcgtgcaacccctcgctcagtttcagcttctggaaagcaatctgatgggaaaggcaaagctatgagttctaat

SEQ ID NO: 151143 - DNA, 647 bp, Zea Mays
tctccaccgcagctccatgttccgtggatctgggccatgtgactcttgattcacaggtatagacctacaaactgtttctgcatagtctctgcctcgcttagctacattttacggttgggttggtctcttggttgttggggaggggcgtgtgatggcaatggcgccaccgccttgtgcctacgccgagggagccggtaccagggaagaagaaacagtcctgaccgttggatcatgatctggcgcgcatacttggatgatgggtcgcggaccgcccattcatcgctggacgtctgagattaaaggagagggtgggcgcacctgggccgttgatcttttaagaaacggtcgcgattagatagagcgataccccttcgatggattggatctgggccatcaatccagatcggacggccttgtgcgctcgcgggttcataatggacgagatccaatcctggccctcggatctgatctgaacggtccgaatcttcccataccccttcacccgagaacacttgcaatagaacccctctgttttatagtaatcaacccgcggtccgcacaactgttttctgtgtcttaggaaaacttaccccgagacccctgagcttaccagaaaatgaggcgcagtccagagagtagtaaaatta

SEQ ID NO: 151144 - DNA, 303 bp, Zea Mays
ttcgcgggtgctgttgaagacttctcaacgcacgccgtgaccgcgtctttagcctccccttcatggcgctcgtcgtgcatgtcgcacacgatgccaggaaaataggcacgtcgtgcagcagctactatggcgaggggaaatctgcatggagtcaatatatttgtgcaatggaaaccagaaaatgtgttgcgccagttagcagacaaaagaccaattctccactaacctctgtttcttctcttttctggtggtgaccacgcgccgacgttgctgctcgagattgtgccggcaagcatcgccgtc

SEQ ID NO: 151145 - DNA, 381 bp, Zea Mays
ctgctgtcctccaaaagctagaaaagcggaaaagaaaatgcctgcaacacgctgtccttgcagtcaaaagactgaatgctgctgctgctgtcccacgttgtccttgcagtcaaaaagattgagatgctgctgtccctgcagtaaaaaaccgccaaggactgctgctgtccttcccacagaccacgaaacttattccaacaatcctctccctaagtcttgtgtgccgtcttgttggatagttggaccatcccggacctggagcaaagctcaagaaactcgatcctcccaaggggcttggtgagcaggtccccaagctgatccttggtgttgatatagcgcgccttgatgcttccttctgccaaacagtcacggatgaagcgg

SEQ ID NO: 151146 - DNA, 290 bp, Zea Mays
tgtaatttggtctgactgcttggtatctttccggtgtcccctatcatgtgttcgttagtagtaaaactctgttgggtgatggaatatgacatgaagaataaactattagtataacacgcaattgttgtgaaggtaaaggggtgagttgggaccttggggtttgaaaaggaggtgacttgggcgatcaatgttttcttttattcatgaggcatcacatgttttggctgtctccattgttggtatgccctgctgataggggatttgacccccagctgtttcttatctgttgt

SEQ ID NO: 151147 - DNA, 484 bp, Zea Mays
acatttagccacgaaccaaacagcccctaagtatcccttcagatgttttggatatactcaattgttcacaaataacatcttccaaaaacatgtcatcagccgcagataaaaggcacaatcagagtttgttcctttcggggccttttatgcagctggcacatggtaggcagcagcacacacaataatatttccaccgacaggatgtggaatcgactgtgccaaaaggcacaaattcaataaggacttcctgtggcttcgcctaacctggtaaattgttcaggaccagggaaacgaccgcaacaaacagcgacatatgttacggagatcgacaaccagagtgctcaagcaaaatttctagtcagtgtgatcattatgacgaagccttagatgctccactctttgatggatgcattatctggtccttgggttcattttgaacaccaacatccctgacccataaagaaccaattaactcaaacttttc

SEQ ID NO: 151148 - DNA, 542 bp, Zea Mays
cccaagttgcagactccggtggttcaccacgccaatggacgagcagctagcggactccgcgcgccaggcgggtctgctccacccgaacaggctccagggtgaccactccatgctggatgaccggcaaggctggtggagtcggcggaggcatgccgatgaacttcttcaggacgttgacatgaaaaacgtcgtggttgcgagcctgtggaggaagagccaggcgaaccgcgacgtcattgatcaactcctcaacgtgatacggcctgatatagcgtggttttagcttgcccgtggtagcttgcggtagggaagacatggtgcgctgacggaggtgaagcagcgcccaatcgcccacttggtaggacacttgtcgatggcaacggtcgtagtggcgcttatgcacctgctgcgcctgttccaggcggaagtggacgtcggcgaggaaggcagaacgctcctccatgtcacgagctagagcagccacccgagtctctccaggctcatatgagcacagggtgggcgggttacggtcgtagaccacg

SEQ ID NO: 151149 - DNA, 427 bp, Zea Mays
tgtgcacgatggtggagcacattaggactaagttgatggagtctattaatattaaaagagatggtgcaaagaaggacacatggttcatagctccaaattatcagaaaaagcttgagtttgagaagaaaaatgcttcatattgcagggccgtctgtgctgggcatgggatatggcaagtcacaagtggagacaatcaatatgttgttgatctcaacaatcacaaatgtggatgctacaagtgggatgttactggagtgccatgctcacatgcagtggttgctattcatgagttcaaacacaagccagaaaactatatgtcattgttcttcactagggagaaatatgtagccacatatgagggtatgattatacttgtgccagacaagagacaatggttaagcacatacttgcctgatgtggatcctcc

SEQ ID NO: 151150 - DNA, 277 bp, Zea Mays
atctcgaccaaatctattgctcaggttggcacaaaattcctcccaactcatgtgtttcagtctgtcctccaccgattgcaaccaaaatagggcagatccttcaaagtgcatcacaacaattctgatccacatttcccgagccacttgataaaaatcgaaatatgtctcacaacgatttcgccacagtttaggatttgacccatcaaatgcaggaaaaccaacattaggtactactgtgcccgaaccctaagaccaacccccagcagagtttggaacc

SEQ ID NO: 151151 - DNA, 832 bp, Zea Mays
ccacaacaacatatgcaaacggtacaaaccagggattggttatctgggttgagtacatttgcagatgcatgttctcttttagaatgtgactaaagttcatatagaaagaagcaacaatcgaaatgtatatatcaactcacctcagggaacaacgagatgccattgaggaagcaaagtgaagggatagtgacatagtaaagggtggggaagctgttagcagcccagcacccgcagatggagtaacccatttgaaggcccaggctgatcttcctgtgacctagcagaaacaggttgtacttttagagggagatctggagaaagccttctgtccatctcttgtgctgaaccagaatctgtcctagtgaggtaggggccatgcctaaaatatgaaagcaaaaattctccaaagatcatatttactatttctattgagagcaaatgtcactaaaatagactatgacagatttaacattttatcatgtgaaatgaagaccactttccctccttgcaacaaaagtgttcgaaaatagaacatggatctgacaacttggataggagctagcaagctaaaacagcagtcatgaaccaaatgctagcacttggtccgacatgcttaactttgttatggaaaaatgtggtagtgaaccaaacttatttcagtaactcagtaagaggccacaatacacaaacagaatatatcaagcaaaaatggttcagtttgtgggcttatctcagaaagtaataaatttctgctatttagcctcatggcagagtaaggttagctttcaaaagttgataacttcattgctgcaaattataatgatgcagaaat

SEQ ID NO: 151152 - DNA, 329 bp, Zea Mays
gagcctgttctagatctcgtgccctttttcgtgagatcactgaaacgcttctcgcgaacggcatgctgttcgcgtcggctatcctcgtctaaccccgtctacctctgaccgcgtgcattcgttgttgttgcaatggccatttgtttcacacatgtgtgcgacacgaacgcagtcgcaaccaactcgtttcacgttgcctcgtcgcgcaatggtccgcgcaactgtctgaccccatccatcctctctatataggcgtagatgttatttcgtctattttttcccgttgccaaaaccccttcccccagcccactccgcacgctcacctcccc

SEQ ID NO: 151153 - DNA, 338 bp, Zea Mays
tagaaaggtaatgagtttaccaaatgctaacacaaaggactcttgggctcctatatctttgttgactaaccatgacggacccatcaagcgatgggtaccaaaatatgcttgacaagctttgcaggaaaaggagatgatatgaagctttgggtgcttgagagagtcaattcgattcttgttaactcaagccatcaatcttcaatgatctatatccatgattgacccatggttgtttttcaaattactatgtcttaaactcatatcatctcggggaaagtattgatgttgtaggaaataaagaattatcttatgcgaaaactacaaggcctacaacgtgg

SEQ ID NO: 151154 - DNA, 565 bp, Zea Mays
cgaatcagatgatcctggtaggcaatacctgaaaacattgttaaaatgattagtaagtggtttgatgaaaactgacatgatttacaccccaacccccaggccagtgagagagatcactcagtgttatcatccagaaaataagtaatttgaccatccaaaactgttgcttccaggtacgccactttgttgtaaccatcatagttatataatgtgtcacataagtgtataagccatttcctcatcaactcatttgcactaacatgaaagtggataacacgacaaattatacaacttggatagcaagagagagatcgactctgcaaactactgtcgccattgacattaacatgttaatctaaaaggttaaattccttattttaattgattgatgatattaaacggttatttctgagtgctgactgacaccaaatagtgtttctagagcagacactatcctacatgaattgcactaaaagattgctgaccacgaaaaaaagtaataaaattataacaccatgcatccataaacacacgtctcttcatgcacaaataatagaagtccaaa

SEQ ID NO: 151155 - DNA, 357 bp, Zea Mays
gaaggaaattaccgctggctccagtcaggatggcttggtttatctcaagtacaccttccggtacagaagtcgatttgacgagccaaatgatgattggctagacgctatagaggcaacgagtgacgagctacttggagcctactcgaggacagaagacgaagctatgacagttgccttcggcgctcgagggaaaaggaggccgaagagggttttcgatgttattgggtttgtctaccctgattattgttttcctgtctgaaggcaagggggaaagaggaaagttgctgcttcaacctcttccagtacgccgaaggcaaagagggccaaggtcttaacatgtaggccgaagcctattgg

SEQ ID NO: 151156 - DNA, 511 bp, Zea Mays
gccaaatgccctggactggactggaggtgcagtattctgggggagccacgaaaactgcgctgccgagggaaaaaaggttcgtagtacaagaactgcacagcacactagcacagggagatcctcagatccggggatggcgcaatcaattactggcagtggcaacgccattaattgtttgtttactagtcatgggttaattggcatctgataatgatttattatatctatgaatgtgttatgtgtagggaagcattttctttattttccttgagccttcagtttcagtggcacgtacagacagtacatgtaaaatcgcttgcagtcgcagcaagaaatggtctgtcgactgtctctccaaagtttggcttctgaaactgaaagccattcaggtgcgccgttcctgcctctgtgttgtgttttagtactagcgtagaatttaagcgaccgttcctgtcactgctgggttgttgttgttgacaggcacatcctttttttctctcctctcgcagtc

SEQ ID NO: 151157 - DNA, 1347 bp, Zea Mays
accattgacggcgcccttcaacacaccatctgctcgtgctatatattaatccaaagggagaacaccggcaaggcagcaactacaacttcatcctcctcacgtttctaaaatccattttccatctcctattttcagtagagttgattttgcaaaccaagaactgttttctttcatcagataatcctccacgtggacagaataaaactgagaagagtttgccgctgatatatcaaagtatgtacatgcttgtttttaaaactgagaagagttgatttcaatacagtttgttgaaggacacaaactcagtatgccatttcaatacaattcatttttagtatgccatttcaatttatgtgcttgttgttcattgtccaaaactgctagagtagcttctccaaattgtgtcaaactgttaggcagatggagaagagcagattttgcaaaatgattttatgtataactgcaacaatgaaagtgttcagttacattatgtgacaacatcatcactatactccactgggatacgatgtgacaaccaaaaaattagtaatcatatccagtttcttgtaaattttttctcttcatacttttggtcaatggtgaacatgttagatgtgttccccgagtataaaatagatttaattccaatttctttattgggtcttttctctcagtttgattcattttcttgatttcaatacataaaacattgaaggacacaaactcagatttcatacagttgttcgttgaagcttcattttcagtatgccatgtgcttgatgttcgtgtccaatactgctagagtaggtataagagttctcttaaattggtgctatctacgaattgtctgatgaacatttatgtgccaagaagattttgattaaatgtatgtgatttctgctaaaaataccttttcaaaagcacaatgaataccttatctacctaatgtatctgtctttgtaaaaaggctcaagtacttgtttctgtttggtaaaggaggtaaccgatcaatagtatttacaatgtgacaccacatcaatcgtaaaggaggtaaccaattttcctagactggcatttatttgtttttgtaccaacctacagtactgaaaaatctttattttacttgaaagtggcatgcatgttcaagtgtcactgtattcagagatttgtttatgtatagtacaaaggtttgcttgatttcaatacataagacattgcaatacataaactcagtgtgcttgattaatatagctgttcgttgaagtttcatttccagtatgccatttcaatttatgtgcttgatgttcagtgtccaatactgctatagtagcttctccaagttgtgac

SEQ ID NO: 151158 - DNA, 753 bp, Zea Mays
tcacagcctcccatgcctccttcactgtccttttggcgccaagggttccccacatctcctttggcacagatctcatcagagcacccattgcctatcgatcttgcgagcgcttgacagtggttcccggatcaatgacatcccagatttccattgcctcatagttaatctgcattaacatggcccactctgcataattcgatcaagtcaacataggccataccagggaactctccttgatgtcggacgacgccgcacttgaactggtcctggtgtcacccatctcctgatccttcacaggcgatctccaaggaacgacgaacttcttccttggggttctcgcggtggacagacagatccaccgtagaacataaaccgcgctctgataccagatgttggatccccggccggatcaacgagcgacgagtacagccgcgacggcgaacgcagacaggtgtggtgactgcagcgagagcgaggaaggctgagcgcgcggacacacacaggttagaacagatgatttttgcctgcgcaatgtgccgcagcttttttgggttttttcactgaataaatgaacggtgcttacacaggcttgaaagccctccaccccgtcgccatcgtgccccatgatctccaccattttcggatcacgcagatcatgtgcatgcgcagcgcgagtgcgacggggtcaacaaacaccaaagcggtttgtggtgccaggcacaacactgatcacccacaaagctacgccactaa

SEQ ID NO: 151159 - DNA, 617 bp, Zea Mays
ggcgctgtacaatttcgtaccggcactcctgctccgccgcagaaccctgcgtcaccgtggccaggcaccatcttggtacaattgccggtgagtaccctcaaaccatgttcgcaatagcatgatcatcgcgtagtcctatccgatttggttttgtcgctcggggttggccgttcgccgtcgcactcacgtgctccgccgtgtgagcctggcggcggtgactctgctcggagttggtaggaagaagggcttctagccgttcattctttgatggtcggctagaattaggggtcttgggtgtattaaaccagagccgtcgaattggatgtgtgcggcccagatcagaaagcttatataccgtttagtcggaggagtgtaatccgtagatcttggatcctacgaacgagagcgagcacaggttcataagggctcggatctaatctgagcactcgaactaggatccaacggccagatttgatgcataccgcttcggtctgagagtctttctaaagagccccttcgtttttagcttatcaacccgcagtccagggtgactgtgctctgagtctagggaatctttcgctgtggcccctagcgttcggtttaatcttgtgcgcagc

SEQ ID NO: 151160 - DNA, 320 bp, Zea Mays
tgatgctgaccccaatgggtgtacccaatccgctggtgatcccaatgggggtgctgcttgtgttgccaatgtggatgacgaggaggaagaaaatgagattcctttgactcggaaaaatagtcggcaactcattgccagcggtgaaagtagtggagttccctctcctgctttgtctgccctcattggtctgcaagaactgtcactggtcaactttgatcagactcttgaggatatggtccccgaggacttgttatcggagccagtggatgatggtgcaatggaggcttgcgctgacgtgcttgatgctgggttgaggtcat

SEQ ID NO: 151161 - DNA, 687 bp, Zea Mays
ctaaaatgcagaatatctcctgccataccattctttccatgctgagttctaatttcagtgaatacattttcctcccttctgttggagtcagtgggggcattttggttgcatggagacacaatcttaaatctactaggcagagcagaattgataaccatagtgtgtcggttcagttttgtaaagagaatgggactgcatggtggctaacctgtgtgtatgggccgcaaggggatgatgagaagctgctatttatgcaagaattaagagatatcaggactgcttgtctagggccttgtatgttggctggggacttcaatctcatctacaggacctctgacaagaataccaatcatttcaacagagctatgatgaatagattcaaaagattaattgaagacctagccctgaaagaaattccctttcatgggagacaatatacttggtccgaccagcaagtgaatccagttcttgtcaagctagatagggtgttctgctcagtggactgggaaatactatttccaaatgtcctccttcaaagtactgcctcccaagattctgaccactgctatctcatcctgggacttacaaataacagaactggaagatggcgtttccattttgaggccttctggacgaaacttgatgattttcaggatattgttgtggatgtttggaactcagttcagg

SEQ ID NO: 151162 - DNA, 824 bp, Zea Mays
ctccttgatagccttttggacatcttcgttccaccaccaagtgtctttaactttccttctgtttccttgactcaacccaaactcttctgaagctatctttcggatgcatgtcaccatcttcctccacatgatgtttgtgtctccctcttctgcccaagggcgctcctcgataactctctccttgaaagtttaggccacatcccctttaagcttccaccactttgttctagtgaccttattatgcttattccgttgtaaacgaatcttaaaacgaaagtcagctacgacaagcttatgttgggttaccacacactctccaggtataaccttgcaatctaagcaggcatgcctatcctcttttctcaagaggacgaaatcaatctggctagtgtgttggacactactgaaggtcaccaggtgggatttcctcttcctaaagaaagtgtttgctataaacatgtcataggctagggcaaagttcaggatttcctctccttcttgattcctagtcccaaagccgaagcctccatgcacaccctcgaaactggtgctagatgtacccacatggccattgagatctcctcctatgaagagcttctcgccaactggcacactactaaccatgtcctccaggccttcccacaactccctctttgagttctcattaaggcctacttgaggagcatacacgctgataacattgagaaccaagtccccaacgaccagtttgactaggatgattttatctcctagcctcttaacatctactaccccatctttaaggctcttgtcgatcaagacgcctactccattcttgtttgctg

SEQ ID NO: 151163 - DNA, 287 bp, Zea Mays
tcgttgccgcacggccttgtcgtggtagcgtcttagagtctgctggtaccgtgctgattggatcactgcatttagccgttcctcctcgagtacatcaatatcctctagtctggtggcctcagcttctgctatactgtcgaagatcaaccttggcgccccaaacttgagatcagcaggtagcactgcctccgacccatagaccatgaagaaaggggtgttcccatgcagggctcggctaggttgggttcttaggctccaaacaacataaggcaattcccttatccact

SEQ ID NO: 151164 - DNA, 412 bp, Zea Mays
ggaaatcttctctaagttgcccacttgtgtttttgataatctgaccagctgaccagggcaccggctcggcttcaatgaggtagacttgatctgcacctgtacctcccgtttccctttgcctgttgctgttagggattcgactagctcaatgagaaaaagtcttgtcctcgcgtgtgttcctactgaattagctgactacgtctttggtgaaaagtcaatttttagttggtcggtaatggcccaggggaaagatcctagctttataaacttgtagatgcatgtcatgcggccattccatttgatttgctgacgaacagctctcaacgataggatacactactgttcagttagccataggttgtttcactacaggtattttgtaacaagtcattccttgatactcatcattttg

SEQ ID NO: 151165 - DNA, 380 bp, Zea Mays
gcaagattatgggagtaatggtagaaaggttgtggtagcatgcaaacccaaagatatgaagatggtcgtaggagagtggtgccaaacatagtgaagtagagtataggatcacgaaacgccttagtacaaagatgatcaaggatggaggtgatgtggaggatcttagccggtagccaacatgaacgaaggcctgaaagaccaaggaacacatgatgttgttagtaatgcaaatcatacgatcatcctcgccattctagaaagaagtgtaggggcagaacatccgaagttgaacaccataggagaagaatgactgagctgagttatcaaactcacagtcgttatcacgctgaatgaccttaatggtgcgaacaaactaagtg

SEQ ID NO: 151166 - DNA, 631 bp, Zea Mays
gcaattctaagggctccggtcatctatagtctagcccgatcgatgctacgtggcttctagatggtcgcaaatcgagtgggagtgcatgcctaggatccctgggcgaaggcgagctcggccatgtgcgaatgaagtcccgccccgatgccggcgaggaattgacccccgatgcactgaatccgcgccccacacccggtacaaaactgcacggtgcgcaacggcgagccccggcggctggtcacgaggtcacagctacggagaatttctgagcgcagcaatggcggcgccgtcactcaaatccacgaatccctctacgtaatggtaccggtgagctaaggggtaagagaagaagggataggtccgcctacttatctcgcggcgaccaaatgcgcgagaatcccgccacagtggttgcgaccgcggaagctacggaggaattggttgcagcgcgacattggcggtgtggagacgatgtcttcggactcaccagggtgtgacatgtggggcccgggtggaagagagaccaggcaaagaatggcgcggcgcgaagtctggatgacgagtggggcccttatggcagagacacgcgtcggaccaggggagcaagggagtcattgacagggaagcccca

SEQ ID NO: 151167 - DNA, 722 bp, Zea Mays
cgagtactgctctagttggcaaacagacaaaaaccctgattgattcaacaagtctgcagcgaagccaagaagcgtgttgctagaggcatgactgcgatatggaacagcagatttgaaaccagtgaacactgacgctttggagagccagccatgtcaaaatctgttgcccccccttttttgatctgtacatctcttcaaccacccaaagatgagggataacgtgcagctttcgagcactgtagctcgacagtggggcttggttctctaggcattgcatgttgatgtgaaagagatacggacagacagacaggcagacatggagcatgtaatcaaacgaaccatctggagaggcggcgttcgtactctataagaaaatcagtatttgcaagcagtgaatcagttaaaatcatattggttttttccttgattcgagagaaagggatcgccacaggaggtctgaaacagaaccggcgacccaaggatggagcaacgcattgacagtctgacagtgccgcttcggtcctttcagggcaatggtggtcacagtcacgtccgatatatggatttgtacccagagaagcttcaagcactccaagaaaaaaaaagcttggattgttgagcaaacacagccaagtttacacgcacgcaacgtaacctccgtttccaggtcgcgaagagcgacccgatgtcgggaatgcgctagctttattgctgcaaatgcc

SEQ ID NO: 151168 - DNA, 376 bp, Zea Mays
tggtgtaggatagagtggatcgaagatataaattatgtgacatgtgattagtgtttttaagatgagatgtgcgaatgatcggttagtgttgcacttgtctagtcgataaatgttgtcataaataattgtgctaaaattggtcatgagaatgcagtgggcacgtggtgtgtttgtatgtgacaagtagattggaagtgtggggtctgtcgaagcgctgtgatgtcgaacgtgtatatcgaagtgcattgtagtggtaattgcgttaagttaatcggtagtgtctcgagtgcacgccacaacatggttgtatgcgagacaaggtaatataaggtgtgctcgacacgaatgttcggtcgatataagtaggaattgtttt

SEQ ID NO: 151169 - DNA, 276 bp, Zea Mays
cttgtactaaaaaagaataaagttgattggcgcatgtgcgtcgactataccgatctcaacaaacactgcccgaaatatcctttcggactccctaggatagatcaggtagtcgattccaccgctggctgttctatgctctctttcctggattgctactccggatatcactaaatcagtctagcaaaagaagacgaagaaaagactgcattcatcacaccatttggggctttctgctatacctacatgtcgttcggcctcaaaaacgctggagcaact

SEQ ID NO: 151170 - DNA, 567 bp, Zea Mays
cacaggcgtacaaatacggccaacaggccacattaccatacaaattacagttacatacacacagcgagggcatcacatattacatcggctcaaccttcgggatgatatccatctccctgtaattgaaaagcattatcctcaattcctcaccctcaaaaagattccgaagatccccctcgcctatgctcgccccaatcggcgaggacaacaattctcgtttaccaacccggtctactcggagacggcaacgctccatccccatacgacgatgtctaccacttcgcgaaaattcacccacactatgttttcccaccacccttcgccgcctatacccagtactcgcactaggaagatccctggcaccctccacacccgacgaagtctccgccgcagccacatccaacgcaacaaaataatccaagccttcatccgaggactcctccgtccaaggaaacgaactcccagattcaccatcagactcaaaacactcagacacagaaccaaacaaactatcatcggcaggcactacggttgaggccgccacaaaatcagtattgtcagcagcgg

SEQ ID NO: 151171 - DNA, 368 bp, Zea Mays
cccgctgttctcggctcggatgtgctggaggaagtggcccgtcgttattgcatcaatattgatgatatgtctattcaccactccatgccggaagacttcgttttgtttttgccgaatgaggaagtggcgacaatagtgcttaatgaaggaaagccattcagaggccctatgttctcgctcgtgttcaagcaatggacaagatttgcacatgcctcgactacgtctttctctcacttgatggatattgagatccgtgggatctcagcgcacgcgtggggtctgaacacagccaagaagcttcttcacgactcctgtcacattttggagttgcaccccgcctctgcgtgcaagacagatctctcctcact

SEQ ID NO: 151172 - DNA, 311 bp, Zea Mays
ctggaagactgatcgtggtggctaacatctaggaacattgataagtgcaagagacctagtcaagatagtggttaaccaaataaaaagaggcgctggaggatatagtgatcaggcgcgatggactgacgggtgacacgcgtcgaggtcatagagaaaggtgtactatgtacggacacagtactcacgagaggtttggtggtttgggcctcaaaccatagtgcggacggtttgtttcttttggcctcaaaattggcgagtggtggatcaacggacaagtggcaacatcacgaagcttgtgtcgaggcaaaaat

SEQ ID NO: 151173 - DNA, 684 bp, Zea Mays
gaactaggtgtaagcctaattccctttcaagcacaatgttccatccacaaacaaatggtcaatccgaagtggtcagtaaaactattgtcatgtatctcagatgccttacatgatatcgtccctgagcatgggttgagtggctaccctgggcgaaatactgttataatacgtcatattattcagctttgcaaactactccatttagagtagtatatggcagagacctgccaacctgcttccctatcagtcaggcacaacatctagtcagatagtagatgaaatgctccaagaatgcgacttattcctttatgaggtcagggatagactgcttcaggcacaggagcatgctcaacactgttatgatggttgtcatcgggatctagaattctctgtggatgactgggtttggcttcatttgctcaatcgtcaggcccagtctctgatcaacagacccaaaggaaagttgggaccccgttatgccggtccattccgtataacagaacgaattggcaacgttttctatcgcctggaacttccacctggagcgtgcatccatgacgtcttccatgtgggtattctcaagccatatcgggggcctcccccttactgctgcctgccctaccagcaatggaaaatggccggcttctgccctcctagaaaaggtactcaaggtgtgactatggc

SEQ ID NO: 151174 - DNA, 591 bp, Zea Mays
agtgccaaaatcacatctcataaattatgttttagttatactgagtcttaaacctttggattctagagtctctcgctaactcttcttttctatttactcatatccaactttcaccaactagttagtacatcgtccacgaaaaacatataccaagggatatccccttatatgccccttgtgaccttatctatcaccaagacaaaaaaggtaaggactcaaaaaagacaaatacttgatctgctaatcttccttgaagcaaagttaccttcttcaaatatctttgatatggtacctctctgaccagatagagcctctcttaatttttctgatttggacacaaaagctgtgttgcctaatccagatcctgatctaaccatactacatgatgttttagactgtcaaagagaaaaaatacatataagaaaatataaacatcaaaatagcaaagggtacaacagaactgtacctcttcagcacaactatcagacacagactgtttgaaccttagaatttgatcttcaaggccttttctctggctcatttccagctgcaccttttcttgagtagacttcagttcatcatatattgatt

SEQ ID NO: 151175 - DNA, 297 bp, Zea Mays
cgggtatggtttgtagttgctgcgctggtagatgttgctatttcgacaagtactggcaagcttcgcacctctggactaactcggctgcatcactcttcgctgttggccagtagaaacccgacctgaagaccttcccaaccatggtcctggatgctgcatgtatcccacattgcccagcatgaacctcttctagcagttgctttccggtggctgagagaatgcatttcatgaggactcctgatgcgccccttctgtatagcgtttctccaatgagagtataatgagccgactgtcttg

SEQ ID NO: 151176 - DNA, 610 bp, Zea Mays
accgtgtgtgccttcattggcacaagggatttgattcaagagcatatagccttcagggtatggccacttgtggaaagctgggaaatgtcgaaggagaccaccactgattctagtgatagtggtctggtccgactgaaatatacctttagatttagggagaagtttgatgagccaaacgacgattggctgaagtgtattgaagctaccagcgatgagctgcttggagcttactccaaggccgaagataacgctttgtccgcagccttcggaggtcggggaagaaaagactgaacagagtttttgatgcgatcgacttcatataccccgattatcgctacccgctgcgagggcaagagaaaaagaggaagattgctgcttcggtcatcccagctgagcctgtgtcgaagagcaaaagggtgaaggttctgacccaccgaccgcattatattgaatcggccgttgtgcctaaattcggcgcaaggtcctcctcaacagccgaagcaatagaaactgctccgattgcacagagcactgaagaggcgaccgtaatgccgaaggtacccatagccgagtcagtcgaggctaaggttggtaaggctgaagagtcaaa

SEQ ID NO: 151177 - DNA, 319 bp, Zea Mays
accaccagatgaaactcagcatggagagaagatattttctgcaccccagtctgttccagattcagttatctgaaccattcacaccactacctctaaatcagtacaaccttgatatttcctgtagggagttgaggtctctaaaacttggttatgtacttcatccatgtcttcatcccaacacacaagcaaagcacagggagagaggtgatcttcttcagtgatcccattaaacactgaaaccaacttcatatgtcctgctgcttcattcctctcctccatattcattccctggcatctcacaattcccctcacaacagac

SEQ ID NO: 151178 - DNA, 588 bp, Zea Mays
gcgagggtagggaaagaagagaaaagctgctacttcggctactccagacgagcctgtgctgaagggaaaaaagttaaaggttcttacccactggtcgtgatatattgaaccggccgtggtgcctgagtttggcggggaggcttcttcagctgctgaatcaagagaacctgttcctcccacgcagaaggctgaagagcctgctataatgccgaaggcaccttcggttgagctagttgaaacaaaggttgacaaagataaggctgaaaggtcaaaaactgaagaagtaacaaagatgccagggattttaagtccttcaacagaagcaatagcgctgaaggcagaaaagagttctgccacaactcctaagagaaggaagatggtaaatgtattagatattttagaaacaaccgactccataagtccccctcccacagggaaggttgccgaagctgacaaaacgcaacccaatgctgatactaagcaaatagaagttgagactacaataaccaaaactgaaaccgaggcagggcccatagtgcctactgagacgaagcttgccaccaccgagcagaaggccgaaggaataac

SEQ ID NO: 151179 - DNA, 892 bp, Zea Mays
ctgggtgggcgctgatatgtgggggccgtgtgtcagccaaacctacgcgggggttcttcgggctgtggtgttgacgggtgggacccgctcgtctgtagcttcttcgtcaccgtagcgtacacgcggatgcgcctaacaacctccgcgagatcctcgccgcgactccgatcccgtgggtccagctggcgtcaaccaccccctccgcacgttccgccacaccgcgcataaagctgccgcagccccattaggcttcatcgagagaaaatcgccgccagggctcgacgctcagtccgccgcgcgcccaggttcgctagccgtcgacttgccctccgtgtagtgctctggatccacctccgtgacctcctgaagccagcgcaaggatcgcccgggattgtcttcgcttctggagcgttgaatcgctcgtcgacgttgaaccaggccggggaaccgcgccttcacgtcgtcgggatcaccctcgcgacaacagactggtatggacgccctggtggtttcgcctccctctcctctttccttcggtgtagtttcgcttggattaggccggtgggtcgccaaatcgccatgtccggccatggcgccgccgtagggtggcgcgcccggccgccggtgttgaccgtgggtggcttaggggagactctgtgtgtgatgtcaaacgagggccgtcggataggcgatggatggacgagattataacatcgtataccctttcgcgcgatcagatttgggccgtagatgtagaatcgggccgttctgatttggttagggcgtggcaaatcctcagccgttgatcttgtgatccgtggctcgactgtgtaggcggattttgatctaatcccagccttcaatactcaatcggacggccgaagcttatcca

SEQ ID NO: 151180 - DNA, 286 bp, Zea Mays
ggcaagcacaaagcgaactattctttcgccttttactaaagaataccgtgtgcttgccacaattacagcatacatttatttttggaggtgttgtctcttgttgagagagccccaacaatgctaaattaaattttacatggtttgctattaaattttatatgatttatcgagctctagcattggtggtttatatcctttggttttgaaggtctttctttaacaatgctaaataaattacattttatatgctttcgaaattgctgcttgtgattggagtacgcaacac

SEQ ID NO: 151181 - DNA, 703 bp, Zea Mays
aagatagttcgatcattccataccccatggtgcaggaaaatatagcaccgacctccacaaaaaccgttgaaacaatcatatcacctcttgcgaagaaactcgacgagggggacgtagacaaaattgttccccagaatgtcgacgcaaacatcaaaaaggaatcaaaggttgacaccaatgttcgagggccaactacttcaaagaaaattcatcagcgaatcgccactgacaatgtcaagaaaccgtcagaagcagtgacacgctacctgcaaaaattgaagagagttatgacagatcaatcaaaagagtaatcaacatctcgtggagtacgcacacggtcccaaatagacaatttcgaagtatgggaagaagatggaatgattcatactcgagaatcattacgtcttaaaatcaatatcccgatatacaataaggaggatgtttctcctaaatttgtgaatgggaggccgttcttgacgacggtgcaactttctaagttgtcgactccggaaattagaatgcatgagtggtacatggtggctagcaacaagtacaaactcgaggacttcacatttgttgtgccagaagatgcattttggagcaaagataatatagatcctgtgcgacatttattttttgacgatcggtgatccttgtaccaccgacaaaggatggaaaccaactacttaaccctcttttgctt

SEQ ID NO: 151182 - DNA, 647 bp, Zea Mays
tccacgagcagggcgcgtcgccgtcagtgagtcaccgccaccaacaccaacccaccaccaccgcgcgccatggaagacagggcagggcggcggccatgaaagctccaggccggcgcggcactggaggagctcaggacgcgcagacgactcggcaacgcgcggcagagagagaaatccaagcgcagcggagttgggggagcagagctctagccgagagccatgggaaggccttggctgggggcgagcagagctgggacagggaccagctcggccggcgcggggaagaagacgagggcgctggagaatcgacgtgcaggctgccgagatgagggagagagaagtggctgaagaagataaggccgagggagagttctaggcggctcggggaagaagatggccggagtggtgggatctttttttcccaaagcacacaagcggcgcgatctttttttccaaagcacacgagcgacgcgtaggataaggctgggagagatttttgttcagatttttttacattcctccccttttataaataaaattgcagatattttgaattggtatttttagcgatgattaaagggtcgaataattaggattgacaacaacaattgggcaggatttgatttggcgaattttccggaatctga

SEQ ID NO: 151183 - DNA, 558 bp, Zea Mays
tttgtcgtgatccctgttccatcgcctaatataacctgtatataaggaaaaacgctcacgtacatttcttttattagttccatgacaaatttgcaacaattttagatgtacagaccttttgctccaaccagtcaggaaagtgttgatccatcaaattctgaatggaggaaggtattagattaattgagggatgtgattttcttttctcctcatccaagaattctctacaacaatagtatcagtgtcatgtcagcaaatagcagtaaaaaataaatacaggttactggttataataaatgtgatgttgtgtgttttagaaatactgaacgcacctgcggaaatattcaagttcatcacaatgccgcaacacatatcgatgagcctgaacaagaagctgcttatcaaggttgacggcagtactctttccaataggttcaccagcagtatcaaacaaatacatgtttgctatttcatcagatggtccaggatttctagatggccttgtaaaacgtgtagttccttctataaatctggaacaaaaggtcaagcactcctcca

SEQ ID NO: 151184 - DNA, 284 bp, Zea Mays
tgcatagcttgggggctgcaaatgtcaggtacaggctctccatgtacgcagatgatgtagttctctttgtcaagcctctggatgatgatctggtttgtaccaagttgatccttgactgctttggagaggcatctgggctgattgccaacatgaataaaagttgtgcaatccctatctgttgtgctgctcctgttgtgcatgaatgctgcagcaccctgcagtgtgtgcctgctgccttcccatgcacttatttggtcttgccaatctccaacaagaaactgcga

SEQ ID NO: 151185 - DNA, 605 bp, Zea Mays
ccttaggcgacttttgtgcgaagtgtctttttagtaaaagacttcgattgacgcacttgttgtgcttatccggctgcacccttaggcgacttttgcgcggagtgtatttttaataaaagacttcgattgacgcacttgttgtgcttatccggctgcacccttaggcgacttttgcgcggagagtgtcgcacgcgagagtagtctacgctacctgtcgcggtgactttgaattggtcgaatgccgaagatcgtcgaagcggtcttttttgacatgttgcacctgagtttttgtttttgcgggggctttcgctggtatattacatggctccgccccgttaaaaacctcacccctcgggaggaaaagagtgtgggccgaaacaacattgtttgctgaattacaagggcacgtgggccctggtggttaaacaaaaaatttccggagattgtcaatgttccaggagtgctctaagtcttcgctggaaggtgttaccagcctgtatgcgccgggggatgccttgacttgacgatgaatggaccttcccatttcagctcgagcttgccccgtgattctgtccgggtggtccggacgagtacgaggtttcctt

SEQ ID NO: 151186 - DNA, 536 bp, Zea Mays
caagaataagccattaacaaagtatgtattcttattatagattgataatgacacatacaacaagtaatttataaaaacattacatgcatgtatagcattaacacgaaccaaccatttttattttacatatgttagttatcatacttgcaggatccaattgcatacccttccctatattttaactacttccacctcttgtattttcctccaaagaacccatgacggtgatgcttccaccctagaaggccatgttttcctcctaacccaatgtgtttcccaaattttccatgctttaacttgccatagtgtccattataatgatgtttaaacttgccaaaatgtcctaagtggtgattgtgagggtgatggccatgggttaagtgatgtacaccataggtagcggcggcggcggctgctgctccaccaatgagcgttgcccccatgttatatccattacctatgaacatgcaacattatggtatcaagttatatatgtatatgtcacactatacttaaacaaaagtgaatgcatgatc

SEQ ID NO: 151187 - DNA, 848 bp, Zea Mays
ttcaacaactacagcgagcaggcagccgcgccacctatgcccacccagtctgttctcgaccatccctgcgctcggtgtaatcccccacgcatatgcgcccgtggccggcgaactcgcgctcgacccgccttttgtcgcatgcgccactcagtcgcgcggcgacctcccgctcgtcggcacttgcccaggccctggccgcgccgcctgttggacccaagctcgtgagcttttgcccttcatggcctccgaaccagtttttattcccaccggcggttgccactaccgacacgcgcagtggcaggtcgaggcccccgcttcccactggtgctctacagaatgtatcactactcgccgacccaaatgtcgaaggcctgctatcctaaccacctccatcaccactccccacaaacttgcgccctgatccagtcacaaccttttcctcgagtacctcctctgatcacaacaagtaccagtgcctcgatcttctcacccaccgcatcattatctctcatcatgttgttttcaatgaggatgttttcccccttgctgaccctctccaccgcccgacctcaattccctccttgatgtcaatcccgtcgacattcctcctctttccctacccccgatcccggcgcccgtgccacacgcggccgcgtcgcctccgaccatgccacacgcagccgcgtcgcctccgaccgtgccacgcgcggccccgtcgccgccgattgcgccacatactctaacattgcaaatcgtacaaaccattcaagccaacaaattaacctccagccaataaagcacatcctgcctagcaaacaaatcaatatcgactttgatgatgaaggaaa

SEQ ID NO: 151188 - DNA, 528 bp, Zea Mays
agaatgggcagcacgaaattcatgcgataggaaggagggggtcgcggcctagctttgtagtcacaggagaaagtccgagggagagaaacgatcggcgtgggatgcggaggtgggcgacggaagacccggaggagcccaacgcactcgtctagaagaagcagctgacccctaggccctacctggcggtgagcagcgcgcggcgcggtagccatgtagttgggcgggccccgcaagtcggcgtgagcgagaatagcgggcagtggctgtcagctgggccccgcgcgcaagtgacgggcgcgacagtattgggctggcgggagagagagtgtggagtgggccgagtgcaggggggaaaactaggccgcgcaggtgaatccagcccaggtgggtcttgcaacctgacttttcctttttattttctattccttttcctttttctctattttcaaatccaaatttgaattcaaatttaagttcatcactacaacttatgtttgtggatttaggggtattaattctggatatatt

SEQ ID NO: 151189 - DNA, 660 bp, Zea Mays
cacaaacgccgccgtaggccgctcgttgcttgcccacacctgcgactgctcgtgctctcggatataatagcgtcgcaccacccagctgaaacgcgccaccgtttccccttcctccactcgtggcgactgtttcttcttcccactcgcggcaaccattaatggccatgaccggcagtttctcgtctcccagacctcttccctgctcgcccgctcatgcccttcccctattgacagtaccgccatcgcactgactatttcccttcctcccattaactctagcagtttcaatcttacaccatgcagccatcaatggcgtgtaacgtagagattatagagcattcaagcgtgcactaactcgtcctcttctcactggcgtccattacaatctccctcgccctataaaaactgcatcaccagatcgtgctcgtgcccatccgcccgcctggcagctcttcctctacgcctctctggctctagccgcgcagtcgctgtactcgtgtgggaagccccctgctctccccgtcactagagttagcatcccacggccttgccgatctcccgtcccctactgtatcgtccccccagccggagcttcgtccgaacgctcaccgacgatcgcgccgttccctgcccgtcgaaccccctgtcctggcccgctcc

SEQ ID NO: 151190 - DNA, 524 bp, Zea Mays
ccagaagaggttgcagctttcttttttgttgccaactagagattgtcctattcggctctgtcctgtccttcgtctccctcgtggcctcgtcttctctgctcgtcatggaccgtgaaattccaagacaaacgagcatgctggaatccatggatttctcgcacgaattcatggcaggttggtgagcacgagggcggtgaacaggggggaaaaggcgcttgtttgttgcaactgtatttggtgctgagacggccgtatgcgagctcagaagctcgaaaagacgatcgctttctagtgcccatctttcttttgttcatctctccgcaacaactcttatcaccaacagctacttcataaccactcaaatcaatttgttaaaaagagttaatttccctcaaaaaacggcacgtcaagaagatgacattcaggcattgttgccaaacaagaatacaagatgagcggagaattgaatctaaaatggcaagacaaggggaatttactttgcgagtgctagtagggtaataaag

SEQ ID NO: 151191 - DNA, 416 bp, Zea Mays
acctgctcctacgcagaggattgaagagccggctgcaatgccgaagactgacaaaattgaggaaccaagaatcgaagggatgaaaacattagtagttctaagcccttcaacaagagtggcggtgccgaaggcacaaaaaggtctagcagcgacccctaagagaaaaaggatggccagtgtactagatgtgctggagacgataaaagcttcaagctctactccagggaaaattgccaaggcttcgaaagtgcaaatgaaaccgaaacaaaactaaccgaagccgaagctacaatgagccaggctagcgccgaagctgggccttcagagcctaccaaggagaaacccttagaaattggagaaaaggtagcagaggaagaagttatagaacagattttgcctgaaaaagctgccgctcc

SEQ ID NO: 151192 - DNA, 944 bp, Zea Mays
cccctccgttccgcattctcctccgcacaatttcgtccagtggtgtctgcgatggtcaggaacggtggcaactcatcatgcgactccaaaacaaatgccatttgctcttgattagcctctctaccactgtttagttggttactcaccactttgttctaccgcacacaaattctgagagagcaagcgactccaacacaaatgtcatccaagccctaagcacagattgctcctcttcctgcatcgacccaacatctaccgctcaacttcttccttcttttcctgcatcgatcgaaaggtctgtattgatcggcacaatgtttgtcgctagatacgcctcttcttttctttattttcaaatcatattcttctggattattatgttattcgtggccgtgtgctagactcacatgtgcaacctttctgttatcaccaattgtctagtttcaattttctagaataaaatacaactgaaaatacaattcggatcagtcgagaaatattaaatcatctcctattcaaatttcactaacaagggatttaatctccctcaaaccacctcaagccgaacaggtcctagagtatggaaagggatgggaaactaataaattaatcatgttgttctgatgttgttatttcacaattgtgataggcccccaacaagctcaattctggtgtgggtgcacatgtcagcacaagtagttgtgagatcaaaccctagttaatagcgactaggctaggaattccaatgtgggagtgagcaattctcggttgagcttttcaagcaacagaaataattcaagagaacgaattttctggtggaaggggcaggtgtttctggttaaatggaataggatgggctaaggcaggagaagtattgagttgcttttgagtggtgtaaatgatttataggattgatccgtttagcaaatatggcacctgcaaat

SEQ ID NO: 151193 - DNA, 329 bp, Zea Mays
taataaatatcgaagtctgccagttttattgaaagagatccaagcaatcccgacacacgtttgtatataaatatttacgaattcacatgtaccatgaagttggacagtcaaaggttacatatgcagacgacgcacaccgtgttgcttgccgtttatagcgatgacgcaaaatcccaactctcatccaggtgttcaccagcatcatcatgctctattcatgtcagcgtgcgtgttgtagccctgcacgagcatgacgaaggacaccatattccgctctggcattccgacgaacaacctacacgtggtggcttgaggatcgagcttcacat

SEQ ID NO: 151194 - DNA, 307 bp, Zea Mays
cctggcttcccatggagctcgcccctattcttcgttccagcacgcatcccatgaccgctgaactccctgccgaggtccctgttctccatggcgccggatccactgcaagctcgccaactcgcccttcttctctaccggcgctccagctcgcgtcctgcgcgcgccctccttgctcgaccggccatcctccggctagtcatcctgctcggagttccctctggcgcacgctctgctcgccgtcgcaagccgcggctctctccagctcgctcggatctcccagcgccgtccctctgttttgttctgccgc

SEQ ID NO: 151195 - DNA, 321 bp, Zea Mays
gccgaatctccatttcccaacccagctaatgcaaccgcacagactcgaatttctccccagccggcccaacactccgcgcttgcggaaacacccacttacctgtggggacagcaccactacccctcaaccgtagtcgctattatgtggggttgttgatgtcagcttcttcctctcaatcctggtaatacgaaaacaactcgatctgtgcgcggctggtttgttgatggtacctaatcactgatccgggcgggatatggtcccctgtgctaagtatatatatgcttgggtggctcgtggctttcatacaccatcaccattaag

SEQ ID NO: 151196 - DNA, 330 bp, Zea Mays
tttgaagattaacgtgaaactaaccacttgttcaagattacactggatgcgaaatttgtattcaaatgtataaagagcgtgtgatgatcgaagtttatggatggagctgatgtactagtttaccctttttgcttatgaactacaaagctgaattccactttgcttatgaattcaacagatgatgatgctcaagtgattactttttattggtcgtttatcctagttctggaactagatagatctttctctcttaagcttgccttacatatcttttcagaatttcacgtatatgtttggattcatatcctaatacccagtgatcatctggtg

SEQ ID NO: 151197 - DNA, 427 bp, Zea Mays
ggattattttgcggccttggatgtggctgcggcgaaggcttctccgcgtgtgatggatgctgaagttcttcctggcccgagtgctgggcgtaggcggcgaagggcggtggcgaagcggagagttagtgaggtgtcgcggagtgatgggcgtcattgtggtgaggtggagggtggtcgtcttcgtgtggacggggctggcaaacgggaattgttgtcctcgccggctggggcgagtgtaggagagggggagctgtggaatctttttgtgggtgaggagctgaggataatgctgtttaactacagggagatgggtatcatcccgaaggttgaaccaatgtaaggtgtgatgccctcgctgcatgtatgtaactataatttgtatgatgaggttgtgtgccttcgctgatccggctgtgcccgtagggga

SEQ ID NO: 151198 - DNA, 597 bp, Zea Mays
tacgacatcgagggttgcgtcgatgattacatgccctagctgcagaatgagatgcagaggcacgatggaatcttatgattcttccttgggtatgtccagaaggtgaaggatctcgttacctgtcacgaggacgccgagcagatttaggagctcaaggcttgaatcattgaggctggccacagaaggaagagatacaagaatgatgacgcggttaattctggtgtcgccaatgtgatccctatggaccgtcggttgccagcgctctatgtagaattgggtagccttgttggtagcgatgctcctagagatgaggttatcaagctactagatgatggggtgcgagggctaaaggtggtgtctactaggtgaaggttatcaagctactagatgaggttatcaagctactgggaaaggctactgttgccaatcaagtcaacataaatatcactgagaaattcgatggccaacaagccttgtatccttgtttcaaaatcataatatggtgaacatatttcggtcgatactatctctagtcaagaaggatgagtgcgaagcactagctcatgtgacaagaaactcctcatgagtgaattgagg

SEQ ID NO: 151199 - DNA, 300 bp, Zea Mays
acgcccttttctgactctagaggcaaagctgaaagaggcaacaagaaaattgcagagttggagtgacaggcaggtgggacatgcttcgcaattagctttggcaagggacttactgcataagctagaaattgctcaagatgacagggctcttactccggctgaaacctggcttaaaaacaggctcaagaaacattccttgatgacggcgtcctttaaaagaacaatggcaaggttgagatctaggatttcacagctgaaggagggatatgccaataccaaatactttcaaatgcatgccag

SEQ ID NO: 151200 - DNA, 646 bp, Zea Mays
gacgaattaatgtcactaacatgaatattcataagtggcaaactatttattatcacacgcagacgtcgtgcgacacacgtaaaacaacacgcacgagccaacgcgactacgcgcgtgaatggcttgctgacgcgcaaacgatgccgcgcgcgaacaacaacaacaaataattaaataaaattatttaggttggtattaatcaagttaattaacaattgtattgataaaggaacgaattaaagctaaagtctcattctaattaaatcgttattttagataaccgacaactaaaccagaattgactaaatagcgcgagcaaccataatggaaacaattaaagaatgcgcggatagcgcgcgagacacacatgagcagcaagagacgacacacgcggcagaggaaccgaggcgatcgacacaatggtcgagagatatcgcatgcatgctaggcggatatgaattacaatattttaactcgacctagtcatactaacaggcaactatcacatgcaaagataaaatcgacgcttagcttcgatgggtttgctactcggttactcgctgtttaattacgtaaattaattaacttgagtgattctaggtgaaacagttaattgtcgtacgacacggcgcatggcccagtaaac

SEQ ID NO: 151201 - DNA, 656 bp, Zea Mays
acctagggtaaaacgctgcttttacccttgtcttatagctccttcccagagaagccacaactggtcgacccctctcccagcctataaaagggagtggctgaccttagggcaagtggatcaaaaggagagagctcttgggcaaccggacaccttcagacggacacgaacccataagaacgaacacgaggaggagcaccgacgaggaataggagatcggacccccgtcgagtcaagacttagctaagactccacatagcagcttctaagctccacttccatctcgataaagagacttgggagcctcttccccctctctcaaccgcttgtaacccctactacaagtttgatcaataatggtgccggatgattggaagtatgaacgttctgtccgaaccagtataaacattgcatcctccgtgcacaccatccggagtctggaacacgtacaataaatttatttttcgcagcgaggtacgaaacatcaaacatcgattgacgtataagagaaaactttttgtttgctatttttcggtgacaaatttaaaaatctaaaagtaaattttttgaggtcaaaatggtatttcggaacagtaaaaacgagattgtgaacctgattccaacccaccgctaacaaattaattactcactgcttgctt

SEQ ID NO: 151202 - DNA, 520 bp, Zea Mays
ttccaagtgatgaagggatctccccgtcaaatttattactgaatagcacaaggctgtctaggctggagagtttacctatactcgaaggtacggcgcctgtaaacaggttatctgacagatctagtatttggagcttttgaagcctacctatccccgaaggtacggtcccggttatttggtttccacccatcagtaacgcttccagctcataggagagattagaaacagcatttggcaaaatgccagaaatgttatttagctcaagattaagatatttcagatgactgcaattgaccaaaggggttagaaaatcccaatctttagtatccacgacttgaagctgattgttgcctaattcaagattagttaagctgccgtggacaccaatattaggtggaattcggccatgaaatctgttcccgtggaggatgagctgttggagcacagaaatattggacagggaggatggaactggaccctcaaatttgttatagcatacactaaatgctacaatatttgg

SEQ ID NO: 151203 - DNA, 475 bp, Zea Mays
cccccatgattcgttcctatgtgcacacgcctcttggcctagaagcgctcgtcgatttctagctagttgtttccataactcatttgccacattgtcccgcgtgtctgtctgcttagcttcggtctcggttttagtaggcgaatcgttcgatctcaagctattgtgaaggtgttggatctgaattctcaagtataagagcgtcaaacaattaactgccaccaaatcttgtgccagctagcaggacagcggtggattatttccatggcatcttctctatgctagacgcaagtcctggtgcttctagttgtttttgtcttaaataaagatgctaatatgcatgtggctatgtgaggtctattgcatccgatttagtgctgcacatttaagtaatgttgatgattgattcaagcaattttttacttggcctttatattctagattatgtaaccggttgaaactaagagatacatgatga

SEQ ID NO: 151204 - DNA, 908 bp, Zea Mays
cgaacatcggtgctcctgttgcatactcagcctggaatctgcctccttccaaggcttttaccagttttgtgtcgaatcctcctgctggtgatagcggtttgggccttagagtgcgaccctctcccaaagaggttagtgctttggttgcctcacttggtgaagtccctgatgacgaaagacaggttcatttcgaggtgcctttgaatccaagtgatgcagagataagtgccatgctggatatgttggctgaagattcctctgatgcagcccctgctgaaacactggctgtagcacccatcccagaggctgacaaagctttggatactcagaggtctgatagtgtttgcccgaagcgtcctcgccgagccactcaaccaacttctcctactgagaggaagaaaaagaaaaagagatgtctttgccgagtgtcatgcttggatcaggatgctggtccttctgctcctgctgctgaggaagtgccagtaccagtttttgctgaagctgaccccaatgggtgtgacttagatgatgctgaccccaatgggtgtaacttagatgatgctgaccccaatgggtgtgatccgaccaaagctgaccccaatgggtgtaccgtccgcattgttgatgaagatgaggaagaggaggatgaaatccctctagtccggaagaacagccgacgctacatagccagcggggaaagcagtggtgttccttctccagctttgtctgccctcattggtctgcaagaattgtctcttgcaaactttgatcagactcttgaagatatggtcccagaagatctgttgtcagagccggcagatgatggaatgatggatatttgtgctgatgtgcctgatgccgggctggagttatctcgagcagcgtcccgtgcctcgtcgaccttagag

SEQ ID NO: 151205 - DNA, 311 bp, Zea Mays
ccctggagaaggaacaagcagtcgtcgttgccctagagtgtgcggccaccactgctctcaagctagcttagcccccccatcgccttctttttagaggcagttgtgatccatgaggcccccatcgtcgccaacctccatgcacccattgtcggcgtccagaacatccaatcgcttgcctcagtcgttttggaccccctctccaactatacccgacggtggcgattagagaggtgcaccccggctattaatctacaaacctggacgactagatcactatgcggcctaggctgactttgggtgcctgacagcag

SEQ ID NO: 151206 - DNA, 688 bp, Zea Mays
tctgctttaacaaacactccagcatcgtcagcataaagagaacagcgaagctttgccgctcttggcagaacccgccccagaaacccaacatctgccgccatctcaatcatcctctgtagcgggtccatagctaaaataaacaggaacggcgatagcggatccccttgatgaacgccacgcatgtgcctgattgcatttgtttgttggctattgattaagattctggaggaggaagagcccaaaattgtggcgatccaattcctccacttctgagaaaatcctaaagctcttaaaacctctaacaaatatgcccagttgacggagtcaaacgcttttgatatgtcgagcttgacaaaaagtgctggttgtttgctcttatgaagtttctgaataactttttgaacgtagaggaaattatcatgaattgaacgtttctgaatgaacgcgttttgggctgtggagacaatctcattcattcttggcgcgagtctatttgctaaaattttggttaaaattttcataaaactgttgatgagactgatcggtctaaacatgccaatcctgtcagccccctccctttttttgcaaaagtgtgatatttgcctcattaaccagatgcaggcttttgcatctatgattatagaaatcatgaatagcattggagagatcatccttaatcagctcaaag

SEQ ID NO: 151207 - DNA, 527 bp, Zea Mays
caagaaaagacagttttcacaagacaaagggtggaaaagcctacattgttggtgattgacttaccaacatcgactctatgagtggcttataatcatttgatagtgatgatgaagatgagaaggtggtcacgctttctatgatattctcttctccacaattatcacctccatcatcctctacacacttaagtcaagtagtttaagctcgtttcatgcactttcgttgcccacatgtctatgtcctcaccacttcttgagcctttggttttgaccgttaggttttggtccttcattacaaatggggagtggtagtgtgagtatgtgagttgggggagcatgggattagggagggatagggtgagtatgatgagtttgagatatatttggttttatatgttttgttattttctatgtataatatgcactttgatttacatatttttgcattgtatgatataatttgtgtttgttgcatactcttatgtatgatattgtgacatgtacactttttacttcatattctaaag

SEQ ID NO: 151208 - DNA, 1356 bp, Zea Mays
tgagtttgtgggcgtgaagcagctccaacagacattgaacctccacaatcttggcgaatcacatctatagtgacgtttcatgaagtcttacacctctttacctgtgcctacatcgatccatccccaggaatgccgctggaacatatggcgcgcgggtcaggatgcggagcgcgacaagccatcgattagggagtgcgaaaagccgtcgggtcaagacgtcggtgggtcggggagagggaggtggtcgggctagtgctgggtgggtgcagagggaggtgtttcggcgagaagctattttttacagtcaatcctatacctagaaaaaaactgcgagaggcttcgtccaaaaaaaaacctatgaggaggcagatgcaatgtttcagcggcgccggcgcatggggcggagggtctgtctgaacggcgaccggtgtcctccttcctgtccagacgcgaatcggatcatggcgcccccctgccagtctgccacctcaggcacactcagctgtcggtgtggtggcatgcctcggtatgctgacttcggctcttctcaacccttctgcctcgaggcctgcatctcctcgactcgtcgccgatctcctgtgatcctgtctcgacctcggccctccactgaatattcaagacatggaggattacccagccataggtgaacaaagttgcaaactctagcttgctgtgctctacaaataataaagaatgtgctaggagattttgtgatgaataaacagtgtcgtgcacttatgtacaagtttttctaggaaatttacaataacttgtatagatctatatatctgcttttcatgttctccaaagggaacctttccttatctgcataaatgtagacacgtcatttattgagttttgccatactgttgatttagttggtaagctgataatgatctatttcaaattcaagcgcagtatagcatattttggaagaagcaggactcgtgaagattaatttcaaaacatctcttcaaaaggaaaagcactgcaaagtagcatagggtcatgtgatgcaacgattctgctacactgaactgcagagcaattttgtttggagaactgtatgttgccacttgtgtagtatagtggcactatattgtggtccaagctcaacaggtcttacaatatttgttaaacatttgtataactcagattcagttgtctgatcaagagtttttgtctgtttaggtttcacttatctgggggagtttgatgatggcaagataagctgcagaaagcttctagatgggcataatcgatatcgctagtgcaggaagccacaaccagataccatggcttttgcaagatttatcatctgccgacatggtcttc

SEQ ID NO: 151209 - DNA, 393 bp, Zea Mays
aaactgttgggtgccttcaccattcatgattattgtgtgtcttgatgaaaggaacatagtaatatcatcatgactattgacattagttatttgttctaagcactatgtatttcaatttccttgtagatatggattggaggaccttacaaaacccaacaagctcaattcaaaattcaagaggaagtactaaagttatgatagttttgtattttatatgtactttatttaaatatatttctgctagaaccatgttgtgttgctgtttgacgacaggccgaatcgagatctaatgtgtgggcggaggaggcaaataaatagtgggaggtcggggacgctgcgctctggcctatggacatgagactgaaatgtgatcggtatgctatcaggaaagac

SEQ ID NO: 151210 - DNA, 835 bp, Zea Mays
aacaagactgaaattttacttttttaatatctgctgcacgccagaaatctccatatctgttgcacgccagaactacccagagattctgctggttgtgtaaaaaaaccctttgcaaagtaaacttatcacaaaatgagcatccgtgtaaaagatttcctagcctagctatagggtagctagctaggttaaaattgcacatatacatgtgcagcaggtgcccattgcgacaagaagatctggccatgtaaaagttccaatttttcatgctaagatgaatgcaccctagaactttgaattgcagagtgcagagtttgatcatcagggaaaactggcggctacactacacaagctagctagagatgagagagagagaaccaatgcaaatggcctagctaattgactaaatgtacagcagcatagagcatccctattccaatgttacaaacctggtgcttcatataattctatacacaagaattgtgattttcatgaattgtgaacaaagtaactaaatgtgtacattgtaccacaaccatcagaaatctggaacgattgggccatggatcgtgggtgtctaaaaagtccaatgaagtgatatctcttaagcagagaaaacatttatactgacaaacgtagcagttcacatgaatcaaataatttcatggataggaccaaatatggataataaacaacatataaatcaaagttcacattatgtcaatagtaccataaaatttctctagagctcacaaataacttaaaatcctaaacatatatgtgatcagcaaataaatataatataaattaaactgatttgtcaaataaaataaaattg

SEQ ID NO: 151211 - DNA, 302 bp, Zea Mays
tgttatgctcatctagcatgttaagtaataaacgggccacctctggatccggacgatcatggacatcagcctcattctcaaacatgcccaacctattttgtacctcatgttcagtgtcatatatgtaaagttgtgcaaactgtgggcgcaatccattattgggtagtagcgagccaatgccattgattttgaaaacataaggtgcagtaccgttatttatcgatcgatcaacgacagcacctagtgaggtaaacgcgaaaagggaattgtacgagcggatttgcctaaggaaccgtcgtgca

SEQ ID NO: 151212 - DNA, 661 bp, Zea Mays
tacagtgctgccaccttagtggagcccggctgataggacagcagggttggcggctcccggccatagacgacacggaatggcgagcacttgatggctgtctggtatgaagtattgtagcaatactctgcccatggcaaccactgcagctaggacttcggtcgatctcctgcaagacacttcaaatacatggttatgacccgatttaccacttcggattgaccgtcgggctgtgggtggaatgttgagctcatgtttagtttgacaccagccaacttgaacaactcggtccagaaaaggctggtaaagattgtgtcgcggtcgctgacgattgagtagtggagcctatgtaagcagatgatgtcatcaaagaaggccttggccacggacgctgccgtgtaggggtgccgaatagcgatgaagtgtgcatacctcgagaatttgtccaccacagtaaggaccactgtcttgccaccagcacgtggaaatccttccacaaaatccatggaaatgtcgctccaaacctccaaaaggatggttaggggctgcgggagaccgctaggatgtagatgatccatcttgttcttttggcaagtggtacacccgcgcacataatcggcggacctactgcaatgcgcctgggttgtggaaggaggcgcgccag

SEQ ID NO: 151213 - DNA, 774 bp, Zea Mays
tctgagacaaggatctgggcactgttgaatcagatgagctcggatgaatcggtgggggatttgattgcggagaggtaactttggacgtggtaccatcccgcgaactcagtcgtgcgtggccggagatatcccaccggcggtcgccgtgactcggtcacttccgccgcggtgtcacccatgcctcgatttccccttactgtgcctcttctatatgtggttgccatgcgtgaacaaagccttccacggtcgtcgatcgttagccggaccgccgtggctataaatagcaccatgggtcacggcgaggtattcacatctccaccagtgagttcagttgaagcccaaattcgcagaatcctctccacctctcccaaaattggtagtgcatggtgaaaccgtagtcctttacggccgtgtagccttaatctcacctcccaattccacccagaaccgtcgcgacgccatttttcccctttttctgtcaccggcgagcacaaattcaccgtgctccatggccagaccactctagtatggctctgcacgtctcgtatgttgttttagcagctctgtgtacccatgaagctcattgtggcagccatttgaccaattcgggcgtgattgagtgggaacgcgggctcggcgtcacgggttccgccgcgcgcgtgggtagagcactctctatgtatgcaagccaaaattgaagtttgttcttgagtcgctttgggtcggtaatgctcaccccgtagctaatttggacagccgctgccggtcatgacc

SEQ ID NO: 151214 - DNA, 489 bp, Zea Mays
ctcccccatgtctctctttgttggggcatgttttggggaggggttcctcttcggtcggcgaaggtactcaaaacattgatttgtcaattattgctaagtctgtttggattgacgaagtctaccctcgttcgcatttaaacggcacacacgaacacgaagctaaagatgcttcggctctgcggtctgaatacatgatgaagaaccaggagggataaacagtgaaatctttaagtcttggacaacacgtttgatgaaggaaaggacaatagtacccttaaaagatcttgtagcttaaatgcaaaagaactaagggcacaattgtaattttatacgaaatttaccctagtccgctactataaatagaggtatagtgccatgcatacgagcaccctttggggggagaattgcattgctctgccttcgaagctgtgatttcctatatcttcgtattagtgtctcaagtcacgaaggtatgcatgtatttgtttg

SEQ ID NO: 151215 - DNA, 501 bp, Zea Mays
accgccgccattgttgagtccgcggaagtgagaagcccgccgcattcgattggtgaccacaccatttccggggttggacgagtgtgcagaggggttcgccagctgccactgaatccgccattgactcaccggaggaaatacaagccacgggtgtgcgccaatttctcaccggcgctacatccaatccgcctgcccgtgcgtcaccgtggtcggccccctatactgcgcatccttggtaagaaacccatccaatcgactcgcctcatcctcctcgtcgtgtagtatcaatcgatttcagtgttggggacgcttgggcggagaatcgtgagcacgtcggtgaacttccgccgtagctctggggcgtgccgccgtgactcggtgcagtgataggagaaggcctcctggccgttggatcggaatggaacacctaggattagatctggagagtaatcatcgtgcaccgttgattggcatatccacggttgtgagcgaatatgtcgc

SEQ ID NO: 151216 - DNA, 1115 bp, Zea Mays
ccggttattaggcccgtctgcatctacacacaacagacgcaggcaggatcagccacagccacagccacttgcttcgtcgtccggttcgcatgaccgcgacggataacaaggccacgagggcttgggtttcgtgcacttgggcgcttgcccgttcggggtcctatcgtgtggaagaggctttcaggaaatcggcgtatgatcgccttttgaagattgaagggaagcaagcaccggccatctcgaaaaccaaaccaaactaaccaaatgcctaggacagagacaggcagggtagcgtcgctcggtcgggggccggctgccggggcgggaggcagcggcaccggcacggcactctcattgttgttcaggagtgcgggttgggacttctgacttcagttaccgagagagcggagcaagaggacatggcgacatgctcgatcgcctgacgcagcatgactgagtggcgtggatgagttgttttttggtttttcttcatttattcgaatatatgtgtaccactaacacaacaacactgctccactgatcctagttctcaagtttatcgagtcttttctcagatacaccaaatctaagtctacagcgtatttaaagcaagaagactaatgatataatccgctgactgcactgtacgtagtacgtacactacgtctttctcgatctagccatagactcatcaagtatgtggtgctgctaatttgattcttctatttgtctttgatctattgcttatagcatcaacatgtttgaatccatgtatgcaattatagccatcatgctccgctgtaaaaaaaaaatcaccagtttcaacgtttctactcactatgcttaaagcaccaatttcaacgttcctacttagcacaaaatgttaaaaagcagttcctacttagcacaaaatattaaaaagcagtggaggtagggtttaaacccacaccctaataatggaagagggtgaaagacactggacaaagctatctatctagtagaacatcatgcacatatatttataatattaaatataaattagacatatataccatatgtatatatgattttttttgtaaaattacaaataatcatgtcgggtcgggctagcacta

SEQ ID NO: 151217 - DNA, 491 bp, Zea Mays
caaaaaagaaaaagagttgtcagtgttgtgggtagacaagccgctagaatggtaaaagaagatgaagaaaacctgaagaagagaaagttgagccctgagccgaaggcagttgctccgaagaaaagaaaagctacggctccgaagcagactacgactgatatagaacaagaaactccttcaacaccttctattgccaacgtggaagaaattctaaaggtaatgactgaatccttgcatatcaagctaagtccactggggccacatctgacgaagcttttatagaagaagaaggagccctcggcaacaaagaagtctactgagccgaaaaaacgaagaattattactgtgactgaagccattgaagaaacaccaccgccaggttcggcgtcaaagacaccagctgtcgagagcgctacagctgccgaagctgcacctactgaagctgcaactgccgaagctgcaacggccgaagatgcaaatttagaaagcac

SEQ ID NO: 151218 - DNA, 408 bp, Zea Mays
ttggtattcttactgtcttataagcatggtctttgaggtgtcgcctaggtgtctaggtgtgcccccaacgccacagggcaccatggtaacactttgttgcctatatgtacaggcgtgcccccaatgcctcaaaggctaagcttataaaatacatagattatgctaatgttttggtggctaccccagtgtatgtcctgtgtgttatatgatgctatgtttcaggtttttgtatgtgtatatttttgtaattctgtgatttgggttttacatgtgtatgttgtttggaaaaattctatatgagcacttgttactctttttgataccctgttgagcacatactgattcagaatgttattctttcaatgtatatgctattcagcaatatgtgtatctgctttaggaagacct

SEQ ID NO: 151219 - DNA, 455 bp, Zea Mays
cacgacgatagccgaggaattcgaaggaccgaacgagaagctcctgcgtggtgtcaacgtctaccctaccgtaccagctagccaccacacgcgtagcgcgggaaatgccggcggcggcggccatgacgacgaggcgggtggtgctggaggtgctacggtcggcctcccgcgacgccttccaggtggccttctccttcgcggcgaggccgcccgtgtccaccatgctcaagccggccatcaccaagcccctctaccaccaccaccacgacaacgactaatctggcgcagatctacagcacggccgtcggcatgccttcacagcccggtgggtgtgacgactattgatgacgtactaccacatttcgtcgctcctattctagtaagcaacgcaaaagaaaatgttgtaagattgagcctgagagcttgagtcaccaatgtaaattgtatacgactga

SEQ ID NO: 151220 - DNA, 690 bp, Zea Mays
gccaaagtagcgaaaacccaatttctgattagcacgggaggtaatggaggactgaacatagggttggagcttcacgaataccaaatcccccacttggaacgtacgcttggatcgatgcttatcaaattgatgtttcatatactgtttagcgcggagaaggtgttggtgcagcagttgatgaatgcgttctttatcctggagaaatgtaaggaggtctggggaaggagtccaatgcttgtaccccgaagtgtttgggctggtatccatagagggcttcaaacggtgatcgaccaatagaagaatggtgactggtattataccagaattccgctgaagcaatccaactggcccacttagacggacatgcatggacgaagcatcacagataagtctccaggcactggtttaccctcttcgtttgtccgtctgtttgagggtggtatgagctgctcatgagaagactgacccctgctagtttgaaaagctccttccaagaagtgcttgtgaaaattttatcacgatccaacacaattgcagatggcaaaccatgtaatttgtatatgtgctggaagaatgactgagcaactgtaatggctgagaaggggtgggacaagggaagaacgtgttcgtacttagtaaacaagtccactaccaccaatatgcaatcgtagcgctgagaacgcggtaatc

SEQ ID NO: 151221 - DNA, 350 bp, Zea Mays
ctcagctcctcaccctcaaaaagccttcgcaactcaccctcacccatactcgccccaaccggcgaggacaacaattcctgcctaccagccctgcccacacgaagacgaccaccatcaaacccgcccactctacgcttcgccaccgcccttcgccgcctacgcccaacactcggaccaggcaaaatttcagcatccgtaacacgcggagaagcctctacctcagccacatccaaggccgcaaaataatctaagccttcatccgaagactcttccatccacaaaaccgaactcccagagtcatcaaactcagaaaacttagacgtagattcatccgattcattaccagcaac

SEQ ID NO: 151222 - DNA, 616 bp, Zea Mays
ctataccttaatacgtagtagtaatagtaaatcctaagtacttctatgctgcaacatgtttccttgctagcttggaggttacatgagtactttgcctagtttgagtctttgagaacaaactaccgagtacgtgaatgcgcgttgtcttagttttttttttttttgtggaattcttgttatacaattctaccaacagttcaacgagcttcaattattttctagtactactttgctgacatctgtattgtcgaaattgatcgtatgcagttagcttttgagctcaccatccatgtatagtattgcgtttccttcaataatttcgtgattttggtgcatcatgggagtgggactactttagcatactgcatacctattaaatttgactcattttgattgtttaagaagactgtgcgcgtgcgtgtaagcaatcctactttcggtttttccctcccagaaaccagactccaatactccactttgattaatttaggttcccgaaattgtaaagttaagtggtcgttggatttgaaccagatacctaactgataagatgctacccacctttagctgctctaagtattctacattctagaatcataggtgctgtttttttttc

SEQ ID NO: 151223 - DNA, 387 bp, Zea Mays
aaatcttttaattacaagatataacaaaaaaaccaacaaaaccaacatctcgctgttggaagtggtcggccgctggtgcccattggcgttgagctacgtggaattcctgcgcatctctgggggattgagtctgcggaggctgtgcttggtgcttactgtttgattcatggactgttacccgactcagtcgcggaggaagacatgtctgttctcagagggcctgtttggttgcctgcatggctgagcctggcttgtatctagtgagcttggctctgactggtctgactggacacatgcaacttcttgtgtttggttgtctgcatgcgatcagtctggtttatgagagatgttgtttggttgccggtatgaatatttgttgtatgagtt

SEQ ID NO: 151224 - DNA, 1149 bp, Zea Mays
tgtcatcgaagtagacgaccacaaatcttccaatgaaagcacgtaaaacctcattcattaatctcatgaaagtactaggtgcattagtgagaccaaaaggcatgactaaccactcatacaaaccaaacttggttttaaatgccgttttccattcatcccctagcttcatgcgaatttggtgatatccactacgtaagtcaattttagagaaaatcatcgagccactaagttcatccagcatatcatctaacctagggataggatgacgatatctgatggtaatgttattaattgctcgacaatctacacacatgcgccatgagccatctttctttgggactaataaaacatggacagagcaaggactaagggactcacgcacataacctttatcgagtaattcttgtacttgtcgttgaatctccttggtttcttccgggttcgtcctttatggcgcttggtttggcaaggaagcccttgggatgaggtcaatctgatgctcaattcctcttatcggtggcaggccaggtgacacatcgtttggacatacatcagcatattcctgcaaaagattagtgacagtcgaaggcaaagtagatgatatgttgtgaagtgagaacaaagcatccttgcaaataaatacatagaagattgaagcaacatcattcaattcaagcaaatcagatttgaaagcaagaaaacaagcacttttcagttgtatttctgtcttcctcacttgagcagatttagaattgtcactgttatgttgtaccaactcctttgcagcacctagatttttattatgaacagatttatttttctctttgcaagctctagcaacttcatccttcaaaatagcatcgggggacatggggtgcaatacaagcttcttctcattatgcataaaagagtagtgatttgttttaccatgatgcatggtgtccttatcaaattgtcatggtctaccaaataacatagagcaagcttgcataggtaccacatcacaatcaatataatcatggtatgaaccaattgtaaattccacacggaccatacgtaacccttaagcttaccactgtcgttgaaccattggatgtagtaggggtgtggatgtggaagcgttttcagcccaagcttctctaccatggt

SEQ ID NO: 151225 - DNA, 345 bp, Zea Mays
caagctgggaaagccaaagttttgcaatccttaaatatttttatgagaattccttaaatactttatcctagcactctcggctctgtgccaatttttattctatggtctctcacaccagggcatgcttccaaactccaggtgagaaatcaggaatagagaaacgcttcttccacatcaacgaggaaatactggccgcccatccggacttcaacgaccgagagaagccgtcgctccaagcccgaatcgagatgacggtaacggaagtccccaagctcgccgcgcgcgccgccgccaaggccatcgcggagtggggccgcccagccacggacatcacgcacgtcgtgt

SEQ ID NO: 151226 - DNA, 748 bp, Zea Mays
cgcggagtcccgcggcggccgcgtcgaagcaggcgacacagtcacggcccgcgacgtacgggcggcactgcgccatcgcgaacgccggggcggcagcgcgcggttccgccgcggtggcgaaaccgacgctgcttgcagcggagaggttagcgcggaggctggcgaacgtggagttgagggcggcgatgaaggcggacgcgggcgtggcgttgtactggctgcacccctggttgagcagcgtggcctgcgggtcggcgaaggtgatcgggacccacgcggacgcaactaccaaggttagagccggcaagagcaggaagcgacccatgcgatggtgcatagccaacgccggtgagcacacggggtaggagatgaggcgaaaagaaccaccgtcgttggggcggtcaggtggggtggtactgccgtactgatagctggagtaatggggattggattggaattggaactagggagtgtggactgtggaggcgtaacctggaactggacacctggagggagcaggtctgcaggtgattagtttggacaaggtataaataaccgcatgagggagtcggagctcgtgacacgttagatactgtgtttcagctgaaatcgcccatggaattcctttcatactattgtcgtttgttgggctgtgggctacaggtgtggctgcaacttgatgcgtgcgcactgcgcaggaggattatctaaaagcctatttaatgagataggaccggcagtagttggc

SEQ ID NO: 151227 - DNA, 615 bp, Zea Mays
cgctggccgaaagggtatcgtatgagtatggccgagcagattacaatcaacggtccagattaaaagacaaatcggtacgcacagacatccctccgatcacgatctaacggccacgagttcaatactactcgatcccatctccagtgcccatccaaaatcggacggtacacggcggcttcaccctagattgaatcctggctgttcatattggatctaacggcacccgcgctgtcttctttcttactacagctaggacggcggcgcgtgcacacccgatggtgagcccgccgaagtggccaagacaacgtttcggtacaagaatcccaaatcgactagatgcaacacaatgctggtgccacgatggattgatctggtgaacccttaccgtgtgccttatagccgagagccacggcgacgatacggggcagactcaagtagaagtgccagcaacggtgagaaatcgccgacggtcccattgatcatgcgctccaagcttccgccgcacatcctcctcacaagctccgtttcccccccccccccccgaccagtcgacgaggccagaccggcaggcccagcagggatcttccatgacaacacgcacttttctcgcctccc

SEQ ID NO: 151228 - DNA, 913 bp, Zea Mays
aaacaacgaaattcgagcggttttcgctgtttttcggttgtcggtcgctgccgagaaacgataccaaggttaaccctgctccatacgcacgcacgcccactccccctgcttctgaggaccccgggatccgcccgctccccgccgccgacgcgccgcagcagccattttcacctgctcgtcacctttcctgttaccggcgcggcgcgagaggaagaggaaggctgcgtcgtttggtgccgtgtcggggtccgccaatccggagattcggctgcgaaaggaaggtgataaggcggagtgcccgagaattggcaataactgctggattgctgctggaggcgctcagttccgcgttcggttgcccgatttcgtgccgattcggagctctcattgggcgctcgagcgtgcgtttatatatagcgcattggtggtggcctctcgccgtccgtggcccgtgggccgtgggtgtgggtggagaacttgtcgccgtgctgatgatgcattgagtggcggcgaggcgataccccctccctgatgttccaggtggttgttttgcgtgcgttggtgaagatgcctcgcgggcaggctctttgatcgcgcggggcctcgctcgttggtgtgtaaggcggcaatggggatcaaggcggtggagaagctcaggtgcccctcgtcggtggccgccgcggcgcggtcaggcttgaagctgtggatgctgcgggccgtgacgacggtgttgctctggaccagcgtcgtgcagttcacggcggtagggaacacctggacctgggggcctcgcgtgctaaagggatggccgtcgtgccggacggcgcgggaggcggccgcggtcaccaccacgcggctttcaacgccggagcccgtcgtggagaaggctgcgctgccaccgaagagtgagtac

SEQ ID NO: 151229 - DNA, 647 bp, Zea Mays
aagttagtgagttagattcttcatattagctttggtcgtggtggcattaatcacaaaaagggagactgaaagagaaatgtgttatatgccatttctatagtggttttggtgtttgatgaccaacacaatattatgatctaactagtttgctaagtgtataagtgaatgttcataagaatcaaattgaaggattcaatacaacatttgggacttaggctggctccagcaagagccggtaaatggttctctacgctaaatctggcggtcagcgacctcctgtatccacccaacaacgaacggcaaaaggtccggtaaatttagagcgcgtgaccagagactgtaaatgtggcgaatctcagacgtccgctatacactgtctctctccctcccgcgcggagacggaagcttcctctcgcgccctcttcctgtagcaaagctctcgtcaacgacgccggtaggatcctggcggatgtactcggacacctctgcgaagctgggatccaaggtctcgaggttgggcgggttcggcgacggaccactcgccgccggtggaagcttggagacgagaaaaggaagcgcagagatccagggtctcgaggttgtcgtcctctgtttggtgattttccagcgcgcgcagctccggctcg

SEQ ID NO: 151230 - DNA, 743 bp, Zea Mays
gatcgtcagatatgactaaggaaagacaattgagggacttcagaagattgaatggtttgtgctttggatgtggggagaaatatgaacctgggcatcaagccaagtgtcctaaaagggtgggtcctcagctgcatagtttgactgtggaagatatgggactgctgttatcagatgaagttctgcacaatttggatcaggaggaccaaacgttggaggaatcctacaagctctcactaaatgctatcagtgggacggatcaggaggggtgtatgagagtgagagcactgatcaagaatcaggtgatggtgattttggtggactctggtagttccacaacttttgtcagccagaagatggtgaacaagttgaatttgcaaactgaaagctgtcaagctattagggtgaaagtggctaatggggagatgatgcagagttcaaagaaggtgccatgtttgtcctggtgggctggtggacatacttatagtacagatatgagagtgcttgagttggaagcatatgatgctattctgggttatgattggttaaaggtccacagtcccatggagtgtgattggaacaataaggtattgacctttgtggacagaggggtgcaggtgcagttaaaaggggatgggaatgaacttagggaggtttcccaggtgacagcgctgcagttgacaaaatggatgaagggtaatgaggtatgggctctagtgatgctagagcaagttccagtggagaaa

SEQ ID NO: 151231 - DNA, 289 bp, Zea Mays
gtccgaataaacgagagtgctagcaatcacatgacgcagccaagttcgtacgacacaaataatgcgtcgtgttgccaggacgcagccaatgcatagttgatgccataacttagccgattaataacgcagcctggtcgacgtgtccgagtacccactatacaatttaatcactcatcgtgagtttaaaagctcaacacaatataaatatttagagcgatttaagaatgcacaatatatccttcatatctttctgctaattatttactacggaaataaaagcagaaaaata

SEQ ID NO: 151232 - DNA, 686 bp, Zea Mays
ctttggatatttattgaacttcgctcatctgcactcgattttgttccacattcacatacatattgtgcctgtcctacagctccacatactatatcttctgatcaatacagatttgaccttgcaattgcggtttcactccctcttggtaagtatcacaaaccagcctccgattgtaccatcctttgcttgtatttcgtcagacacttgtaagagcttggtaagatacattacaacgtgttcctatgttccacctgagaggagcgtgtagtgaaattattagggataaccgtcaccgtttgtttcctgtttttgtgtttcgatggcaggcgacgaagaagaagcaaggatccctatagacttcaatgaatgtgttagccgccaagatcttgaggcaaacaacaagctcctaaaggagcaaatggaggagacggtctacaagtcagtgcatgatgccttcattaacatggaccttggcaggacttacgagaggctggatcgacgattgtccgagattgtcgacagacttgctgtgctggagacgcaacaacaagcactgccaccaccacctcctcgtccacgtcttcccgatgatgcggtgtttgatgaagaaggtaattatgatgaagcgaccaccagagatttgcgcctttgtcgccgtcttcatcaaaacacagaaggtatgccac

SEQ ID NO: 151233 - DNA, 516 bp, Zea Mays
tgataaggctgcagcagaatgcatcgcgagacagttagcccactacaccctcatatggggcacactgtacagaaggggtgcgacaggagtcctcatgaagtgcatttcctcaactaccgggaaaaagctattgaatgaaatccatgctggacaatgtggaatacatacagcatccagaaccctggttgggaaggttttcaggtctggtttctattggacaatagcaaagaacgatgccaccgagttagtccagaaatgtgaagcttgccaattcctgtcaaagcaacaacatttaccggcacatcagctaaagaccatacctgtaacatggctatttgcatgttggggttagacatgattggacctttcaagaaagcttagggaggctatactcacgtactggttgccattgacaagtttactaaatgggtagagtacaaacctattgcttctttaacctcagccaaggcagtggagttcatacaagacataatatttaggtttgggataccgaac

SEQ ID NO: 151234 - DNA, 712 bp, Zea Mays
cagtgcgggtattagtttggttaaattgtcctggaccagaaactgcatatctaccagcctctattcataatgcttggtttcctagcctgctatccattcagtaaagcgttttgctcgaggcaggagcagttgggatggagttcttgaacatgaccttgccatcattctcatctcattgacctaagtcaaatggtttgggaagacgaaaagatgatttattgatttgttttggtggtatgtgggggataaagattattttctctgaaaatatcgagcctatcctatttttatgcatcaaattaacaatcctctgccacaagaaaatttgaattaggtggctgtggatttgctcgtgctgcttaccattaatgccactattgtgctgcttgtgatctgctctattcttttgggggtttgacctgtaacaagctatgggattgttccatatatcttttcggaatcacgaaccaaataatagctgcaggactagtgtgtgagtttcaatcgcagttcagtaaccaatctttataattaaatcatgttgtaccaacaatgacatataataagtcctctgtgttaaatctcctgctccatcttgtgtgtattctttatatgttttcatggtcatatagtttcaagaaattactttttttcattaatatatgcaagcgtcaaacccttcctccagctgatgtagtaatatttactcaca

SEQ ID NO: 151235 - DNA, 377 bp, Zea Mays
cccggagccgcaatagacctatttgtgcccatactcatcaaggagagcccaccaagaaggtgcccctcaccgtctctagaaccacgtcgagttttattttacaatattacatcagcttcgtcgggcttcagacatttggcatcccgaacattgcaattgctctcttaacattataatctcgtgctctttgaacatttgtcattccttgccgctgatcgtcatttgcaagtttcctcttcccttccagcccatcgctccgttctcgtcgtctttgatctccattcgctgagtactcccgctcgtctgtgcttggaccaggtgagtcactaccagtttatgcggctagggttcatcctcttcccctcctccaccctctc

SEQ ID NO: 151236 - DNA, 525 bp, Zea Mays
tggcactagcatgggacccacacgtcaatggcctctcacctgtaccgaagtggcggagttcgcggctgcgttgaccacgagccgtgcgaatcgcataacccgcgggctcccctcggttagcgcagcaaatcgggggccgttgcaacctccttggctcgcacccacctggctacaaaaggaatcgaagccgctctctgctctgccctatcatcgtctactccactaaagaaattgtggcggatgctcagggggagggccgtcgctggagatctctgcccacggtggcgaaacatcctcggtgcatcgacctagggcttcaccgcgactcgttggagctttcgtgaagtcgtcagactcggagagttgatagcgcacaagtaattgctcgccagacgttctgcttccgccgcggactctccatggcgtggtcaggccccattcgcgaacccctttcccctgtaagtccgtccttagcgtctggcttgtcctctgccacgcgtaggttgtttcggggttaagtttcat

SEQ ID NO: 151237 - DNA, 648 bp, Zea Mays
ttaattcctagtataatcttaccaaaaatataaacttacaattttgataaacaagttttgaaaaaggacttaaattaaaaagtcgggttacctgagcttgtggaggtacgcttgctatttgctactcatagtccacccccatcgactttacaaattacacttggtcattgcgatttccagtttcctacacagcagtcccggactcccggttcccccactcgcgcaagtcgcaagctctcctctgcggctctgcctgtctttcgtttgctttgccattgcctgactagtgcttactgcctagccgcctagggacgcgatggtgttcaaggggcgcttcttctcgtcgcgacacaagtcatcggaatcctcgtcaagcccagacggcagcaacagcccgcgcacgcctacctcggcgccggcctcggtatccgcggcgtcgccggcgtcgtcatcgtcttctaaatccgacaagaagaagactaaattggagactcccaaaaagcgcgacaagctctttggttccgcggctaccgcccccaagagcgccgcgtcgtcggccccgtcaagcctggcgggtgacgggaggaaggggcccgtgctgcatcatagggacgcgggcggcggaggcgggggtggcgcatcggcggc

SEQ ID NO: 151238 - DNA, 694 bp, Zea Mays
gttcaattgatcgagtctacgagcaacaagagaccctaaggatgctagaacacgaaccagagaagcatgaaccgacctgtggatggatgtccacggcgaggtgtctcacgacggcgcggttgaccgaattgggggaaattaggaatttgggggctgtgggggctaatcgagagcgaggaatggtgcactggcttcgtaacaagctagcggagcaagcggggcgtcaatttatagtgaccagaagcggtggctctgaatttggggaggggataagcttgcggccggagcgaaggtgagtcactggagttcgctcaatgtggcatttactggggtagagtcccggggtggtaactaaccatctcgcatgacactttgcgacatggtaacatggtgagtaacgtggtgtattcggggtaacggcgaccatcacggcgacggcagcgcgaccacgtcgacgggcaagtgggtacggcgaagctgactctatccactccccttcggatctttttaccccctgcgactatccactcgccacagagcacaattcgtagcaccggtgcggatcacggcgcgaagatcaccggcggcgagattcactgaacgtggcgatcttgtttagtccactgttcaccactgaacatcgccccgagctgcttgacaaacaaggtttgggagcaatttactccaaaaattg

SEQ ID NO: 151239 - DNA, 424 bp, Zea Mays
gtttacgccggcggcgactgcggattatcctggcatggcgactgcggattatcctgactgcgggcattttaaaattttcaatatgcgccgcctagcgtagctagctagtgccaaattttctacttcgatatcgtcggcgcccctcgccccgtccgcaccggcgttggcgttcacagtcgcagagtattccgcgccgccgcgttacgttccttgaccagtcgccgttcaccaacgctcactaggactaggtaattgctttcttctccgcttgcggtgctgctatactgactactgaggtcctgtcctctccgacagaacttcgccacggcctcccgcctcgtcgcacccaaacccaaatgtgaggtaccaccacgggccacttgccagtgatggaggccccaccctccgccctcccgtggtggct

SEQ ID NO: 151240 - DNA, 363 bp, Zea Mays
gggggcgattgcaacacaaatctgcttgttacttaatataatttctccttagtccttaccctggaaatgtgatgaaaagagtactagaaacaagattcaatgtcaaaactttgatgctctgtgctatactgaactccctgactccctgtgaactttctgaggccatctgtcttacaagttacaacttccacccaatgcttaacaaatcctaggtggcatgcatacttgaatcgtacttgcgttattgcatgcatttggaatttaaattggcctcttctttcaatataggaccataaatgagctagtgtgctatgtatgttcactgtaccaaagtgtgaccaggctggtttttaggtggaaaag

SEQ ID NO: 151241 - DNA, 485 bp, Zea Mays
tggtgtctccagggagaagagaaagaacgtagttgttaacgtcatcgaatgtggcattatttgggcaaacaatggcacgcgaggaaaggtacgtgggatctcggtaatgcaacagaaaatctgggtatacttttgatacaagcgcagctaccttatcaccctcaacccggagcaacaaatcttcagggattgtaatccacgtagcctcaggctcgctcgctcttctttcagcaggcaaggtaccatcaccaacagatagtacccatctggcaaacatgtcgagctcgtctcgcgcatctacttgcaaagagggatcaaaaaggcgcatgttggtgcgcagcctaaggaggacaacatggcgccagagattcgagtttgtaatagaggcgttaactatggaagagcgagatccttttctaacaacaggtagtatttgccggaaatcgccaccaagaacaacaggcttgccaccaaacgggaggagt

SEQ ID NO: 151242 - DNA, 384 bp, Zea Mays
cactgatccttcctgcagaaagacaggaagtagaagcctgcgagaaaccacatacaacacaaattagctatgtttgcaagaaatataacacaaatctgataggatgctaaaacaccaaaccaacaatgccttagtcttgttcaatcttgataaaaccatcttgttcagtcttattaaaactactatgtaaagcagtcaaaatcactactaacttgtttggttttatttgagagataaaaaaacaacacatcaatttattccattgaaaacaaataggatactcgattgcacgcagctagcagctctctggcgtagatcgatcactgtagccaagacaagcgcatgctcagcactaacttgatttgatttccctttccagtttcc

SEQ ID NO: 151243 - DNA, 840 bp, Zea Mays
ctcgtccggattcctcgcctgttcttgcaatcgctcgagtataaagccaggatgtagcgtgcccctcctcctcatccccaagaacggtgagctagagcccggtgtcatcgcagaaccagagaaaagaacatgggggatccgccgccgttgtgtcacgcgtgctccatcggcggggtcttggtcgtaggctagggggctccagcacgtgcccacgatggtgtttgtggcctcgtcgtgcgcgattggtgctcggggcgctgtgaattgctcatcggagcctcaccaccaccgcgggtctgcttcggcgcgtgggcaagcacgtcttcgccttcgacgccagtgagtatcatacccgcatgttcgtcgtagcctcctcatcatgtatcaccgttcgatttcgaggttggaccgagaatgtggatgggtcaaagcttcgccaatggcgtcgccgtgcctcagcgtaacttcgcccgggctatcaccggagagggggattaggggagagattatgggcgttgtcgatcactggattgagggctcagattagaaacgtgataccccttcgtgcggtgcaatccgaaccctggtaatcaggatggatgggggagattggttcaagacgtggggtgttatcgaccgcagatctatgatccgatgttggcaactgaatactgattcacatatcgcgacgatataatcttggcggtcggttttagatcggacgaccgggtagtgcacaggattctttattgcacccgaagtctaatcatggccgcatataggtgatcgggcggccacggtgtgttggtaccccttcggcctgggaatttttcaaaagag

SEQ ID NO: 151244 - DNA, 432 bp, Zea Mays
gtcgaagcccgcattcggcgaggcagaggctgctaggggcggtgcccagtgctatgtgctagagccagggaaggagagggtcgtggactgctccatggacaggtgcacgccgggaaggggtggtgcgactgggaaggggagcagggcgtcgctggagatcgaggtgcgctcggcacggaggagcacgggcgcaagggagaggtccgacgccatggagaagatggccgatcgcgcagggagaggtctggcgtggggttgtagccatgttgttgggagccggtcgcggaagaagcttgccgagcgtgtgcaataggactcgggatggggaagaaaaccggtggctacgagccctgcggaccgtcaatggcgcgattgggagctagcgcgtggagggaggaaggacgtcggtgggagcagaggagagtggcgaag

SEQ ID NO: 151245 - DNA, 994 bp, Zea Mays
gaaataaaacatgacggagaaatgcttattagctatcaagtagggtcactgaattatgagctggagtgtaagacgtggacgagtggctgtggcatgcatttaagtcaaattgaaggggtttataaaggtgttctctagctggcttctatctataagaaagaaaaggcagatttctagtgccgaacttccgtatctattcccaggactcatatcatggtgttgtatttcaatttcatcacaatttgacagtttatgctgttcatgctaccttgcttcttggtgacaatgtgtcctcaaacctagatcctctctggtcccttccatttgccccactcaatatccctcttgggcagcttacaccttacagcagaattaccgcaaacccaaccagcactacaatatgtcaaccccttgggggcttgttcggttaggataattccttgctagtcaaaattaaatagaaagagatttagtcccccctcaatccccatgcaaccaaacaagacctagagtggaatctggcactgaggcttggtaaaaaataaaaaaaaagataatattgcagctcaacggttctgtcagcaaagtatatcttgattttaggttcccattggccccaactccagtgccaccctcttcaccttgtgctgtgtacctacaacgtatgacttttttggagaatgtgctgagccctgagcgtgtttttcatcacaaagatgagtgttccagtccagactgacctgaatgaaaggggcataaagaaggtaaggagagttgaaaaacaacaagcacaatgagaacaaatagctagaagccaggaactcaaaactttggtggtgatgagttcctcttgttgttgtccactttctctgcatgtcgatggccatgtaaatggtagagcattggaagttttggatgtgaagtgaactgttgttaaagtccactggagtgaagctgacttttgcttttatatagtagccaaaataagttaggc

SEQ ID NO: 151246 - DNA, 702 bp, Zea Mays
cctccacatgtgatacctgtgacgaaagtagagcgatagatagacgcacgggtcgttgaagtagtttagcaccaacgagtcacgagtggcttcatgatcttgatcgatgtagctccggtgctacatccttcgcctctttctcgttgaagactagacacaagttgcaacaccgcatttatcatagtttgatgcatgcggcatatcgagcacctcatattcggtcgtcatctcaacaacgtccgagctcaagaaagtcattctgacaacaacgatttagtggagtgaaaggagagtgagacgagtgaattatgatatggtaagagcaatttgaagagtggaagatgttaatgaactttttaaaagacaaaattttaaaatttacaatagtgcgaaccaattagaaaatatcacgtgacaaccggaggtcggtggcgaccgtgccgttcgtttgacagcccaacccactgtccggctctggttttgaagctgatatgacggaatccaccacccgatggaaccaccaggacaccgatgagtgctggctctggttttggatccaacattagtgtcccatatcgtcctcgtcgacacggaacagatatgacggaatccgtggtgttggtttcgtgtgtaccagaatacgtctgtgcatcaggttcaactagcgtacgtcgccgtcagtacatgcgtgcgtacgtggag

SEQ ID NO: 151247 - DNA, 838 bp, Zea Mays
gggcatcccagacctcgaggaggaggacgccgtcgtcaagcaggtggccggcgagttctcggcgcccgggagtggcgcacgcagccggcgcagctcgatcggcggcgtcagcagcggcattgcccaagtcgaccaagaggacagttctgtcgtcgataagcaagtcattggcgggggtaacgtggcgccggcgcaacgtaacactgcatcctctgcgcccacaccccgtaggcccgtcgacactacagacgttgccggggagatcaaggcgcagttcgttcgagctgcagacgctgtcagggcactttcaccacttcttgagatcgggaggcggaggtaccaccaccgaagctcagtgtaccatggtgagcgttttcttccagtacgcagcacgtctttggaaattggaaatagcttgttcccaattctttggtttgacttattggtattcggttatagtttcatcaagcatggtgtcagcgattgccttgccgcattcggacgttggaggcatcgaactcctggacgttggaagtgagaaggtgttgggaggaagaagcctgtgttcgacactggagaagctctatgtctgggagaagaaattgtatgatgaggttaaggtatgtgtgcattgttatcaataaatcaactaaaataaatgatacatgaaattggtattaacagtgccaaaaagctaatttgttgctccatagtggtcacatccacactcggagacacaaatagtctcttatctcaagttgggagcgagcactgcgaatcatttttatagccttatcttctgtagcagttgaatcctaaggttgatcacatgctccca

SEQ ID NO: 151248 - DNA, 519 bp, Zea Mays
gtcgttttcaatgggctaccgtgccgctgtgcatggtggggtagggattcgggggttttgtagacctacgtgataatgtcttattaatatattgccgtggggcggtcttatctccgcaggtagagttttttctactgataaacgacattagggaatgggtactgtatttacaaaatgaactaagtgcaacatgagatatttggtttgcatattatatcctaccatcacacaactagacataacctgatatggaaaccaaataaaagattttttcttgcagataataactaggtggactaacctttaataattgtataccattaccacataagcaggaaaaaattacacagtgaagacatagtttggttatgtgtgaaagacgataacattatgatatgtggattacttatgaggtcctcaaaagaacttatgaggcaaaagaagtgcatattttcaaatttgtagtcttgaaaacgtgaagctgtatggtttcctggcaaccttgcaagcacatgtacg

SEQ ID NO: 151249 - DNA, 304 bp, Zea Mays
caaagccaatcgtccatgtgcgagtgagatcggtcaggggtgagaacctgggtgcgtgtgggtcaccggaatcgggtctcggagttcgtcgtagtccctccctcaagatacatctgggtgattcacttgggaccgctgagtgcgtggtgacctcgacgctcgggaaatttctaccaacgccactgggattgtccatcgtcatcgggggctcatcgctggccgccttgcgccgtgtccttggcggctaattgcataattcacggtatgatcacccctcctggttttgtatcgtcttcaatttagg

SEQ ID NO: 151250 - DNA, 374 bp, Zea Mays
aaactatttcgtgagtacgagtgaaattagctcatggtagtaccacatttagtatcaaagataatataagtgcagcatttagaagcaaccctttgtttgtcgccgcataaaagacgtttatgaaccaaatcgataaaagcgttggtgcataggggaaggcagcatgtagcaggtgcaccacacgaatgaattgtggttatatgaagtggtatggcaccgaacaatctcatgtaaggacacaatggcgcagaaattgagtacaagacaaggcaagagccaattacctcttcggataaacccgagatatgtgatattgtagcatgtactgcaatccgaaaacgaagaggatgactagtgtaataaacatttgaaaa

SEQ ID NO: 151251 - DNA, 536 bp, Zea Mays
gaaaacgtagctagagtttgagtggttggtttcgcatagtaggagcataggagaaggggtgcacgtacacctgtgggaaaatatttagtggagcggtgtttggaattccaataggagttcgatcagttgtgtctgctccttgatcatcgattggaacagtaacttcagatatgaatacgtagctagagtttgagtgcttggttttgcatagtaggaacagaggagaaggggtgcacgtacctggtgggtgcgtatcgccagtggaagtctcaaaggcctgagtagggcggaggcagcagaggaggaggaaggcatcattccaggatttgggcccgtgcgatgggggcacggataggggatgggttcatgccatggccgcctagtatagaagggggatgcctaccatggaagctcgacggtgggggcaagatccgtggctacctgcgtgggcacggcgtgtgctaggcgagatacagggcatggcggggggcgctgatgtggaggaggttttcgggggagcttcacgcggtcgatgg

SEQ ID NO: 151252 - DNA, 370 bp, Zea Mays
gtgtgcttaatgaactgttgggctccgggtaaccctaatttgttgggcctcggccaaccccacctgggctgggtgtatcacaaacatatcaagcagatcatagacaaggggctgaaaataaacgtccatatcactacccgcagaacatcgaccaggaattaagacaaacaagataaaatttgaatccttcatgcacatcgatggtggacagttgagtggaatcaatatgccaggccaaatactataactaacattcattgtcctatatggattgaaaccatctgcagcaaatgctaggcggatattacgactatccatagcaaattctggatacttttgatcaatatctttccacaagggtgaatcggca

SEQ ID NO: 151253 - DNA, 1050 bp, Zea Mays
gattgctctgttagcagggcatagtggtcaccccgagttaagtatgcgtgagcatgtcacaccgccttaagtcgttgccgacttaagtcgattgctccgttagcagggcatagtggtcaccccgagttaagtatgtgtgagcatgtcgcaccgccttaagtcgttgccgacttaagccgattgctccgttagcagggcatagtggtcaccccgagttaagtatgcatgagcatgtcgcatcgccttaagtcattgccgacttaacccgattgctccgttagcagggcatagtggtcaccctgagttaagtatgtgtgagcatgtcgcaccgtcttaagtcgttgccgacttaagccgattgctccgttagcagggcatagtggtcaccccgaattaagtaagcgtgccaattgacagtgaacaatctgagtgcctttgaaacctttttattgatgatatttttctcaatttacagaatacatcatcgttccgagagcctccgtgatgtagctatgggtagaacttcctgagatgttctatgttccatgagttcccaatttctgttccatccatctgagtgaggcgatatgatcccggccgagtgacttctgctactatgaatggtccttcccatagaggtgacaatttatgccgtccctcccccgttagaattcggcggaggacgagatctcccactgtgaaggatcaacgccgtatggccttatcatgatagcgcctcagagtttgctggtatcgcgctgattgaatcaccgtattcagtcgctcttcttcgagtatgtcaacgtcctctagcctagtagcttcagcttctgctatgttatcaaagattaaccttgttgccccgaacttgagatcggcaggtagcactgcctccgaaccataaaccataaagaagggggtatttccatgcagagctcggctgggttgagttctcaggctccaaactacatacggcaactctctgatccattttcctgcgaacttttcgttcttgtcgaagactttctttctcagtgcttctaatatcat

SEQ ID NO: 151254 - DNA, 486 bp, Zea Mays
tctgttaggaatgcaacttagatctattgttatgtgaagggctggatataaagatgtacaaagtgcagatactgccctatgctagtgactaaaagggtctgtttgcttcctaccctggaaagcacatttggctaggcagcaactcaaggcgtttgattgggtcggatctgcttgcctagctgcgactactaggcaagggtgcaaaccaaacatgccctgagagcatctctagtcattccccaatacaaatccccaataaagtggtaatgactactgtaatagtctcctatatgtacaaagtgtaggaggtcaagcacggacaacatatctggtccgctctggtttgctgagttggaacccaagtaggaggtcgagcatgaacaacgatatctggttcttgagcatgatcatgccgatgtgcacaatgtgcatggccccgcatatggtgaagatggggttgtgccatgattacccctagtcgtcgat

SEQ ID NO: 151255 - DNA, 307 bp, Zea Mays
ttggtctaggagagccttgcgattattgaaagcaaaaagactcgagggctatgttgatggaactgtcgttgagcccaaagacaagccaagtgctgaatggaaggattgggatgctataaactctttggtagcagcatggatgttaagttctatgatcccagcaattgctagcactgttgatacaattataagtgctgcagaaatgtggaaagcgcttgaagaaatgtattcgggagctggaaatgttatgttgatggtggagactgaagatcgcctccataatatcaaacagggggagcgaactgtg

SEQ ID NO: 151256 - DNA, 311 bp, Zea Mays
tccttgctaaaattgaagaacagtccgataacatatgcacataagtgctttaggtcttcagtagccagtgtaagtcttatggagttttatgccatgttttaatgtctctatgttagacctcctaaaatatgttgttttaagtgacttacgtgttaactaattcgagtggagaaaatggttaagaaaaactaattaacctgctcccacctatgtttttgagttgcgaagtctaaaatactttgctaagtgttatactggttaaccaacttgttagatgactttagttaagctcgtagtcacgatgaattgtg

SEQ ID NO: 151257 - DNA, 1022 bp, Zea Mays
cctatctgccatgcttgccagttaggtcggcacactaggcttccgtttgcgcagtccatgtcgcgtgctactcagtgttttgatttagttcattgtgatttgtggacctcacctgtcatcagtgtctccgggtttaaatactatttggttatccttgatgatttttcacattattcttggacttttcctctgcgcctcaaatctgacaccttttcaaccatttctcatttttctcttatgtccatactcagtttgggcgcacgatcaagcaagtccaatgtgataatggtcgggagtttgacaactcctctacccggaccttctttctcaccaatggtgtgaagcttcgtatgtcttgcccctatacatcgccacaaaacggtaaagccgaacgcatgctccgcaccaccaacaatatgatctgcaccttgctgatccaagcatccatgcctcctcgctattgggtagacgctcttcatacaaccacttatcttctaaattgccttcccactaaaactgttcgcgcctcttgtccctttgctgccctgtacaacacacctcccacatatgagcagcttcgagtttttggatgtgcttgctatccgaacctcgctgccaccgcaaccgcaccacataagcttgctccccgctctactaagtgtgtttttctggggtattctactgagcataagggttatcgctgtcttgatctatccacaaatcgggtcttaacatctcgtcacattgtctttgatgaggcttgcttccctttcgcagcctcgccccctcgaactaatgattttgattttttgtctgagatggatccgacgccttcacccatcggaacacgtcttttacctgtaggtactcgttctgttgcccccgtggttgcatcgaaggcaccacctacgagggttgctccgaccgacactacctcttctcagtcgggccagccctcccaggtccttgcaccggctactcggacttccacgcttgctgcgccggctagtcctggtgtgcct

SEQ ID NO: 151258 - DNA, 868 bp, Zea Mays
cacaccattttgacctgtgcaccgagtgagagagaatatggcttcaccggtgattttttgctacatcgccggtcaagccgtattcagtggacagggagcgtcgtcggcacataccccacgtttacatgacctattgaggtaagggaaggcgggactcaacgggtattcatcaccgaatatggggccgccaccgaggatccatacccagccatgggcagacctcactgctatcccatctctggtattgcttgtcttcgcaactttgccctattctcctcatagcatatgacctagccgcactcgaattggctcaacagaacgccataatggggcgctcaccagcgcggcttcgccgtaaaagctggtggcatcgggtgcccggcacgcgggtcggtggagaagatgatgcgtgaaccattgatcgtggcatcaatgatcaggagttgatctcgtgtgtttggagatctaaaccgtggttctggcaaatggcgtctgtgatttaattgtgatatagcggttccgccgtggcaggtggtcgttgatcgttgatcggagggttgtgagcggtttagatctcataaaatcctggtagtcggatctcgatccgatggctatcctagtgtaccacttggggatggttgggatataatcctagccattgatgcatgatccatcgaccctggtaaccagataccccttcaatcgcgagaaacttgtgaaataaaccctttgttttaaagtaatcaactcgccatccatcgttatttagagaaccttacaaccagacccaaaattttatgaaaggggccctgtagtctttggggtttaacgctcagtccaaatgatattaaaattctataaaatgcag

SEQ ID NO: 151259 - DNA, 457 bp, Zea Mays
gaaaagaaaaagaaaaggttacctgcgcacctggcctgaaaccccagcttttcggcccattaacatttcatctcccgccggcccactaccctgccgttcctttccattttcggatcacaggtttgggtcaccgcctggtggggcccgctcgccaggagcttcttcctcaccgtggtgtgcgcgcaggggaaatcggacctccgtaacaaaactctcgagatttccgggctcggttccgtcttcgttccaccgtgaagctcggcccactcagcatcgcgcgcgcagcgccaacctcacccatggcctctgctggtgggaccctgttgtctgctgacccagtccgagtttgcgcgaaacgcggtagctgttgcgaatcgatcgcggtagttgggatttggtagcctcgacctgcctctacgtgcctatatttacgtcagtggaggtaccgtcgacctga

SEQ ID NO: 151260 - DNA, 465 bp, Zea Mays
gtcgatatgatcctggccgagtgacttctgctaccatgaatggcccttcccatagtggcgacaatttgtgccgtccttcccccgttagaattcgacggaggacaagatctcccactgcgaaggatcgatgtcgtatggccttatcatgatagcgcctcagagtttgctggtacctagctgactgaattactgtattcaatcgttctttttccagtatatcaacatcctccagtctagtagcttcagctatgttttcgaagatcagccttggtgccccaaacctgagatcagcaggtagtactgcctccgaaccatagaccatgaagaagggagtatttccatgcaaagctcggctaggttgagttcttaagctccagaccacatatggcaactctctgatccacttccctgcgaacttttcattcttgtcgaagactttcttcctgagtgcttccaatatcattc

SEQ ID NO: 151261 - DNA, 360 bp, Zea Mays
ctccgcgatatggctgatcggcgaagtcttcttgctttggggcttgggggtggtggatgttttgctgttgctggtatggaggtgggtgtgggggaggtacgatttgtacctcctggtggtgttggtatgcgtggtgcggtagatgcggagcggggccgtggttgtatggatgagggggttgctaatatgtgtgcgcgacaactctagggttatcggctggttgcgcccgtgccatcctgtctctggtggccttcgtctctgggcagtctcttgtagggtgcacgcagtcttcgccgtggaacaagcagtaaaatctgcgcggctgatgcgcacgtccccggccccgaccgcgagttccgt

SEQ ID NO: 151262 - DNA, 293 bp, Zea Mays
aagagagaatttgagaattgcacaatcaagacagaagagctatgttgatacccgaagaagactactggagtttaaggagggtgatcacgtgtatctgaaggtgtcaccgatccggggtatgaggagatttaaagttaaaggaaagttgtcccctcgcttcattggacctttcttgatcttaaagcgagtgggagaagttgcatatcaactggagttacccgatcatctatcagatgtacatgatgtatttcatgtgtctcagctaaagaagtgcctcagggtacctgaggagc

SEQ ID NO: 151263 - DNA, 457 bp, Zea Mays
ttacaagtttggttttgctgtacttttggtgtcgtctgcatctgtagggcgcgcaacgcgtgtcccctgatctagttttttttttaacagaggataaccccataatagcaatgcggtatagtatactacagtaacaaaagctaaaaccggataggacaagaatgcgtaagccttgcaagctgcaaacacctgacgagaacgaacagctttgcatgcatctgtagacaccccccacgtccgagctaggagtacagtactagttttcagcgccgaccttcggcttggcgttgctggcgaaggccacagcggccggccgggtgacggcgttcacggtcacggccatcccggggccggagccggagccgggaccgcagcactcgcgcttgccgtcgcagcagtcaatgcggcagcagggggtcggcaggacctgggcctcggccgcgccgagcaccaggag

SEQ ID NO: 151264 - DNA, 355 bp, Zea Mays
tgaatttcagccccctctcaaagatcaatctcgttctctctttttcagaactcaaatcaaacaagtccaaacatcaaagttgtgccaaattcccttgaacacgccctggaaaagtttgaactcaaaccaatttcatttgacacggtttttgcgcagttttacctcgggactcaccttgtgacacgacaactctctatacactgccccccaaactgctcgacttccacacacaaacgacaaagctctgtcgggggagcaaatcttgtgcagcgatcatgcccaaattcgcgaagatcttcaacctatgggcgcttgaacttgagcagaagcgaaaagccacgtgttcgatcgcttg

SEQ ID NO: 151265 - DNA, 296 bp, Zea Mays
cttccaccattgatggtgcaagcctactacggtgtggactaattattcggcctcctgtgctaaacacggactcagatgccactgttgaaacaggtattgcaagcacatcacgtgcaatctttctcaaagtaggatatttgagcccagcatgctgccaccacaggatgatatccaaaccctgtgtcctaggaagcagtggttcctctaagtacaaatccagctctgtgcgcacataagtggaggtcacatctggttgcttggacatgtaatcatcaaaagtgtccattcaatcctcc

SEQ ID NO: 151266 - DNA, 434 bp, Zea Mays
gacttaagttggcaacgacttaagacggtgcaacatgctcgcgcttacttaactcggggtgaccactatacccttgctaacggagcaatcggcttaagtcggcaacgacttaaagacggtgcaacatgctcacgcttacttaacacggggtgaccactatgccctgctaacggagcgatcggcttaagtcggcaacgacttaagacggtgcaacatgctcgtgcttacttaactcgggattaccactatgccctactaacaaaagcaatcagtttaagtcaccatacaacattctacttcggcaatgacttaaaacggttccacatgcttacgattactcatataggggctacctctatgtcccgtgaagaagttttaaagtcaccatacagcattctacttctgcaaatctagatactgctgaattctaaaac

SEQ ID NO: 151267 - DNA, 734 bp, Zea Mays
tttcctaaacttgctgatttaaagcatcttcgttatgtctatctgcataggatatcacttgagggaatgcgtgggcttgttaaacttcatcacttacagctagttgattgtttgaatgattgtggggaggaactaaggcaagtgatgtgtttggggaacattgatcatctgcgatatgtaaattatgggtcgcgtagaattggtgagtttccaattggtagactcacttcacttcaggagctgcacaactatcgggtacagggaggtgaaggtaacaaaataagtgatatcaagaacctgggtgctcttcgcgaactagatgttttcagcattgagaatgttgaaagtcttgaagaagctgataatgccaagttaaaagaaaaaccatatctcaactctctatctctcatgtggtcagcacgtgctgatgcgaaaaatgggaaagatgatttgattcttgatcatcttgagccacatgcccacattcgaaacctgaatatttctggttattgtggtgcaaggcctcctatttggattgaaaatctccatgtgaagaacctggtgtcacttgagttagcaagatgcatgtattgggaacagctgccttcactcggagaattagaatgtcttaagaaacttttgttggagtgccttcctagcctacaacagattggtcaaccatctcaactttccaacattagctgtattggttcataccttcctccacatcttga

SEQ ID NO: 151268 - DNA, 572 bp, Zea Mays
tcgcgacgcgcgcacgaccttctgggctctggcgtacacgacaccgcgcgaaaagccgctgacgccgggcccggagcaagaactggcaaaaaagagcgcctagttaccgagcactagcagaggcaagggcaaactagagtatagggaggaaggagtaggcggaaacgaagcaagggaagcgtaagcgttaggagacgaggcgccgagggaggcaagccgatcacaccaaacgcttcgtgctgctgccccgtctcttctcatcgtgatctcagggcagtggatcgatctcacgtcggaggcgaccttcttaggcgcgccaccgccatccgagccgagccgcagcgatccagatccaggtacccccttttggaccgcccctgcccctctatccctcgccccatcggcgtccgcgtgtcctcgtcccctgagacgccaccggcgtggagatggagtgacgatccgatcagatccgattgctcgttttctccgagaatctctcccccttttgtcggttgtgagctctgaaagtcgaatatgccctgtttccctccaatccatccagttggcagctt

SEQ ID NO: 151269 - DNA, 496 bp, Zea Mays
tcgagattaaggaaggctagtatgaaagcaaagaagatacatggttatttgttggttcttggttcacactttaactaatctaaatataataaacttattatttctttacttcgcattgaatgctaatcaagcgatcttcatcatcgtacttataactggttggtcttctggattattgtttgggtcttgcttcaccgtcttattctttagttggtctagacgcttcttgggcacattggcgaataatatgtccttagttcttgcagtagtagtaagcacatcttgctttgagcaccttgtgagccaactttgtttgactggcgacagataatggctaattgggtatttgcatcttaaacagttgagcctaatttgattctcttatttgggtataggaaggaaagagaggatgaaaaggttgagcaaagacaggatatagagagcagataaaacccaactatctaaggttttacatagctaactgatgccattgtgg

SEQ ID NO: 151270 - DNA, 953 bp, Zea Mays
tccatggtgctatttatagccacggcggtccggctaacgattagcgaccgtggattgcattgttcacgcatggataccatgtagagaagaggcacaataagggaaaaatgaggcatgggtgacaccgcggcggaagcgaccgagccacggcgaccgccggtgggatatctccggccacgcacgactgagttcgcgggatggtgccacgtccgaagttatctctccgcgatcaaatccctttcaccagatcactcgagcacatctgattcaacagtgccttagatcttttatctgcgttcttcagatatttgcagagttttgatcttcagcgttttactgaaccgaccaccttccatcctctctatctcctaattcttgttaagaacagggtgatcttcattaataaaacttgttcaccaaacaacagtctttaagtttactataaggttcatggttcaattctgtacagattttcagatttggtgctctcaattcgactgcatttcattggggccatacctatctgaacccaattttcagatttgcccaacttactcgacatcacaacttcacccttatttatctccaatttctgttgagcaccagtgatctttcacttaatcaaacttgttctcctatgatagctctacaaacttcatgtgttgacatagggcaaaatcttcataatttggaagatatagggcttcaaagttgagccaattcactgaaattcagacatagccattggagcacaaatgtggtctttttgcaaataagcccaaaacttatggtttcatttgcaaatctccaaatatttgaaccatatgacttaggataccctatttccatgatttttgcacttaggtcccaaaatgtgcacattttgcatataacaccttagggtttcaatctagggttttccaggggtctattaggacttttggtacttctag

SEQ ID NO: 151271 - DNA, 497 bp, Zea Mays
agtcggggacaatctagcactgaatgtccagaccgcatcgaccatcatgtcaggcttcaccatagcaatggtggcgaactggaagctggcgctggtcatcacagtcgtgatcccttttgtggctttccaagcctacgctcaaatgctgttcctgaaaggtcttaacagaaacgcaaaggtactacagccacactcaaatgctgtttcatatctcgtcttattaactgtttttttgatcggggcgcacagctgaggtacgaggaagcaagtcaggtagcaacggacgcggtcggtggcatcaggaccgtggcgtcgttctgcgccgagagtaaggtgatggacgcctacgagaacaagtgcgagtcgccgaggaggcaagggatgaaggaaggcgtcgttggtggcttggggttcggcttctcgttcgtcgtcttctacctgacgtacgctctgtgcttctacgttggcgcaaggttcgtccaccaagggacagcaac

SEQ ID NO: 151272 - DNA, 572 bp, Zea Mays
tgacattttcttatccatggtaatttcctggaaggaggagatcgtgcgttccatagagaagaaaaagaggaaaacacccccacgtcatggcccaccatgggatcatttgtggctattcaaaaatctatgacccttcatgtggcctcgatctagccgatagaatcgcgccacgttgccttaaacccgcaaaaaaattatttactcgatatcctttgcgttagatgtccgatttattccttcccgggtgtattagcttcgcaataatctcatgtgcacgttaaaaaaatatattattttatcgtaacacatgttttagttgattaattaattatgtgtttgtttgatggttagtgtaatggcgattcagttaagattattttatagatttaagttgcgattttataaatacatgttaacataattaataccaactcaaatcttttgatttaaatacttgcctagtgtaatcgcgatgcatgtttagcaattctcatatgtcgcgtcttttataatcgggattattatttatacagtataatttatgccataaatctgttttgactcgtttcagt

SEQ ID NO: 151273 - DNA, 1124 bp, Zea Mays
ctcccttttcttttatttgccattcccacgaccatgactaccgggcaattttttttgtggggcccgctgtcagctaggatcatgagaacctggctcgtggtctctcttgctacatgtggtccgtgggagccagctgtttttcatcactgtttgacggacccgcgcgtgggacgagaccgaagccgccatcaaagtttgttgagattttatcgatcacccgttataatcggagattcaacgtgctcatccttttgtggctatataaatcagtcatcggcaccccttcgacccatagctcgagtcggcgcttgaattcgagagtctaccataccatcgccatctaccaagcaagctgcgccatcgaagatggatagcagagagagaaaggaactcgtcgtcgtcctaagctcgacatgccgtcctgtaggccgggcctgggatcccacaccggtgcgtgggcgtcgtcgtcgggccgccatgcatcagggcaccgctgcgtcgcgtagtccggatccacgtcgcccagacctgaggtgagaaatccccacggggtcctccctgccattcccttgcgcggcattagacagtatggagtttgggcagtcgggtgcgtgggtggcgtggtccgatgtgctgcgccgccatggtacacgggcgccgctgcccagctttccccggcgtgagatagaagaaggtctcctggtcgtggatggaaaaatcaacgacgtggaatagatcctgggcgtagagtctcatcgcccaattcgatccgttgatccagccgtggacggctgtgattgaaatggctgataccctttcggttacgtggtttttgggcgctcggattgtgatcggacggtccgcgtggcatacccgttcggattaatacagatctaatcgtagccctcgatttctgatctgacggttcagttctgccgatatcccttcgtcagggctatttttcaaaagagaccctatggaaatttgaaaccaacccgccgtcctatgcggctgttttctgagtcttgggaaattttgcaagttaacccttgcattcctctgtttttgacgaccagtccaaagaacaataaaaatagaaacttaattatagaaaatgattttta

SEQ ID NO: 151274 - DNA, 787 bp, Zea Mays
tccattagcattctcttcatcccattattacgtacttctactaaatattcatatttgataatattcatctcctgttagaaaccataaagcaatagcaaaaaggactctagaacaaatactttacacaaggtatgtatgttttattgtctgaatagaacaaaactatatccaatcatacttttagaacttcaaaggagcatattctgatgttcaataacaaacatgaaacatgcctttaagttctgcagcgcacatgacttcaggggaactaaacaccccttcagtttcaccctagtgattcgttctttctaactaaaaatcatttgttttattgggaaacatgcttgtgtgttgcaatagaaccaaatatatattagaacagattcggactctacaggcgcgagttcttttttagcttgtgtatactcatgagtcctgatcatatataactgacctacaagatctctttaggtattttaaccggccaaatgatcttatgtctttcctctgaattaattctacttgaattatcttattgccacctcttctttttattaaagacatgagagccgcagtattttgtttattatttaaaaaaacaaaaacatctgctgagttggaaagccgaatttctctcacacgtgaccattgattttatgcatttcggattacaacagtgtgaaatgtgctcgatgtgaattcttttaaataccacaaagtacatgccgctagctgctgataggactactccatttatgtcaactgtaattttaagccactcactcca

SEQ ID NO: 151275 - DNA, 1737 bp, Zea Mays
tctattgtattatttatatagctagtacatattaataacatgcccctagatattttaggttaaaccactcaactcgagcagcaaaatggtccatcttgagattgatgcatttgacattattgatgggctctttatgacttcacttcaactttatgtaagctttgtgacgataccacatgtcgcctctagttcccgccggaactccaaccaagttctaatgcccctcatgagtagcgtatttgatacactctctatgatctcgacatgtgtcaccaccaatccttgaccgcctaattatcacgtcctccattgcctttgcttgacttggtcaatcgtcttgacctgatcaacatagactactggtccatgtactcttgtgcttgttgattttctcaagtgttagacactacggtcaatcttttagcttctcttgtccctcactccaactccaagcctcggcgtctgttcttcactgctctaagtatattggcatgaacctgcttgaccttcactattgactatcttggaccttcaaacctacgcaccacaagccaagatatatgttgcacatatcatactcatgttatggttagtcaatgctaaaccaaagctaatcatttccttaacaatcatttatcacacttgaacaccatcgacatatctcgatcatgtgttcgcacatatgttggaaaacacctaaaaatagcgtgttactgtaagttaaatgttagtgttaatcaaatatatttcattacaaatgtcacacatttgaattctactattactattcatcacgtttgaatagtgccattttggttcttcacctctctaaaccatctcactttccaaagatagttttgtatagaccaaaatgctcccatgggcttgtttctatctaccttcataacttctttgttaccctcctctatgtatatcaagcttgagctcatctgctttcccaccctaaatgatgggtgttagacctccttgccctttcccgctagtggcccattgcgatcgccgccgatattggtctcactatgctatactcctcgtgcttcacttggcatattcgcaaaggtgttgaacccatagagcacaatgatctcacgtatggcgcgacgatgaaaagcgcacaccacttggtgagctcaagtgctttgtccctactaccactaagcgagatgcaagagagcaccacaacgaagagcatagagatcagggaggtttcaacaacgtagatgtcacctagcatgaggcaaagagagatgaggccaacaatgtcatagagcatgggcttggtcatcgtcatggatgttcatcgagcgttcctgcctttctcccattctcataggcttctcaatctcgctcgcactcattgtgttatgtggggatacatcaagagagggagagaaattgtgtggtagggaatacatataagtttgattagtggggtcaatggattagtgagtgtgagtggtacacaacatggtcttttttttccatacaaaaatatggtagcctaagagtgagccaaactgagacaaatctttatcccaaacatgtggcgtgatacaacttagttagacgcataattataaaattattgttctaatataaagaatagtaaatgatataactcagaagatcgatatttaaaatgccattgatctaactaaccctaaaagtttaaacaagatagtcatgtcttttactctcaaagaccaaaaaaatcac

SEQ ID NO: 151276 - DNA, 488 bp, Zea Mays
gagactttcgccaaattttacccgttgtgcggaaaggctcacgatctgccatagtgaacgcatcaattacaagctcaccgctgtggcaacatgcaactgttttgaaactacgaacaaatatgaggctctccaacgcttctttacatgggaaggaacgtgcagacatggaacaatttagcaaatgggtcttggatatcggcgatggtgctctgccggccgtgacaagaggagacgagtccgaacctacatgggttacgattcctgaagatttgttgatacacacggatggggatgccactgcgtcgctcatatccgaggtctacccaaatttgttagagagatatatggaccctgtatacttagctacacgcgccattgtatgtcctaataaccttacaactgataagataaacgactacattgtctcattgctccctggacatggtgtacaatgccttagctgtgacacaatctcaaagtcatctgaa

SEQ ID NO: 151277 - DNA, 764 bp, Zea Mays
caggtatttactattatagtacttcttttatcaggcttctctcttctagtacttataattttatctactctataatagtaatcataagtgaatctatcctataaaatggtactctaatccattttaaattcttttcattttattttcttatttttcactacagaattaccatactgctctatcagttctagcaggaattaaataaactcacgaataactgcaaattactaatatcggtgtgttgcttgtttggatgttattggccggttgagacctgcgaatcacgattctcacgagcaactgtttaaactttcttgtcaagatagatagtgttcttgtatatgtttattttatttggcatgcagatggaaaacgaacaacaaacaagaggatcgctgggacctagtcaggcggttcatgtgaatgatagctattgtgatatatataacataaccagtcagtttgccagcaataaacatgtatttagatattacacttgttgtcttgttgatgcatctgagactacacctgcaatagctagctgaagttatgcattcgtgatgaacagaggtgcgaagggagagatgaaaagaagtgagtcaggttaattgaagtggtgataaatactaaaagaaaataaaaatgattaaaaagtggttggagtattattttaaaggatatgttcacttatgaatactatcacggagaaattaaaattgtaagtactaaaagagagaagcctaataaaatgaatatcataatag

SEQ ID NO: 151278 - DNA, 715 bp, Zea Mays
gtgatccgagtacgtgctgcttgtgatacgtgtagtatccagggtggtgcccctctgcctgtgttcatggtttagatcagctagtttgcccctgctccagtttctatgggtgctcgttggattgtttccgttccgtcgctgtgtcttgttgttcccttttcgacatgatttgtctctcccgacggatgtcctgcgccacttcgataccccacctcgtagcttccaagtgaatcaccatggatctgatttgctctagcagtggctcttctttctttcttggtcctgttgttcgagggatgcagctaatctgtatccgtcgttctctcaacgccacaaatatcgttgttctctccttactccaacggaaacatctggctcggttgtggttgtcgatgccgggcttggcgtggtgcagcaaggcatggtcgagggtggagatggatgcgagctgacaggagggctgtggctgtggaacccatacgaagggaagaactgaagctgtggctgctggagggagaagctaatcatgtgaggtgcgggtggatttggggtgggcaatcgagcatcgaggttgagatcgtcacgaggacgagggtccattatcattccttggaggtggagcttgtgtccacaagatttctctgactttcgatcttcagcgccacaagtcacttattacaggttacaaatctcacctctgcgctacctttctgag

SEQ ID NO: 151279 - DNA, 433 bp, Zea Mays
gggagttcggtggtgtggacggaagagtcttcggatgatgatttggattattttgcggcattggatgtggctgcggcggaggcttctccgcgtgtggtgggtgctgaagttcccggtccaagtgttgggtgtaggcgtcgaagggcggtggcaaagcatagagtgaatgaggtggagggtggtcgtcttcgtgtggacaggactggcaagcgggaattgttgtcctcgccagctggggcgagtgtaggtgagggggaattgcgaagtctttttgagggtgaggagctgaggataatgctgtttaactatagggagatgggtattatcccgaaggttgaaccaatgtaaggtgtgatgccctcgttgtacgtatgtaactataatttgtatgaagaggttgtgtgccttcgctgatccggccttgtccgtaggg

SEQ ID NO: 151280 - DNA, 428 bp, Zea Mays
gctgaacgatcccttggggcacatggtgctctcggaaagcagtttcaaactctgtccaggtagcatctctgatggcagcgttgaaggtatcccaccaagctaaggccattccggaaagttgatgagcagccagttgaacacgctgattctccgggcatccgatggcttctaacttccttttaatcgtgcgcagccaatcatcagcatcgaggggattgctagatccagcgaatgtgggaggcttgaggctcagaaaatctcccactattcgggcgttgattctccagacttctagtgaggacctcagtgagtcgggtttggttggctagaacttgggctaaatctaagggtagctctggaggtgtggggaggtgggtctcactcccttctccatcggcttgtctttcagctcttaggggaaaccctgc

SEQ ID NO: 151281 - DNA, 392 bp, Zea Mays
accattgccatctacaccactttgctctccggccggatcccggagtccatcggcaactgcaccgagctcaccagcctgtacctgtaccagaattctctctccgggccgataccggcgcagctcggccagctcaagaagctccaaacgctgctactctggcagaaccagctcgtcggcgcaattcccccggaactcggacagtgcaaggagctcacgctcattgacctgtcgctgaattcgcttaccgggagcattccggcgagtctgggcgggctacctaacctccagcagctgcagctgagcacgaaccaactcaccggcaccattccgccggagctctccaactgcacgtcgctgacggacatcgaggtcgacaacaacttgctgtccgg

SEQ ID NO: 151282 - DNA, 484 bp, Zea Mays
ttatattacttcggctatgaagacccatttgcaactcatggaggttgtggtgcgtccggttgtcgtagaccgtccccctgaagactttgatcgtgctatcgatgatgtgccaactgttcctgatgctcaatctggccccaatttgatcccattaagtcagccaggagatggtctgcagacagatttagttgtgtgtatccctttggcacaaactaattgtagtaagtcttattggcattacatcttcattttggaccatgagcactttgctcattccatttgacgtgggactgatcatcttgtacatgttgcaggagagacccctactcttgtggttgatcctcaggccgaggcacgtggctgcttcggtgatggttttattgcctccaacagtcctgagtttaggaatgaagaggagccatacgcctttgctatggctgccgattcagatgatgatcgcccggttggtgaactcacagagagt

SEQ ID NO: 151283 - DNA, 306 bp, Zea Mays
tagcagccgaactagtagaaccgttgcacagcaccatggtgtaaaaaacatctgactgcatgggaccgcattgacatttctaaatgatcctactgtttgatgcgtattcatgacatgctgcaaaagtttgcactatatttctgcatgactgggaggcttactttcactttcgagctcatcattcatgtgactgaagcatgcaaagagaagccctttgcagtagcaaatgataggaacaccggtttaggactcaaggatggattcatgttgcaggatgatatatggtttcaaagatggatatttgcg

SEQ ID NO: 151284 - DNA, 366 bp, Zea Mays
accttttagtgtcttgtgtatttgctagacaaatctggtggcatgtcttttccccaatgggctagcaagtcttgactcctatatctcatgatcatgttttccaggactggtggaggaatgcagagcagcaggtggataaaagtcagcgcaaaggcttcaattctgctgtcatcttagtcgcttggtggctgtggaaacatcggaacacttgtgtctttgaggggcagccttcgtgtgcccagcagctgttgcggttcatccgggatgacaccgttaattggtctctagcaggagctgctgggttggcaggcatttggcctgagtagtagtagttgtaggatagttctttcttatggcagtttttat

SEQ ID NO: 151285 - DNA, 423 bp, Zea Mays
gccgcgtctggctgcctcggaggatccgcgctcgcagatccggtcgcttttggcaacttgcagtcaaggaacgagggagggaatggcgtgcctcctggggctagagagcagcgccgagaggcgtaggaccgtgtgaggtggaggtgagggtcgtggagccaccgcaccaaatcgccgagcaatggcgagcaggagtgggatctgacgacactgttgatgtggagcgacgacagaagagtgcacgaagatgagaaatggcagatggatgaggcaataccgtgcgacgatgttgggggaccgagacgccacgcatggagacggcggtgtggcaggggcggcggcgcttggagatggcgattgtgggagcacacgacggcgagagcgacgaggaaatcaattagggttgctagatgttcgggcgag

SEQ ID NO: 151286 - DNA, 415 bp, Zea Mays
taagacctttggggacctgattcgggacaaggtggagatctacgtcgatgacatcgtggtcaagactagggaggggtcgactatagtggaagacttgaccctagttttcggcaagctgtgggaacccgcaccaagctaaacccggagaaatgcatcttcggtgtctccgtagggaagttgctagggttcctggtttcataccggggcattgaagctaacccggagaaaatcaaggctattgaggtgatgaggcctcccacccgaattaaggacatccagaagcttacggggtcactggcagcccttagccacttcattttgaggttggctgagagggcactacccttcttcaagctcctgcggaaatcaggcccatttacctggaccgaagaggcggaacaagccttccaagaat

SEQ ID NO: 151287 - DNA, 394 bp, Zea Mays
aacaatatagatctactacctgtgccgacataagcatcactaacaccatattgttttttgctgaagtaatggctcaacaaacatggttgtacgcacgtgttccctgtagcacaggtattggctggttagaggtcctcggaaggtcagatgggtctacttcgtcttcaccatgcaaaatgcgatgggcatccgttgtcacaaagactgggcaatctaaagaggttgcgtattttttggcccgcaagagaagcattgcaaattaggacgggtaccagccatcgcatgcataaacaaagcagcgaatttgtgaggactaaccctgtgcaattgcactgtgcctcgggcgcttcgcttcgtggcatctcgcaacacgcacgcatggagaatcaggaat

SEQ ID NO: 151288 - DNA, 401 bp, Zea Mays
agatgagctgaccggagtacggctggccgcggtgaggttgagtttcgggtgacggagaatggatttgggggaaatcttaaattcgagctctcggaggcacggttgctaacgattgctggtgatgatgttacgcagctaggggagggctcaatttataggcggcttcaccggtggcgcacaatttggtcgagcaacgcggcggccggaggtggagaggattactggcgcgcgtgaatggctgtcccatgccgtggcaagctctccggtgttgattagacaacagtgggggtttacggcgatgcagtggaaaggttgagccacgcggcgcacggccgggaagcggcggtcgccggtgagcttatctgttccagtcgtagggtagagggggaagcacgggaggg

SEQ ID NO: 151289 - DNA, 447 bp, Zea Mays
caaagaatgcagttgaaaagaatacaaggaagaaaaggaaaggttcttctaataacggtagttattctccccatatcacttcttttagtagtttcaaatatattttaggttttttctattcaatcatacataaagtattgttgttaatatttgtactcctccatatatgacataggaacaaattcaaggaaaatagatcaaaatatgagacctgatcaggatccagaactgttgaatgtaaggcatagtggataatggaattgccatttttcaataatttgattatctgaatatttttctaaacggtttttacacaaacaactttggatgaaagtattggtgttaatatgccagaacaacatgctgtaaccaataagatgaatgctgattttgaaactacggatgctttgttgatgcaaggaggatatacaagtcttttacttggag

SEQ ID NO: 151290 - DNA, 676 bp, Zea Mays
tggtcgaaaccaaattcaagttctaaggaccatttccccccaataaattttacggttggtgatctgccaagctctgcccgcgaggacagtgaacggcgcggacatgtgctcgtgttccaatcgattggcgggctcctagttcaattcggtggtttgtcaagcatcaccaacatacatggacataagaacaacgcgcgaatcggatggtgtcttaccagaacggactgaccacggtggagtggtgctttacggtggcggagaccaatttggggaaaaacgacgttgcgacggctctgggtgaaattggaggcggggattaaggctacacggccgtaagaaactatgctttcaccgtgcgcaaacgatttgggcaaaggtggagaggtcagtgcgaatttgactcgatttggtttactgttatgtgggtgatgaccgagcctcgccgcgaaccatgggctatttatagccgtggaggtccggcgatcaacggacaagcaccccgtgagtcaccacgatgaggactagtgctaagcacgtggcgcacggcagtaatcgaccgacggtgaggtcttatccgatcagtcgatgcgcaagggaggtacggcgagcctagctacggcagaaccatggtgatggcacggtggccgccgattaaccggggcctgccacctccccg

SEQ ID NO: 151291 - DNA, 839 bp, Zea Mays
agttatggtacaagctgctgcaagctaaatacatgcacaggaataatttctttctctctaagaacaagggagtttctcaattttggcaaggccttcatcaggtcaagcatctgtttcaatggggtgcgatgaataagataaaaaatggggaagggaccctgttttggaaagacatttgggtgggaaaggtgcccattaaactcaagtatcctagattttttgacatatgcagagacaaggatgttcctgtgtctgaatgctatgagagaggagagtggaatatagatctggtgaggccccttaatgattctgattgttgcttatgggaagagcttcatactgagcttagggagcataatacctctcatgggagtgacttagtgttttgggctctcgacaactctagcagattcactacaaaatccctttacagatttaggaccgatggtggtgtcaaatctcctgtttacaaaaaaatttggtattgcaaggtgccgttgaagatcaagatttttttatggcaaatttacaatgggaaaatccaagcggccgcagtgctagaaaaaaaagggtggaagggtagtacgctgtgctctctgtgtggggacaaagagacagttgatcacatctttattcactgtgtcctctcgaaacttgtgtggggaagattgaaaaattttgctggttgggatcttgtgcccagatctgttgctagtatgtttagtaattggggagtgggaacatcccaggctgcctgcacttttcatctttttattgttgccgggctggtttggtccctttggtgcaacagaaataagatggcgattacgaaaaaattt

SEQ ID NO: 151292 - DNA, 950 bp, Zea Mays
ttcgtgagagggagtgcgaacggccagatggggatctaatcagacaagcgaacgaggacgggaacgagcacggggtgccgcgcccgcgatatccgtcgtccccggcgaggcggcgacactgctgctgtaggtgcgagccgtagctactggcctgccgtagctactgtaggcggcaacactgctgtaggtgcgcccgccacaattgcattcttacaattgcctctgattattgacaacgctctgcagatcagtttcctcttgcaatataacaaagttcaatcctggtagatgcacgaaaagacactccgcagaggaaatttaccatgaaactcaaacccgaacagcctcatatcattctgttcatattcgcacagccgaaagagcagagagagagagatgaatctatcttagattttgtttggatcttgtgcatccatccgtccactcgtgagaagggacaatgaaaagcacagggtttctgcacgcaggggcgcaggctcggtgccactgccactgccacccatgcgagcacgcactactgctactgtgatattatagaacagaaccatgcatgcagcctattgctagatcagagctcatctcagaaggcagaaggcagaaggcagaagccgaccgaccccgtatataccctcctgtctcactggttttagatgttttcaggggccttgaactatcgagacccatgcattcttagaccacactatgctttttggttggtgattcctatgttttttgttttttttttgtgatatcaaactgacaatttagtcactcaaccacatgtcatttttctcgggccccactttctattttagatttttgacatatgacgctctcgaacagatctcacatttttagaatcatccatgatctatagctcaccgaattatattcgcattgcattgctttatttaatttgccggtcttgc

SEQ ID NO: 151293 - DNA, 438 bp, Zea Mays
acacagataaatataaattatagtgttagtttacccaaactgcatgacaaggtgacttggttagtttcagaaatagatgtatctgaacagtgaaaaacaaggattaataaacagcagattaacataaactaaggtattatacaagttacagcttgcaaaaaaagtactatcctgcatgcttggaacattaaaatggaaacatcaaaacagtacttttccaataataatttacttaacttacaacatattatgcaaaccaaggagaactcagttattgatgtcatcaacatatcatgaaaacagtgtaatgatcaaaaaaagaatttgtaaaaaacactgtaggacccaatacccttgttggtaaaccgatctaagatctatatgttagcaaaagatatcttacattcagatttcagacattctgaagctgcatcccca

SEQ ID NO: 151294 - DNA, 596 bp, Zea Mays
ctgtaagagatgttcccgctctgagacctatatgcgtcatggagttctcggcggggtttgctcgggaggaagttgatctccgacgtgccctcttcgtctccatcactggtaaccgtcctatggtctctcctgacatggttttggacgaagttgcgcggtcatacgatgttgatcgtggcctgttgagaattcatcgatccaaccctgaggatttcattctttttctccctgacgaggagttagctgtgagggttttcaatggcggcagacatttccttgctcctggcttcagtctgaaattcaagcgttggtcacgcttcatccatgcgacgggtggctctctcccgttgttagcaaatgttgagctgagagggattccggcgcatgcttgggatcgctcaactgtggagcggttgttgtgtaatcttgggttgatcaagtcagtgcatcagtgctctttggacagaagtgatctcgatgtctttcgtgtcctggcatggtgggccgatgggtcggagctccgccgtgaagttgatctctttatcaaggaacccgtgcatggcttggatgagtcgtcggagaagctgtgtcttgtc

SEQ ID NO: 151295 - DNA, 331 bp, Zea Mays
gcgagatgctggacaatggtattattcaacagagctcaagcccctttgcttctcccattctgctggtaaagaaaaaagatggtgaatggcgcctttgtgtggattacagaaggctaaatgctcacactgtgaagaaccgctacccaatgcctatatttgatgagattgttgacgaattgggaggagcagcaatattctcaaagttagaccaccgctcaggctaccaccagattcgtatcaaggagggagatgagtataaaacggcattccaaacgcaccatggacactttgaatatcgtgtcatgccttttggtctgactggagcacctgc

SEQ ID NO: 151296 - DNA, 517 bp, Zea Mays
tgcccaaaactggcggacctgctcctccagagcccgcactttctcctccaaacgcttcctcctctcctctgcctcgagctcaagctcatccagcagtttgttccgccttgcccacatctcctccctgaaggcgaggtccccctcctgccgggtgaggtcagtcgctcgtttcgcaagggaagcttccctcgcctttaggctcccctcggcgcgagcaatgtcgctggccctgtcggcgagctcttgctgcagcttctgcaacttcgcctcagtcgcagcctacttgtcacgctgtttttccagcaccgtattataagctttcagcttatcatggagcgttgtgacggcctcctccctttgctctaagcgtatctccttcctagctagtcttttttccttctggatcacctcttcctctcggtcagataccttctggatgtcctccttgaagtcctcgcgctcctgctcaaactcggcccgctccgaggcgaaatggcaagacaccgccttagtgcgc

SEQ ID NO: 151297 - DNA, 834 bp, Zea Mays
aattcacattcggtttgtcttctaaaaccggtcgtgacattaactcatcaagatcaatggtgtgatcttgatgcaagttagtccgaagcaaaaaaaacatcatgggtgaaaacctgacccgcctcacataatctcataataaagtttttcctctatggttcctagcatgaacatgaaacagagctgtgttggcatcgccctcacccagccagctgatcctagagcggctcctcgcaatacgcttgagaggagagggcaaggcaatgtttcttgatattattgtgcagccatgcttcctcgttggacaaagtccgagagtcttgagcaatttccagtagatgaagaaactctgtggctccaattctgaagctttcttgcagtggatttgagtttcctggacaaaacatcaaaagggcaggaggatcctagaaccgagttccaagcttcctcaacagtatgcatgaagccttcgatttttggccaaaaggattcgaagtgaaatcgaggttttccaggcttaatatcatccagcccgagcaacagaagacagtggtcagagtcctccgaggctgcactctgcagaaggcagtttggaaacagctgctcccactcaactgtcaagccttaccaacaccggatcagcttgcagatttgaccaagtgaaactccgaccctgtaaaggaatgtccctcaaggctaaatcattaataaactttcgaaatctgcccatcattcttgtcttcatctttgtatataaggttaaaattcccaagaacatcccaaggtccctgacaagcatcgtgaatttctctcaactcctgtaggaactgcttt

SEQ ID NO: 151298 - DNA, 367 bp, Zea Mays
tatgcatcaattaacacttctatattttcttcatcaacatttgtctgctgccttggacgcttgatgggagttatgcttacctctagatcactgggtggatcttttgtgagcacaaaacttatttttctctcgtccacattatcagatatcatggcctcttcttggtggatgtaatcaagtgccactagcctagatcgatcaatgccacatcgtttcttgtaaaacaagaaatccctttcagaatatccaagttttgattttatgtacaccacgttgtaaaaggcaacataagctttatcaatatttaatgtgacaatctcttttctaggttgtgctcccatgcaatggaatttcaaggtccatatct

SEQ ID NO: 151299 - DNA, 492 bp, Zea Mays
aacccttctctaacagctcatctatctgcttcttgagttccaccaattctggcccagacacttgataggctcttttagaaatgggggcggtgccagggataagctctatggaaaattcgacttttctctcgggtggcatgcctgttagttcctcgggaaacacatctggaaagtccgacacaaccctgatagcctcgagcgggttggcctccttgctatcaaccgaaatctggtgacaatctcctttcgctgttttaggcatccttagctcagccactacctcctctccgggcggggacttcaatgttatggtcctcttgtcacagctaacattcgcttcatatttcattaaccaattcatccttaggatgacatctaccccaggggtgtctattactattaggttgctggggaaccctatcccccttatttccacccttacatttgagcatatcttatctgcttgcactttaccaccgaccgaattaaccc

SEQ ID NO: 151300 - DNA, 389 bp, Zea Mays
ggcgagggttgaggatgtggtggcgagtaaccgtgttggccaagtcggcaccctgtgttgaggaggcgtcccaaacacacactgcacggtccgcctgctatgtcgggttgtctcgagcacgattagcctccgagtcgtgctggctcatagccttagaaaccgcgcgcggggcggctcgcttagcacggcctatccgacatctataccagataccctgtatatttagcttggttacactacatggacattcttggagaggaatagatggttaggctagtaggtccccagcagcattctgaatcaaggaagaaagccccatggtctagccttgaaatctcaaccgcacacaattacacaaatgctacatggcgaataactttccaacaaag

SEQ ID NO: 151301 - DNA, 715 bp, Zea Mays
aagcgagtaagtgttgtggcccgactatcatgttcttctaatatgcttgaaggtgatacagggtatggcttcattaaatgctctaggatcccgtggtcaaatattttaccatacaagtttcatatattattttgatatattgttgattttttgctattttaggtgttcaatttggccatcaagtttattcttgtctgaatttgttctttcataccctaaaattttctccacaaagtgttgcttcgaggtaagtcattaattgtacgattagtgatttagtgtgagatacattaacaatataacttcatgtaagaaagataatgtaaatatgttcagcccatgctccaataattaaattctatcaaataataatgcaaatttatttggtccatttttgtttgctacgaggctaactagaatttaatagaaggatcactatttgtataagtgttgttatatgctctttgcaccaccatttgaaatcttgggattaattgtatacatgccactctacttgaggaagacactttgtttatgtgcaaaattacctagatcttctttgcacaaatagttaggtagtggtgtttactgtttttccttgcatttgaggggtatcctcagattttgttaattgtggttattgctctaacattttgcatgataagcagctaggttccggtgtcggtctggtgggcatttgtcttaatcatgttgg

SEQ ID NO: 151302 - DNA, 373 bp, Zea Mays
cgatcctcgtagagaaggatgaagtatggtatcccacgacatataagggtggtgcttgcaagtggagctgtagtgaggtcaaacaacctgttgaagacgatgttgaatttggatctaggtcgaccggttgttgtcttgttgagttgcttggtgggtaggtaggtcagcagccttgcctcgctgggttgcttggcgggcaggttggtcggcggcctcgcctcgctgggttgttcggcgggtagcctcgcctcgcctcgctgggttgtttggtcggcaaccccaagaatgaggccctttttttggactaaacattcggttgattcgatccacattcgttgtcaaacaatgtttcaaatcagatgtaagaataggc

SEQ ID NO: 151303 - DNA, 438 bp, Zea Mays
catgtgaggaggttgtgcagaagaacatagatagagatttggagtccttaaagctcgcttctatattctcgtagactagatcattcttttttaaccaattactcggtgtgatatgtgtgtgcatgtatcattttgtataacatgattattgagaacgaatatggaggagcatatatatgacatggatgactgtaagatagtcgaatccaccgctgccaatgtgcggtatggacaaacaggagcaaagttagttgcagaacgagcaaaacggcagttcatactagctgaggagcttggataggcatggtggcaaatccagtagcccgtaggcatgtatgccaagaagcgatggaatgatatgatccaggtcatgcatggtttgtctagttttcccaatattattacattacatcagccaaacgcatgcaatacatttct

SEQ ID NO: 151304 - DNA, 298 bp, Zea Mays
aggaaatggaactatctgaaacagtaggacaaaagataagacgagaacctaatggcagtagaggtacctagcaccgggccgaaacacatatttgcctcatcttgtattgcactgaacacttagaggtgtcttgctaactttattgaatacgcagttatttctctctttctacatttcccaaatggctagcgtgatcatagatcgcacaccctgtcttctggtctgttgtccacagttccccatctcaatgaaccattgtcccaagtcttccatctggctccaattagccagcgcccaa

SEQ ID NO: 151305 - DNA, 400 bp, Zea Mays
cttaacatccaaaattggtggtactaataaagaaaattatggagatgttagtgatatgaattctgattcgtattacagaagctttggaagagatggttctatggggttaataggattggagaatctcgaaaatacttgctttatgaacaattcaattcataaaggcgaaatgattctagcagatgatactgtagaatcttggaaatactagcagatgagtaccggagcaaccatctagctcgaaatgattctgttatagttgatacatgccatgtaagtttaaatgcccctattttttatactcaactcttcctgaaacagtgacatatttgtagttctttcgtgcttgtaacctcatcaggtgtaataaaataaaaggtatcaaggcgcctaggatcac

SEQ ID NO: 151306 - DNA, 329 bp, Zea Mays
tatcggcgtctgaatggttggtggttttctcacaaggtccaattcgaccaggggcatgatctggtgctgactggaccctacagggccatctctgcgtacgggagcgtctccgttgaaatcgacagctccaccacgacagactcctccaactcctacattgaacttggcatctccactgcagagatagactacgtcagaatcgacgtctccaagaaagatacccgccgcagcagcgacgacgacggcaggacaacgacgacgctgctctgggattgctacaacgaggaaggcgacgacgtagcgtacgacacggtgttgacgcggaccat

SEQ ID NO: 151307 - DNA, 559 bp, Zea Mays
tgagaaaggaagacggctcatggcagcggagcgaaagaacgagaaaggaagacgagacctagataccgagaaaggaagacgacacacaccgactcatggcgacggagcgagaaaggaagaaatgaccgagagaacgagatttagggttacctgcaacaccggagcaccggatccaacaaccacaaggcagacggcagagccgcagaggtagaggagcgagcttggcgcagatcgaggtttagccgtttagggttagggttagggtgcaccgttatagtgaacaagcggagcgagaaaggaagaggataggacagaccgagagaggaagaggaagattagcgtcggccatcggtcggagttcttctccactggcaccggccgccagcaagcgctaacggcgggcggcggcacaaaaatcgccaaaccgagtcgcccacgaccgcgagagaggagaaaggagcataacagggttctgaaatatggcacaggcgcacagcgcatagggcacatgtgagtgtgatggactcgttttttggtcgggccgaggccgtgccagcgc

SEQ ID NO: 151308 - DNA, 501 bp, Zea Mays
cacagatccttagggtttcctctccgctcgcagcacagcccgccggtaaaaggccaggggctacctggacggctggtcctggtggctggtgccttccattgtgagacgtgaagctaagccggcggcggcggattccttcgtacccaattcgtctacgctatgttaggtttccttcatttgattttgctttctcgtttgtcgctgtcattcgcccttctttcttgcctctcgttgcgtaatccttggagcagtgatgagatcttttcagtaatgatctttgagacgtgattatcgatctctatattgctacgttcttgctgagctcctagcgccaggcgcacatgcttttagttctatttgggttcagggtttaatctggttttcagcgtgtcattaccgaatcgttctggattcacaaacggcgaaatttacttgcctgcgttattcctggagccgttccatcctatccactacaacacagtttgaatatatgtgctaagg

SEQ ID NO: 151309 - DNA, 310 bp, Zea Mays
gaagatgacgttgcaaatatttcagacttgtagagccctcgagcacctccatctcttgttcagttgcttatattagtcatatgttccctatgtttaaatttgatagtagattgaggcaacatataaacttcaggtcaaaataagaagagataaaggaagaacaatcaaatgagaaaccttttcagtcagtatagaatgacatcttttttctttcagttcaggttcagcgacacatgcatgtaagaatacattgcagactaatctttgttgtggcctgagtgtgaattattttatttttgaaaaaaaacag

SEQ ID NO: 151310 - DNA, 555 bp, Zea Mays
ctgattatctcgatatccccctcaaagatagcattaaaggatggcgcttggagtggtttattgttgagaatcacggaaattctctccccccacggtcagggagacagccggacgttcgcactctgagctggactgaatccccacagaccaggatgtggctgaggcaggagttctgctagctgaagttggattgttgaaggagaggggtctgactgcagaagctgtggttgctgactttgtcttcaagaacattcagccattgaaggatagggcatacccggcctacctgtaccgaggtctagctgactccacccgggtcaccaataggagaattcctgttgtggacttggtgagccggcttgaaatgatacttaggggcaaggtgtcaaatgttggtgcccatgttgcctactcggcttggaacttgcctccttccaaggcctttacccatttcgtgtcaagtcctcctgctggcgatggcggtttgggccttagagtgcgaccctctgccgaagaagttagtgctttggttgcttcgcttgaagaaattcctga

SEQ ID NO: 151311 - DNA, 785 bp, Zea Mays
catcgacgacgactccatcctgcacctcccatctctggcccttttcttcgcctctccgtcccactccagcgagctgctttctcctcccaaaatataatccgatccacatgaacaataagcaccaccatcagcaagcaagcaagcagcaggataaattaacttaggagtacgtacgtgagagagaaattaaaagaaaccccaagcgcagagagagagagcgcgcgcgcgcggcagcttcagccttcagctatagctgcccttttcgtctctcctccccacatcccagaaaccattctttactcccctccaagaaaacaagcaccacacaaaccctaaagaaattcagcgcacgcagcaagcgcgcctctcatcctctccttcctcgccgtctactattttcatcatcaccgccaccacttcctctctcgcgccgccaattattaatattatcggtactgttgtgtagccattatttttactttcgcttatttgctactatactccttactgacatataattagttcttctcctaccctagaaagatggcaggcctggatttgggcacaagctcctacctgcaccaccaccaccaccagtccctgcacctccaccacgaagacggcggcggccgcgcggggggctctgacgatggccaggactcgctgtcgccgggatcgggcggcggcggtggtgccccgcccagcaccatcggcggcggcggggaggtcgtcggccgccgcccgcgcggccgcccgccgggctccaagaacaagcccaagccgcc

SEQ ID NO: 151312 - DNA, 611 bp, Zea Mays
acagaacacccccacaaaatgcgctataaaagaatgagcggaaataggaggcatcgtcatcactgctgcccccaaaatcatgatcctaaaaccccacgcgctccggacctcagaacccaaccgcaaataggaggtcgggcgcctcagccctcagtgctcacacggtcacaccacatccccctacgctgatcaccccacgcccccacatagcctcgcgccctcgaaccaaaccgcatcccgacgggccagctgatgatggatcagagaagcacgtgacgtacctggtcgcgaggcatggcggcgggtgttttcagcagacgggcgccatgggcgttgccgcgttggtgagtgggaggggcgcggcggctgcagcgagcgggtgatggcaggctggtcggcgaattagcgggcgggtgtgttagaccgtggggggcggcggagggaccaaaacactactgcggccatttctgctattcgtggctgagctgcactttttcggccctaaaaccctcggagacgaggagaggtttgggccgggacgatgggaagtatcaaaatatctatgtggtcattttgctgatccgtccttaaagatcactctatttatggaa

SEQ ID NO: 151313 - DNA, 898 bp, Zea Mays
aatttctccaaatctatgctactgttatccttgccgccaacagtgatgaggaggtaatgacaaattactttcaggtagccttgatcggctcgacttggtcatggctcatgaatctcctagaagtcttgttcggctctttgaaggaactctgctgccaatttgtgtctaactttgaaagcacctactcacgacccgatgtggagttagatctccacgatatctagcagcagcatgggagaccctgcacatgtttgtgcataggtttgagtttgaacacaatcccccgcatcacctcatctttagtcgtcaacgcattctgccaagccatgcgagacggaaagatgcttcagaagattgccatccacaacatccaagatgtcgaggagcttctcaccctccctgacaagtgtgctcgggccatagagggaagagcatggcacacacctagggacacccaattggggctatatgggggtcctcatacaccaagccccaaaagaagaaggcttcaggggcccaccaagtctgcgtcgctgcttagggcggtgagctgagcctcgagaccaacgtgtagtcccagttgttgccatagagcgtcagaaagcattgccatatatcgaggataaatcttcacgatttaactatgtgtatggtagtcaaagacatggttgaacacttcaatagcgagcaagctagaggcaaccttaggatgaacttgaagcgcctccgataggcgatgatgcaatcagaatggcagcacccacgccctcaaggcaacccctaagggctgaacaacatgccttttaaggcaaagcaggtggacctgggttttaggaccccatgcacacaatgaccatgatctatggggccatcgaagagctaaactcatgatgtgctt

SEQ ID NO: 151314 - DNA, 455 bp, Zea Mays
ccccttacaaagaatctcgtcctcgagatttaggaagatctaaggaaaagatggggaaaatctatgcgaatctcttcttctctctcccatgtagcttcatcttctccgtggtgactccattgaactttgcacatctttatcactttattccttgtaactcgagtcaatgtatcaagaatcttgataggatactccgtgtaagtcaaatcaccctaaacactgagctcttccattgttaactgttccttagggacacggggacacttctttagttgagacacatggaatacattgtgcacatcagatagattatcaggtagctcgagttgataggccatctctccgactcacctaaaaactctgaatagtccaataaagtgaggggacaatttgcccttaaccttgaatctcctcattccatgaagtggtgacacctttagactggcctggtaatt

SEQ ID NO: 151315 - DNA, 412 bp, Zea Mays
gggtacaggagccgccagatctaaaatcgtcggtccagattagaccgagacacacatgaaccagggttcattcccacacgtcggattcgaatcctacgcttcacattcaccaagcccgcgatctaacagccaccctttgatctaacaccaacggcgcggatcgcgctggcgaagatgtaagtcacctttttgatcctggccgcccaaaccggatcaacggcccagatcgaacgtggtaaggaggtaagacatgttataatctagaccgttgccctagctatcaacgaccgtgatgatccaatagcccccatacggattgcaagtcaatcaccaccgtccgtttcatgatctacggataccttggcatcgtctaccccacgacaccaaggcgcagtcgtcgcgccatgcccgg

SEQ ID NO: 151316 - DNA, 294 bp, Zea Mays
ctttaacactcttgtttcaaatactaatgcctacttaaacatttccgtttatatgcccatgaccttctggtctttggaaatcctttcctcttctgttgttaagtcgctatctttcggcaattccttgtctcttggtattggtatgctcatcttcttgaaatctttcatactctcatctttttatgcttacctttataccccaaggtctgtttaagatatttcatttttacatgcccttgaccacccttgtttttcaatgatccatgagcggttattttattttgcacatccttg

SEQ ID NO: 151317 - DNA, 605 bp, Zea Mays
gaagagaccatgtagtgtctctgaaatccgaagtttcttggggctcgctggatattatcggcgcttcgtaccaaatttttccagcattgctaagcctttgactagactcttggagaagggtgttctctttgtctggtccggtgattgtgaggtcagttatcagacattgaagagcaagttggtggacacccctatcctagctttgcctgagagcggtaagcgtttcacagtttatacggatgcttcgtgaattggtcttggctgtgtgttgatgcaggaaggcagagtgattgcttatggctcaaggcagttgaggaagcatgaggggaattatccaactcatgatctcgaattggccacggtggttttgctctaaagtcatggaggcattatctttatggcgaggcttgtgacatttacaccgatcataaaagtctcaagtatattttcactcagaaggagctgaatttgaggcagcatcggtggctcgaattgattaaaaattatgatttgtctattcattatcacccggggaaggcaaatgtggtggctgatgcccttagcaggtccggggttccaaaagtggccttgcagttgattgctga

SEQ ID NO: 151318 - DNA, 564 bp, Zea Mays
aatattgttaccaaacaccttacgggctcaaaactcaactattcactgaacctcaaaatttgattgtataagttcccagtctgggcaacaattctgagcagagattttcatccactgcatttgaggactcaagtcccttcagcaagactaagatcttagtgatcaactgctaacaacattaattgtttctcgtctaagtaaccttaatgaaacaaccattggaatttatctctaatcggtaatgaactcaccaaactgatcatatactgtgattcaagcctaaaagatgaaacatatgttcaaatgcttatgccagtgacatcagtgtaagtaaatggaagcaaagttacaagaactatcaattctacactacaaattcatctagagatacgctagttaatacttcaaacaatgccagagccatttgaaaaagcattaatagtcaacatcattcgttaatagtaagcaccaaatccaaaactgattcctgggttaaatctaaacacaaaactcaccacgacatttattagatgcaacatagcgaaaaactatgcattagactga

SEQ ID NO: 151319 - DNA, 612 bp, Zea Mays
cctcaacaccatgactcggaagtctatctttccaattcccatcttcgatcagttggtggatgaactttctcatgcttagtggttctccacactagacttgttggctggttatcaccaaatccgtttgcaggagaagagtttaaaacaacattttctacccatcacgatcatttggagttcaaagtgatggtgtttggtatttctagggttcccgttacttttcgaagtgctatgaactccactctctggcacctctattacggcagtgtgttattgttttttatgttcaacagtgtgctatctgaagatgaccaaagcatgctagagaagaaggtagaggaggtgcagtcttggatcttcagcttcaagagtgttgatggagggggaagcgacatagtagtgatttgaagtattagaaaaactttgttagagatttctcaacgctttctggagtgtttcagagtgttctactcttagctggtggttcaactttgctgggaggaaaaattctggaggtttttctttttctttttggaggagttcatggctcctgtgtgctgtctatattacttctagctgatcggttcactgattgcatcttggctatgctag

SEQ ID NO: 151320 - DNA, 639 bp, Zea Mays
actaaagacgaagacgaagacacacacacatagagagagatagagagagagcaacggcactggcaatgacaccaaatatatataatgggcaagcagcaaagcaaagccgtagacatgcagccccattagcttttttttaggggaaaagatgtcccgagctacatccgaaacggatgatggccacacaaatccacaaaacaaacaaattcattgccacaggcagcacaaacccaagcgcagttgggagagcaaaaacataaaggctacaacttagatagtaattctattaccaaattgtcacccctgatgagcgaagatttgcatcaccgacacttgtaacctcctgcaggtatccttcatagttttggcatcgtcttcatgcttttggaggagcgcccaagaacgacaccaataaattcctctgaagagtacctgcatataagtttgtatagggcttttatcaaaaacaatatcatttctacacaaccataatgcctagcaaatggcagtagcaccaaccaaaatcaacgtcctccacctagcatttacatttataagccaactattgtaaatgtcctcggtgttagtcggttcttttaggccaaaagtaaagctaacaacccgccaaataaacttagc

SEQ ID NO: 151321 - DNA, 498 bp, Zea Mays
gccaagaccgttgtgactgctgccgcgagtgcgaatgtcgctgctctcgcctagtagcatgaaagcactgttgccgatacccctcgctaggcagcttgctggggctgagcgtcatttgcttgtctctcccatcctgaagcctctcccagagcccccctatggtcgccccttcggcgtacgaggccttcatcatcaccaatctccacgccatggcgacgactgtccagagcatctgttattggttcatgtcaacctcgaccctatttcctccacctacgttcgctagcgcgacctcgtcctcctcaccctacaacgctatgccctggatgatgacgccctcaccaacatggcgacccttactatccctcctggcaacagatggataacatggagctcacagtttgttgacatcttcactaagggtcttccctcgttgttcttggagttttgatctagtctcaacgtatgttgtggctagagattcacatgtgggggtgg

SEQ ID NO: 151322 - DNA, 372 bp, Zea Mays
ttgtacccctctcaaccaagtaggtatccgtacatcttaactcttaagaataaattcaggaaggttttcacctaaatactgaacactgattgtgtcttcgtgcaaactatcaatggtgtttctgtgaatcctcaatgtacttatgtaactaaaatatatcgagggcctacgatcaaacttctctgccagaacttgtaatgggctgtataccaaatcaggtcttcggtgcacttgctgtaactgtgtttacacatgtgagtatgtgacaggaaactgacacaaaactattttttgttgaaagctgctaatgctcagtccttagtctacattcaaaaatggtaaataacattattaaaaccaattacttgtcat

SEQ ID NO: 151323 - DNA, 610 bp, Zea Mays
aatctagctgcggatcgcctgcaccgttttgattgctaatgttgtgccgtagcacgatcggcctgccgagttcatccagattttgggcttgctagctgagcgatttgcctgtgttggtgcaagtgtataacgtatctctgccgagcaatcgcaccattttggaactgacgttgtgcgtttcgttcattgagtataagcgtcgttattcagctatcgctggatttttttccagattgtattggggggtttggttgactcggcagggccttggtgtattgttttggtcacggcaagatcgtgtgtttgatatatttgttgttgcatacatgtcggccacgagctccctgcaacccaccacaaccaatcatcccactttaagctgcaaaactaatacagctgctgagaataatgaaagagccacagttggtaaatgtgtcttcctgctggttctgtacgcatctctggtcagtagtttaccttgcagagggtgacaccaagtgtatgttactatgcatagaattagttagttacaatttgcattaagacgcccaatcttccatgtaagagactgtcctaaattcatatgaaaccagtagcagtaacactctct

SEQ ID NO: 151324 - DNA, 465 bp, Zea Mays
ctttgaaaaagcttttgaaaactaccacttcgtcatcttttggctctgggatggtttcttcgccggcaaaacgaagaagcttcttctctgtctccccgaagtaaccgagcttcatcatcatcggcacatcggcctcaaagacagtagatttttcaaaatctaagtggctaggctttgatgggactagagtgttgtagtcttcctcttcatcagcattttcttccttaatatcagcttcttcagcctcagtagtatgtacatattcgtcaacagtcccctctgtcacaaccaatccagattgcttcataacttcagaaatcggggctatttcggtggcttcggcctcctctccgtcacgggtcactctagcagttgaacgtactctggccatcaggtgttgaatttcttgcagttcttacgaatgttgatgatttttacagttttgacgaagctccctcttatgcc

SEQ ID NO: 151325 - DNA, 302 bp, Zea Mays
gtaactagagccgtccgatcctatacctgtggcgcagattagatcggcgccatcgtgaacgggtactggatcgcagccgctggatcacccatcggcggcccagatctaaatacccccaaattcaatcctatcctaccaattcgatcggacggccagggactcatcactccccagattctatccccgccatcggacacagatcccatggcccatatttcatcttctaccccagacagctgagcgcggcggaatacattccctacagcggcgcccaaaaaccggcgaccggattgacgcccaag

SEQ ID NO: 151326 - DNA, 422 bp, Zea Mays
accgaagtaggtgatcggttcttgatgtctgaaaaccaaagttttttaaaactgaaaaatcaaaccaaagtttcaaaaaaaacgagtccccgactttactcgatggagtagggctaagggtgggtcagtgcaaggagatatcgttagctaacgtggcctagagcgtggtcgatatcgagcgccatggttctatgattgacgattcagcagactagtcgagacccgctaaccagtcggttcagctggtaccgatcgtcttaggatcgtactagtcggtacagatcgtcgtgttcgagtctaggtcagtatcaaccaggtttgattgataccgaccacctactgctaatgcgacgtctcctaatttgctgatactattttaacggtttgtgtttcgatttatttaaaaaacttaaaactccaaa

SEQ ID NO: 151327 - DNA, 321 bp, Zea Mays
ctctggctttggtaagttcttaatccggtgcttgatcttgtgatctatgcttgtgatttgtgtaccaaccctaaaccctaatctactctactaccttcttgttctatgactatagccacccgtgagggaccggtctggtgctccggctttggtaagttcttaatccggtgcttgttcttgtgatctgtgttcgggccgatctagtgctctggctttggtaagttcttaatccggtgcttgatcttgtgatctatgcttgtgatttgtgtaccaaccctaaaccctaatctactctactaccttcttgttctatgactatag

SEQ ID NO: 151328 - DNA, 327 bp, Zea Mays
ttcttatcaaatggagaggattgccttcctccatgtcatcgtgggaagattataccgtcctaaaggagagatttcctgctgctgcaatctggggaccagatgcatctcaaggggaggatgatgtcaggaccgggtgaattggtgaagtattaatgctctaatgggcctgttaatctcgtccttgtaatcctagtgtttgggccggtgttgacaatcatggattgagtgggtggcactgttataagccacaccgtagcacttgctggtcaagaaatgagaatagaaaaatctacacatacctgtcttctccttccatttccttctgct

SEQ ID NO: 151329 - DNA, 775 bp, Zea Mays
atccagtatccatgtcaaattttgttgaaactgaaaacacaaggttcctgacacttcctgtgccacgacatgaacagaaaaaatactataaactgggtaaaaacatcaaaagttatggtcaaatgaacttaaccaaaaggcaggcagcagcattcggatgcaaagagaaggatgtgagaaatggtatatcctgttttcctgatattctgatactctcaaaaagactgaaaatacagatttcgccgaacaagtgtgtatttctctaggaataagcatggaatgtatgtgaccgtgatgtcataacataataatagaagaagaatcatctaacattgcatatgaaagattggattctgaacgaggatgtgagctcttaaaggcagggaacctcacaggggggaaaagagagagagagagcaaaatgataaatgatctgtggcctaggaggtaaagaatgatgcccaggcccagataagatgtgatgaatgaaaccaccgtgggaggaggcgatgatgaaacaacaggcagaaaaaggaataagatccggccgatcttgggaacccgatgttccactcacagaacgcaagtggagccaacttttgcagacaggaaactggcacatggcttggacaacgacgccggaatgaggcgacgctgttacagccttgttcactccgtgcgaatcctcagatgcgaacttagtacatttgtagaaagtttgcaagatcagccaccaagagctagctattcaccgtcatggacgccaagatcagcc

SEQ ID NO: 151330 - DNA, 388 bp, Zea Mays
atagtgcctcagttgatgatccacgcaattccgatgttcgccgccgggaagtcgggaggcaccgcccacacctgtcgtgtggagaatatgggaggaagcgttgatttttcggtggacggctcagattgaatgtgtgttccccttcgcaggtttgatctgagcggttggatccgatctgatggccctggtgggatcacgactatttaaaatatgggtcgtagatctcagaacgtacggttctgattagatcatgtgtaacgtttcggccaggatctatgttgatcgtagatttttgatcgggtggttgtaagctcatgttgctcaagatccattttggaaggtaggatcgggatccattgacccagactgcgtaccgattcataaccac

SEQ ID NO: 151331 - DNA, 928 bp, Zea Mays
ctctccttgtacacttttgcgaggagaacgatagctgcgagatttagggtcctaggatggagtaggcggcctctgctttggggggtgttctttaattcggacggtactgcttttgttctcagctggctgtactctctggtcaacagtttcatggtactgctaagcacttctgagttcttgcaagcaaatcctatttttgtcagcccccaaaatgttatcttcttacaactagctgttcatcttattgggcattctttttagtggctcctaaatcccaagagcttcagtttgcccatcgtctaagcagacatttgagctcatttagtcaacctgttagctcgcgttccgatggactctcgttttatgttccttatggagaattgagaaccttattttgtgtgctgaactctaggtagcttcagttgttcttacttatcctgtttccaatttttcttgagaaatatgtggtatgtgcatacggcacagtggtttgctgattctatcattatcaaaccctgacagagagcactgagatagaactaggcaggactcctttctggattaagctaataaagataacatccaagtgccggaaaacaaaacaaattctgtcaaaatttacactcctttagattccatctgtgcaaattattgttccgggtatctcaaggggatatgcctgagaaataaaggttccgctcatgttagttacctctgttaaatgattttgagtacagaaaaaaatcaatctgttgaacactgttactgatgggctctgacttaattttagttcagttcagaataatattatttccgaagtcccaggctctagccctcgactgtttcttctatcatgtattgttcactttgtattgacttaagctttgtaaacattacaaccaggatttcacttgcttgagctttggca

SEQ ID NO: 151332 - DNA, 429 bp, Zea Mays
gctgattcttgacggcttgttaagaagaatattccaggcagagctaacctccagtgcctgccaagcgtgtgaatcgccatcacgtggatctgcttccgcatgaactttctccagaaaacgccatgatgtcaccacggcacgaccactgtaagttatgtccttctaacttcatttatagcgctgtcaatcagccatgacccatgaatccatgaactgaaactccttccggaaagctcggttgggttgctgaagaagcaaacatcatgttttgactctttgcttcctaacaaaacaaacgaacaccgatccaatcttcctagtttcttgtgtaaggtctcttgggtcaactgcactgaagtttgccaaagactttgcctgacttcctagctcttgacaaacaaaactaccatgctctagcatcagcacgtg

SEQ ID NO: 151333 - DNA, 547 bp, Zea Mays
gcggtgctcgccataaattgaacctgacagtagcaaaaggaagtgttggatattgtgatagcacagacaaaattagttgccagacctcgaaatcacttaactaatgcacatgatatcacctccaaaaggtggactaaacttaatgcaacgcgtaaaactttaaaattctgttttttagaggtgtatctgtttgggaatagcctcaagagagactgatcatcatttcctttcaaacccagctatatttacaccaattcatgtgaacagagacaagtttcctattgctccacctacctatacatcatgctactccaccccacccacccccacgacagagttcaagttcacattcaaatagtaatgtactcaactaggtaatgctgtgattttatcatctgcatttacacataactgccattcaaatagtacacatgttgctgcatctgcacctcaccactctagggaaatcctcttcacattatgcacatatagaagctcgccttttcacctgtagttaaagctcaaaaaacctgataacaatatgatc

SEQ ID NO: 151334 - DNA, 468 bp, Zea Mays
gatgaagatgatcaaaagcaaagttcctcctcctccgatgatgaagaaatgaagatgttgatcaagagattggagagaacaatgaagaagctcaactccaagggcatccccatcaccattgaagatgttcaattcaataaccaaagtagaaataaatttcacgttttagctctgatttttgtgatcttcgcgtctgtgtgatcgtagcgagacgtagaatcattttataaaccttttactttattttcttactattggtgtactgttctaatatgagacatgttttgccttgcatgaatggattggatgtgcttctatgttgatgtgtgatcgagtttagacggtgagaatttcgtgggtgatcaagaatacttcgacagccagcaggatcaacaggagttcagtgaccaaggcaagtatagcatgggccttccttgatgtcctattcacctttaattcactattcat

SEQ ID NO: 151335 - DNA, 329 bp, Zea Mays
gtgggcgcagccgtggccacggacgcggtcgaaatgcaggaaggcgcggtggtggcaacaccggccgcggtggtcgctcgatcgccaatgatgagtgtcgctactacgggattacgggccactgggctcgcgaatgcaggaaaaagaagcgcgatgaacaggtgcacgccacgtaggctgacgtgcaagttgaagaggcggttgcgttgctgctagcggatgcttccatcgatggcgatgtggtgacccagcccagggatgtcacgtcaggtgcaacaacaccaccggaggtgcatctcaaggaggacaagttgttcgtgcagctcggt

SEQ ID NO: 151336 - DNA, 543 bp, Zea Mays
gggacgactgtgtggtcgcgccatgcttttgtttgagcttggtatttgtttagggcctatagggcgaagacacgatctccgtcgatgaggtccttcgaagtaggctcgtctacatcggggacggctgaagtgattgtccgtggtgacccatgttttatttcttgcggggtcatggcctccgatccatatagcaggcggaaaagggtgaacctagtcgccctgcactcagtcgtgttcagcgcccagaccgcttcaggtaacaggtcggcccacttgcccttcttgtcgtcgaggaacatcttcttgacggctgtgaaaattttaccattggcgtgctccacgacgccgttggattgtgggtggtacactgaggcaaaggcaagcttggtgccaatggagaagcagaaatctctgaagtcttggctgtcaaattgcttgccattgtcaactgtgagctcagacgggactccgaaccggcaaacaatgttttgccagaagaatttttgggcagtcttcgatgttatcgtggatactgccctcgcc

SEQ ID NO: 151337 - DNA, 1024 bp, Zea Mays
accgcgtcttcctccccgtaacaaatccatgcatcccgtaaccacctctccgtaatagccggcccaggtggcttccccagcagctattctcccgccgaggaccgctccagccgaataaagaatagtttcctgcgtgggtgacgtcagccgggcgtcataggtgacctcattcgtatacctttcactgtccctgacggctgggccgctacgtatacgcgtacgcgtatttccgggacgtgggcgccgaccaaaacggagaaccagatttccggcgctaccgccctgcgcgcccccataaatctcttggtcctggcagttgccgtctcggtcgccctggagaaaagcaccaggcgtgcgccgtcatattcacagccgctgagagaaacaaaggaagcagagagagaacgtgagtgttgttgtcgagagggtgttcgacaagtcacgcactggacgtccaggtattttctgtgcttgcggcgtggagcgttctgggcctcctcgccgggcattgaggacagcgcgggcaccgtcgtctggttgggtcgcagaccagggcgtgctcgaaagtggtgggcgcagctcggcgtgattcacggtaaggactccttcccccgactcgcgttcatctctagttcgtgtagtgtcgttcggataaggaaataggcccgggaggggcaggagcacgccgctccggcgggttcgccatcgtcgggtgggcggcgctgccgcctaggcgctctggggttgggggcgattacgctgggtcgtcggatcatgggtgaatggcggggattcgaagcacgggataccggttcgccctgcttgatccgggccgtcgatcctgtaacgagtgtatagggttagatcttggtcacctaaaatcatgatcgtcgatctgtgatcgtgcggtggccgttgcgttccggttcattaaaatgcttgtctaatctgagccctaggtttctaatcggacaactagagtttacccgtaccccttcgcccgggccattttgcataagagacc

SEQ ID NO: 151338 - DNA, 748 bp, Zea Mays
ttgcatattgcataagggtcgagtcatgccgaagttcaactttaacggactcataaccatgctcattagcttctccctctttttctcatccgctttcatgtaaaaccattcattagtccatccagtcgaccacttggtacgatagccaataacggggccttcgtatccttccgatacgcaaaattgtagaagccaaagttcctgtgaaggccatctgctctagccttcgtctggtactgaagttcgtgcactcggcagaaagcttcggcattcgcatccattccctagcttcggagagcccatatgtagacactaagtctaacaatagcattgggggtcagctgatgaaggtatatttcaaagttctttagaacctcccctatgatgtcatttagcgggaaccgaagccctgctctgaagaagctcttaaagacgataatttcgtcatccctcggctccggaattatatcttccccagcaaatcgaacaagcttgctcccatactccccaaaatagccaagttttttcatcatagtcatgtcatcttctgttatagtagatttttcaaattcaagatgactaggctttgtcgggtttagaatgttgtagtcctctttgctctcattatcgctctcaccctcaaccacagtttgtccagtttcaacattggaagcaccttcgtcagtaacttcccctggcacaattagacctgatcgcttcattacttctgatatgggcgctgtttcgg

SEQ ID NO: 151339 - DNA, 933 bp, Zea Mays
gcgcgagaaccgcgggctctggaggatccacgacttcccctcacgattcatccgctcgggagataaatactctctcggagactcgaaaagctacacgcacctgtctctctgccatcaccaggacctgtgagcgagtgaagccctgccgtcgccactatccttcgccggcgacgtggctagacttccgtggtgaaacccgagtgcctattgggtgcagaaaggcttcagctccaccgatttggcgaatcttgcctcggggttcctcgtcgtagttactcctccgtcgcggaagtcgctgtacagcgtggccagtcgtcgccccagcccttgggtatgatcctcaaccaccttcgtcgcgtttgtaggagtgtgtagcacctgtccgttgaccgttgtgattcggggcaccgtagcgccgggcgagagctcgtcgggctcctccgccatggcaacgcggcgccgccgccgtagggggggcggcgtgcggggaagatgcggcgcccaccgtcggatcttgaccggcggtcgtgattaaaacaacgtgtaccccttcacttggaggaatagcgaccatcaaattctaatcggacggtggaaacctaggtgtaggtaacgtttcggccaagtacattgtggacgttagatcgagatctgagggatggcaatgcataccggtttggatctggcagaaactaatccgaagcatcgattagggatcggacggatggggattctccataacccttcggcctctgcagttttataaaagagcccctgtagttttaaagaatgaacctgcggtacactaaagagataagaatccatacggtcaggtcctggattttacagattggaccctgagcttctcagtaatagtgagcgcagtccagttagttgttaaatcagataaaagaaagtagaaattgattttgg

SEQ ID NO: 151340 - DNA, 387 bp, Zea Mays
cgctcatcggagaggtcttcggcagggtgatcctctatctcctatgctgtttgtgatggttatggatgtgcttaacagtctgttcagagcagctgaaagcagggggctgttacaaagtttagaggaagctggggttcgtaataggctttcgatctacgctgatgatgtagtgtttttttgttaaacctatggttgaacacctgaattgtgttagattgattttggattgctttggtgaagcaacggggttggtaacaaatttgcgcaaaagttttgctataccaattaggtgtgatgggctgtatttgcaatgcagctcgggatcctttccgtgcagctatctggggctgcctatctctgataagaagctaaaaaaaagggagttta

SEQ ID NO: 151341 - DNA, 405 bp, Zea Mays
ccaggacaaggttgtagctgtaaagtaccttgattatcaattactaacttgtttggattcttcttgcaaacctttagatgacctttcagagaagatgtaccatttgtccttgtgtcacagcgaaagagcttgccacaatacctacacttggctctgtcttcccctccttcagttctaactttgctgaaatgttcccatacatctgaccttggagcaatagctttccttttcttgccatcgtcctctgttggtgcatcattgggctgctcttccttgcctttgtctgcatctgtcgctatcggttcttttgcgttcacttcattaacaccaacatcatcagtgtcccccatctacaagataaagttgacatttgagaacactacacagatctaaaagactaaaatg

SEQ ID NO: 151342 - DNA, 383 bp, Zea Mays
ccgaaattgtgagtctattcgggttcggttcctaaaatatttttggaaatttcggttctcatttttcagaacccgaaatttcacaaacccgaatagaccgaaccgaattaccctaatagaccgaatgcccagccctaccttctccattcgttcactctagaagctctgtttccgtacacatatgttcctctcttttatggcaatcgaccttctatgatgctctttcttctttcaatgaggcaatgatggttctactatcgacgtttctcttttcattaaagcccctccaccggcgtttctccttttttttcactgaaactcacaccaccatcgacatttctccttttttcacaaaagcccccatcctcctctaccaataaaag

SEQ ID NO: 151343 - DNA, 415 bp, Zea Mays
ggctgcggttggggaagagagagatcgaagagaatcagggtaatgcagatgggatcgatggaattcgtagcgccggcgttggaggagcttttgccggaactttccctcgaggagcagccacggttgcagaaccaatcccgcgagcgtgaccgcacccggaagcgacataccaagcactctcctcctccccgtccgtcgttgatctcggtacggtacgtgatggagatgggatcgatgggaatggatttcgtggcgccggcgttggaggagctgctgccggatctttcccgcgaggagcagctacggttgcaaaacaaagcccgcgggcatgaccgcatcttgaagccacataacaagcacactcctcgtccccgtccgtcgtcgttctcggaatggtacgtacggtcggcgtcta

SEQ ID NO: 151344 - DNA, 369 bp, Zea Mays
aatacaatttgttcaaaatagtatcaatgtatgttgccatggctctcaatagattgtagtacttctttatacacaatattttctgttattattccacatgaaccgtcatcattttctatcaatattttgagccctttcttttttgtaactcgtgacacagctacatatagttgaccgtgtgtaaacacctttttctttaaatataaccctacatttggtagtgtttgtccttgacttttatttatagtcatagagtagcaaaccttgattggaaattggcgtcgacataatgtaaaaggccatttattgcccttagttgtcagattaatgcggggtatatgtattttttcgccaacgtgtgtacctgtt

SEQ ID NO: 151345 - DNA, 656 bp, Zea Mays
gtccgaacgcacaacttggcctcccagactagaccctgcaggtcccgagcatgtatcaaaggatggctagtgtcagatggcgggtcctatgggtgtactactaatgctccctagccgaagctgtgtgcaggcccaggtcctagtcgaggctacctcctgggggccattgccaactctttcttaggtatgctagtctgcagcctcgacaaatcaagcctacatcccaggggccaggtaccaaggaggaatcggttactccacacacaacagggacaagtggtacatagataagttctaatactgcttgataaatagtactcaaaagtaccttacaaaaagcaaaagtattacatctgccttcaagtggagtcctagctccatctctactctacaggtatgaactacctccacagcagtagggccgcgtgggtagctagctccgagcggctcgccagcggaggcgaccacctctacaccgacgacagcgaccacctctgcacagatggctcgccagcagcgacgactacctcaactccgagcggctcgccagcagaggcaactttaaacacacactacaagccggggttagcgttataacttaaatcaagtctgggaaaaaggggaaaacaaatcaaatgaaaatcaagtgaatgaac

SEQ ID NO: 151346 - DNA, 683 bp, Zea Mays
gctgctagtaactcttcaacaagtcccatgccattttgcactcgagcattgcctaaacccagaatgtgttcaagagtcttgtatctgcgtggagcatcatcatcatgatctgcatcaaggtcgggggtcactgttggtggtgttgcaaactccacaacaccggttgttgtaggggtctacagttactgattccacctggagtgattgctgaagattggactggcatgtgcaatgtcgtggatggtgccctggatggtccagcaaagtttttctccctgactggtgtattgtccagctgctgatcgccaccaatttgcatgaactcaacacagaaaggattctcatagtctaccttctcggcatcaccccagtcccatgcccgattttcttcaaacacggcatcacgggataccatcacacgctttgtggcagggttgtagaactgccaagctttgctcccatgctcatagtcgatgaacacaatcggcgtgcttctgtcctccagcttcaataggtgtttggccccctgtttgacatgcaccacacatccaaacgtatgaaagtgttcaacatagagcttaaaaccataccatgcttcatgaggtgtgcaccctttaacactctgagtgggagattggttcaatatgtagaccaccgtcgatactgcttccccctagagccat

SEQ ID NO: 151347 - DNA, 343 bp, Zea Mays
gcggctcccgagcatcacgaccgcacctcggcacctgggcagccgccacgcgcagcccaccctaccacggcaccgtctctagagctaggggcgaccatgccggagatggccattttcgccgtggacaagcccgccgcctccctcccttcatcatttgctgccacgatcggtgcaggtgctgtcgccctggacaagcccaccacctccctctcttcctctgctgccacgatcggtgctggggcctcggcggcggcgtcgagatctcgcgagcgacgagtgcgctagagacgggatttgcgcgcttggggatcgcggaggataggggcataaccgtggatatgga

SEQ ID NO: 151348 - DNA, 299 bp, Zea Mays
caaggtcctttttagtaagtgcatattcagatgctgattgggctggttgtcgtgatgatagaagatcaactggtggatttgcagtttttatcgggaataatcttgtgtcatggcatgccaagaagcaagctacagtatcaaggtctagcactaaatctaaatataaagctttggcaaatgcaactgctgaggttatgtggatccaaacgttactaaaggaattgaaggtagcaagtccacctgttgcacgactgtggtgtgataacatgggcgccaagtatcttgcatccaatcctgtg

SEQ ID NO: 151349 - DNA, 345 bp, Zea Mays
gctggcctcaacttgttcagttcattagggtcagactaagctctgtataatgaacttttagctcctacttggattgagcagtaataaatctctctagtgcatccctgtatccctgatttgtgtggtagctgaccacagttcctaagcctgtcatgatgatacacccacaaacagatctgcatgtgacaacctagttcatttaccaagctgaactgaaaatgttctttcagcatgttccatatctacatcccgccgcttaaagattaatggatatgagctttaaaagctttacatcattatggacccttgggccttggttaacctgctcttactatcgctttaaat

SEQ ID NO: 151350 - DNA, 319 bp, Zea Mays
attttgagggatcatcgagaaggcacgacagtttatcctatttgcatcgtcggtcattcaaccttagccggagtttaagagttgaagggaaccatatgctgtcacacccaagattggatcgtaggttcagtgtctgtgacccagttagcttgggaggcaggccaagtgattttgatgggaacttcccattcatgggatcaccagatgatcattgtatcgaggaggatacaagcaacggagcacatttttcacccttcccatatggctatggtgtctctgcacctatggaagaaaatggttatcatccaaatacaccgtc

SEQ ID NO: 151351 - DNA, 832 bp, Zea Mays
atcataaccaattgtgattagtcagatgacttgatgaccttgcattgcacattagctgcaactagacaactcaggcaatccagacaacaaggacaggggcaacaacactcacagtgaggccagaagtaaatcaggtgggcttggagggtattgagtgttgacgacgaggtgccacagtcaatcatgtgacaggggggctccacaagtcgttgatagccaggaaaccgagagacacgtccatggcagcagaggttgattcatgtggcagcaaggtgctgccagccattggtgaaaggatatgaagcaaagtattggacgatcatgagaaaggagcggttgcaccatgaatttggaagggggtcgacaagttgtatagtttcctggcgcaggatattttggccggtaatgggtttctactgggttgttatcagacaccacatggtttacggtctgctcaatccaggccaaaacaaatgtgattatgtcacattcttaactgatcatggagtagaacaaatgaaccaaacatctcctgaattcccatgaaatcaaaacacagtatcaaaaatcagttccctgcccaagtttttcataagagatatcagaacatatattgggtgattgagatgattaagtgcatgcttgtttgttaccggaatttgccatgccaaaagttttggcaaggagaagttgagaaaaaaaatgtttgccaaagatttggcaagccaaatgtgagatgttggcaagttttggtggcaaattttggccatgaacaaatcaggctctaaaaaactggcacatcaaggactaatgtagctcagaacatagctga

SEQ ID NO: 151352 - DNA, 633 bp, Zea Mays
tgtgtggtattttcatgctccttctagaacaacatgcaattgtcctcgcaagcatcaatcttttggtagttcatgccaagaccagcgatgagcttcttgcaatggtacaagtccttcggcatgttatgattcggtgggctgatatcaataatcagtttcacaaaatcgttgtaacagttgttggagaaggtgtactttgtcttcatcgccatgagacgtgttaccacccgcagtacgctcacattggttccttcatacactttagtctctgaggcttcaagaagcttgtagaactctctcacatcctctagaaaagcttgattattctgtagttctgggtactcattcctaatatcatccaacatctcttccattcggtctacatcctggtccccattcgactcaatagtatggtccacctctcctgctcatgccataccagatagttcggcataaagccatgtttgaaaacatgatatgagagctccacttttttcaactgaaccaagttccgacattttatacacgggcacttcgctaaacaagcatcaccagcaaatacgagtgccacgaatttatctgcaactctcacccatgcattagagtgcccatgagtgacactgtcgaatcatc

SEQ ID NO: 151353 - DNA, 437 bp, Zea Mays
acccatggtggtattcttattgcttggaaaggcgctgtttgtcaagccatttcttcccgtgttgatgattactcggtctcagttcagtttgctgggctggatggtatggttcacaggggtgtatggcccccaggaggatgatctgaaaatccagtttctgcatgagcttaaagacatcagggcactctgtacaggaccttggttgcttgctggagattttaatatgatttatcaggtggctgacaagaaaagctccaatcagttttcggagttttttggatgatacaagtcttaaagaaattcctttgcacggtcacaaacatacatagtccaacgaaagagcttctcgtacccttgtgaggcttgacagatttgtttgctgctctgattgggaagaattattcccagaatccctcttgcaaagtgcagcagcaggg

SEQ ID NO: 151354 - DNA, 755 bp, Zea Mays
aaactatttgccactttccattcggtgcaatcagatcccgtagccagtcgtctcccttatgagtcaaccaaacaaaaaattaagactggagagtcaatgactaagaacaaaattcatagaaatgtcaaaaagctcaaaaaattaagaaaagttcctatggtttcagaagagtcttgacactctgacacaataaacaaggttactgaagagtaacattagcagctttatatcggcattccatttgcctgcatagtaagcctatcaatcaagaaacctagataatgtgttcaatcatcatatcaacaacaatagtcatggtttctgaggcgcatactgtggatgtgtggtgctagagatatgcctggacgcctatagtgtaactaaaaccttgtagcgtctcttatgcatcaacgtcaaggcaaaacctcaaagtaaggctagcaactctgggaataaggcaaccaccaaggacttcatagctttatatgaggaatactgcctacgcagaaaaatcaataagcataaaaactgacctttcatgggaagctgaggaaccacaaggcctttagattagttgataaattatgccacatgcatgcttaactagataaactgtgtgtatcaacaaaatatgcaatgaaacaaaggttggcagaggcgcctcctaggccccaagtatgtatttgtagattatagaatgctaactgcaaatttcacgaattctagtaccaacccatcaacacattagttcccag

SEQ ID NO: 151355 - DNA, 393 bp, Zea Mays
caaacactaagagggatgtccaagatatggaagtgctgacattctcaagacgctgatcatagaggaagacctggtaacctgcgcaaaatcaaatagaaataaggcaccgcgagtgctcgagtgccccaaccagacttcgctatcgtcgtcgcacaaccactgtgcaccgctcgctgcacaacacccgcgcaccgcccgctggacagcccacgagcactgtccacagctcgctcttgcgtaggtcgtaggcgcgtcctcgcccttgcgtcctcgcctgctccgccaattcgctctcgcgcgcaactcgctcctgccatcacgctcaacatcaccctcgctcgtgccatcgtgcgtagcctcgcccctgcgcccatcccgtgacgcactgcccac

SEQ ID NO: 151356 - DNA, 292 bp, Zea Mays
ggaagctaatacacgttgctaggagcattacgaaacaaggagaactctcacctgggcaagcagagtgacagcagcgcccgaccacggtgtacgacgacatggcggtgagggagaactccgatccgcaattaaccattcacacgccgaatcaccaagcctgaagaccccacgaaccggcccccggagtcgccgtccatcccaataccacgcgcacgaagaagatccgcaccgccggtctctaactctctttccgtctacggttcccgttggtggtggctgggttctcggctag

SEQ ID NO: 151357 - DNA, 310 bp, Zea Mays
gagaacaacctgttttgatgaaggctccaacgaaaactatctcttgcctggttcaacgtcgtatccactactaggctgactaaggtatgccatctctccaaattagcaccatgtaggcctctcctgtaggagacattgagaggtacagaccctagcacattggccacagtagcattcttccgctgcactaggttatataggctcgggaatctatgctggagcgagaaatcccccagccatttgtcctcccaaaaccttgtgtcctgtccgttgttaactcggaatatcccattcgcaaagaagatatcct

SEQ ID NO: 151358 - DNA, 2141 bp, Zea Mays
taaacaaaaggacagctttgccaggtatagacatgaatgacatagctgctgtgttgtcactgatcatctagtctttgttccaaaacttagaaatagattagacatagcaaccatgcatcaattactgtcgaccatagtatgacaggttctgaacttctgattgtactttattgaacatcatagtacattttgcccccaccagtcttatcgcacagctttggagccccttcactcaaactcaaagaacacatcatcattaagaacatgaccctggacagcccatgcacgtcaatgatcccatcattatcattataaccatatcaaacagaagatggatcaacagaacagatagtaggcaattccactcaaatacaaatataacagaaccagatcgacatttttggcatgcactactaataccaagtgatttttttcatggcttgaattttcatgaaaagtattccaaaaatgcaataattatgtgcttcataaaagcatatactaaaaagctaattgtccaagtgataccttgtataaaacacatgctgatgttcaaagcaacttatatagtatagctatatttgcaatttgagatagcagcagttaaacgttaccagcatgcttccaataaatgtacgttcagggttacagaagaggtgacaaaacacatttgtggtataaaaaatggacagatatgagatttcagctaatgttactccaaaccaaagaaccatggacattgtctatctgaaaccaaacatacgagataataaaaagctgaatatttgccaatatcgtcagatgccaaattttgtaactgagcaagtgccaaaatcaatccagtataattcagaagatatactagtacgtagtggctgtagcacaaataggacaatatgaaggaaaatggttagtcaaacttcactagatactgttcaactttcaggagtaatatggaaattaccgtggattctgctcaccattatgtaagtgtgagaatttcactgatattgaattactgactgatgcaagcacacattttttgtttgtataacagtagcaatgtagcttgtaaacagtaccaatgaattagaactcacagatcagcacattatcaatgccaactgccatggcaatatactgtcacaacgcttttgcagaaacaggtaacatgcacagactgtaataaaataagaaaagcgaggaatgttacacaagtgacttgactagctccctaaagctaaaattatagaatggtaactgccttaggagtgtcaccagcatgacagagcacaagctccaagcatttcgaggaataaaaaaaaagcacttcaaacctgttgagttacctggtgtctgtcaagccattcgatgtaagacttggtccttttacgctacaaccatcttcctccagagatcctaactttttttagttgtagctaactagctatcgttgcagcaagatcagtttgtttggatgtgcctaccgatcaggtcaataattcaatgcacggtaaaaatgtgcatatgtcataaaacacaaaatgagattcacagtacaaaactagctgtctaattatttcatgacgggcaatgcagaaatgataggttttccaggtggagacatgaatgaccacaattgcttgattgtcagtgatttgctactccttgctccaaaacttacgaacagatcagacagagcaaccacatgtcaactactgtccatgataacatgacaccatctgaatgaacagtacagtgcattttgcccccacacatcctagattttagaactatatatttgtggaccctttactcaaaggacttagcatcatcattcaaaagatgaccctggacgacacatggatgtcaatgatggcatgattgtaaccatagaaacaacacccagagtacaaagccaaaggatggtttaagttacttcatccaattgcaaatgcaagttatcacagcggtcatcacatttttggtttgggctgccaaatatcagtatacagaaaaaaatttatattaacaatatgcaattagtatgacttgtatttcaataatgtacaactctaattttaaatatcaatgatcaaattgatatacatgataccgaaaaaaaataatgtcaaagtgat

SEQ ID NO: 151359 - DNA, 466 bp, Zea Mays
ttcacgtctaccagcgatgtggccgggctgctgccctagctccctctcgcacggagccgcaggtgtatcacctcgttgccctttgttgggaccccgggcatgtccaccgtcacgcatcgggccgctggtgtcctctggcctgccgatcgactagtcctcttggcgtccaactcttctacgctctccctcgagccatcatatgcttgtggtgcgctcgtcgaacccaactggcgccacaccatggaggattacgaggccctgctggcgaaccgtacctgggacctggtgccacgccccttgatgccaatgtggtcaccgggaaatggatcttcaagcacaagatgaaggcgaacggccctctggatcgatacaaggctcgttgggtcctatggggtttcacccaacgtcccgaggtggactatgacgagactttcagccccgtggtgaagcctggcaccatccggac

SEQ ID NO: 151360 - DNA, 500 bp, Zea Mays
ggcagtggcacctctcccagaggtcggtataatcttggatgctcagagacctgtccgtgctcgctcgaggcgtccccgccgaaccattcagactgatctttctgttgatgagccgaaaaagaagaagagacgtattcggcgagtatctagtttggatcagggtgctggtccttcggttcccaatgatgaggaggttcctgcgcctgaacttgctgatgctgatcccaatgggtgtggtatgactgctgctgatcccaatgggtgtggtatgactgctgctgatcccaatgggtgtggtccatctgttgctgatcccaatgggtgtgttgccagtgttgctgatgaagacgacgaagaggaagaagatgaggttcctctgattcggaagaatagtcggcaattcctcgccagtggggaaagtagtggggttccttctccggctttgtctgctcttgttggtctgcagaacatatccctggccgactttgatcagactctcg

SEQ ID NO: 151361 - DNA, 338 bp, Zea Mays
aaacaagcataaaggaaacaatccatacacaactaaagattacaacttatctcagacattggtactgggagcagctaaaaaggaaagacccttagctcctgcaaccatccatttctccctttcctcagcagtggcctctaagattgtagtgatatggggggtgggccgtcaaacaccactctgtttctgaacttccagatcatccaggctcccagaatcaaaagtgaatttacccccttcttggtcatatctgacacaatatcagcaatacgtttccaccactgtaggaagtttgtgtcaccctggagaggggcaagaatgtggagccgaaatttctg

SEQ ID NO: 151362 - DNA, 368 bp, Zea Mays
tttactaattcctttacttattttaaatacgctctggactgggcctcgataactaaaaagcataaggggctctgcgcaaaatattccaggactcagagcccaaacgagtggactacgggttgaatgtgagaaaacctagggtctcttttgcaattgtctcaaaccgaacgggtatcaattattctcagccgtccgatccgatcccaacggatcagattagactgagcctaccgcgaagcggtatgcgttcccggccgtcggatcaacggcgagcggcccagatttaaagtattgaatatcaatccagaaccatccgatgctagatcaacggtgcgcatcccacatccgaaccggtatccattaggttt

SEQ ID NO: 151363 - DNA, 426 bp, Zea Mays
ggtggcttaaggtgattaaggattatcattaagaaatccactatcacccagggaaagccaatgtggtggcagatgcactaagtcgcaaggcttcctgccattgtcttaaagtaagaactccggacaccacattatgtcaagaaatggagaaattaaacctgggaatgatacaacatagaactttgacccaattgaagcttgagtcaattcttctgcaaaagattattgatgcccaaagaagtgacaagggtatgaaacatattcatgagaaaatagaagctggcaaagcgaattttttttagaaaggatgatcaaggcattgtatggtttaataatagcatagttgtccctaaggatgcgggagtccgccagcaaattttggatgaagctcatcttagtcgatattccattcatcccggaagcact

SEQ ID NO: 151364 - DNA, 334 bp, Zea Mays
caatcaatttagaaccaacaattcgacttgcaaattttattcaagtcattagtgcactaaaattactacaaccaattaacaacgcattctccacgataatcacccaacaatttgcgttttaaattagacatcacatgagcactactacttttcatccgtgaccataaccatacgcaatttggctacaacatcccaaacgggtgcaagaacactagtttctagttttaaccccatgattgttccattaatcattttaactacttaatcggcatcgaccgacttaaccttcatctcgacggtctgagcaccacaattcacgaaagtctacctagac

SEQ ID NO: 151365 - DNA, 303 bp, Zea Mays
cacagctgaggcctaacttttctatgagttgatagtacgtataggtgttaactgaaaacaatatcgcttgaaagcagagacactgtgcataaatttttgctctggcgcaagtcaacatgactgtgtagaggtgctcaactgatagattacagtcctcagcataagcttcatggcaagttacagtagtaacgaagttgatttttccttgcaggtaacaattcatttgcaagttcataacagtccatttgtgtcccatctcacaaaaacgttaacttcttcaatagcagactagtacactacgtt

SEQ ID NO: 151366 - DNA, 275 bp, Zea Mays
ttgacggatgttgataaatttgattgaattgtattagacgatagatagtgattgaattgtatcctttttggatggaaataagggaggtagaattgcatcctttttcagatggaaaggacggagatattagacgactttgttgtgaaacatgtgcctctccaataaatatttcttcaaggttaggattcaattgttgtgaaacctctttgaatgaacagccatttaagatgccgttttcacctattccagatgtcttcatatggataaactaaggg

SEQ ID NO: 151367 - DNA, 317 bp, Zea Mays
catacctgcacaatgaacttgaggttcttctcccttcctactgaaaccatacaagcatataattagtcaaaatagcaataggttgattacatccatctattgagtagaataatttaaaagaaaataaccaaagatgataatagctagcatgaacataacaaaaaaatagacattggcgtatgggaaagggaaacatataacggtaattctaactccacatattacattcagatgattgtaatggcatttttaactaaataatgggattgtccagaaattgtaatggtattttttctcgaatatccagagagctgtgc

SEQ ID NO: 151368 - DNA, 1028 bp, Zea Mays
gctactgaccgaggatgggacaaatgagggaggcgtgtagtggtggcggttgcgagcactaggcggccgatgggacggagaacattgtcggatcggcaagtgacaatcgggtggacgtggtgagggttgcgatggatggcgaccggattatgcaccgacggctcgtcatgagactgggtcgggacacggggtggctcattggaagaggggaccgatgaaccaggctgcacacgtcgctggtagatacgagcaggatcgacaaaggtggtcgaagaggtggggtcgaaggcgatggggccgcgcttggcgtggaagagggcgtcaggaccgagggtagggaaagagaggggacgtcgacaggaccagcatcaaggaggaaatcaaggtcggtaggtggggtggagctaggaaggggaaacaccctcgtcgaacaccacgtgatgtgagatgatgacatggtgggtggtgagattgaggcactggtaccccttgtgatcggtggagtacccgaggaaaagacaatgagtggagcacgacactagcttatggagcgcggtggcagagatgttgggatagcaggcacacctgaagacgcaaagatgctcgtatgagggggaggccccgaaaaggacggagtgcggagtgggggcacagatggccttcatagggagacgattcaagaggtgggtggcagtgtggagaccctcaacccagtagcaagcaagaagggaggctgaaaaagtatggtgaggatgatgttggtaatggtgcgaatcatacgctcggccttgacgggaggtgtaaggccacaacgtccacagttgcacgccaagcgagagaaagaaggcacaagatgtggagttatcaaagtaccgctcgttgtcgcactgaagacctcggatggtgcaaccaaactgagtcaacacccacgcgaagaagtgagattgggtggtgaagatgtaagacttacgacagagtggaaatgtccacatgtcgagagagaagtaatctaggatgaccagatatcg

SEQ ID NO: 151369 - DNA, 429 bp, Zea Mays
gtcagggcaaagcgaagaggatgcagatcaagtgcagtcaccatctcagacaagcaagaggcaaggccatgagcttggaacatgcagtgtttggcacttgctggagccaattgtagtagtttctggttcgttacatatcacagtgtgatgccatgccgatatgcctcatgggccatgaggaccacatgtgaaccgggtccaatttgtcagtatcagtcttttcgatgagatgattgcgcagtgagataccgatgattattacttgtaaggcatctggaagctagcttttgtgcccaagctcgttctgtttaatctttaagctttaaacccaggctgatttgctgatatccgatggcacagccgcgccagctgaataaacctggccctcatgctccacgggaattggtcccaagaattcagcaccggcac

SEQ ID NO: 151370 - DNA, 857 bp, Zea Mays
cacgtaaagaggagaggaacttgaggccctaaatatagctcccataccacatctgaactaagctaggccagaaggcagtataacggctaagagggatgttccttacttccatttacggactatttagacaagaacttggcactccgaactactggaacagttgattccacaacaagaactgaacagaagccatcagtcttggcaaaggattggctgaacacaacaggtgcccgattcaccattactctaaagtccccatccttgttttggttctagtagagcaaaggggaagggggcagataaaggcaaaaattctggtacatatcaccgcacctgtctaacttcacctttaggtacagccacaagttggtacgagtcctggaggaacgtgaggtcaacattgttggatatgtaccgagacaattaggtcacggtatgggcacaaaatttctaaaggaggtactggataactgtatcttggcggcacccggccgttgaaaagagggcagagatattaggcagaccaagaaactctacaacataggaatgctttccaattccctggtgttagatttttctcagaagcagccaaccaaccagggaaaggttggttggcagccttcggtcagcttcaaaatgagaccaactgactcttgtagtcttgtgactgccatttttccaagaaatttataccacagaccgggaaccccagattggttgatgggtcatcggaacaaaatctctggtgctaccaggtagctaatctgctctgcggttgctgagcgtctcagaaaagcaacagggtaccttgctttgctgctaggtgacgatgacaccggttcgaaattggatgcgtt

SEQ ID NO: 151371 - DNA, 378 bp, Zea Mays
gacattgccaacatctagctacgacatgagctgacctagtgctagtttagtttgagttgcgacatcaatgaggcacaaatccatgccacactgtcaaccaaggaaattgaggaggaagaaaagcgcagaaaggaagagggagaagaggggcattgcactcacattgttccccttttaggacctgtataccagcgatgcctccccatcagcactagtgccgacgctgacagctgttgagctatgaatcacgcagccgtgtgccaccgctactgcccctatgcacctgatctacatcagcgtcgcccaatccgactcgaagatcccgccctgcccatcgccctgatggctgctgtaggccagaaacaatcctcctcctcc

SEQ ID NO: 151372 - DNA, 442 bp, Zea Mays
aattttctatgtttattaaaatacttctatatattgtgatggtggatatggatgccacttagatgtgacttgcatccatcgtgtcgtttgtatatgtgcgggtcagccatcgtgctgttagatttatttgcaggttttggaaacctccccgtacaggggaagtgctgccgatttttttgacatgcttgtttattttttcgagccgtaccgagccggtcacgagccaagccgagccgatgaggcacaagtatttcgtccaaccctacacacaccacgacgacaacggtgtattgatatggttccagagttacccagcgcatcaaccaccatatccatcatcgacaccaatcctagaaacctatgacttggccaaactagaccacattggcatagctcaccacaatggacacacggctagatttccacgattgacaactcccca

SEQ ID NO: 151373 - DNA, 496 bp, Zea Mays
cagatccagcagcatgcagtgaaacacactaccatcacctagctagctactacaaacctacctacaacgaggactcgaccgatcatcgttctcgagagtgagctactgagctacgatgaggtgcacactggtggtatggctgtctctggtcgtcatggccgcggtcaccgccgccggcgatgataatacgccggagccgaggccggtgatcactccaaagccgaagccaccacggccgtaccagccgaaaccgacgcctcaaccgtaccagccgaaaccgacgccacagccctaccagccgaagccgcagccagagccaggacacccgaagcccacacctcagcccaacccaacaccggaacccaccaaaccgaagcccacgccgcagcccgagccgaaaccaaagccacagccgcagccgatgccggagccccagcctggccacggcaaacccaagcctaagcccccggcgtactccccgggcacgcccggtcct

SEQ ID NO: 151374 - DNA, 317 bp, Zea Mays
ctaatcggtcccacgcgaactagatacgatagcggaccaatcgggtagcttcttacctgtagttatgacacagaccatcgcgactacgcaccacagcggaatttgtccctcggcgagcaatcggtcgatccagccatgtcgcctggtactggttagttcatgagtgccctccctggatctcagcgaaccccaacgagtgatcatcaagggcttgacgacggtatccgcgaaagacgcagacagcggctcccacagcaatactcgacggtggcgctctctatttctctgttcacgacaacgatgtggctctcggcgcg

SEQ ID NO: 151375 - DNA, 332 bp, Zea Mays
ggtctcgacagtcacaccgatgtgcggatcgcctccggggatggtcggaataggccggtccacgtgtgtaggcgggtgagctcgtcagcggcgagtgttccggcctgctcaccgcgcgatagttcaattggttagctcgggaggctcgaccaggtgacatagaggcggtatacggaaggaatttgagaatggcgcagagacttacccggtccacgttcgtcggtgagcggaagaagtccggcgagggtgattcggggtctccggtgaggctctgccgggtccgaggacttggggagcttcacgggtctctggcgaagctaaccgaatagctg

SEQ ID NO: 151376 - DNA, 608 bp, Zea Mays
gggcttggaagcttagccacgtgtttgagccatgttgtgctggcgccatcaaagccttctctaccgtgaaccggccgagctcaatcactttgcactacccttttatctagtcgctgcagggccagggcagtgaagtctcttcccgttcttgagttctagcgagagtgcatcgtgtgagtgttgtggttcatgttcacgtcggtgtttactctccccggccatcaggttcgatctgctcttgttcatcgcatgccaatctcccttttctggtgactgagctcatcagtttctcatctcactgtggccgtgtcgtctcgaggagttgctcacccgtgtcactcgcgttcagtaatctccttaagccagtgaagctcatggcactacccttttcatctctactgcagtgtctcgtcgggaacgccgcggtgccgccggtgaacgccgctgggaacggtctcgccgtggcagaccttatctggggccggttgcgtgcgtgatctggggttggtctgctctgtggtgagtcgcaagtgcctgctccaccatggttgggaactctactgcatcgtcgttccggcttaacaccatcgaagttggaagccgccgac

SEQ ID NO: 151377 - DNA, 484 bp, Zea Mays
ccaagaaccaacgggcaggttgagcgagctaacgggatgatattggatgcactcaggaaaaaggtcttcgataagaatgaaaaattcgcaggaaagtggataagggaattaccctatgtcgtttggagcctaagaacccaacctagccgagctttgcatggaaacactccttcttcatggtctatgggtcggaggcagtgctacctgctgatctcaagtttggggcgccaaggctgatctttgaaagcatagcagaagctgaggccaccaggctggaggacatagatgtacttgaggaagaacggctaaatgcagtaatccaatcagcaaggtaccagcagactctatggcgctatcacgacaaggctgtgcgacaatgatccttctcagtaggagatctcgtcctccgccgaattataacgggggagggatgacacaagttatcacccttatgggaaggacctttcatggtagcagaaatcac

SEQ ID NO: 151378 - DNA, 516 bp, Zea Mays
ggagccataatttcagttagctgaaataaactctgaacgcaaagactgacaggatgactttcagacagctttccctttactttttgtgttggatcaaacccaactcacttaaaggaatttgttcatgtatagatgatctccatttttattataaagatctcagctccaaactgcctagaaaagacaccatacagctccaaagtggagccaaattactgaaattcagaccagtacactttccccatctgaagttgtagaagtctgacagcctatctgtaggcgccattttctgctatttttgtgtagaaccaaaccagcctcccttaagcaaacttgtgccctgataggtaatctacaatttctctatagcaaatatggcccaatactccactaatcatccacaaaagggccccaatgtcagaccaattatacacatttctaaaatctgaactgcactaagtctgaaatttcagatttgaggataggacctttgggctaagtttttccaccagtttt

SEQ ID NO: 151379 - DNA, 1259 bp, Zea Mays
ggcgggcgcagctacgcgctcgtcccggccgacgagctctccagggcgctcgccaggtgagctcctccgcgcctttcctctgtgcctgcggcttgtaggggtcccagattttgatgcaccagctcaacggctgcccatccgtagcagcgcgatggtgcagcttgcagtgtttaggatgtactgtactgaatgaggcaatgattgatatagtatattcagctgtagtgtagttagttgtcaacgtagtgattgtagcggcaagtgaatctcgtcctgagtcctgacaccatttttagttgtgatcaattgggccttaaggttttcagtgttcacacgtgtctctagcaatgtcttaagcttgagcgcacttccccaagtccagtctcggtatgcagcaccgatcaaacctgaggcacgagtgttcagcattgttcatgagaatgctgtcctcatctagatgggcaaggtgataccaacttgctagggagatgagggcatgcgtgtcggagcaaatcctttattagttgctgacttggcgtgttgtgtgtgttttcgacacgtgtcctgccgttgctagttttgtcagaattccatgcacgacgagcactttgacgatgacatactaaaacaggacaattgcttatctccggaacactcaagcacaacataggactggtagttaaggcatgcggttactggtctatcaaatctagctttcaaaaccttacgtgtttcgcatgcgatatgcttatgaagcacatgaaaggcatgcacttagatttgtgctgcgtgttacttttgaccagattattgttgttccctagaccggctgcagatctgctataatatttgtgtaatcaaagccatgaatgaaattgtatgtcctgcttcatgttctttgaacttctcaattttacctctatcgtctcactatgtggctgcataaaaaccatcaaacatcagaatctgtaatccaagggagcctatcacgtcgcgttgtatcctcacatagaatacatgtgggcacactggtttcaactgcaacatgtatgcctatctggtctgcaattgtaattgaattgtaggtttgtcctggtttgtgaatagaagcattggttgggttcaacacacaggttatattattatctgtttatttgataagttggaagcacccttgagtatccacaaatgagtataccactataccttcattcatggagtcaaatatttctctttgttagagtatattgttagggttt

SEQ ID NO: 151380 - DNA, 837 bp, Zea Mays
gtcgctaagtctgaggccaatagtccctgttagcctattgtaattatagaatgtgtaattatagtaggccttgatttatggcatgtatgaggtacggttgcttggctctcacgccaccccttgcctatatgtactcacgtatattgatggaatacaatcaattattccactcttacatggtatcaatcgcggtttcgatccgctactcttccgcaacctattccgcgcctgtcgctgatccgatcgttgctccagtcgcagacgccatcgcctggagtattgccgatccaatcgccagcgttgtgctgtcaatccggcctcacacgacgccgcacatcaccagcactcccagccgatcgcccgccccgtgctgaccttctcgccgggtgtggtcgccggtcagctccttcctccactcccgatcactcgccccgttgctgccgtcaacatcaggctcggtcgctggtcccgtttcccatggcagacgacgacgacaccacggtcgcggccgacgccgcccgcgtagacaccatgcgtcaggccgaggaggctcgcctccgcactgctgctctcgatgcctacgagaaggcccacgaatctctctaggcgcaggccaccgccgtcgtcaatgtcaaggccctcatccccgtcgtcctcgacaaggccacggacacctacaccaagtggtgtggcatcttcctcaccgtgcttggcaaatatgccttagcacgccatgtcctcgacgacgaatccttccccacacgctcggcctgggtccaggcggactgctacgtgctgacatggatttacggcaccgtctccggcgacttacaacag

SEQ ID NO: 151381 - DNA, 628 bp, Zea Mays
catcctattctgtttcacaattacaaagagtcatgatgtctagaaagtttccattgaacttaaaccttaagggggccaacctgtgtaccaaaatgggttcattgtttgtctttgctatgcttagtttgacctttgttattttcatatatatgtatatacatacgtacatatatacatatacataaaactaggttgaatactgatggaatggtgctccatgctttcgaatttttgtacatctaaatctgtatgaaagtaaataagagcttaaggcagattaagcattccaagcttttcattgtagttatattggcctatgccctaccgaggcaaattgtgttatgcgttgctgaggtttactaacatgattttatcaagaaattctatatgtgaccacattttgcagatttgttctctgttaacttgcaagaacactgagatgagagttgttatttttgtatcacctgatgttcactaggcattggtacatgtgactttaatttggtgggcatatatgcaaagaaattaaatgaaataaacaaatgagagaagttctgagtagatagctacaaccagcatgacgttcagtatggttgcttttatcaccttggtgatgtctttgatagtg

SEQ ID NO: 151382 - DNA, 891 bp, Zea Mays
ttcggttcctcgtactcaggcaacatggcctctgggtgtccgcaggtacatacgagttaaaatcaccgacctttcgttatcttgttaattgatgtttttaattagaatttattcatgtcacacttaggtgtggtaatgcattacgatccaaatatcacttcaaaaaagctagaacacttaaataatgttagttcaaaatgaatagaacctttaaataatgacctattttcaaataaaataaaatagggtattcttgttgtatatgctgtttatttacaagaaatgaatgtgtcacatcacatgcagatgtgttcgacaagttccgggatgataagggtagtttcagcaagagtctactatgcagcaacccgagggggctcctgagtttgtataacgcagcccacatggcggtgacccctgaagagaaggtccttgatgacgccatcgcctttgctaggagccaccttgttgaggccatgattggtgagctcaggtcgccgatggtggagcaggtgtctcgcagctttgacatccctcttccccgcttctcacggcgactagagagcatgcactacattgctgagtacgggcaggaggaggagggacatgatgctcagatcctcgagctcgccaggctagaatttgagctggttaggtcgctccatctcagagagcttagagaaatctgcaggtaataacaagaaggacgtagccaacgcgcacgagtgctgagtatggcgccacaggagaggaggcctttgcgttcatcgccaacatgacagagaatgcatggaggaagatcaaccaggcgtgcatggagatggaccccgccatgctgccggcgttcaaggttgccgtggtcgacctgtcaagatccatagagatcatata

SEQ ID NO: 151383 - DNA, 619 bp, Zea Mays
gcagtgtcctcgggcccggcgatgagcaggtggcggcgacaggtgtaggctctagcggcgacgagaacagcgttcggcgagggcagctgcagactggaacgatgtcggcgtcgactccaatggtggcttcgtggtccttctacgagaagccaatgagtctggtctgtttgccgtttggggaagaaggagagcgtggggtttttgcaagaaacaatccacatcacatgacaggctgcggggggttaagtgttaaagtagcggtgaccatcggatcgtggttggagggacaggatgggagatgtgcatatgtgcacagccgtaggcatgtgcataagatacgctgccaaagatgaagggtcccaaagatgaacgggagatgaatcggaggcggaggccgaggcctcgctgctgtggcgccgttgtcaattgtcattgaatagctgtcccggagtctgcgcctgcacgttccgctcgttcgacgtcgtcgtcaccggctctaccgcgtcggcgcggcgcccccccaaagtttcccgctcggctttataggcctcgcacgtgtgaggtcaatgcctacttactcggccaggaattgtcctctcgccgtctacgagtctactag

SEQ ID NO: 151384 - DNA, 474 bp, Zea Mays
caccggtgaccctccctgcgctaagatttgcgccgccgtcgtctcaactcgtgctcaggatgacttgataagcgctcggagcacaccgccggggataagcccggccattaaagaatcccggccaccgtacaaagttccccgcggtagaacccgataagctcgccggtaaccaccgcctcccggtcgtgcgccgcgtggcctagccgttctacagcaccgccgtgacaccttaatgctgtcccatcgtcgccgggaagcctgccacgccgcgggacacgaattcaccgcgcccgccttcttcttcatttccggccgccgcgcgtcctcccgaaattcactggccaccgccttgccctcctataaattgagcccgtgaccagctccgtagggtcatcagctaaccagccaccgccaattagccacaatcgttcgccggagctcgggaatttcgcgttcgccccaaatcgggtttcc

SEQ ID NO: 151385 - DNA, 380 bp, Zea Mays
gaaggacgccgcgggggccctcttcgaccggatgtggggcccccacggtcgggaggcggttagggaacgggctgaccgggcgagggatcaggtaaggtttgtgttttgttttgtgttgtggaatgtgggtgtacgcgagtgtgctgaatcggtgtgctgcattgcagatggcacgtgctgaggaggtggaggacttcggacgtctgaacagcgcgctgtccgaagcggaggccaacccggtgatggccgaggctgaggtcgacccagcgccgctcccagaaaccggtgaaggttcccacgctgcccctgcgtcgactgtgtctggtggaggctcgccggtagcctctgtgccgatggcggaggatcccccgaaggcggcg

SEQ ID NO: 151386 - DNA, 456 bp, Zea Mays
tgcgtctcggctgatttcgtgaacatgcacctcctaattttcctcgtatgtagttgttactaaacatcacaggtgtaacttctatataccacactgacatgacacacactgaatattaggtatcttctgcagctctttggtatgttgctgaccactgctcctaataagccgtctatgcgttatccatccatccgatccggcgcacatagcatgaagtccaaagcctcctcaattccacatgtttctcacagatgttgacaccggactccggagtaataaaaccccacgaaactgcatcacagcaagaagttttcagagaattttcatctgctagaaattgttaccatgatcgactagtacccacctggcatctcttcacagcgcgtccatgccgcgcgcacataacaaaacttggtcttattcggttacacagggatgaatggagattaaatctcc

SEQ ID NO: 151387 - DNA, 740 bp, Zea Mays
cgaaggctgcagtcatcagttgatcctcttttttggtgtaatttcccagcacttcattacacactgtttcaatcatttctagccactcttggcaaggttctttaaattgtttctcaaatttaaaccgataaggaagtcgcacaagcacaagtcccttcctcgttccttttagcttcggcgtgctaaattcgctcaaagtcagagatgttttgttagccaaatattcttgaactagatctctggtgctgatctgttcggctaccaccctgaattctgccacaacttgttggcatggtgaccccgacgtcatgcgacacaagggcctagtcaacccgaagcttaaactcagcgggctcatcactagcgttttcaacttctccctcttcttctcatcggcctagacatagaaccactcacttttccaaccggttggccacttggtgtgatagctaagcaccggggccttcatatccttgcaatatgcgaagttagaacagccaaagttttcatgcagtccgtcttctctggtcttcgtctggtaatgcagctcatgcacttggcagaaagcttcagcattcgggtccactccttggcttcgaagggcccagatgaagacgctgagcctaatgatagcgttaggggtcagctgatgaagatatatttcataattatctaaaacttccccaatcatctcattcaagggaaaccacaatcctgctctaaaaaagctcttgaaaacc

SEQ ID NO: 151388 - DNA, 275 bp, Zea Mays
atttcgtggtacctgttagaaagaactgagaagagccgtgaattacggttgtagtagggacagatcatataagccattagaactctactccctcctcttgaaacagtatcaaaatgaaagccactctggtggcgtacacaggtaggagttctaggatacatcttagctgtttccacaaggacaggaaagccagaagattgtgcccataggaggctcagaaagttgtggtcatgcatagatatgttgtgtcaggatatgtcgaatccagttatctt

SEQ ID NO: 151389 - DNA, 469 bp, Zea Mays
tccttctactcacgcgccgtacgtgcgtgccgctcactcgtagatccggtgacgattcctcccctgcgcgtgggtggtgaaattctccctccgcattccaaatcttccgtctcgccgctgggatttgatttaaggcgaggcgaggtgatgtgagatgagatgcctcgcacgaacgcctgttggactagggagatgagacgattcatgcaagatttgttcctgctgctgtcttcctcctgctaccaagtggcttcttgggggcaggcaaggaattaagcttgtaaatccctggaatttgaagaacaaacatttgaaatcaaaagaaaaaaacagctctcttcgctaccaactttagaagcaggacatcaaattccaaattggctgacggattcttgctttacatacacaataacacaatacatgcgcctgtctgttgtgccttgcacttagtcactggttgttgctgttg

SEQ ID NO: 151390 - DNA, 723 bp, Zea Mays
tcctcccctcccctatacaacccaccttttaaccaactctcgcaaatggattcatttgtgaataagaggagataatatgaatgcttgtgtgcaacatctggctgacgtatccatactcttcaaatgtgcaacttaatcaatcattcagatgatagatactacatttaagatgtcactctgtgggataaaaagcttcaaatcactgattagaaaacagtaatccctccggtctaagtacttgtcaccattcactttctgtgttcttcaagttctaactcggaccattatttttttcttataatagtatgagttataatatctaataagcatggtattatgaagatagctttcaagaaaaacggcccatatggtttttatgttatcaaactaaatattctgaaaactattggcaataaaaaaaattaacagtttgaccatatttcggcaaaagcctcaagtatttgtaactggaggaagtactatctagctggaaagatgagcttggggatgagcacctgtactccaaatttactgagcttgctaggtgtaactggagcaagtagaagtaacacttcctcgttacagaaaaaacaagtagcgaatttattttctttttttaacacaatagttaatttatattctacaacacgcagatagcagtaacactcttcttatggcccaaacatatgggagagtaagtgcatgcggtaccaaatagtgata

SEQ ID NO: 151391 - DNA, 340 bp, Zea Mays
gcctagagcagaccatagacccatacatgttttatgactgcgcagataaacatcgtctattatttcaaggtgtttattagttggaagactgtagagtgtaattctgaatcagacattcttcaaatgtccaatgtattgccaactctgtctccttaacctaattgtatctattaattcgttcaatactttgggtaccttagcgaactttatcctgtatagctatttgtcagagtccatactatggttaacttgggttagctactatctgtgaataagggagtggagaatatagagttttggatggttactccacctggcctgttatacaagctaaaccagc

SEQ ID NO: 151392 - DNA, 647 bp, Zea Mays
ttctgccatccgcagcgggtagcacataatctccagaaatacccgcagaagaggaagctcccggagtgaaattaacagaagaaccccactgagccaccgggtgaggcagacgcggagctccaaactgagacggcataggagtagacggtgcaggagtaggcgcggccagatactgaggaaaaccctgcatcggcacgaactgagaagtcccaggcacataaagttgctgcggaggaagaggaactgaaaactattgctcagcacttgacatcatgttgatagtgccctgagaagaggaggaagtcaccggctcccatctgagcttcccattaggattcctcctacacaccacatccttgtggtcctgactgcagatagaacacttgccactccactggcactctgcacggcgatgcacatcaccacagcagaaacacaccagccccagcccgggcttaggaacagcccgaaacctctgagttcttcctcccgaagtacccgagtcagaagatttgccacggtaaggatggtgcgctgatgctgagacttgcccctcttgtgggctggacctcccgtgttgcccctcctcacgtcctgaccacgaggctgatcaacacccgaagacttctgcgactccatggtatact

SEQ ID NO: 151393 - DNA, 587 bp, Zea Mays
aaggcattgaagagctagtggtataagtacaacaaagaatggagttatgtcaaggcttacacgcggtgaagaagaggatattgccaagggtgagataagtaaaacaccgctctcaaattaggataagagattggagattttagataacagacataatgtaatcacaaggtaggatagagtgatgagaagggtaaaggagacaacaaacaaaacacaacaaaggatagagttaaaactcgcaagtgacaaagaagaggatacgaccaagggaaaagtaggtacagtacaatgctcagattgagatggaaaagaggatattttaaaggctagtataagataaacctcaaggtaagatataaaggtgataaggataaaggtggtaatgatgaaaagtataatccatggacagagtcgaggcaagactcacgaaatggcaaggtggagaaaacaatcaaggataagataagtgaggtcccgacagaagagttgaagtaaaaattcattaccgaagaaagttacaaggaaacaacgagattaccacaggtgtgcaagataaaatgatcactcatggatcattaagaaacaag

SEQ ID NO: 151394 - DNA, 440 bp, Zea Mays
acatgaagactggaatcttactgtctcagaggaggtatgctcttgatttactgaaaaaggcaaagatggacaattgcaagcctatctcaactccaatgtcagccactgaaaaattgtccaagcatcagggaacaatactcaatgaagaagaacaattcagatatagaagtgtggttgggggattgcaatacctaaccttgacaagacctgatctatcatttgtagtgaacaaagtatgtcagttcattcaaaatccaactgatgcacattggtcagcagtgaagcgaattctacggtatatcaaggggacactggaccatggccttcagattcagagatcaacatcaacaatgattttaggcttctcggatgctgattgggtcggctgccccgatgatcgacgatcaactagtggctttgcagtattcctcggaggcaat

SEQ ID NO: 151395 - DNA, 519 bp, Zea Mays
aaagcttacaaaacagggcactgaccacagagctcttgagggatataagagtataggacttacaacttcaatcagcactcgaagaattgcaggctccactcgaagcaaagcctgggcaagttggtcacggaactccttgtaaacctcagatgaacacagacgggtttccaaattgcggcgggtaaaatttttcaaagtatgtcgctgcagcgactctcatcccctgatcaccgtcccctatagccacatcacaaatagtaagaactaagaacataaccaccaaactttcagaagtaaataataactaacttctgattctgtttctctttcccgagtaaaaaaacatgagttgcaatcaattgaataatacccatgggccatggccacagttggtgggtcctatcatgtcccagaatctaaggttttcctaaatttggtctttccatgtgcataaacagaatccagacatggtaagtgccatctttcagtaaaatacaggagggatttcggtgctgtgcg

SEQ ID NO: 151396 - DNA, 550 bp, Zea Mays
attagtacctcccagtcaaaaagaacagatgcagcagttctctctaggtcttgcttcttagggctcttcaaatcatttccattaagttcagataagctcttcaaaaagtccactgtatctgttaatccttgaaggtccccatggagtatctcaatgtcttcaatacatctgtgaaatcaaatatgcaattccagttgcaaaatatttcactgcaaaacttgagatgtctgacaataacaagagaaggtactcacaatgctgcactttcctttgtagcaacattttgtgaggtcggaccgccaccagttttggtttcggacacagagtaccagtcaggaatgcctgcatctctcccaggaaccctttgaagtacatatcctgagaccatggcatcttgcaatcttcttgcaccactagcctacaattaaagatagccaggttggctcatattttaccatcttaagcaggattctaaatatattgcttccatttttctatgggctttccatgtttaatatatactggttttacttggcacaaagcatataaa

SEQ ID NO: 151397 - DNA, 333 bp, Zea Mays
ttcgagcaagctttggcgaggcatcaaccttgagggttaccatctgggttgaattcagacctgacgctcctcctagacatttgctggctatgcagagaagtaggagcaggaggtggatgagggtacggggcggtccttccatcgaattggaacccgtgcgcttcgattcgacttgccaagtctagttctgtcagtacgtccacccactgaataaataagggaagaattgaagctgctgagagtgagatatcagctgagttaggtggaagattgtatctcaactagtattacaagcaaagtactgagtgcctcaaacttgcctgaacaaccaag

SEQ ID NO: 151398 - DNA, 327 bp, Zea Mays
gaaacgtgacggagtggatccagctggcttgttgaagctttgtcccttgggtggaaacccaaaagatcgaactctctagtgcctatcctgctgttgagcttggagcacttggaatttcctcttgaggtgacccttttcttcttcccttgccctttccacttgtatggccttgtttgagaggtgcgagaagctgaggaaatcttggctggcaaggatagtcttgagttatggtctaagccccttcaagaaacgagctatcgtcttggcttctatgctaacatcgtcaggtgcataacgagccaattctgtgaatttgtgcacgtactc

SEQ ID NO: 151399 - DNA, 544 bp, Zea Mays
gtctagtttttttttcttcctgccggtgctcaattatttatggcaacctggtcaaagagctgcacaacctatactgacgacagaaattttttgtttttcttcatgagaaacaatccagcaacaaactgaataaattaattcctcgcaactttttttgcgacaaatgaaaacctccagaacatgcagttccttgctgtagtagctcatcgccacaaatgattgggcaccggcagcagaacctagaccaccaggtctgcagaaagccagaacagtgaccttcagcccacacatggccattggacgaggcgagttattgagcccagtgcggcaggcatgcctttcgtttcgtcccctaccaccgaaacctaacacgcatgcacgcctgatgtcgccttgatgcttatctgaaaacaatggctgcctgccttcctgttcaaagcaaggttgctctcagctgcccaatcattcattcctcacgcacatgcatgcagccgcaccttcagaaactgcaatcacccaccgagccattagctagacgatctgc

SEQ ID NO: 151400 - DNA, 1663 bp, Zea Mays
gtgcagggttgggggtggtcgtcattggaggaagggtagtcgtggggatggggtggacaaagggacgcccattggcccactctctacaacccgtgaaccggtcgcatctccatgtggcatggcctgtccctaggtggaccttccccgcttctgcctccacctagctggcacacctgacgatgcccaacccggggtatcctttcggcccacttccctctgcgccaccggcacctcaaccaacgttactactcctatcaccccactttgttctatcctagaatttgtggcctggtgggtgggatcaacagttacttgctagctcgttcagcacgatgaccctgactcctattgtcaccaactgagttgttgattctggtgcctcctaccacaccacaccagacgctggtatactttcttattcccacccacctctctcgtctcatccttcatctattattgtgggcaacaggaacattctcccagttacctttgtaggtgatctggttcttcgtgagccttaccatattcgcaatgttcttgtcgcccctatatcattcaaaatattttatatatttgtcaatttaccaccgataactcttgctctattgagtttgatccttttggcttgcttgtgaaggatctcactacctagagccttctcgcccgctatgatagctctaggcccctatacaccatgcagctgcctacatccacttctccacctactgcttctgctatatcaccgccttcatcctcgccgcaactgcacgcactgacttcttctagtacctccaacacttggcatcattgactcgatgatcctagccctgatgtgttgtccaagttgtgtagtagtctagtcatctcttgtactaggggcacctctgagaatctatgccacacctgtcagctaggtcgtcatgttcgacttcctttccctagctcatatcaggttgtgcatacttttgacctcatacactatggtttgtggacctctcctgttattagtgtttcgggttataaatattatctagtgattattgatgattcactcattatttgtgaacttttcccttgcgtttgaagtccaacacatttgcaactctcatgtacttcgcttgggtttccactcaatttggtcgcatcattaaggtccaatgtgacaatagctgtgagtgataactcctctaggtcattcttctctcatggtgtacaacttcgaatgtctagcacctacacttctcagaatgtcaaggttgcgtgcctgattcacactactaacaatatcatgtgctccttgctatttaggcatccgttcttgcttcctactgggttgatttgcatctgcacaccccacttttctctttttagcgccactccatcctatgaccatttggcgtctttgagtgtgcatgctaccccaacctttctgtcactgctccccataagcttaaccctcgctccaaccattgtgtcttcctcggttactcccggatcacaaagggtatcaatgtcttaacctcaccactcatcgcctattgatctcccaacacgacatcttcatcaagacggattttcccttcacgagtcccttccagcccaccattgacttctttcctgagttgaactatcttcttgaccctgaccccatggctccctatgg

SEQ ID NO: 151401 - DNA, 485 bp, Zea Mays
caggcagcatcaagatccgagccacactgaacaatatgatcattctgatccttgttgattccggtagctcgacatgttttataaactcagcggtggtgaccaaggctggcttatgtgctattccatgtcctccagtgcaagtcacagttgccacaggagacacagtcatttctgatgctatggtcaaggcaatcgaatggaaggctagtggacatatttttcgcacagatatgagagtcctgaacctgggaccatatgatgctatcttaggctttgattggctcactagtcacagtcccatgcattgcaattgggatcagaagctgttgcaatttgtggatcaaggggtgatggtacaattgcaaggtgagacagttcctcaagcatgtgcactcactgaaatttcagggcctcaacttcaccagttattcaacaccaatgatatttggtcatgtgtcttactcgatcacactacttccactact

SEQ ID NO: 151402 - DNA, 437 bp, Zea Mays
gtggcagttgctccggcgatcaacggtgagtaggggtaagttgtggcgatgcggtggaaagggtaaacacgcggcacaaggccggagggcggcggtcaccggcgtttccacggcggcacaggcagaccgcccacgtcgcagtgataagaatcacggcgataagctcaaatgtgtgatcctatccactcctccccgcgagatctttactttaccgaagttatctccccgccagcggacacaaatcccaacgacagcgtgaatcacggcgtgtgggtcatcggcggcggaggggaaagaggggtatcttctgcagtcactgtaccatgggaaaaatctgattcagtcgcctgacagatcatcttagagctccattttctctagaatttgcatgtgaacttcatcaaccctctgtaccaaagttgtagagttacaaacca

SEQ ID NO: 151403 - DNA, 889 bp, Zea Mays
ctgcatgctaacggctggttgaacgacatgaagctgtcctcgcctactgctgtccctgtgaacattggtagcaacagtgttgcttttgatcccatctaccgagcttggactgtgagtctacatcttacctactaacgtactgagacactcgtagtcgtagctgtaagagctggcattgacagccagtttccttgtcatttgcagcagaagtatccttcagctctgaacgcgtttgaaagaattgttgcctgcggcaaaggcaagaagattgcgctgttcttggattacgatggaaccctctcgccaattgtcgatgaacctgacaatgctgtcatgtctgatcaggtaatcgcgttgtagcatcaaccaatctcttaatcaaattaagatcgcgttttatttcactgatattttttttcttcaatatcatatatacagatgcgggaggtggtgaggagtgctgcactgcatcttcccactgcgattatcagcggaagatcttgcgataaggtggtgaacgcactgtagattatccttccccgtgtgggttatattttatacctgcactcatctctcttcctggccttttcaaactactttaggtgtttgattttgttagactcaccgaactgtactatgctggtagccacgggatggacatcatgggtccagtgggaaaaactggttctgtcactgaccatagaagcagaggcactaactccagtaagaagcaggtgtgaaaaatactttagtattttttttcaatctttatcacgtttagtgcaaagaagcaatgtatatttcttcaatctggagtttcttttttttctcttattaatgttttttttggtaggacaaggagatgcagatctttcaggctgctagcgaa

SEQ ID NO: 151404 - DNA, 370 bp, Zea Mays
agttgcaccatcttccacatctcctcaactaagtgcaattgaaccaagtcagcacacttgtgacctcgtgcaaatggtgccccacacttgtagcataaacccttcaccttgcgaaaagcatataaggatgtgagccgatcatcagacgatgtgcctgtagtagttttgtcctcccctgttgcagaactgctcttgatatccctggctgtcgaaactgaagccccaaaattcttagtataagttttagaatcctgccaccgagattccctcttcttcaccaaagctccagcttcctcctgcaattgggcaagaacagcagcagtatccacgtcgggaggtcgttgcaacataaccactgccttaatatcat

SEQ ID NO: 151405 - DNA, 565 bp, Zea Mays
gtggttggttgtttttgttttgtggcgtgaccctcggcatgtgaatcgttggtggccttcgggttgtgtggtggtgagtggtcagtagcgagggcaagcttgcccttcttggcggcgagggctgctctagcgtcatcgtcgtttagtggtgagctagaacggtctttttggaaggcatcgtgggaatagtcttcgtcgtacaaacgatgggcgtcaaatattgggcactgacatgcgctaacacgttgtcaggcggacccaaacactcagacggtgggggagagctcaactgcacgacaagacaaacgacagggaacagaagcttctcgttatatgtgtctcatcccgctacaggatgggggtatttatatgaccatctaggggtaggtggtccaaagttcggtcatatcctggtcaccaactatatccggagaatattacatgtaacggaataattgcagcatcgcacgcgcagcggccagtgcacaccgaataacacacccgctaactacgctgacaagtgggccctcggaggtgcctcgtggtggactgatgacgtaacggg

SEQ ID NO: 151406 - DNA, 394 bp, Zea Mays
ggggagagggggggcaaagaaaaaaaaagaagcactagcaaaacagtccactataaacccagcacgccacacaaacaaaacgctaaaactaactagaagctctttgcgggttgaaatcttctttgacgaaattggccacttctcgctcgctcttctcaagaccatgaaagattcttcgatttctttctttacaaatctcccaccaaaagtaaatacagagaccatcgaattccttgtgagccgcagttttctctacttttagtctgcacttcctccaccatccatagaccgacgagcactggtccaactttggcagagaggagaggttgtaccacgagctgagccaactccaacacgattttgtgaatatgcaatcttttgctagatggcccat

SEQ ID NO: 151407 - DNA, 382 bp, Zea Mays
tcagctaatgccttcacccgcttgaaacacttgaacgcctcatccttcgttgtcagaagctcaacccacatgaaacgactgaaatcgtcaacaattaacatgaaatagctcttaccaccgggtgtctttggtctgatctggccatagagatctgcgtgaaccaggtcaagtcctttcttagctcgataattcgccacctaagggaatgagtgtccctaatgcttgcccaatgcacagccatcacatacttcttctggacgatttaacagtggtatcccatccaccattcccttctgtccaagctctctgagtgctctgaaattgagatggccataccggccatgccagagccaggcttgatcatctgtattcgtcttcagac

SEQ ID NO: 151408 - DNA, 363 bp, Zea Mays
cgaaggcgttacgtacttggtctggtgtatttgttatgttggtctggtgcgcatgtagtcggtctttgtgcggacagtttggtgtagtcgttttcgcacttgtttaagcttcatccggctgcacccttaggcaattgttgcacggatagtcttcgcggaagacttcgattcgtcgcacttgttgcgctagcccggctgcacccttaggcgtcttctgcacggatagtcttcgcggaagactacgatttttcgcacttattgtgctagtccggctgcacccttaggcgacttctgcacggatagtcttcgcggaagactacgattgttcgcactcgttgtgctagcccggctgcacccttagat

SEQ ID NO: 151409 - DNA, 2137 bp, Zea Mays
cctgacgctcagtttctagaaagcattgatgcatttccttcccttcttgtccttattttagattgctgtttactttaagacagagccttattttagctagctcctgccactaataataatcctttctacattcacattgctctgttcctgtcccaataagtccctgccgctctccatcactttcttcggtccctccctcccgtctccttcctctcttcctgcatatatcctcgcacgtcgcccttgctgccatggggccgtccaatttctctgagaatcctaatgtcctgagagggattgcaggatcctcttggaccgccccccgcttcccgcacacgccatccaacagcataacaaacacacaggattgctccgcctctcggaatcagatagttcttggccgcctttgttgtgatcgtggccacaaggccccaagggatgcaggtcgcgtcgattgaatgagaagtaggtgagggagatagagcatggttgaggatggcgccgatcatacttcaccgtgcgttgtccttctccatcccgttgcttcatcgccgtgatgtgtcgtcgcccttacaggtcttgatctgatcatcttctacaaccgatgaatccatggatatggagacctggattgtaatgcaaaggaatggatggattggccaattattgatctgaactaaatttttacaggcctcggatgtgtcgaacagacctgaaggcctggcattattgacgagaattgctgaggacactgactgctgcgattctggacctccattgccagaccactcgccgttggagaaaagcctcatcagcaagatcctccgtctgagaggtgttttggatctgccatgtcgaagttcatgcgacgcgttggatcaggttcatgccaaaacttgacaccatttcccgttttgacagacatcgtgatgggcgtatacaaattgttgttctccacgcttaatgcagttgcttctggataccctgggggttctgaaggttgcatatcccaaatgcttatcaggtgtatcaggaaaccatacatcttctgtacgggaggtctgtcgtctgaattgaacccctttatctgtaccctacttgcagaacatctcctggacacatgttcataaaaagaatgctatccctttttcaccatgctgtgttaaataagcctgatccaacatctacttctgaaaaacaaacagggacttgttcacctccatcaggtcctcgtgttggttcaggattgctactcgaaaatcaagcagctgcctaactctggctctgagaagcaaacaatcatggagagcgagagcttagaccatgtaggtatgcagtttgacttgcccatgttgatactttgctgtcaatacaatggtcagaaagcctatgtcatcgtactgaactttcgccatcgagttcattactcagctgctcaaaccggaattgtaggtaagcgtgtcattgagatgcttgatcaggtgactccagtggtgaaagaaatgttcagttccatggaaagctccagttctgcacaggcggcggcggcagcagcagcttggccggaggatctcccagaaagaagaaccctccctcctgttctctgtcgcactacatcccatcatccatcagacggtgacgaggttgcgatgcacacaggacgttgcaaagttgaggcaccggcgcctgggcacgagacagatgagggcgtttgcaccagggaggaggatggccaaaccagcagccgtgaaccgctgtcagctcctattcctaccgctgagtttttaccgctgcagccgacgctgtcgtcggtgtccccacatctgctgtcggcgccgccgccgtccccgatgcccgtggttggcttgtccatgcttctgcagtcgtgggaggcaacgcaagatggccacgccaccgccgccgcagtggtgccacctgctggcgtcgcacagcctgctgaggcagcgccgacggcacacaaagacaccacgcccgtcggcaccagcatggaagtcgaaggctctacgtcctctgtgttacttgaagctggtcagcctgagccatgcgtggattcacccaatgggagcacgcaggcaccagcgcagggcggcaatgccgctgttccaaacgtgccgcc

SEQ ID NO: 151410 - DNA, 528 bp, Zea Mays
gccatgtcatcgcccggctgttatttctaaaacgcgggcacgccatgtcatcacccggccgttatttctaaaacgcgggcctgccacatcatcactcggtcgttatttccaaaacggtcgacgcggcccattttaactcagcggttatttctaaaaacgttgatgttaccagacttcacccgaccattgtttccaaagcggccggcgtggcccgttatcactcggctgttacctctaaaacgccgacatcgtcatcgatcactcggctattacctctaaaacgccgatgtcgccatcagtcactcgattgttactcctaaagcggtgacgtggctccaaaggactcgactgttacctctaaaacgccgacatcaccagtaaccgctcggtcgttacttctaaaacaccaacgtggcccgctatcactcagtcattacttcaaaaagcgccaacaccaccaataataactcggccgctactaccaaagcactgacgtcgcaaataaagcagtctgaagcgtgatccgat

SEQ ID NO: 151411 - DNA, 384 bp, Zea Mays
gtgtgtagaagcttatgtcaacgatgtggtaatcaaaacagaaaacccagaaaaactcatcgaagatttacaacaggtcttcaacagcttgaggcgctaccactggaagctaaatctagggaagtgtgtgttcgaggtacctgtcggaaagctatttgggttcatcattagccattgaggaatcgaggctaacaaagaaacaatcgaagctataatgaggatggaaccaccacggtcacagaaaaaggtgcagaggctcactaggtgcatggcagcactaagccgttttatttcaaggcttggtgaaagggggatgccattctataagctactcaagaaggtagacagattccagtagactgcagaagcccaagaagccctgga

SEQ ID NO: 151412 - DNA, 873 bp, Zea Mays
aggagtgtatgttttgaaagaagtggacatgccggtcacatgctttgatgctcctaaatctatgacccaatctatgcgatgcctacatgaggatgcaaaaacttgtgcctgagtaccttcgcccatgtgggcatagttggaaaagttaccaaagttgttggtggattgttcaacaggtacagtgaggcactcagaagacttgcccttctgccattgctcccactgtttaacttgttccccagttagagtaacggagggactctcttcagtggtagctatgttggccctagaaccaccatgacctcgacctcctccacgactaccatgacctcttccataactcacacgagtaccccatcgacctccacgagatcctcctcgaccaccatttcctctaggattaggacaattgtaacttaggtgtcccttttccccacaattatagcattctcgatcctcgattgcagcatagaccggtttcacatgattatcattacccatcactcgaagtctgctctcttcatcaatcatggctgacacagcctcatccatggtaggaagactctcctggtgacaaaaggcagctctcctactctcaaactcaggatccatattctttaagaagtgggtcactctcctgtcctctacccacttatgaacaatgtgtgcatcatgtggacaaaccatttggagaggggcatagtgatctagttctccccataagtactgaagctcactagcatattgcttcactggtctccctgcttgtttcaccacatctgccttattctgaatctccatcatcaccaccacattccccctccaagagtatatgctactcaaggtctgccatatctgtgaagcagtgcgcat

SEQ ID NO: 151413 - DNA, 527 bp, Zea Mays
ctgatcccctgcaaagaccacatcagacgcaacaaatggaggaagataaaggaacaaaaaatgccaggaagaaggaactcaccaaagtgctcacgacatcgttagagagaggaagggtgaatcctcgtccataaaggatcccgatgacaatgccctgacgactttgacccgggcttcgatctcggttagtgcgagtggcgcgaaggaatggtggtcaaggtcatcgacatcggagtacttgtgcaccggtttctagcgggctatcaagggccgaatccgacgatgcatgaaggtgcgcaccagccgcacaatggtgagacctcgctgcttcgacgtcaggatcatcatcagaagatggtccacctcactcttgaggttcacctccgccccatggtgccactcctccgttgatatcgactcccaaccggtgaatagcgaggcactcccagccacgttcttgacaaaaaaacactccccttcataccacatggaggtagagagggggatcttgaagtactctgtttttc

SEQ ID NO: 151414 - DNA, 327 bp, Zea Mays
gtggtaaataattagcagaaaattattaaaatgcatgtgaaggttatattgtatatactcaaatcgctctaaatatttatgttgcgttgagcttttgaactcacgccgagcgattaaattgtatcgtgggtacccggacatgccgatcaggctaaattattaatcggttgagttatggcattggatacgccctgtcaacatgatgcaatattgtggcgtacgaacttggcgtcatgtgattgctatgtcacactctcatttaatcaaactgctcccgttgagtgagaccgccatcgccgagtcgcatattttttgcatgccctgttg

SEQ ID NO: 151415 - DNA, 417 bp, Zea Mays
cttccttgtgcgtcggcgcccccatcttcttcgttccctcaaccgatccccctgctgcgcccctggaagcaacgccaccaaccttcttgcgccccaagcagccgcccctgcctgcactagctcctgcggcatctgcacagatcttgctgccccgcatcttcctactccctgcggccatcaatggatccgaggcaagcccctaaggttcgcaggtcctcgctcaaggctgcaattggtgtgattccaggaggccgacctagtttttgccaaacatcacgtggaaacaccgtagatggcagcaccatgtcacaacctgtgcccgttacagcacctgcatctacaaatcattcgacccccggcattgttgatcctgactggatgttacctgattataggtatgcattgactgaattctta

SEQ ID NO: 151416 - DNA, 618 bp, Zea Mays
aatgggctgacactcggagtaatcaaaccggccttcaacaactcaatcacttgcttttcaatttctgttttgtgatgaggagaatacctataaggacgagagttcaccgggatagccccgggaactaggggaatatgatggtcaaaaggcctagatggtggtaactctgtgggagtatcgaagagatctctgaactcttccagcaaaccctgcaaatctccactgatctcctgcctatcgccctctgtcacctgttccagtaaagcgaatgcccatatatcattccccttcaaccacctttccacttgcgcagttgacacttccaccactgcttctgtctgatcaacatttccccttaactgaacccaaactcctctatccacaaaactaataacctttttctcccaatcacagtgcatgggactgtgacccttcaaccagtcgtaccctaaaatggcatcatacgcccccaactccaacaccctcatattactcacatatgtatgtccattggcccaccactccatcgccttaaccatagtgttacttcttaaaatattcccattggccacccggacccgagcggacacacatggaaccaccttcagacccactctc

SEQ ID NO: 151417 - DNA, 680 bp, Zea Mays
ataagcaataagcatttactactcactttatcacactggacatgttttatttgtgcatcatgttggctaagccaatcttttggcctgtctaggatgatttgctatcatttggttacaaaaaaactggaatcccaaccaaatttggactggggatttatagaatcattttgctggcctcactggcgtggtcgggtgcgcaggagaaggcatgatgtggcagtagggtagtgtttgcacatgcttccggcatccagcatttcgtggttaaccatgttgaaaccacaatctcttagactatgtatctggtttgcaacataacattccctgatgattttgtcaatgaagcaacataaatactggacgtgttttgatggtagaaaattagtgtcatgtggacccatctttttcctgcaaatgtacaagatttggcatggcatggtgataatttaaacactacagtttttggtactacccacagattgtgttgggcacaatccaaatatcacttctctgcccttgctcagatttgttggtcacagccaaattttagttcttgttagtcacagtgctgagcctttgtatttgaatgatcatcatgcagtttcttataagtcatttccaagcattattctagaccaaattccagtttttgcctgcctttacatgtgtggttgtcacgg

SEQ ID NO: 151418 - DNA, 2142 bp, Zea Mays
ttcatcaaaggtacataatagactagttttatctagtattttcacatagtatattacaatatgtgaaattgacactaaagttgtcatccttatattactaactaatctaagttgcaatttatgaattatgtaggaagataagaaaacttttgtgacaactgcggtaaggaaacatgaggtttgtatacttagcatcttatatctacacttgccattgaccattagtgaacatatttatattagagttttctatatcatttcataggcggtagatacatcaatttgcatggaaatttgagccctcccaccaattgagacactaactttttttattgccactgcaagcatatgctagtattacaactaactattgcaatatattagagcgatatgcaggagaatcacaatggcacaaaaaatattgtagtatcatctgaaatgcaagtagtaccttgcagcatgaaagagatagtatcaagtgacatgaaagaagaggtatgcaacctttgaaaacaggcaaatagatgtcattttggtgtttgcaattctaatcagaatatcataaatgtatatacttttgtttctattttcaggatcattcctctccaggttttcttgcagagaacttatttgctgacttgggctttacatgttcatctaatgcagctggtaaaatatgtttcaattcactttatttctaaacgttagtaatgtatttggtagtattctaaattgccttcactttcagataaaacaactgaggaaaatccagccaccgttctccaatcttctccgaagataagcgaccaattgagaaagatatcaaattcactgaagcttcttaattctatggcacctagtatagtaaaacagaaaacagatatagttcgtccacaatcctttgacttagttgaagcagaaccaaaaactcctgaggtcaacttaaaactttggcatgctcaagatgcacaagaatcacttaaggctcgtagcacagggattaaggtaactattttgaactcattacatacactttttattgtatcattagctttggtaataaattgtttactctttttctctacaaatgcagaaatctctagctaaggagtgtttgttgtttctaaacagcgctaataagtaagtattaccaataacatattatattatttattgttgaatagacttcatttatgtttctctaatacatatttccgtatcaaatgcagggagcagttaaaaagtttaaaggtgctcaaaaaccttaaaatattattacttaaccaaacataaatgattgcttatgtcttgctaacatgttggtgatgtgtagggtattggagagaaaagggcaaactatatacttgagcttcgagaggagtcaccattgaaagaggtaaaccttctatattgaatgtttaaaaagttaagtttaaacaatatgaagcggagaatatcaattaaactattttcttcttttagattgatgatcttaaaagcataattgggatgagcaaaagagaggtaggtaactctactataaatatttgttttggaaacaatcaaagtattgtaattcaaaaaatgttgcatcgtcgctggagatggtggtgcatatctgttagtcaagtatgtgttctaggtgatgttagcacgcatggtagaaaagctgagttgctgccttctgctttctgttccgttcagatcgacaagatgatgtcaaagttgatttcggactcggagatgaacgagtaagggttgtattgatctcttcccacttaggaaaggaggagaaggtcatagttctaaatttaaatatcgatgcttgttgttatcagatcgctgtggaatccagatgattttgggtgttgcttgtgagaatattctgatgttttgtttttttaaaaaaaattacaggaatgtcttctctacgtataggttttatacaggaatgtcttgtctacgtaacgtataagttttgtttttaaaaaaagaatataatcgggtggaaggctttcaggtttgctgtattagacaaaaacctatcagttaccctgtcatattgtgagtgtgcatattgtcatattgttagaactgtgagaacaagatatgtttatttggctccgccaatattgcttagcg

SEQ ID NO: 151419 - DNA, 730 bp, Zea Mays
tacttgcatggcttctagtcggatttggtatcctcgttaagcggcgaagtcgttgatgagacaaacccaacgtttatttggtcacaccagatacgtgcatcaaacaccatcacaaagcggcggcggctacccttttggtggctcgcatgtcgcctccgtaggccatctcaagtggaacggtggatatggacgtataaaattaaatagtgttttatatcttagactatattataaagtagattttaaaaatagttttgtaattttaaaatagagactatgataaaatgccattcaagatagtaaaaggaagtaacaaccttttcaaaaaaaaatagtctaaaataaagtaacaacattttcaccttcgtgagtgactagctagcacgtcatggagctctattcaccgtcaccgatagattgctcagtttccttcttcaaagattatttgcctatccgcttataaatagttcacagccacttataaatagttatggtctgatgcctatgtgagatgaacattatgactacattgtctggcgctctagttgcttctagtctgacacctgatctgacatctttgttcactgccagttagagaatatgtttctaaccttatggttcgatgtctccgtaagtcgaacattgtggtccaatgccttgtaatccctattagattgcagtgaacctcaggatcaccttaagtctctagaatacccatctaaaagatcta

SEQ ID NO: 151420 - DNA, 1932 bp, Zea Mays
cgagcactacaggtttgttccgacctcgctccctctgccattgcgaccgcactggattttatccggttcgacaccattatgcctttcaacttttggttgcgttcttggttctagggttcgtgtcctccgtctgctagatctttgctcggcttcatgtttgtactggcggctgtgtgacagcgaatcgtattctaggaaatcctctcgaaatctaacctaacctcgcccctaaaaccatagctagggtggtgcggcttggaagccacatgttcggcagtcagtaccaggctgtccggtataaggatttcattacctagtgaactgttggaacggccctcaagaaacgacagcgtgatttttttagatgatccaaagcagctattgttgctgtcgggaacaatcgttgagcttcttctagtcaatgtagagggtgcaatggtaattcgtttgccagtttgtgtcatatgaaaacctagataaaaaatgacttcaatgttactttctatacaagcgttgggttcccatccactgatgcataaagagcactccagctagagcttcttaacccttatttattctaattcaatgtgtaggtctctaaccctgtttgctaatcattaaccttttggagaattttgctagatagaaatatatatgttatatttatcaccacctatttttatcaaggataggataattgtttggtcgctgctctgtacagcttcttttctgctgattcctgaagggctcccgacatcatgttaatttgttggcatgccacatgtttgttgtattgctcatgagtcacagccaaatcatccttccttattcttttaaaaaatggtagctttgcgaaaaagcgagattccgttgggatatcttattaggggaacccaagatcatgctaatttgtcgtcatgccacatgtttgttgtattgcccatgagtcacagacaaagcatccttccttattcttttaaaaaaggtggctttgcgaaaaagcgagattccattgggatatcttattaccctttggagatttcagctctttgatttcaggtcagcaaaacgactgtcagcctcaagtcccacccaaccgtacaagtgacagatgaggatgtcttgcactacatccatgtagtgttcattatgtgttgtagcatataaaagcttttagctgaacctaaaataggagaaaatcaaattattggttgactgcagactacacatattgacctcatatagatgctcattatggctgttgcatgcatgtaaacctggatttctatagaaaaagaccttgtgtgatgaaaatatgggttgcctacctcatacattttttatttttttatcaggcaacattgagcgcagttgctttcacttctgtttcttctagccgattcttaatccaattccccgaggaaagcaaaaagacagttagctaaaaataaatagttgcctacctactaagttctcgattttggttatccaaattctaatcctcctctgctgcagagaaagctcgtggacgggcaacgaaccagcggcgtttccatacgcggaagtaaatcttctcatatcttctacttcaaaatgtcttgcattgtattgcgttgcttgatgacgtgcaacagaggaacaagaggattaacattgtgttttcaaatgtttattacaccagccatcctcttcgttttcggattgcagtacgtgctacaatatcacatatctcgggtttatccgaagaggtaattgggctcttgccttgtcttgtactcaatttctacgccattgtgtccttacatgagattgttcggtgccataccacttcctataaccacaattcattcgtgtggtgtgcctgctacatgctgccttcccctatgcaccaacgcttttatcgatttggttcataaacgtcttttatgcggc

SEQ ID NO: 151421 - DNA, 862 bp, Zea Mays
ctggcagtgaagtcagtgactggctcattgccagcacgccgagcctctgcccggtggaggaccaagccgcgaatcacaggagcgtgggccgggggaagatcaacttcatcgtccttcccgccatcatcatcacttgcaggctcccacgcctgcggattcgtcgcaggtcgagaccgcccggaaggattccgggatgtccgaccgcgagcactttgagacccggaggcctcagcacccggcatgacattgccgcctccgcgccctcgcttggatcgagagcgaggtggagtatctccgtggatttcctggtcatccgaggagtcggattcaaccacagatgggttccttcgacgcaccattctaagaaacaagaaatagaacctatgatgagcaaggatcaaacatgtttgagtagaaacgcataagatattgagcatgctcttcaaccgttcatatgagcggttcaactacaacgaacaatatcaaatcgctaatctcaacaatgtttgtgacaaatgaagataatctaagtgttgcaatcacttaaactaaaatgtacccaacgaatgatacattagataatcaagaacgcgtaggatcgagtacaaggaaataaaacacggcaatacctcgatccggagattgggtcaagaactcccaatgagatggaggaagatgatggaaatcgccgggatggacggatctccaacaactcttccaaaagtgtgagggcacgagagagtttttggagtggagtgtgaaagtgagagagagtagaatgagagggcagcggcggcttgaaaatgagtctgagaagggaagaggagagagggagaggaataaaaggggaaaagtcggccgc

SEQ ID NO: 151422 - DNA, 528 bp, Zea Mays
gattatgagattattttcaagaatgtgcctctcatgtgtgataatgaaagtgcagtaaaattgactacaaatccggtccaacacttaagaactaagcatattgatatacgacatcacttcttaaggggtcatgttgaaagggagatatctttatatattccattggcacggatgatcaattagccgatatttttacaaagtcattggatgaaacgagattttgtactctaagaagtgaaatgaatgtgatcgatctctcaaatgtagcttgaggttgaacgcacatgtgtagtattgcatttcggttctaaatatgctctctacgctatttattgggtatttttgatgaatttttcattttagattgatctaagtagtttgatatgaaaatgtgcattcctcaaatacataatgtgtatatgcatgcatactaacccttggattggtcgaaatgtccatatatgagcatcaaatcagatttgaaattcaaaatcagaaagtgaacagaatttgaaaaattgagtatca

SEQ ID NO: 151423 - DNA, 778 bp, Zea Mays
tcaaatttcatcagtgctcacatggtgcatcagttggggttagtagaggtggtctgttctccagttaaggtgaaggtggctaatggtgaaactatggtgtgtgatagaatggtaagaggagtggaatggtgctctcagggtttttcattttgtactgatgtgagagtcctacccttgagtgcatttgatgtcattttgggctatgagtggcttaggcagtttagtccaatgcaatgtgactgggccacaagatatgggtgcctaacaattctaccttgaggactaaaatcattgatgccttacataatagtattgtggggggggggcattctgggggacatgccacctatcacagagtgagaaggttgtttcggtggaaaggcatgaaggctgatgtagtgtgctttattaagcaatgtgcagtgtgtcagcaggctaaggtagagaggattcacaccccagctcttcttcatcccttgccaatccctcaaggtgcatgtcaagatctaacaatggattttattgaaggattacccaaataagaagggtataactctattctagttgtggtggacagaatttctaagtatgcacattttttccactcaaacatccctttactgcaaccaaagtggctcaagtgtttttggacaatattgtgaagttgcatggtacacccaggtctctggtagataagatgttcactagcaatttttggaaggctctcttttcctcactcaacaccaaattagctcttaccacagcttatcatccttag

SEQ ID NO: 151424 - DNA, 584 bp, Zea Mays
accgaattggtatgcaacatggagccttggattcggatccaacggcccacaatcgatccgagggttggagcacgacatccgatcccacccgtctgtcccgagatcgacggttacgaacacatcaaccgaatcgttatcttatgaatccatcacgaccgtcaatatctagatctattgtccatggcgttcttccacaccccgatttactagagtgacggcgcacacagctcacacggcggcgctctcgccggagctgggtgaacggcccaatcccacccccgctacctcgactaacaggttctgcgcacgacgggaatgatgctagaccagaggggaggtctttttccttggtttgcggtggcgacaatccgcaccacggcacgaacgctggtaggagctccgttgagaaattcccggtgccaccgaggctaattctggccgtgatgttccggagacccttccccagacttggcggtgtacccaggtgagcagtcgggtcccgagtggtgacgccagagaggggttccacagcggcgattgaacttcacacccgattcctctattcacggcgacctcacggcgat

SEQ ID NO: 151425 - DNA, 451 bp, Zea Mays
ggcaaactgagccatcagcagcaaggcaactagtaggatcggagccgattgctcttatatatggtgctatcagctacgccgaggcaagcgagagcgagtcgatgtcatgtggctgacgcagtatgagccgctcactggacactggtgagtctgacgaggctccaacgttgatagctagcgactgcacgaaggctaaggacaaaacgagatgaagagcagagctgcagaggcgtcgttcagaggttgccatcgccgcttgtgtactgacaagtttggatccccgtagttgcggttgggttgccttgcctgccggcgacatattcctaaatccctaccttctactgtcgtggctgctagtaatacatgctttgcggcattgtttatgtcagttggtgcatttggagtcgcgtttgtgtgtgtcttatacatacgagcatctactttatttgcg

SEQ ID NO: 151426 - DNA, 2101 bp, Zea Mays
tgatgattggaagtttctcacagaatattggaggtcatctgaatctgaagtaagtataaactaatattctcattgagatcacattatttgctcttcaatagttaattgcactatgtaccttgtactcagatgcgctcagaaatagcaaaagaatgtcgttcaaaggtgggaaatcatcacacttcaggcagcaagagctttgcttgttctgcgaatgagctagtatgtgaaactttccatgaactttttaaaacattagtttgtagataactcagtgctaaaatttgcaaaacttgcaggctcataaactaaggcgttctccaagaagagatgagatctatatcaagacacatacaagaaaaaatggagttccttcaagacatgcagaactaattattgtaagttcattcctcgaagaagaattgtaggctctaattcttgttgtatatagtattgtaactattcatctatttttagaataaattgaaagacatagttgaagcccatccagagttgaagcaaagaacaattcaagagggtgatgcatttgctgctgcttgtggagaaaaggagccaagaggacgtgttcgtgctttgggtttaggaccaactccccaagatgttggtaccccagggttgaagtgttacacacccccaagactacagatggaagtttttggcccgtaaaaaggctgaatgtgagaaagtagctcttcaacaacgcataactgaattggagcagcaaatgcaagaggaaaggatggcaagggaattgcaagatgtggaaactcatttcacataatggttcaaattcacgacataatggggtaaagtatttcagcaacttagttacattctaatggagttcagctcaatgctagtgaaatatatttgtaccctatgcagatttattctttatatattctctctcttgtatgtttgtagagccgaaggtatgaagagcatgatgtggaggcatatcatgacgctaaatttgtagaagatgaagattgtgcagaaaatcacatcaatcatcattgtgatgatggtgagcaacaccatcaaaacagtcctgttggtgcagcccggacagtgcaacgccatcaaaatagtcctgttggtgcagccccgatagtgcaacgccatcaaaacaatcatgttagggcagccccaacaattcaactccatcaaaatagtcctattggtgcagtcccaccaaagcagcctcaacggtgcatcactacaagtttagcccacccagtcccaccagggaatgaggccccctctcgcattcaacatgatgaacttgtattagtctcatccttcatgttttaattataatttaatatggttccatagattgattcaattctaataaatttatttttttgcctcaggttggaaaggatgtaatattatatgccattattggacctgagcagcctgtggctaagggaacaattgtttcaactaatcctaacaccttgctgggaggtgtgcctcttgggaaacaatattgtgaagttattgtgaacactgtattgaaaagggatgccattttgccttgtccttatggttatgtagagacgatggctgatgctcatcaaatgtcagttgcttggctttataagagggtaatgaactactctagtactttgcttctttttgcatatgtgatgagtgactaaacaatctaaaattgtatccatgatagatgaagattagcaaggcatcaggatcaccccaaggtttggaggtatgctcaaacattattaggcaagtttttgtagcctgaagtttattggagcaacttattcaaatgtaatctttggattgcaggtggctggcactagaggcaagctgcagggttggagaaacaagagaccgacagagcattttgtagacaatgagtcctaatttgtagttaaatatgtaatggcatgtcaagctatatgtgagattttttgtttgaaactcagagatgaatcattttgtagactgagtcctgattttggtgtagctaaaacatgtaatttctgctaccatgaatcctattttttggtgtagctaaacatatataatggctactataatataatgg

SEQ ID NO: 151427 - DNA, 402 bp, Zea Mays
gattacatggcgccccatatatctactgatgccgaaacattcagattgttcttcacagtaatggtctgatttttcgcaatccaaaccgaatgtaacataaaaatacaaaggcaatacatgacctgatgtttggactgacacataaacatccatatctatacaaaaaattggattgcaaattacctgtcgtacacggtacaccgacagccggccatcggagttcggaggcgggcatctaagcaggaagcagccagccgttgggcgctaggaacagcggcgcatgccagcctccgggcgctaggaacagcggtgtaggctgcagcctacaggaacgaccagtcaccggctcgccgcccaccaggaatagccgccaggtagccaggcagaggcaagaacatgaac

SEQ ID NO: 151428 - DNA, 626 bp, Zea Mays
tatcctcaggcgaccgctccaatctggcgtcgaacctgaagcaacgttgactcccctcaggtgctgtcccgcgctcaccaggatctccgggaaactaaggtggctatccggcgggagtgggaggcgctcgagactgagcaccagcgccttggcgactggtgcacccaactagaggagcgcaccaaggcggtgtcctgccaattcgcctcagagcgggccgaatttgagcaggagcgcgaagacttcaaggaggacatccggaaggtgtctgaccgagagaaagaggtgacccaaaaggagaaaagtttggccaggaaggaggtacgcttagaccaaagggaggaggccgtcacagtgctccatgataagctgaaagcttataatacggtgctagacaaacagcgggacaagcaggctgtggctgaggtgaagctgcagaagctgcagcaggaactcaccgacaaggcccgcaacattgctcgcgtcgaggaaagcctcaaggtgagggaagcttccctggcgaaacgggcaactgatctcgcctggcaggaggaggacctcgccttcagggaggagatgtgggcaaggcggaacaagctgctggatgagcttgagctcgaagcgga

SEQ ID NO: 151429 - DNA, 559 bp, Zea Mays
gcccaatctcagcggaatgcgcccgcacgcgcgccctcggtgttgactttgcacagaagaccctagctttttaaacaacccgtaaagagtccgcaacactattgttttgtctcactgacatttgcatcaaggtcccttcccttctattctttcataaagtcaggtccactatgcggagcggcggagcagtagctccggcgagctcgttctggtaggaatatggaatggccagtgctctaactgggttgactcctaattcaacacctaataatcgtttcccctcgatcaattgcacgatctgagctcttaatcacactgtccacggtgacagcgcgaactacgaatgaacagaggtgttcccgatgatctagcacggtttagcttaattgaacgggtcgaggagcatcaggagaacataagggtattgaaatgggagagcagagggcatgaacggacatgtagcacgctggccacggtgagctcatgcagcacggtgctctggaccgaattggggagagtttcaaattgaggctctgtggtgagtaattggaggcacaag

SEQ ID NO: 151430 - DNA, 615 bp, Zea Mays
tgactaatggaatcgttatattcttgtgtttgggttacagattcgagaaatagagaacaagcaaggcaacatgtgtcatttcataggtctataatagtacaatctgttagcatgggctatagtaggcaggacccttgggttttaggcagtgcggctgcctaggcatgttgccttgtgcgccctctcctagtttggttatttggttgtaataggcaaggatcttcctgattggattgtctaggatagtttcccattgtccaggatagtttcctattcctgtgaacatctttgcctatatgtacccgagcctttgctcctattaatcattcaacattttcccaatacactgtctttcacaatctatatgcattgtacttgatagaagtgaaaaccctgaccctaactagggttgggctgctatattaataaatgaaatagtacccactaagccattacaattaagataaacacatgtctaacataccccgcagtcgcaactctaggcattaccaaaactccgagaacaccgtagaggggagtcccatggtgaagatgtcggtgaactacgaagtggtcggtatgcggaggacgtgtacaacaccgacggcgacacat

SEQ ID NO: 151431 - DNA, 442 bp, Zea Mays
atcgtgtattgaaattctgagcagtttagagaggttcaagtcatagctgttttctctcactactcattgattcaggaatacaaagataaagaagattacaagctaataactttactgagcattacatcctcctagctggtgtgagttctagtctattggctctaatccaccatatgcctgccctcacatgtttttagtgtgaggtttttagtgtggagatttatttagtaatcctacgtggatttcgagggagtgctcaagtcttgagcaggcatcatggatttatctcgttaggaacataggtgcaatgactagataggttttatttgcaaatcggacgtgtagcacaactcgccttttcgtctggttcgtgtgacactttgggttctttaaccaagaatagtgagaggaagagagagacttttgccacattcggtttcag

SEQ ID NO: 151432 - DNA, 365 bp, Zea Mays
ctaataacaacatttcttaaaagcattgtgacagctttgtgaggggaaaactgagcaaggtgagaaaagtagatttacgcttgataaagacctcagattatagtgatataatatttcaaccactggtgataaaatgagagtaaggtttacccttaggcgccatgcttagcagagagcgtgcatatagccatgcaaaacactattttacactgtagactgcactgtctacagagtggagtttgaaataaggagtgggattggggttaggataggaaggctgcttgagacagccttgctgccatacagtgagcattgaaggatacagtattgtgtaagaacatgcgaagtggacacaaggacatgtg

SEQ ID NO: 151433 - DNA, 438 bp, Zea Mays
tatgctagaatattcttgatgaatgatgtggataaagggcataaagtctggacggaataaacctagggattgggattatatccatctcaaggacaggcatgcatgcatgcatatactgaaccccaggcttttgaggaaaagaggccatgcatttgcagggaattagtacaactcaccaagtatcccaattgccccccctagctcctttgctttctttctcttcctttgctttgcattctttattcccttttgccggtctctgcccttcgcgatcgagcctgcccaggcattaacaaaaaagcaagcccttcttttggatcctcgccagcagctaggttgatatgcagatgcagctagcagtagcagctcgatatatcagcttgtaaatactgagctactacctgcattcacacaaaatgtaatatatcagcacaattt

SEQ ID NO: 151434 - DNA, 301 bp, Zea Mays
taatgattggccgtttgaagggaaatgagggtggacgagaaaaagggcgattttggcttgaaggtcagatcacaaaccgttgtttcttcgcctggccttgattaggcctctcaccactgaatcccttgttcttcccagaagttgtgcatttggcttccacagataaggctgtgctgacagcctttccatacgtgagatctatgcatgtggccattttcctttgtagtcgatcattcagtccccgcataaaacagttcttctttaaatccgtattcacctggtcgatggcatactgcgacat

SEQ ID NO: 151435 - DNA, 320 bp, Zea Mays
cggccatggggagaagcagcgccgtagaggaggcgcgctggggtggagggcaggaatcaggacctaggcggctgataccatgtgagagagttggaagcgtgtgtttgtatattgatgatgatagacagtacatgtacaagtatatataggggaggaaggtgagaggtaaaaggaagccatctacacctaaggaaagatctagaatacaatcagatcctcaatcatagtgattgagatcctcccctaatcctctctatctatatcagagacaacacttccatatagggcggccggcatatctgccaggcgtcagccaggat

SEQ ID NO: 151436 - DNA, 285 bp, Zea Mays
tggagggcgcttgggatggccggtccacggcgaggtggcgggcgcccgcggcgggggagatcgctggtgaggctaccgagcgcaataggagaagggggtgggtgcgttgtgctcgcgaggacatggtgaagctcaagagctacaacaattggactagaattcaacggagaggggagggcgggactcaccggagcggaggaagggcgcggcggcgctggctcaattgagctcggggaagggaagagggagtggccgaggccggtgtggagaaggagggagcttggg

SEQ ID NO: 151437 - DNA, 365 bp, Zea Mays
gtaatgcaaacacaaaacacaatcaactacacgaaggaatgatgatagctgtgctggacagctggagcaccaactctcatcaaaccgactccgcacacgttgacgaatcggggtctccctttcgtgcttagtgcaagcgaattcaatcctcagattctacgcaaaaaaagcttaatcggagagccacggagatcagatcatcagctccgcagacgcgcaaatggcatcgccaacgaatagagcgcttgaacggtacaagagcgccatcacggccgccacgtccgtggtgggcgcggccatgctgctgcgtcggctcgtcgctggcgtcctcccagccggcacgccgccgctggtgggcgcgctgc

SEQ ID NO: 151438 - DNA, 367 bp, Zea Mays
gaacccccattaactatttttatttgccatctaggtccatgtactatttcgggtatgtcatctaggtccatgcacagctaacgtggtgttccgcctcagtccaactggtgatgtggccttgaatagcacatggacctagatgacacactcgaattagttaatggggtttgtcataaccatgaatagtacatggacctggttgacacactttaaatagttaatgggggtttacgtgactttaagaagccaaccaaattcaagataacatacgacttgaacctagctagttgggtgcacgaaatcacatcttccactcagccaattcatctaggtccactttctactttttaagtatcattgatcttac

SEQ ID NO: 151439 - DNA, 821 bp, Zea Mays
ttgttgactcttgttacctaaatacgaactcttgtttcagacaccggtgttatggtttcatgggatggcagatggggtggtcctatttgaagcaggacatgctgggtgtgcatttttagaggagcttggcatgtcctgtgaattcaaggtaatacaggaagctgtagtcaatgctcacttttaaaacattttgcctccctcccaacaagtggctctgcaaacatttgagctcgttttcaaacacgcctgacttcagctatatgtctgttttcccaattgattttttgaccagttttcccaatcatctactcaggcttatcctacccttggacattcattggttgacgaagagcttcaatactttcagcaatggatcctgattcgtctagggatggctgcatctggagcggctgaaaccgcaaggccatcatcgtcatctaaccacaacgaccatctccaatagctgttttttttgtcattgcttagtttctagtacaattcattgctgctatctttgcgtggcacatcagttctcgttgtgacgaacataaacatctttcttaatctccttcacattatttttttataatagcagtaattgacttaacattattcaactaaggaattgaaagcctcacgagttctaacgtgatccgagaaggtttatgataataacagtagttgacttccatcgtgattcgtgtccgtgaatttgattcgttccttctgaaacaaaaagatcttgaattaacactcaattttcggaaatcacaaaagtgaagaccggtttttttgaaatatatgacgtaataaaaggtact

SEQ ID NO: 151440 - DNA, 414 bp, Zea Mays
taataatgcggcgcgtggagagatccagacagcgataccccttgtgagcagaagggtaccctaagaagacacatgcgacagaacgaggtgcaagcttatgcgaagacgtggcctgtaagttaggataacagagataaccgaagacgcgcaagtgctcataggaaggaggggtattgtacaaacgggtgtacggaacctcatggcgtatggaggaagaaggtctgcggttaagcaagtatgtggcagctgcgagggcctcaacccaatacttgggtggcatggactcatgaaggagcagggtacgcacagagttgttgagggtacggagaacacgttcggccttgccattctgtggtgaagtgtggggacaagaaaggtgaaaaacgatgctgtgggcagcaaggagatcatcca

SEQ ID NO: 151441 - DNA, 315 bp, Zea Mays
cccatgattgttccattaatcattttaactgcttaatcggcatcgaccgacttaaccttcatctcgacggtccgagcaccacaattcacgaacgtctacctagacatctagaattacatagagagcctactacttcacattgcaattcatacagaaccacaaggttacaataataacacacatgtaatcgacccttctctacgaccttcagttaggtcaccaacagacgacatgatgactacgaaggcatgtcaccatttcatcacactcattcctcgcctatatgcgcactaattcgtttcttgcgaccatgca

SEQ ID NO: 151442 - DNA, 527 bp, Zea Mays
cgctaccgtcaggtgacctggatgagcaacattagctgcatcatcaccggctccatttgcatgcacgtccaggtgcattgcccttcaccggtgtaatcatttagcatctcatgattagctccttccatgtatagttgcatgtaatctaggattgcttgtcgtgattgttgctatcactggctatttgtatctgccaatgtaagggaacagagtatcgtgtgaatcattctctctgtaatacaccttcacactttcagccagccgtagctagcaagctcctgctgacgctccccatggcatccttccgatttggcctcgccaccaccttcctcctcctcgccgttctgtccctccactccaccatgggcgagaccgaggtcccccgagcaagctttgcccatgagcccaaagaagatcctgctgcttatcgtcgcacctacatcgtcttcgtctcgccacccgtgaatgccgacgccatgagccgaagcgcgcatcgccagtggcacgagagcttcctgcctaccacc

SEQ ID NO: 151443 - DNA, 612 bp, Zea Mays
cagcgatgagcacctgcggctaaaacaccagtgttttcccttgtacctagagtaggattctacgatctttcgtcttgctctactctatcattttctggtcaattagtccttgaacataaattgggatcatgataccttgggaagagcgatttgggatggattttggcgaagctaggtccggcaagagttgatttggtggctagatggggatagacaggccttgttcaccaatcagatggagatgatttgagcgaagtgagagaccgatgtaggatgtgcacctttggacacggtggactgcggtgacacatttggctatggctgtgttggatctaaaagcaaggaaaaaatgcaatcacaaccagggatcaatttcaacaatcttatgttagtgctcacatgtactaacaaaatgatttgcaataatcgtactttaatatgttttctttggatttaccacaaaactttgttggcataggtgacaacggctgccgcgacaactcctcggtccaggtctccttgcccatgagccacaggcttcgacaaccaagaacatggtccatctggctcaaagtaggtcttcgctccgaggctaatacaatacatggccgc

SEQ ID NO: 151444 - DNA, 286 bp, Zea Mays
ctgagaggcacgaaatgagcatactttgagaagcggtccaccacggtaagaataactgatttgcctccaacctttggaaacccctccacgaaatccatggctatatcgctccaaacccctgaaggaaccggaagtggctgtaacaaacctgccggatgaaggtgttcagacttattacgttgacagactgaacaacccttgacaaaatctcttatgcggctggcagcaaggggactatggaaggaaaccctccaactgttgagggacttttcgatgccctcgtggc

SEQ ID NO: 151445 - DNA, 878 bp, Zea Mays
atccatcttatcttaaagtatactctattaccttaatagattcatcttaccttaaaaagattttatctggtcctaataaatataactaacttctaaagattctaacatatcctaataatatttatcctaccctagtagatctatttaacctaaactagtctaatctagtcatattcaatctaatctagctcctacttaacctaatatgatctaatctagtgtgtgttacttaatgctggtgcaaaagatatggccacgctcctaattcacttaagcctaaattgatgacttagatcagttcagccatacctaggttacataccctatccaaaccatacagaagcaaaacaatcaaaccagattctgactaatctcatttaactcatagccatctactaaactaatctaatgtggcctacttaattagactaatgatacaggtaaaaagagattagaccttactagccatgtattaacttatcttagcacattggatcaattcaaccatgagctaacccaacccatagaaccatgatgaatggtataacctttctattcccacctaacatcaaacaaacttttgacctacatcatgtagtctatctcatccatacctatattaaccatattccctagcccaataatatacactaactcctaatcaatgagacaagaccgaagaagatgatcaacttcatcaaggaaggttgagcatcaactcaagtcttcaaggatcaagtgaggtcaccaagatgagtcaagatccacaatcttggatgaagtcttttcttatcctactctttcttacccaaacctatatatgccctaaagacatcttctattctacataataaagtggacatacatatatataccca

SEQ ID NO: 151446 - DNA, 356 bp, Zea Mays
gattttgccatttctttccttccaaatttccccagcagccactgagaagatctccatgaagaatggaagaccgaatagacctctggcttgttcaagcatcttgaaaaaatggcaaaatcttatcatctatataaagtaaagaaagattagctgtttgcttaccggagtgtgaattgtttgtttttctcaaaaggcccaacaacttaattttcatgcagttggacttgaccacgaaccttcttggacaactgtcttttcttctgctcctatgtagcaggattaagaaccatgcactattgcttcagacacaatatacttcttttggtttctactgggcgctgctatttatacctgct

SEQ ID NO: 151447 - DNA, 339 bp, Zea Mays
gtctgatcaaagttcgctagagacaattcttgcaaaccaatgagggcagacaaagctggagaaggaacaccactactttccccgctggctatgtagcgccggttgttcttccgaattagagggatttcatccttttcttcctcatcttcatcaacaatgcggacggtacacccattggggtcagctttggtcagatcacacccattgggttcagcattagtcgggtcacacccattgggttcagcttcagcagaaaccggcactggcacttcctcagcagcaggagcagaaggaccggcatcctgatccaagcatgacactcggcgaagacgtctcttc

SEQ ID NO: 151448 - DNA, 860 bp, Zea Mays
ttttcccacaaaagctcttcaagcactagtgggttgcttttctttccctttgaaccttgctctcttatctttgtaaatctgttgttcatcttcctgttgtagctcacatagaccaaattgcataacctttgatgctctagcaggttcctcttcttggtgtggatctacacatgcaaattcaagaagtcatcaaacatttactgcatatttcagttactgcatatgaacattgaacaaacaacaaagtaaagacacttactgctgaaaattcactccagtttctctcacaaccagaggccgagcaacagaggcttataactctttttgcaagggtttgtagttcgaaagcaaaccctccatatgcaccccaccatagcactgaagtagataaacattgtaagtttagtcgcaaacatataaactgcatattttagttaatacaaagagaatttagaaataaacttacagggattttttcccctatctcttattgctccagccttcgagaagcattcccctttggacctttcatagtcatctgcttgcttactaatctttgtttgctcatcttcattactgatcatcttccacataacatcgttaaacatggatcttagccttgcagcctgcctcctgttttttcccttatgtcaaagaatttgcccggattcaaaaatagggccgccccgtacaacttctgctccatctgactttcccaccttttgtcaaaacatgagattacttctgcaagtaatttgcccttattttttaatgcctctttgatggtggcttttgctttatccatagctgccataatatctggagcagcaggtgtctcatcaccatcagcaatccttagg

SEQ ID NO: 151449 - DNA, 349 bp, Zea Mays
tatcccgacaaacttcctcggtctgggtcagccaactgtattttcgtggtggtggataagttttctaaatacgggcacttcattcccttactgcatccatatactgctgcaacagtggctcactcgttcatcgataatgtgcacaaattacacggacttcccgcagtcatcatttcagatcgtgacccagtgttcactagtaagttgtggcagcacctctttaaattgactagcactcagcttcagctcagctcttcttaccacccacaaacagacggacagacggaacgcgtgaaccaatgcttggagaccttccttcgctgtttcgctagcgcctgccctcgcaagt

SEQ ID NO: 151450 - DNA, 810 bp, Zea Mays
ccactgcatcgtcaatctcatcatggccgaagactggtgggccccaataaccctgtacctgcaaggtcactatcaccccaatgaccacaacgaggccaaacgactgaaacacagaagccaggacttcgcactggtcgagggacaactatacaaaaaggggatcagccagcctatgctaaagtgcataactgaaattgaaggcatggaaatcctctgcgaagtccatagcggaacttgtggctcccactcaggaccaagggccctcgctgccaaggtgattcgacatggattctactagcccgcaataatttgcactgccaatcgagtcacaaggtcatgcgaagcatgctaaaaattctcccctcgctcgacagcccctcgcaattcaccaaacttatcgcccacacatggccacttcagcactaggggctggacatcatcagaccactgcctacagctcaagggaacctcaagtttgccttcgtcgccgtcgaatatttcacaaagtggatcgaggctagggcagtatccaccataacgtctaagaccggacagaaattcttctggcaaaacattgtctgccgcttcggagtcccatccgaactcacagtcgacaatggcaaacaattcgacagccaagacttcagggatttctgtttttccatcgacaccaagcccgtcttcgcctcggtataccacccacagtccaacggcgtcgtcgagcgtgccaatggcaaaaattttactgctatcaagaaaagacttctcgacgataaaaagggcaaatgggccgaccaactacttgaagtg

SEQ ID NO: 151451 - DNA, 488 bp, Zea Mays
gttgctgtcatgtgcggtggagcatctaaatgcagaaatcgttcagttgacagtatctgacatcattctggcggttgagtggatcaagtgctcgtatttgtacatcagaataaggaaggtgtggatgcatactctcgtttaacatttaaatttaatgcatgtcataactataatgaaataaattgctagaatcctgagaactatggagttaagagggggactcctcaagatctccttgaaaagcaaattcaaggtaccttattttggcatcatggttctgttaggatgccttatgctttgaccttaagcaatcaaatatacagatatatgtgtcgataagattcatgagttggtggagtatggactgatttggacagatgaaggagctttcgttttacaaccgctaggtaaagttttcttctttctaccaatatgaaaatgcagagatcacaatcacaagatgctgtatggtctagcgctcaatctgc

SEQ ID NO: 151452 - DNA, 430 bp, Zea Mays
tgttgtttttgcaacaacctagtaagaggtctagccataataccataatctttcacaaatttcctgtaatagcctgttaaacctaagaatcccctcaactctatcacattcataggttgtttccaggacaacatagcttcagttttactagagtctgtggccaccccatctcttgaaatcacatgccccaaatatttgagttcatgcttcacaaaagtgcatttcttcatcttaaagaaaaactagtgctctctcagcttggccaacaccatcctgatatgctgataatgcacttccaaactagggatgtagatgagaatatcatccaagaaaaccataacaaattttctaagaaaagtctccaacactgagttcatggcacactggaagctagctggtgcattagtgagatcaaaaggcatcactcaaa

SEQ ID NO: 151453 - DNA, 351 bp, Zea Mays
gaagaatgccaatctataatcctgaactcgtcgtctatatatggcggattggctacccctacaaaagatagagcacctctcgtagcctgagagagcattctcatctcttagatactttgtaaccttgaaccttgagaaagatcatctccaaagcacaccagaagtagggtattgtgtaatccagcagcccgaacctatataaaccctcgtgttccgtcgtgttaagcacaaaccattgagctgcagtcgatctcgtcgaccacaaaaggcactacacgacataccagtgtgttgctagtaccaaacaccgacagagttctaatctcccccttttgttaattagcactttta

SEQ ID NO: 151454 - DNA, 638 bp, Zea Mays
gtggaatgccatgtagcctgactatatctttaaggcatatttgggcaagggcggctcctccaaaagtggtctttactggaacgaagtgggccaccttggtgagacgatcgattattacccatatggaatcatttcccttctgtgatctgggcagtccggttacgaaatccatgcctatttcttcccacttccattcgggtattgggaggggttgaagtaggcctacaggcttctgatgttcgacctttgttcgctgacaggtgtcacatcgggccacatattgtgctatttccttcttcatccctttccaccagtatctggccttgaggtctaggtacattttggtggtccctgggtggatagagtaagctgagttgtgggcttcattgagcagggtttctcgtgcctcttccactggcacacacaagcggttcttgaaccagaggactccttgctcgtctgtcctaaggtccggaagttgctccttgcgagctcttcccataaacctggctgtctctgcgtccaggcgttgagccttgcatatgagatcttctagatttggcttgacttccaggctacagttgtctcccagacatgcattcagctgagctgattctttcttccaatcttccagaaag

SEQ ID NO: 151455 - DNA, 596 bp, Zea Mays
ccgtcttcacccgcaggcttcgggaccgtggctttctgcttctaatggaagaactggtctccctcggttcttggaccctattcgttctggtgttgctattggtggcagaccctctaaccgttctaaatttcaaaatttgaactccggccggtctcgtccctgcaacctgcaatggcgtcccgtgcgtgctcgcgggcctgctgggctaccgggctctgtgactctatgctgtcatttctgtaagggccggggacacgtggattttttttgtcccagcaagtttacttccttcggttctcctctgacttcgttccctgcctttgggagtcgggcccttttggtgggaaaccaaaattctcctgatcgcagctcctggtttcgcacaccggatgtgtctctgtccggtggaccgcccattttcagttgcttcgaggagttcgcccgagaagtattaaaaaaatctgaatcggcacctcctcagtccctgacgctttctctgggcgtcacttcaacaaaaccccaacttgctccgtcttcgtctgctggttgccgatcctcgcttcctgctcagatggcgtttaggcgcgttgatcccg

SEQ ID NO: 151456 - DNA, 826 bp, Zea Mays
atgcgagcatcatcagttggcattgacaccattagtgtgcatataccagaccatgcttttattggttcggaccaaaagtcctttgttgcattcaaggatatgtggttaatgatgatccttcaaagactcgacctgcaacttgtgacgcggtttgcactgtaagtgtcgctcgtatttccacatacatgtgttattactattagtgagccgtataaattttcaatatctaacacatgcacgtgtgacttgtagaatgcaacatgatcagtaggagattcgttatggtaccaagcccggtgctagtgccagtaaaaggattgggtatctcaacccaatactgatatgcgaggagagccacactttcagaatcgggaaagacaacgaagagttaaagggaaagacggacaaagaagttgaggagtgtctaaagactatgaagaaggagattgaaataagattcaccacctacatagcaaacacaatgcttaaatttcaagacagggaagccatattggccccgtacaactttaagtaagtgtgattttgcataaataatattaataatttcaatacacatgcatcacaaatttgattcatacagagaccactggatatgcttcctcatttatcctaaggttcgaaaggtgctggtgctcgactccttgaactacgacccttcaacctatgcaaaattcctcagtatcttagagctataagccttttctatgcatgcatacttatatcgatgagaattttaaaataacatggagattctatttgagatcacagagcatttaggttctataagtttaaaggtggaaagtac

SEQ ID NO: 151457 - DNA, 554 bp, Zea Mays
gtgcaagcgatcatgccaagtagatgctgaggccgagtccacaaaagtaaagaagaagaataagaaacttcgacgtttgtcagacttgcagccaatgactacccaggtcgagccgaaccccaatgataacctagtggatgctgccctgaaggatgttatggaagatggaagtggggtgaaaacagctagatatgtggtggtggaggaagatgatgaggaagaagaaaaagtgcttcccctggttcgcgcgagcggctctaaggctcgcggtaacaccccaagccttgctgctgcatccaagatgatggatatccgggttagactatgtcagctgttgacggtgtactcgaggatgccattcctgaggatctactacttgaattacttgaaataagaattatcgatgtccatatagattgcccaggcgaggtatcttccactggatttctggctaggccagaggtaagcctgctagtccaccatggtgcttcagctcttgtcctggggatcactcctactcctgaggctcttccaacccccagggtactccagcc

SEQ ID NO: 151458 - DNA, 275 bp, Zea Mays
cctggagctcgacgccctggcgcgtgagattcccgtagagagatggggtatgtgatcactgtgatgctcacctgctcgtccagatcaatgcgattagtgattacgacttgacattcgtttataataatgttaatacatccagaattaaagattgttcgatggtaaggtggtcaaatgttctttacttacactgtccttaacggccatagttttaaatgaatcttcagatggagtaccaacttttgagtgacaactgacaatgacttggacaacag

SEQ ID NO: 151459 - DNA, 850 bp, Zea Mays
cgaggacaagggatgcgaccgtgacgacatactggcagcactcgacgacgccgtcgatgagggcgtcgacgtgctctccctctcactcggcgacgacgaggccggtgacttcgcctacgaccccatcgcgctcgggggctacaccgccatcatgaaaggcatcttcgtcagcgccgcgggtgggaacatgggcccggactatgcaacgattgccaacgaggcgccttggctgctcacagtggcggcagcgacaactgaccggaggttcgtcgcctccgtaaggcttggcaatggagtcgagctcgacggcgagtcgttgttccagccacagggtttcctaagcgtgccgcggctgctggtaagagacctcagcgacggcacatgttccgacgagaaggtccttacgccggagcacgtcggaggaaagatagtagtctgcgacgccggtggcaacttcaccgcactcgagatgggcgccgccctacgcgcaggcggtgcagccggtatggtcgtcatcaccatcgaggaattcggctcggtggtccaacccaaggcgcacgcgctcccggcgtcgcaggtgacttacgccacagggcagcagatcagggcctacatgaactccacagacatcccgacgggcgagctgattttcaaaggaaccgtgctgggcaaccgcgactcgccagtggtggcgccgttctcgtcgcgggggccaagcaaacaaaaccaggggatcctgaagccggacatcaccggccctggagtgagcatcatcgccggcgtccccaagccggcggggctcatgacgcctcccaatccactggcggccaagttcgacgtcttgtccggc

SEQ ID NO: 151460 - DNA, 762 bp, Zea Mays
atcgcccgcaacacgggacacccctcggttcgccccccttcctccggatcgcctggtccgcgctcacccaggctttctttgcagccgaagagccgctaccgtcgacccaagcccttgccgtgcctcggacaccatttgtgagccccagaatctctcctcaaggtaaccgacctaaccccgcccctaatttcccatgtcttgcacttactctcctgcgattgctcgctggagtgctccccggtccgccaaggactgcccctccaccgtctggccacctcaccccctttcctgttgtcccaaccctgccatcggattcaccgagtcctccccaacctcccaggttacctagaccaccctcgcgcccctaggagccccagtctacttcaccgccggttgtgccgtcgcgggtgcgtattgtgctgcctgtggccagccggagaggacaaactccctagcgcccgatcctaaccgtccagtcttgatcggatggcccggatgcgtggataacgatttgcatggtccgtgtagccataaccattgatccgtgatctagcggccaacgcgccccgcgctctcagcacaccgctgacccgtgggccccgtgcgccagtgcctcaacccttccctaccccacctatgagctgcactcgcatgccggcgcccgcaggatctgatctcatccgttcgcttgtgatcgtgcggtcaaggttgcctgataccccttcgcgtgtaaatttgctaaagagacccttgggtttctga

SEQ ID NO: 151461 - DNA, 2925 bp, Zea Mays
tgtctgtgactggagggtgtagttatacagcattcccacatgaatttcttaggaaacattatagtgatggtggattcctatctccaaaattgttaccagatttccacattcaaagagagccttcaaactaagtgggtaaacagagagtaactgtgggaaagaggtcaagtacttaccatattttcatggtcaggagaaattttattagtacatagataaacagcaggtagaacatcatcaggggataaagcaagcaaactgcattacagaaggtaagatgttaagcattccccccagtaatgaacatatcctgtggacgatcaacatgtatagaacaatcaaagaggtaaacattcagaaacctcctgaacatgttgcaaaatattgcgatagttttgatctttcctttttccttttcaaccaagtcaaatgtgcgagccaaatgcaagtatggtgcaggctgtcctgctatccagcaagctgcagaaatgcagatacatatggcatgactaactattaaataagatgctaaagaatatcaggaataagcagctaaccatgttcaataggtagatacttttcaattagcagtgatgtgttggcagaatctccatgtgctaaagaagttcctacatgtaagtttgacatttttggagtagcctgagaataaccactagccatgtctgtttcactacaattatctgcagtttcaccttgtgcattctgcagcataatattcttgtcaacctcaattacattattaccctcacttgaactgtaaaatatgtcaactgctacagccacatctccgtttgccttctcaagcaaataaactgcatattctctagacatgctaccatctacaatctggagaagctggtctacaatctgatcttgtgttttttcagtatcagctaactgatcactgttttccacgttattttgatgtgcctccacagttactctttcaggtctacaccttttaaaagcagcttcagtagctctaatgaaataatttgtaattgtggactgcttccgcccaccagattctgttgaggaagttaatcggcctttcttttttggcttgtttgtattgctggaacccctcttatttacctttttgggagtatttggtttcattctcataggagacaaatttaccagttttgcagagtattccacaggcttctgtgaaaataaagaagattcttgctgactacttacatcagcagacgacccatgattagaagaatggtttttctctgtcttgggtgtgccattacaagaaacatttgcttcttcaaagaaatctctttcccgctcaaaaaaaatcgatgctgctttaacaacatcaccttcagaactcatcagcaggtctgtgatctgttcctggctcacccacgagggtaagaaatctgacagttctttaagtgtttcctgcatagtattctccatcagtttatcctgttgttcagaagcagaagagattgctggtaacaaagcagcatcctccccatcaagctggctcgagcaattaacaaccacatctttgcagctacgagtagcatctattgacctacgatggaatgccatcaagaactcctgtttgtttgctgtctcatcaaccaacccagcaaaatgcttctgcagagcaactgcctccttactatcgagcttcccagcatccactccggcagtagggatcacactctttgggtgcaaaaacttaacatagtcgcgcaactcattgtaacttgagtgctcactataaggaacaagatggatttcgagtgaatctttcaccctaacagcaaaaccttccttcttggtttcatacatccacccagttggtacaaacccaacagccttagcataccctctctccatcatgatctccttcaatttcacaaaattcggctggaagtagggcgaagtctcccctaacaaattccacccaagaacatgcacatccgtccctgttgcgtcctcagtaaaaacgctattcttcccaccgaaccccaacagtgtcaaaatcttcatcttcctactgtccacatggattgaacacccacagcgctgtgcgacctccagcaaaatcttctccttgccgacagcataggtggcgatcagacatagcacacgctctcctgatactgaactctcctctttcacacgtttgattgcattcactatgtaatccacagaatcctcttgcgaagggaatgtaaacttggggttgcagtatgtggtgtccagaaacaccgcatcagcacggacgaactccagcaagttaggatcacgcgtcatagactctgtgtaacgaaagtcaccggtgtgcacatatctctcggctctcggcccaggagaggcgaagaggaactgaacggcaccgggacaatgattggcgtccacggcggtgacgccccacccatcaacggtgatacggacaccgatatcgagggagacgacaagttgaggcgggacagagagcacggatgagacgaggcgtgcggttggcgcggagcagaatacaaggccgcggcgccaggaagggccgaggccactgtagtggtcggagtggaagtgcgagaggaagtaggcgacagagaagtttccggcatggcggaaggcatcgacaaggaagcgggagcccgggatgagtgcggcgggaggcacagagaccgggacagggggaagaggcgtggaggcggaggtgaagatggagaaggcatgggaagaggggagagaggcgatggaggagaggaagagcgatgaggtggtgacggacagcgacttggaatcgtcgggggaggagaggagggacgccattgattgctgcggcgggtttagggtttggaggcgccggcggcggtggcggagaacggcatggcgcggtggtggtggcgcgcgctgtgaggctcaggc

SEQ ID NO: 151462 - DNA, 388 bp, Zea Mays
acaggaggaaacaaaatacaaatttacagccgctcgtccacgttcgtatctgagattttggcagcggttaacggcggcggaagtgagaggaccggccggcgattagcagcgagaaaatgtctagcaccgtcgctggcgatgaaatgccacctgtatcgtctgtgcataagccaacaggtacgtctatttcaatggcgatgaaatgccacctggcgatgaaatttgcagggtcaaaaggatacagctacattgtttatgtttgaaataagagttgcaagggcatacactatagctgtgatgacaaggttccaggagaccttaaaatatgcaactacataccgaatagaccgtgatacagagggtgatgcaaatgattgggtggtgaaac

SEQ ID NO: 151463 - DNA, 709 bp, Zea Mays
tatagtgctaagcggatatgtagattcttatacaagcataacaggtaatatttatattgtgaaattcttgtacaagcataatagttaatatttctatagttaatctgataatattctgattttttcaggcttcatgctatgatgaaagagaagataggtggagagcttgttagatggaatgccacgaggtttggcacactttttttgttcctacagagtttttgggacagacaagacaagttccaagcttggatggtgtctagcgattggaaaaataatgattagagagatgaggaagacacaaattcacatacgattgtttgatagataggatatggtgggagaaggttgaaatggtgctgaaaactgtgacaccactatattttgtgcttcaatttgttgaccaacagaaaaatggaaccatttctagctttcttccaaaaatgttatctgcttaagctaagatctttgctaagttaaagcatgacaaaaatgtcaaaagagatttcatgaagaaagtgaatgaaataattaaaaagaaaactcagtatcttctcagtgatactctcatgcttgcaggtattatacctattacctatttacactctcacgtttgctgctagtatagtttacaatttctgaaatttctatctagttgtcatgcttttttgtggatgcctattgtaggggctacacttgatccaaaagc

SEQ ID NO: 151464 - DNA, 327 bp, Zea Mays
tgaatatgaacagagcaaacacatgaaattcctatccagctttgacaacattaacagctgttatattggagttccaagtagtacataagggggaagtttggacctgaagtgtggggcatacattgccatataactatggaatgaaaagagattgatcatcatattcctgctttcaagaaaactttgaaatatttgaatggtacgatactatttttctgcttttgagaaaacaaacagaagcctgtttggaaagaagagactggatgctacaaaacaaggcagaactgatcatcatggaactgaagtagagctttcacgaactcccct

SEQ ID NO: 151465 - DNA, 1007 bp, Zea Mays
gttgaattgtttagggtttaggatttagggtttggtattttgctcaatatattgttaaacttggatggcttgtaccatatacaagcaaccagtttgcaactgattgttgccattgctgtggcggtggtgtcgtttatatttccaagtgaacaatcctactcaaaagttcgtttagcgtgtggagggaggagttcatgtttcttctgcgagtgttgtgttgatgttggggcaaatctgagccattcaatgtgacattactctttctattctgtcatatacttttgtctatgattctatttccttcatgtatccttcttttgctgtgatttcaacttgggacctggatcatgataccgatgggacaaatctgagttcgatttgatgtcatataagattcttgactcgggtagatttgatgcatatattcttcatgtttttggttgggatgcccaagcttaactggatgagttgctcattttgttctaaagaatgattttatttcttctccacactcttatttactacttttattcttccaccaatacttataactggttccctaatgcgtctttacttctgtgtcctgaggcactagcttggaaatccctttgggtaactggcattggtgttagtggtcctaattttgtgccatggctttgatcaatctggattgatcaatccaaatgatagacatgctaaattattgtcatgagcttggttgtgctttttttggtcatgtttgtgaaaagcttctctacgtttgtgctgtttctatgctgttcacgcatgtatcgatctattttcccaagtgcagagacattgggagttatgatgcagagttgttggagagctttctttccatcctgccataaaaccaagattgggagtgtgtttctgggaactactggagatgctctgatagggagtagcgttcacaagcatgttttcactactactacttgatggatggaacatgtatactttcctcctaatgtgttgcagtggtg

SEQ ID NO: 151466 - DNA, 976 bp, Zea Mays
gttccctgatttcctaattgtacagctgttaaatatacatatgattcttttcatctgcttacactcttggtgtaaagtaattgttaatctatgctctattcccaatgtattggagatttggactcaccaaaatcacggcatttctatgatttcattgttacagaacttgatgcttaatttcaccgccccttcttttcaacaccaactaatagtcttgtcactagtgctaacagagggaaagggacttgtcagtagagaactagtatgtatttaattcgttgcctgaacattctagccccaaagaggactgtaggatcttctacgagctcatttatgaaaataaagcattagctgtcaaaaatatacgaacgaacacaactactagtcctctctgccaacgtatttgggagagagatagtaatgtggggcttgattgaagagaataatagataacagagagtatgagctggtgggcggcagaaagggtgggcaatcatcactgcttttcaataaagtggtccacttacatgtcaggcatctgtttcatggtctacaacttgaatttggagatattaatcatcacaaggtgaagcattggtccacatatttgttcatgatggaatgcaaagtttattgagatgtttactgtttattcatgagccttcttgaatattttcttataggtgctgttatatagagtaaaatagcaaagttttctcaagtttgctataaaaattgcttgtgcgttgtctatcagaaaagtactgaccaggacccaccagtaaaattccaaagtgaattataactccatgattcatccacactcctcatgtagccaatgagtttcactagtaatgtgtgctagtctcagttgcaaaaacctattgcaaagaaactttcttatggcttaatgtaatgcacgcatgttcacctttttagcctgtgtgtgtattcaattattgtgacaaaatttccc

SEQ ID NO: 151467 - DNA, 382 bp, Zea Mays
gtgattatgagagcataggtatccaaatacttattatgtgggataaaagatggataggttagggcaagaatagccaggggtaagaaagtttatggtgaggaagaactccgtgttgggtggtaatgcatctgaaggttgagttcgacttctcttcttccttgacgaggttgatcttttccttttccagccttggtctcattaatttgatgttactgtatatcagcagagttgggacatatggtcgaagtagttatggatgagatggactatatgatgtaggtcaaaagtttgtttgatgttaggtggggaaagacagattatgcaatccatcatgactctactggttgagttagatctttttgctcttggttgttattctaga

SEQ ID NO: 151468 - DNA, 1125 bp, Zea Mays
aagccactaaaatcaccaaggaattgaatccttacttttgtggcttaggcaccaattccttagattctctccaccaatcctggaacacagcagcatcaggaatgggcgccaagtgctgcaacctcattctgcccaaacttctgaaccagacctctcttgcaaaaacacaagacaccaacaagtgttgcaccgtctctttctgcttatcacaaagtaagaaacactgggggtggtccaaacctctacgagctagacgatcagtcgtccaacaatgattaatagaggctagccaaatgaagaagccttgttaaacagaggttggattgctgatattagaggggcattaactgtgggagctttgactgactatcttcacctttggaactctttatctggtatggtgttgcaacctaatactaaggataaacatattttttcagttgcccctgatatccaatattctgctagttcgtatacaatggcctctttttggatctgtttcctttgaacattatcaaaggatctagaagtcttgggcacccccaaatgtaagttcttttttgttgttggtggctcataatagatgctggactgctgacaggctggaaaaaagaggcttgaatcaccctcctagatgccccatttgtgattaagagccagagaccaaccatttgctggtatcttgtgttttctcaagggtgtgctggtataacattctaagaaagtttgggtcctcttcatgatgacactcacttcctattgtggtggaaaagaatttcagccattgtgtctggcttgacaaggattggactctctgctcattcttggggcatggttgatttggaagcataggaacggagcgatatttgatggtgtgtcaccaagcctcaccatgctcttggattttgtcaatgagaagagggagaaatggcaagctgctggagcaaagggtctctcctttttggttgctcccagtaccagtggtggagggctgcagtctcggtgtttttatggatagttttgtgtatgcttgtttttggccgccgtagcgagaggtttgtatttgggtgctcctttgggcccctttttcttcttatctccggttgggccgttacagagtggacc

SEQ ID NO: 151469 - DNA, 525 bp, Zea Mays
ggcgccaccaccgatgtcccagcaggagcggcatcagaagaatcttcggctaacatatcaagcatggcacttatctctgcatcactgggatccaaaggcacctcaaaatgaacctgtcgttcatcatcaggaatttcttcaagcgaagcaaccaacgcactaacttcttcggtagagggtcgcactctaaggcccaaaccgccagcgccagcaggaggacttgacacgaaatgggtaaaggccttggaaggaggcaagttccaagccgagtaggcaacaggggcaccaacatttgacaccttgcccctaagtatcatttcaagtcggctcaccaagaccacatcaggaattcttctattggtgacccgggtggagtcagctagacctcggtacaggtaggccgggtatgccctgtccttcaatggttgaatgttcttgaagacaaagtcagcaaccacagcttctgcagtcagacccctctccttcaacaatccaacttcagctagcagaactcctgcctcagcc

SEQ ID NO: 151470 - DNA, 307 bp, Zea Mays
atacagacggccagccaatcacagccgcaaacccgtggatctacggtgctcgtgtttcttccccgctcgaattcgggaacggcggcgccgcccgcgttgatttcaaatcccgacgagcaatttgtcccccaacaatacctaatcccggatttaatggagttctagcgcatgcggagatgaagacggtcaagggcagagggtacctcgatggcgcagctgatgccgtccacacgacccgcggatccgcagcggttgtagcacgacggtgagcaattcccccctcactgcacgacgattcccgccggcg

SEQ ID NO: 151471 - DNA, 905 bp, Zea Mays
ggacggtctcaaatgctgcaattgaccaaataatttggctggttttgaatggtcagggtggcatatactgtccgcatccgcaatttacatggcattgcaccgcattcgaatcattccagaccaagacgatagagtgtttttattcttctattctacttttcaaattgttggtccatgccattgtaccttgcatactagttccataaacctgcaccatccttttctacctccaccatccctgccaggattgcagtggcaacgtacggcggtcatttacccatgttccaaccgacctgatcctaccatgtgaccatacacgagctggatgatatgatatggaaatgacggccatcacgtaactacatccagagccttgaatcttgatctcttcgatcaaagcatctccttttcaccaagtgttacgatcaaaggatggcatggaccaacaatggatcgataccctttcaaaaaaatcaatggaattggtaaacaagttaataaaacgaggaaaactggaaaagttgagttggaagaataggttggagacgactgggatagatccaataagaagaacccagctaggcagctaagctaaaaaaagaagaggaggaaacagctatgaatggtacggcacggacacaataatcttaggacagtggcaccaccgttcatccaaggtaacgctttggcacttccaatgctagtaataataccagcagctataactgatcctgacttgcatcattgtacattcaactgaattaggaggcttattggtcgtccaaacagctcccgcaccttccaattcgaagtttcttgttgagtacagcatggttgacttgatactagcatctgtaatggaattccacaagctgagtaggctaaaaatatggaactgccttctg

SEQ ID NO: 151472 - DNA, 747 bp, Zea Mays
aaaattctactaccagtagagataacatcagtttgaatgcataatggaacatgatcagaaaaagatctattcaaagcccgcacattagtattattatacgcgagatcccactcaggactagccaaaaaacgatctaatttttcaaaggtggggtcaatccggttgttagaccaggtgaacaatctattgctcaaatcaaactctataagcccattttgctcaattatactattaaaaaggaagctccacttgttaactcctccaggtttatttttctcatccgcttttcttataatattaaaatcaccacccacaagcaaaggagcacgacttctcgagcaaaaagacgacagttcactcagaaatctgcatttattttccttctgagcagccccatacacattaataaaattccagatgaaaattttttccctatggtaaatcaaggtacgaatcataaattccccaatctcattttctctcacatcaaaaacatcagcattaaaacccactaacaaaccaccagatctaccaatagggggggcagaaaaccaggcaaaagatttattaccagccagcgaatttaaccagaactcactaaaattacttcttagagtttcttgcaaaccaataaagtccactttctcatctttaatgagttcacgcagaaactgaaccttagagccaatccctaacccctgacaattccaaatgaggcctatcatcaaactgggtcaggggggaggt

SEQ ID NO: 151473 - DNA, 3058 bp, Zea Mays
gggcgctaccgcccatggaggtgcggcggttccggtggtggcgggacgaggcggcagcggtggaggaggaggaggccgaggtggagaggaggttggcggccaagcgccgcaagcgctccgtcgccgagctcttcgccgcggtcccgcgggtgccccgaggcggccaggggcgtggcaaggggaaggctgccaagaggaaggcggagaaagacaagggaaagctagtgctcgctgccagtgttaagaccaacaagaagaaaaaggtcccgactgggatcgatgccagaccaaaggtatagcgcattgcatcgaccatcgacttgctttccatttctgatatcacgattttgtcggcgcagtagaatgtttgtattctcaggcaggtacaggtctgccggagcttgtatgctacaaacaagtggatcttattgttcagctgaccaatgaccatacgcacagattgctaactccttgagagttcctaaatttgtgctcatccattattcgtattcctgcttttgggtaattgctaaccagccaaaaagctttaggtgtgctttgccttcatcattagatacaaggtgtatcagatggcataaatattgccagcgtataattcggatgcatagcaatcagttgtaactaaaacttacttattgactgcttccatattatttgttgtgaatgactaaggtgtgagaaaaaattcccaccaccttctagctgttgttaatgttttggttacttgtcacgttttcccttgagttttcatctgtggtgtctactggcctcatgtgtctaatgccccttattgttcttgatcttcatgttgtttgagttagatacttagattgttttattcaatgtcactttcttagtagtttctattactatgtgatattcatgcctgctcaattgttatagggacacttgcttttgcaaagtgctgaactgctggctaaaatatcatttttgttgtttgttttgttatggaggtatgccatagtttggttgactgagtgtgaatacttaccatgtacaaaatacttgcaacgttcccaagtaatgcggtatatagtatatactgtatagaatggtgaaagtaatagaagtctctcacctcccactttgttgataggttcaaataataccttcaaatacaacttgtagcagaaatacctcaagagatgtgatacatttgtgttttttttctcatttcaggagaaaaacagtggggtaaaggtgaactcagttagcatttctaagtcatttcagcatcctataaaaaatagggaacccaagagttcttgcaagaaaaagggaaaacaagaggtctcagtcttactggataagaaaagtaagaagggaaacagaaagtcagttttggaaatacacaaaaaggatatggcaaacagtgttcaaactcaaagcatttgtaaggatcagtcaaaagcaggttctagcacagcaccgaatacaacagatatgaggtgtaaattaaattcttgttgcaaatcaaagcatgttaccttttctgatggcgctgacatatttggaaggaccgcacatctacctgcagataatacaaagcaaccacaatctgtacagacattccagcaagccactcaggaaggtcgtgaccaccgtgatagagatgatcaacagttggtttatcaacaagctgaagctatatcccggactgttgagattaccaattctttgtctgaaaatgtagtactagctggtgtttgccgtacaatcccacttaccaaaccaaaagatatcactatactgggaaactcagtggatctgaatcactgcatagaaacttgtcatggcagtaactgtttgaactccacgagtttggcaagcttatctagtaagatgccatgtcaaaaattccaaggtgtgaactctcatctgaatggcaacaatgtttcaagtcttgatgttcagtatcttggagaacaaaaccatatgatatcacaagcatcatttaatcctgttagtttggcacccaagggagtatcaggtgatatgagcccattgtcagagccttccagttgttgtttatatgataggagcagtatcacgttccacgagaaggctgatgctaattaccacttgggaaaagttagttctgagattcttagatctggtaacgtggtgagaagcataagctcttcaacaggatcaaataaaccagcacaagccatcgattgtgtatctgctgcattcaggaacatgcacagccgccgtgacgattatgtcggccttcctatcaattcacgaggtgaattcgtcaaggttcatcctggtggcacccctaattctgttgacatttttacgaggcagtgtttgggggagaattcctcatgcccctcagattatccaaccatcttcagttctattacccgcatggatcatgtacccaactatcatgctcgacaattctatacaatagaccagtctgcttttcatgcagatcctcgttttcctccagcgggcccaatggcatatgggatggatgtgaggcagtggccaagttctgaaagagcaaaagttcattactacacaattccaaacaaaaagtatccatgcgccaaacagcaagagctttcaatggatcacaattcacagcagaagctacttgggctgcgaagccgctgtcccagccagaactctgggcagggtatgcagcacaacgccgaaacgacactgcgcctcatgggaaaaacggtcacacttgggaccagcagcagcatgcactgtagaggcctgaacaacggaaccccagcttgttccagtaaacaaagccaagctgaagaccggggaacgcgtacgaaagttttcccacagctgtttcacggaggactggctctggctgatcccgctgctgcgtgtaggatatcagatggagagaggcaaccgtctggacacccgtcacgtttctctttggctccagcagctgttcgggcttttctgcctggtaccagcagtttcagaacaggtggccacaaccagcaacctgaactagcaacagccagtaagaatcctt

SEQ ID NO: 151474 - DNA, 324 bp, Zea Mays
ggcggaggggcttacatgcggcgagactactccggtgaggtggtcgaggtggtaggggaggtcctgagggtcacggcgatgtgcgggtcgctgtcggggatggtcggagtcggccggtccacgtgcgcaggcaggggagctcgtcggcagcgaggagtccggcctaaccagggcacaattgatcaatcaaatgggtcagagagcttcactagggatcaaggaagatgtgtgtgtgcggaattgaagaacgactcaccggatttctcggtctacacgcgtaggtgggcggctgaagttctgctgtgaagttctgccgggtccgag

SEQ ID NO: 151475 - DNA, 570 bp, Zea Mays
gcttggatatctgtttataagcagtaacttgcaggacaaggggctgtagattttagatgcttattttacagctattgtataaccagttcgctgctgcatctcacaaatcaacttcagtgttataaagttgtatttattgatatcgattaatcacaattagttgtcctagtcagtatcctgaacttgactaggggctacgacctgattaggctgattagttttctggtagtctgattcattgtcgacttctgatgattagtcggatgactagtgggtggaagaatagaaaaaatggaattgctgggcagtttaggacatgggctacatctgggatggtttacggcaattggcctcatgtttttcagcccaatttgcaaccctacatgcagccaccactctggagttgtctccatgcttgatttgcactctagaacatatactatatagtgtatatttggtatactagtcctgatatatataggttgagtaggatagaccagggctgactagtcgtcctggttgatgactaatcgtgactagttgcctggtgggtcccatgttgattagaat

SEQ ID NO: 151476 - DNA, 453 bp, Zea Mays
gcaaggaaaaagcgccaaccatccggagacgccagccaaataggcgtgtgattgggccagaatgggccaaatgaagatatacatgtaagagtgggctgaatgccgtgagctaggtttacgtgagggtataaatactcaaacaatgtaataagctggtaactttgcagaagagaaatatacgccgccactccgtctggccttcgtctctcttcctcctcttgcattccttgcttgctccccacgcacagcagtatatcccctctctaacatctggtattcggagatagttcatcctggattccacaacccaaattccgcgccgtccccgatctactgctatggccaactccgattcggctgtagcgaagatgctcgaggaattgcagcacatggagaaccgcctgacgggagtcattgaaggtcgctgcctcggcatggagcgtgacttcgacg

SEQ ID NO: 151477 - DNA, 469 bp, Zea Mays
caaatctcccttcatgatgcctaagacctaagcattaaacatatgcactatataagatattaattgtacacaactacatacattgatctttctgatttaaagctctataacaatttacagtaagtccctagaacataatctaaagtcactggactaacagttcaactcatgatggcattttccagccaataccatgattatatgaaaggttgtgggccagcaaaccgtgcatttgaccatacaaatactattttgcaccgtggactatattgtttacatagtagagtttcgaataagagatgagataggtaagactgctagaggtagcctaggcatgccattgtaagggataaaaaattaaagcatctaatagcaaccgatcatttaaggtgtgtttggtttgtgaaatcacccattcttcatgaggtgatgcatctaatgatttcaagtcgtccgactaatcgtgatt

SEQ ID NO: 151478 - DNA, 945 bp, Zea Mays
cttagtagttattacttgataaaagctggactatgaaacaagctgtggtagttaacatatgcaaattttagggggggggtagtctatccgtaaattaacatttgacactggttagttcaaaattgaactaaccaacgtcagatattaatggatggagatatagtagaactaattaagtgatggaagcaaggaatatgcatctcccagcaaaataattttctcagaacaatagaagtgactcatcattcagtacaccaactgtgaaagcagacgacttacctgttcagcataactagaaaaggatgacgggaaattaagaaccacaagctccaaaaacctaaaagccattaactggatctccacagatagatgggtcgttccattcagaatattagccatcagcaaaaacagtgtactccgcacagatatagtgttatcctgtaagcataattatagtctcacatctgaagtcaaaagctagaaattttaactggacaaggaataacaaagcgatgcaaataaagaatgatgtgcttgaaatagccaaaaataaaaagaaacttatacgatgtatttgtgaatgcaacaaataaagcatgtgccatattgtggttagtagaaatcatgatatcacacaagcaatattattttttactggcatatttacagaaaactggaatgtcaaaatgcaatgcaacgtgtaagaacatcatgaataaccatttcaattaaaagaatacatttctaatcaagcaaaagtacagaaaagcggagaaagagatatacctctttcaaagatgggaagatcagagactgcagtatattgtataacgattcacggaccaccttgtcagtatcacatattctctcctgcagcttctcaattatagcaaccttgtgcagtttaagctctgttgggtgcttgacaacaatgtcctttattcc

SEQ ID NO: 151479 - DNA, 359 bp, Zea Mays
agtaggatgatgacatcactacggggagaagcgacaatcccatctccgccgtgggaatcatgggtgatcgcttcgttcttgatggtttcgcctgtttttcctggtagtcttaggtactattcttgcttacctggccatcgctggcactattttttgtggcatctggtgggttcgactatgacgattaccctcacctatgtaaatcctggattgatggattttttaatagctaaatagcaattctagccgactatttagacttccctgtgtatggtgttcgttggagcttttttcatttgggagcatcgtgcgaaagtctgaatgccagattaagaatgccaagaattactcacacccgg

SEQ ID NO: 151480 - DNA, 470 bp, Zea Mays
ctacataaagttaacagcttataggcttagaagatggtgtactcaacctgcctaattagcattgcgaatttatttttatgtgcacctggaataaatactgcagttgataggtgtgtttcagtgagtcaaagcattccatcttgtaagtggttgccagggttgcatatgaatttgttttatgtgcaccgggaataaatactgcagttgataggtgtgtttcagtgagtcaaagcattccatcttgtaactttaagtggttgctagggttgcatatgaatttgttttatgtgcacctggaataaatactgcagttgatagatgtgtttcagcaagtcaaagcatttcatcttataagtggttgcgagggttgtattgaattattttgcatggtcaagttatatccaaacgattgaatgctgcacagatgccctcaactgaatatgaagtattgccttaatcatcagagaatg

SEQ ID NO: 151481 - DNA, 408 bp, Zea Mays
cggggagtttcactggcttttgtgggggctgtccatggggaaggatcgagcagaaaggggctggaatggcctagccatggtgggcggtgctcgggcgtgtctgcgggcggcggtgctctttgatctcatgcgatcaccggttgccaagttcgagcgaatgttaggggagcgcgggggagtgagaccgaggtctgagcgacctttataggcacggacgcgagcgaacggggtcgtggccaaccgtgggcacggggcgcacgcgtgcgtgggttggccatgctctagcgtgccgtccatggtcgaacacgtcgcctggtttcgtttgcccatcttctcgagcgcgcagtgacccatccaagcttgttcttgccatggccactacacaaaatcccttcacctccccttaag

SEQ ID NO: 151482 - DNA, 407 bp, Zea Mays
ggcctctccaggcctctagtctaagtaaaaatacttgtcattttggacatggcatataacatttgaagtttgaacattgttttctactaaaatatatttacaatctaattaacatatgaaagtgtaaaaggaaatatcaaggaaaacctgtatgtaggacttatgtttccaagctaaatatttttaaaagaatattgatagccaaagtttcgcatatttgactggatcttgtccaaaaggccaattgtttgactgaaaaggacttatttgatattgaatcatgtaaagaaagttctcagcaaacccaagtgaacatatgccaggaagcacaaggccagcatcataccttatcttccctggacttaatcagatattctacccctttttcattgttcggtcatgcatcg

SEQ ID NO: 151483 - DNA, 442 bp, Zea Mays
agcaactctgactcgggcagtagcaggaagcagtgtagtacgtttcaggcgggcaactgtactttggctaatgaaggaatgagaacttccagaatcaataaggatgaccacttcaaaattctgcatgacacccagtaaggacaaggctctttttggaattaccccttttgctgcatcagatgagatagccacaaacaattgttcctctgcgtctggtaaactctgctgatatggagaatcatctgctggaagaagatcccagacttcttgaagagcatgcaattgcacagtggggttacaagtgtgaccacgatgccatttttcagcacatcgcacacacaacccttttgcccgtctgaaggaacgaagagcagcaagcttgtcatcagtcgtgcgtccttgaaaaggtggacgacgatcactcagcagatgtggtgatgca

SEQ ID NO: 151484 - DNA, 301 bp, Zea Mays
aaggggtatggtggcatcttgaccatgggatttgatatggagggctcggattaaatctgcataagcgctgaaccggtacacgatcgtggtcgtcggattcgcgatcaatggctatgcttttaagatgatgcgatatactctggatcaccggatccaaatctaacggcctgagttcaatccaggtgaaggggtacacggttctaatcttgatcgttcaatctaaatctggcggctgcaacatcatcaaccctagatcaaatcttggcccttggtttgcgatgaacggttaggagtgcttctc

SEQ ID NO: 151485 - DNA, 697 bp, Zea Mays
aagccgtttcaaattggaaacaaccgtccaacgtcagtgaagtacgaagctttctgggaatggcagggtattaccgccgctttatcaagggattctccagcatagcaaaacctatgaccgaacttctcaaaaaggacaataagtttgtgtggactcccaaatgtgaggaaagtttccagatcatcaaggaaaagcttacaaccgcaccagttttgacactgccagatatacaccaggaatttgtcatcttctgtgatgcttccaagcaaggcttaaggtgtgtcttgatgcaaaatgagaaagttattgcttatgcatcccgcttactcaagccacatgagcagaactaccctacccacgatctggaattggcagccatagtgcacgccctaaaaatatggagacattatctgatcgggaacaaatgccacatcttcactgatcacaagagtctgaagtacatcttcacgcaaccggaccttaacctccgtcaaagaagatggcttgaattaatcaaggattatgacctcgaaatccactaccaccccgggaaggccaacgtggtagcagacgccctcagccgaaaacctttcgagattaaaggaaccaactttctagaagattggaagaaagagtcagctcaactaaatgcatgtctgggaggcaacggtagcctggaagtcaagccaaatctaga

SEQ ID NO: 151486 - DNA, 368 bp, Zea Mays
cgaagggtggcgtttctgccttcgctccaacatcggcgctttagaggtagctgccgagttatgctgagccacgtcggcgctttagaggtagctgccgagctatgcgaggacgtcttgctttttccgagtgatgacttgacactttttagaaatagtgtctgacccgggaaaaccccatttatatcacgtcgtcgcacgcctctgcgttctgagccctaacttcaccttcctctaaatattactctacttccctctgatttcgcttcccttcaatccgctaacgagattgcgatggcgcccaagcggaagaaccaaaattctgctgcagtggtcattcctcccatcgaccccaacagccagttgccttt

SEQ ID NO: 151487 - DNA, 1306 bp, Zea Mays
aagcactaaaatcggataaaatgttagtttcttcatcttcatcttcatcttcgccttctccttctccttctccttctttgtccttcactgaagataaatgtttgatagcattctgcattatgtgaaaggtacacagcccatgatatgattctataaatactttgtaaatagcctttcccattgctgcatcttgatccgtatagatagttctaggttgttttccattatgtgcagctaataaagtctgaaaaagccatataaatgagtcctctgtttcatcaaatagaagtacagcaccaaatacagtggtttctctaaactgatttagcccaagaaaaacaccaaaaggcatatactctttgttggtgccaaaagtagtgtcaaatgtaaccacatcaccaaagtgtgcatagtcaagaatcatctttgcatcaacccaaaatatgttggttatatgctcctcacaatctaactgcaaagcatattggaatgatggattttgagcaattttgtcatgaaaatacttcaacatacttccagcctgtccataagccaaatccctctgccgtttgctttgcaagtaatttttgctatcacggcaagtgtagctaaggttaagtgatccaccaacttgatgactagccaactcatgtgcagcttttggtctaattccagaatcatccgcagtctctatttcaaaagcttgcaattctgaaatttttctctgcgatgccatcaagtgccgagtttctggcaagtgaagaaggtgattgtgttcaagcataacatctgtgacttcataatttcctgcacctcgatccaatataaggctcattcgagctttgcaatcagttcttgtttcagctctaaagcactttggcacatgatttgtttgccctttccttcggaagccctcattggaacaaacaaatctgcatgaggtcaccttacgatcaaaggtgcttacatttgtgtatcttttcctcacatcaaagcctgtgtgaccaccatatgccaaccaaaactgccaagcctcatctgcacttttgaaccttaaaccaactttaggagtccccttgtttaattctgccatggccttgtacaccactcacaattgcacaaatttgttctctgagacacacatcaactagttctgtaacccaaaaaaattgacaaaccagaaaatataaaaatcttgtacctggatatagcctgacacgagagaactcttccaggagaggcgcggagggcggcgcggctgggcaccggacgacgggcggcgcagccaggcggacgtcaggcggcg

SEQ ID NO: 151488 - DNA, 473 bp, Zea Mays
ctcaacgctcgcaattttttcacctcccatggagttcttttacgcatgtcttgtccttacacttcccccaaaacggcaaggtcgaacgcataattcgctccatcaataatgtcgtccgcacgcttctcttccaagccagcatccctcccactttctgggctgctgctctcggtactgccacatatcttctaaatatctttcccacaaagacacttgcttccagcacaccccacttcgccttacttggcaaacacccctcgtacgaacatcttcgtgttttcggctgcaagtgctaccctaatctcacccccactgcaccccacaaactatctcctcgctccaccctatgcgtcttccttgggtattctccccaccacaaaggatacctctgccttgatcgtctctctcaccgcatcatcatctctcgccatgtggtcttcgaggagacctcttttcccttttctgaggatctc

SEQ ID NO: 151489 - DNA, 274 bp, Zea Mays
aagaacaggacatgtgggagacaaaataaatgatgtcctcaaatgttgcatacgaatatgacatagaagttcctagaaatgtgatatttgtaatagtagtagtaaccatataattatgctgctaagacaagaacagaaactaaaataatgtggcccgcaatgtatggtccgtattgatttgcttgtcgtcttaatcaccctaaacgcatctatcgtcgaacagattaatatagagttatttggtcacgccgtcggtttgtgttcatgaaaccct

SEQ ID NO: 151490 - DNA, 365 bp, Zea Mays
ctcgcttgtatatgtgtaaagggttgtaagatgaagttgtgtgccctcgcgtgcctgtgcctgcgagggcgctgtgtactttgtgtggcatggttggctatgctgtgctggtgtgattatagtcggtcttagcgcggatggtttgatgctgtcgcttctgcttttgttgtactagcttgaccgcgccctgaggcggcttctgcgcggagtctttgtgagagacatcggaatttctcgcacttgttgtgctaagtccggctgcacccttaggcgacttctgcgcggatggtcttcgcgatagacatcggaatttttcgcacttgttgtgctaagtccggctgcacccttaggcgacttctgcgcgg

SEQ ID NO: 151491 - DNA, 403 bp, Zea Mays
agccatttattacaacatacctgtcaacatcactcgtggtccgtcacatcccatgcatgttttgaacgtattgaagaccactcgaatgtatcaactgtctcgtctcctagtaaagcaaacccaaatattgtgcattgtaggtggtggttcgagccaacaaacattcctaatggcttatcgtacatattagtcttatgtgtagtatcaaatgtaactgcatcaccaaaatcaatgtactcggcttgctggctagcatgggaccaaaatatgcttaaaattttcccttctttgtccagttgaaagtctgaaaaaaattgtggattatctttcttgcataatgaaaaaaaagataacagctttgacacatcatttgcatttctttccctttgccatgcttttttcc

SEQ ID NO: 151492 - DNA, 381 bp, Zea Mays
gtttttggcttaccaggatcatgtgggaccagctccgatgaagcttttccatttttcttaggcatgcaactccgatgaagctgctggccatgtcgtcctccgccggcctatttccatggccacgacaaaattgaggatcggttaccacctacctgcgtccatcggatgaacctatgtcgctgctgcttaactgcacattgagattgagattgtgtggttgtcgctgctgcttaactgcacattgagattgagattgtgtggtgttttgtttcaggttcagcctcaccgcctactgtggggaggacaacattgtagttttagactgctgctctacaagtacctactgccctacttcattttcagggtgcccttatttctaag

SEQ ID NO: 151493 - DNA, 477 bp, Zea Mays
gtcggttgcagcaaggatgaatttatgtcctttagaagatggggggtttattggcccgactacatctattccccacatttcaaagggccaagacatattggttgggtgtaatggttcgtggggctgatgtatgaagttgccatgtatttggcattcatggcatctttttgcaaatttcatggcatcgtcgaacattgtaggccaataataacccaaatgtcttaattggtagtgcaacttgggcccagattggtgtgcgccacatattccagaatgcacttcatttaaggcttcgatcacttcgctaccagcaaggcaacgaagtaaaataccatcacacgaacggcgataaagggtgtcatttatgcatgtataatttaatgacctctttcgaatcctagacttttcattagaatccagtggtagatatccatgaagtagataatctaagaaaggtgttctccaatcgcctgtctc

SEQ ID NO: 151494 - DNA, 374 bp, Zea Mays
ggctacgtgggggtgtggggccaggggcacagcctgggcgcccgccgagcacgcgggagagaaggaagaagagcacgactaccggagggagaattggaggagaagatttctcacctagacgcggagacgcggaggctcgccggtgaggatggaacgtggacagcgacagagaactctgtgccatggacgtcggcgactcggcaaggcgacatcgcggagtctggtggagctccgaagtgacgactcgacgacggcgaggatgtagcgccgacgcgacgatgctcctgtggctgctccgacgaggcgagcgtgtgatggttgttgtggcgactgcgagagaggagagcagagcagggccgattgaacgtgggcgc

SEQ ID NO: 151495 - DNA, 339 bp, Zea Mays
gaaataggtcgccaatcatgcaattgacttaggggaaatactccttaggggtagaatcaggtgtgaaccaaagattagcgtcggtcttcgccatctccggccggtatagctcgccggatttcggtttcccgtgcggagctccgccgaggaccggacgcagtgaaggaatagaacgtgaagggtttgtctgcaatttgtcagtgactcgtgtaaactgtgtatgtgcccacttgcggttatccaaagaggactgggtctttctgcgaaatttccaccgcgggcgtgggcgcgtgcgcaagcgcgcttctgtgcgaagttgggccgcctaggccagtttga

SEQ ID NO: 151496 - DNA, 276 bp, Zea Mays
gcaataatatggtctaataatatgatgcaaaacatgccttccagtaggaatagtcattttgtaatgtcaattggcattcaagaaggaaaccattgtggcggagcatgacaaatagtggggaagaactcaaagaaattggtcacaggtacctgagttgttttcccacatccagtttctccactaacaacaactacatcgttctctttcagcaactgtaggaagtgttgcctctgtctagctattggtagagaagctcttgcttccagcattttctaa

SEQ ID NO: 151497 - DNA, 834 bp, Zea Mays
ttttgttgaagtcttgttccatagcgatgtgcgggagcagaagggggaaaacctcacccgaacgggccaaattttcatttgcaataccacctgtaggcgcctgctgatcagatgggataacaatcgattcaggggacccctccaggttggtaggcaaataatccggagttggcgcgtgagcgactggttcaacatccgggtaagacgccgatgccatcggattttctgcagattccaaggacgcttgcaccttcacagttgattgggtcatcggattttctgcagatgtcatgttagtaggaacagaccacatatgatcataatcaaatgaactaatgtcacccaaatgagacaatcatgagttactgggaaggatcatttgagtaggctgggaagatgtgtgatgacatttggtaaatggaaaaagaccttcatcaaaaatgacgtcatgagatttataaacacgcccagaagtgacatcaagacatttgtagcctttatgaatggaactatagccaataaaaacacactccttagatcggaaagagagcttggtgttgttatagggacgcaagtgtggccaacatgcgcacccaaaaatgcgtagtatggaataatttggaggtgtatggaaaatcctttctaaaggagtggtattgtggatcacacgactcggaagcctattaattagataggtggctgttaaaaaagcttcatcccagaattttaagggaacatgggcatgtgcaagaagggctaaacctgtttccacgatgtggcgatgcttgcgttccgcggaaccattctgttggtgcgtatgggggcaagacacat

SEQ ID NO: 151498 - DNA, 507 bp, Zea Mays
ccaccaagtattgtcctcaatcaatcgctagagagctccaatttcatacttcccccaattcggttttcgccaccgcaagaacaccctcaccgcagccagctcaactcaggtccgatctcgccctctatgttattgttccaacacccttccatgctcttgatgctcaccgaaccgcccaattgaattagaccgccatgaatcgcttggaacacgttgtttctttgagtttctccgctgtcaccgtgggcagagtgctgtagggctccaattcagaaattaattgatggtaaatactccttagggttggaattaggtgtaaaccgaagattagcaccggtcttggctccctccggccagtctagcccgccggagcccggttctgcgctcgccgtcgtcggggacctcggtctgcgaaggaatagaacctggggggcctttttagaaactgtcagcgactcattgcaatagtgcagagaacttggttcgagttattcaaaaccgtaggga

SEQ ID NO: 151499 - DNA, 304 bp, Zea Mays
gaaacgagcaccaggggcactcggctgagttgttgaggtgggggcagtggcagggcggatgaatacaagctgtttaaaggggtaggagggtggatgaggtgaagaacagttttgattgaaaggtcggatcaccaacctttgtcgctttttaggcccctagtgggacctgtcacctccatagccctttgtcttgcctgggcctgcatatttagcttcaactgccagcgcggtgctgacagccctgctgtaggagaggtcgaggcaggtggccatcttctattgtagccggttattaaggcctctc

SEQ ID NO: 151500 - DNA, 549 bp, Zea Mays
cgactgtttcgacatgtttcacatgcggcgaactgtgttccgacgtttgcatgatacgttggtggaaagttatggtctgcttccaagccgaggtgtcagtacaacggaagctttaggtattttcttgtgggcatgtgggggtccacagtcatttaggcagataaggaataagtttggtcactctttggaaactattagtcgcaagtatagtgaagtccttaatgcactatataagatgtcttctgacgtaatcaagcccaaagacccaaatttcatagagattcaccctcgattgcgagagagtagattttggccccacttcaaggattgcataggagcaattgatggtagtcactttcccgcgtctgtcccggccacggagcaagccaaatatattggtcggcacggttacgcatcccagaatgtaatggtcatttgtgacttcgatatgaggttcacatttgttgtcacaggttggtcaggttcagtacatgacactaaagtattacaagatactttgataacttatgcggacaggttcccgcgtcc

SEQ ID NO: 151501 - DNA, 364 bp, Zea Mays
tctccctccggtgtagtggccacttgtgtgtagtatattcgcccagtcttctttatattcttgcccgctgcattatttatcgtaattcccttgccttgatttgagctccctgagttctgctgattgttggatctgttctgccttggatatgggtagtctttgataaaatgtctagacttcccacaattgaagcagccagttgaggaactagggagggcgggaaaatgagcaataggggcactcggctgagttgttgaagtgggggcagtggcagggcgaatgaagacaggttgtttaaatgggtaggagggtggacgaggtgaagaacggttttgattgaaagctcggattaccaaccttggtc

SEQ ID NO: 151502 - DNA, 665 bp, Zea Mays
atgggtttgggttttgttgtgcattaatgctagccacatgcaccccatattgtgcactaaatctttctagtcttctgcggatcgaaaagggttcgtactcatatgtatgttgaaccataccacgaccttagagagttgtgggtggttgggagaagttttgttgagatggatataaggattgctggaaataagctgcatcctgttctacacattctgtgtcagacggtctggtataatgtgcggatggtctagggacatacttggacggtccgtgtgtatagccagatggtctgagcgtgtctattacccagtgtgtggagtatggtggtcctgacatggctctcgatgattcgttgcaagggatggagccaaccatcgttggattagatggtctgagctcagccttgacggtctggacatgcacatggtcgtgggtttatcttaaatcggtggaggaggttgtggttgcccaatgtaagagttcatcggctaccataagatggttgggtttgtgaaagcccatttgtagccgataaattgtgtgtggtgggcgcaacctcattatcatacgtcaaaaatttatgaatagtagatttctcaaatgctcgtttagttttcctaacatcttccgccattctccccatgcattgtttcatttgatctcg

SEQ ID NO: 151503 - DNA, 705 bp, Zea Mays
ctcatcttcccaagtgtcaagagcagcatcacatccagaccatcgaaccagcacttgaggtacttgagtccctccacgagtaatgacacggtgttggataatctgcactggaacacgcagtgtgtccggaataactggaagagacttactcaccaaacagctgggatgtagagatggctttaactgggatacgtgaaatacaggatgaactgaagctgattcaggaagctttagcttgtaggcaaccttcccaactcgctgcaggatttcaaatggcccaaagtatttataagcaagcttatggttagcacgaacagccactgacgactggacataaggttgcagcctcagatagaccatgtctccaacttgatattcacaatctgatcgacgcttgtcagcctgattcttcattctctgttgtgctcgaaggagatgatgccggacagaccttatcatgagttcacgttgagaaagccagagattaaggtaggcatgattcactgagtcatcaacagacaaaccaaaatggcgaggagagtgaccatacaacacctcaaaaggagaccgacccaaagaagtgtggaaacaacaattataccaatactcaaccgttggaagccaagaagaccacttggatgggcacgactgtacaaaacagcgcaagtacgtctccacacattggtttacacgttccgtttgtcc

SEQ ID NO: 151504 - DNA, 599 bp, Zea Mays
tcataagctgacttagcggaatattcctttggactggagaaacgccaaaaatgtttatcagaaaaaccaggccacagtagcacactggaagtggcatcacatagctgtaggacctcaacaataagctccggggtaaccaagcctctcaagtcactgacccaacacattttgtccatggcttccgccaccgttctcttgttaaccaagatagcaggaacagcagtgaaaacatgtggaactaaatcaggaatgcgttgccccaaaagccacctgtccttccaaaataaaatattgcggccatcaccgagaactgaatccatgccatgaataaacaaggactgaaccatcccattggttttcaagggcaaatcagcccaaggcttgcttggatcagttttagcaagccaaagccacctaaccctcaatgcccagttgagacaatggatatcagagataccgaggcccccaagctcctttggcctagtaactttgcgccaagccaccaagcaatgtcctccattagctttctttcttcctctccaaaggaatccctgcctaaccttatcaatggctttgagagcccatttaggcaagtcgac

SEQ ID NO: 151505 - DNA, 537 bp, Zea Mays
acggggtactagtggtacgctgggcaggcggtgtccaaataaattaactggttgttgtgtagttgtcgtgcgtgatttattgttagtgggtagttggattacgagttatgtaaggattatgttagaaactagaatgcggcgtgtaactgtgttcgtgttgtgaataatagataagtaggtcttgttggtatcattagcaagtgggatgattcctgttgtgcaaaaaaaaatttgaaaggcaaagaacatgtgtagtgtgtcgatcaagttaaccgataggtttcgtaaatatgcttgtgatgcttttatgtgcatgataagatcgatgccttgtcatcgtagtctcaggaaattttctgaaatatgctagtgctccactgatgggttgaatgaacttaaaatgtattataatagttgtgtgtagtgccggttatccaaaaatggcgaaaggcggtgtgtgatggtaattgggaaatagtcacgtcattagccaactcatgttaggtaggagttgattgtgttaagtgattgttatat

SEQ ID NO: 151506 - DNA, 1340 bp, Zea Mays
caagagccgactgaaccaaagtgccatcctgatcatccaaaataggtgatctcaacctcctggagtagaccttgaaaacaggtggcttcaaatttcatctagcagaagaaacactgtcaacacaactcaccgcagtcccaagccctgccaaaatcgaatcctccctctgacccgcagccaaaacagaagtggcaccatcaataggataatcgggtaccacatcatcatacaaggtcagaacaccaggcgccgccagctcctcaaccgcaacacacgggagggtaggggcatcaactggtcctgccaacgaatccgaggagacaggtgccgccaaaacgtccactgtagttaaagggcaacccgaatcaccagtagccatcaacacatccaatagctccacatcattagaaggtccatcacgcgccgacacggaatgaatgcgtgggcccagccgcgagtgcaccgaagctcgaggcaaggaggtctgatcgcccagcctccacacccgccgtgcacgtcgaccctgctccggttcatcatcagagatccggtggaggtggcggcagctgttcctccccaatgacacccttcgacccaataatcttcactatcacatggaacaccaacgagcgtggaatccaaactccgtcttcatcgaggaccgccggctccacagcatgcaggtccaacacctctggcaaccccacgggagagcggcaccatgatctcaacctgatgactgacaagtcctccccgccgatagaatccgggtgcaggccctaaatcaggcagtatggaccaagcaaaacctccggtgtctccagtccccataggtgagcagggataccacggagctcgacgtcaatgagggaagacaagacactgcttcccgaagcaaaagcctgcctagaccatctcttaacatgcaacctcagtggagggacgtggagcgacgatccctcactaaccactcgaacaaccagatcctctgaagggaagaggacaagaaaggagcctaagcagcacgacgtaggcggagcgtatcagcgtcaaggccaaaccttaaggcgagcgcatctctaacctccgtggcacaaccagttccatactgcccaactacgctgatgatcagagcatgacgaagttctatctcagcacggtcgatcatcctggaacgcccaataaacctcacaggacgaggaccatccagagccgtgggcgacaagttccccgaaggcagaagcaaaggagcgccgctaagtccaccaccagactcggccctgcaccttcgctgcccacggcgagtacgccgcttcccgctgatcgcggcattcgaccac

SEQ ID NO: 151507 - DNA, 517 bp, Zea Mays
ttgaagacgatgctcctggcaggtggacgacgattcggcacaggcgccgacgcgctgcctgtgtggaaccagaccgcgcgacaagggtgcctcgctcgaccccgactcctagccgtctgctggtaagtctgcaaggtaaatgcgcccgctgcctgggcagaggccacttcgccattgattgcagagacccggtgaggtgcataaattgcctgcgcaacggacaccattcctggcggggctccggaaggggtagtaagacacctccaacccccaagtgccaagctccccgcctcgacaacgtcaactttccaccgctcgtgctcgctgtcccgcccatggctcaacccggcgaccctgctgactgcccggagcattcctgcgccgtcgcctcctccactagcaacatggaaagggagcttgagcggctgagttcccatgctgtggtagtgtggctcgggcgtgaccgccccgacatcagcccggagcgggtgatgcgggccttctgctcccgcttcgg

SEQ ID NO: 151508 - DNA, 1014 bp, Zea Mays
tccagtattacatacatgcgaactgtgcagatattgatcccttgtgacctaggataagtttcgcaaaatgcttatagttctatagaatttgccaagtggaacctgcatgacaagaatagcaacagcaaatccaagtccaaatcctaatccaatgaacatatatagagttatatcgacatgatcttgcgacattttttgtttcaggtcatttggctgaggtgaactggcacattgtctgcttaagggtgctccacagaggcctatgttaccttcaaatgaactgttctcaaatgttccaaattggcgtgattgtggaatcatccctgccaaattgttgttagacaaatctagggtctcaagaaatgtgagatttgttagttcttgtggtatctccccggaaaggtagttccatgacaggtccagtgattccagctggctcatcctgcctaattggagtggaatatttcctgtgaaggcgttgtgtgacatattcaataaatgtagtataacaaggtttccgaccaaatctggaatagtaccattgagtttattatttgataagtccattgcagttaaggctgtcaaaatcctatcaattgagacgtaattccccttaactgttattgcaacagtatcttggtaatattggttggatgcagaatgacccaggatctgtccagtgttattattcttctccctcatagatttaaacatcttgaaccattgtggtttcacatagccagagaaattgttcaaggcaatatcaattatttgtatccccaagaagtacccctggaaatttccacttgtgaaagggtcatctagtgtgccatagaattgattggaccttaatacaaggacacgaagattggaaaggttgccaagccaagatgggaaaacatctacaatgttattgtatccaacgtcaagaacctccaaatcagtgcattgagaaagagctttaggcagctgtccttgaatgttatttccatttatatctattgtccgcagatc

SEQ ID NO: 151509 - DNA, 452 bp, Zea Mays
gataatgtggcacccgatgctcctcatacagctgcactgtgtacaaagggggtgtagggtaaccggtggagttgagcacctcccacaagatggaaggaaaaccctcgtgagaaaggaaatcggaactgaaacgagtgtctcctccattagcgggggtgggtgaagtcatctgtggaagaggattagatctaaaggttatggtgaaaggaagaaaagtaagagagcctgggttgttaaaaggaagtgggttagatcaaattttactcctttaatttctattcctttcagttttataaggcatgcatgctgaaaagaacgtctcctcaccgagtcagaagggtgcctttggggcatccttaaaatactaagaccgacccatatggcctacttaactagccacctgctttcccccactattcctgaggccttttgtcctaggtctagcgttctag

SEQ ID NO: 151510 - DNA, 478 bp, Zea Mays
aatatgaagaaaaatgtgtaaataaaagtgcttttcataatggaatccttgggttgaatacttaatctaaagtacaaattcacaacaaagatttggattcaaatttgggatttaaaaataaaaaggagggaaaacagaaaagaaaagaaaaagaaaaaaagaggtagaaacctaaatgggcctggctcctcaattcagcccactagcgcttgcacacgtcaaaaccctaaccgcctgacctccgctcgccgccatgcgggcccacgtcgccagcctcactcctcaccgcacgcgcgcactgccgcgtgggtccacctggccagaatccctatcacacgtcgcagccgcgtatcgaccgaccgtatttccattccgcgttctctcgccttgtgtcactggtggtggggccggatggccaggtccgtctcctccctcgaatccgcgctagagcttcttccccgcgtgaaccggatcgcgc

SEQ ID NO: 151511 - DNA, 499 bp, Zea Mays
gtcaaacttaggttaaaaaagtcaaacgaattataaattggaacggcgggagtatttaacaatgattctgcaactccatcttatacatatgttcagttttaaacaattaatatgaatatggtaggaaattgtccctaatgtcttcagtagagaactagagacaacactaagtgtaaatttcaacagccaagatgcactataactataagttgtaagcatgtgacaaacaattcaaatattatttcgttaagctcttattgggcctcatcagacatccatatagtttggttttaaatgtatcgggcattaaaagagaaaataattttaatcacaacaactctaaggaaacatgatttgcccatatacatcagtaaaggtgaaagtaagcatacagattgtatatcctccctcatatgcctgagctttatattgaaaatccctagccattcatccatatcttcaacacatatactggctatttcgagaccctgcaatacct

SEQ ID NO: 151512 - DNA, 480 bp, Zea Mays
ctttagtgcattgcattgagagttgcatcttatagcataatagttgttgtggcttggaattatgttgttacattagtgattgccatcatctagatagcttgaaacttgtgggatcatcaagcaccataaggttattgtgtggttactccgattgaagggttatggggggctctatgctcattcccttgggaggctcgcaaagtgttatttcagtggaatcatctaggctcgggaaagtttcttatgatccactagttccactctagtgcccatgttgttgggccaaggttgtgtgctcgttgtgatctaatagaatccgcttcaataggaaataagttgtcgagcaaccgaactttcagataaattattgtatcatttgcccgcacttgtttgatctccctacacctatgcttacaattctatatttctacttgtgtaattgtttgagttgtcgtatcaatttaccctagtagcttgttt

SEQ ID NO: 151513 - DNA, 375 bp, Zea Mays
gaccatgcatacctctgacacccagtgccaccactcccaaggagtttgccatatgcagtgggagtttcctagcaaacatgcttatgttgctactgttgatggtgggtatgttagttcttctaatcttgaggatgaagatattgttgtagctaaaattacaagggttgatgatgaacatgagacaagtgatgaggaggtccttgtcgatcatgccacaaagaattacatgtctctctttgttcaatgggttttgagcgctcagatggtcaagtggtcaagctacaacaccacaatttgttccacaccttcttcattgtcaacaattattgtgttcttaccatcattgatggtggtagctgcaataatttggtcaac

SEQ ID NO: 151514 - DNA, 1725 bp, Zea Mays
gcaacctgcggccaccaatggtggttgaacgcttcatcctattaggtttacatggtaccatagccagcctcttttttcatccatggcgcatgaattctcctccaccatcccctcctccttctcaattccagtttctgaaaaactgaaccgcacgaattacgtgctctggcgtgctcaaatcctgccgcccatccgcgcggcgcaactcgaagacgttctcacgggtgctgatccaaagcccccggcccgtatcgccagcaagatcggcgatgcctcgacgaccgaaccaaaccccgagtatgctcggtggattgcgcgtgatcaagcagttttggggtatctcttgtcgtccctgacacgagatgtactcaccaacgtcgccacgctgccctcttcggccgaggtatggagcacactggccgcaacatatgcgtcccgtacccgtgctcgctccgtcaatacgcgcattgcgctggcaaccacaaagaaaggcactgccaacatgacggacttctacaccaagatgaaaggctatgcagatgagatgagtgctgccggacagccccttaacgacgaagagtttgtatcctatctcctcactggtcttgatgaggaacgctacaatcctctcgtttcatctattcttactcgcatagaacctgttacaccttctgaattactctcgcaaatgctgagttatgaactgcgcacggagaggcagtcgggggcctcctatcactcatccgtgaacgcggcctcccgtggtcgcggatcttcgtcgaaccgtggcgccaacaaatggcgtggacgcggtcgccccccgtcacgtgatcaatcatctgtcatgtcacgcgggggctcttctggtggatccaaccgtcgctcttccgctgattcatctgggggccaatctcgtcctcactgtcaaatatgtttcaaaatcggacacacagccaacatctgctggtaccggtttgacgaggatttcgtccctgatcaacgtcttgctgcatctgcgacgacatttcaagccagtgattcacaatggtatttagactccggtgctactgatcatatcaccggcgagcttgataaaatgaccgtgcatgaacgatataatggcatggaacaaatcaaggcggcaaacggcgcaggtatgaatattgactgtattggctcatctgtcataccttcgtccacccgccctctacaccttcacaatattcttcatgttccccttacacaaaaaaatcttgtgtccattcataagtttactctagacaataatacatttattgaatttcatcctcatgtctttttgatcaaggaccaggccacgaggaaggtgctggttcgcggcccctgtaagggtggtctctatcccttaccgacccagctgaaccccactcagaagctccttctatctgccatcaagtcttcacctcatcgctggcatgctcggctaggtcatccggctcatgagatcgtccttcgtgtcattagagataatggtcttttatgttccactctaaataataagtcatccgtttgtgatgcatgcatgcgtgccaaggcacgacagcttccatatcctatttcggttagtaggtctagtgctcccctggatctcatcttttctgatgtttggggtccagcaattgattctttcggcaacaataaatattatatcagtttcattgatgattatagtaaattcacttgggt

SEQ ID NO: 151515 - DNA, 686 bp, Zea Mays
ccgtgccgccgcgcttgtgttgttcaggattttgtggtggttcagggcctctggggtttcgttttttcggaacttcggattggttggtgccgttcggagcggggatgtcgtgcgtgtggtttgaggcgctttgccggcgtttttgtcagttttttttttggatcgaggcggatgagcgattccagtcaggcaacttcactgctccagtgcaagctctgcttttggtgcgggagttcggaaatcacaagggagacgaagtgacgaacagagcgggtcaaaactgatctcaccttgcagtattgccgttacttccttacgccttaccgcagctggctgtggcttctcacttctgtgtgtgattgagtgtggtgtggaatgcaagtatggaataattgtctatgtactggcgttcacgttctgttacccgtcctgctgctatcaatgttacatgttacttcacatccgccaccagagtccgtctacattgatttattactttactttactggacggatcctaccgctaccggttagtgaatttcagaacagtaatgcatgtgagtcgatacttgttgttgttaaactttcatttcctatgaaattaagtatctcctgctttcatgccaggcatcgagttttagattcataatggtttagctagttagtgttctgaatgtgcaatcaact

SEQ ID NO: 151516 - DNA, 849 bp, Zea Mays
tttccccctaaaggtacatgcaccagcaaacatctccaaatatgacgaatccacaaaccccaatgtatggctgaaggactactgcctcacatgtcgcatggcggcgatcaaggatgattacctaatcatccagttcctcccctacaccacatggaaggggtgagagcctggttcgagcatctgccggccaacaccatacacgactaggcagaccttcggaaggcctttgtcaggaactttagggcacctacaagtgtcccaagagctcctaggacctccagaggtgcactcagatgagtggtgacaacctccagaactacatccggaggtcctcatagaaaaggaacaagctccccgatgccactgacctgacgtgttgaatgccttcacctatgacaacatcagtgaggacctcacccacgagctcgggcaggggcgaccaaagatgactgtcgacctcctcgacatagcgaccaagttcactgatagggaggatgcggtaggggcaattttctgcaagggaaagagctcgcgtgacgccgatgagccaagcagcaaaaatagggagtgtcgggagcatcctgataggcatgaaaggaaccatcgcccttctcgtaatgaagaagtcgctgctgcagactgaccgcccaagccatcaaccaagaacaacaacgaccactttcaaaagttgatggactcgccgtgtcagaatcatggcttccccgtctgtcacaaacttctagagtatgaactcctaaagtgcttcatctccaagccaccgaccaaaaaggcaaagcaagaagagccggcaaagtcagtgcaacaggagacccccatggagaatttccc

SEQ ID NO: 151517 - DNA, 639 bp, Zea Mays
gttggacttcgtcgaagccctgccccgagtacgtggcaagtccgtcatcttgacagtggtggacaggttcagcaagtactgtcattttattccgctggcacacccatattcagcggagtccgtggctcaggcgttcttcgcggaaattgtccgcctccatggggtgtcgcagtccatggtgtcggaccgcgacatcgtgttcacctccaagttctggcgggagctcatgcgactgatggggaccaacctccacatgacatcggccttccaccctcagtcggacggccaatccgagtcggcgaacagagtcatcaccatgtacttgcggtgcctcacgggtgatcgaccacgacaatggctgcagtggcttccgtgggcaaaatacttcttcaacaccgcctaccagagctccatctgtgacacgccattccggatcgtctacggacgcgatcctccatccatccggtcctatgagccgggggacacacgtgttgctgttgtggccaggaccatggaggaacgcgaggagttcctcgctgatgtgcgccatcgtctggagcaggctcaggtcgtccaaaaaagtactatgaccagggacatcgcgccgtcacatatcaggtgggcgagtgggtgctgctc

SEQ ID NO: 151518 - DNA, 595 bp, Zea Mays
gttccttagtcaccaaatcagcctaagccacgacgtgcccgtgtcggtctcaactcccaaaaaatcaaatacacaaatttataggctctcaagtgtgttgcgcggacgggaggggtgtaagaggagcctcagaggggaggaaggagagggaagcggtggctgtgaggtgagcaggtggcgtcgcgatggatgggggcaagggcgagtatgggagaggcgatagttggagtcaggagatggggatgggatgagcctgtctcgacgggagtggggagtttagtaggttagactatggttaatgtgggagccaagtggctaggagaaaatttacctttgccataggccttttttcctcttttgtcttgaaggcctaaatccctcatttgggcctatttttgtttttacgtcttctctttctattgtactttggctcctttttctcccctcaatatatttttttggcaaatgccctgcgcccctgccagcaaattaaaaaaaacgttctagtatgacctcgatgttcagtataatactgaccggccttctggatattaacctacacctgctgttacttgtttttttaacaacaaaatgc

SEQ ID NO: 151519 - DNA, 425 bp, Zea Mays
accgagcactactcccggagcttgctgagcctcctgagcatcgacgtgattaactcgtgcccttccttgatactgggtcttgttctgctagctgatggaggagggcgccttgggggcggatgcgaaggtattcttggggccattcaccgagttggagtaggcaggtcctgatggcttcagctggggacagttgttcttgaagtgactgggatcttcgcagtgccaacatgcatttgccgggggttggttgcttgcaactgagagggcatgaaaggagctctgactctgctgactgaaccgtgacggggtgggtctagctggtctactgaagcttggtcccttgggtggaaatccaaaggatcgagttttctggtgccgatcttgctgctgagcccggaggacttggaatttcctcttgagatggc

SEQ ID NO: 151520 - DNA, 461 bp, Zea Mays
aaactcaatcaaggcttgcacatgtagaccccctaatgtccttgatccactgcctatttagcaagacatccttgactgtcctttcattgaaacccctctttgggattagcagggagagcttcagagccatttggtccaaggagcccccatgcaaccatttgtccgtccagaaaagagtactttcctcattcccaactgaagtcaccaccgagattgcaaacatagcagcagcattaggaagcacctaaatatctaaccccgaccaaggccgatcaggttgagttttctgcaaccaaagccacatcatgttcaaagcctaacctagagactccagattataaatgctcaaaccacctaggctctaggggtctgcaaactcggttccaattcactagacagtgaccccctttaacatctttccttcctttccataggaagcctctccttatcttgtcaattgc

SEQ ID NO: 151521 - DNA, 1456 bp, Zea Mays
aggagttgaatatttgcagtcacataatctgttccagagaagaccttggtaatctcattaaacatcttgagtctatcaaccacttgtctcgcaaaatcccactcttccttatttggtgcacagtcataaagtttttcaacacgagtggcacagttaaaaataggctcatatggaatagcaatagagagcatcttgtatgtagagttccacctagttttgcaatcctagcttgtgtaccaaagagactttgacaaacttagccatctcttcaaatttctctactcttttaggtgtggctgtccagaatgctacactatcacgaatctttttaattgcaggttgtatcacatctaaaccatccttcactatcaaatttagaatgtgtgcagcacaacgcatatgcatcaacgacccctctaaaacaagtttagatggaccaatcttcttggtaaggtcagagattaccgcagtattagttgtgcaattgtctagtgtcaaggtggaggtcttctcatcaatattccattcaaccaaagcatcatatagaacctcacagataatctcagctgtatgtggtgcaggcacatatatgaacctacatacaaggaaaacaatgtaaaagttgtaaaaatagacaaatatataaggaaaaacaatgtaaaagttcttacctcattataatgttcctcaagttccaagaatcatcgatgaaatgggctgtgacagccatgtaacctcttttttagttgtcagaagtccacatgtctctagtgatagcaactcgtgacttacatgcacacatgtactgcaacactcttttcttttcttctgtatatgcatccataatgtcctttctaccacatcacaaaattagaaaatagcacaacacttcaaatcacaaatcttgatacaaagaatagtgtattccttacctaatagtattctcgctaaccatcttgaataatggctgacatgcactcacaaatcgacgaaagccaatatgctcaacgatgcataaaggatattcatgcaatgctatcatagcagcaagctcctttctagcaacttcaggatcaaaagtgtagctctccacggatactttccccccttcttgtgaactaaacctcaaagatgattgtgacataatcttgttctggctagtgagctttatcttgcgcaaaacacaaatcttcaaatgatcatgaagatgctttgttccatgagtacttttcccattaagcttcttatgacaataagaacattgtgccttgatttcactagaacttaacttcaccctcttgaattcattccaaacaacagatgtaagcttcctctttggttctgcaatcacttcttcaatttcatcaacatcatcatcaatctgtattggctctgaatcattcacagattggggttgcatgctgctctcagtttcattcccactctcagcccccgc

SEQ ID NO: 151522 - DNA, 478 bp, Zea Mays
aatcgccaggaaatggaatgaatgggacacctgggaaactcaagcttgagaaacttgcaatcaataagttctctccaactagcctattgaattccatcaaattgagaagagaaggtcctctttctctcatgacagagcacaaagaagcattatggagcacgtattcgccaaccacaaagcccgatacttctgttctaaataggctcattgacgctggtgtgtcaccaaggattgaggagtccatgtcggtagtcaacaatgagatattgtggcagcacttcttggagttgacgaccaacttccttgtgccttttgggccgtatctgagaactacaacaccatcagaagggacttcaccttttgttgacccaccattgctaccaccgtttcatgcagttgagttcatcaatggtttggcagctagaggtccagggaagtttttgtccaaaaggatgaggtccaattggttggacctata

SEQ ID NO: 151523 - DNA, 358 bp, Zea Mays
agaagctactcgtaccgagttggctcgcttagtcgcagcagggttcattagagaagtactgcatcctgagtggctagcaaatcctgttcttgtactcaaaaagaataaagtggattggcgcatgtgcgttgactatacggatctcaacaaacactgtccaaaggatccctttggacttcccagaatagaccaggtggtagactcaactgccgggtgttctatgttgtctttcttggattgctactccgggtaccaccagatccgcttggcaaaagaagacgaggaaaaaactgcattcatcaccccgtttggagctttctactatacctccatgccgtttggcctcaaaaacactgga

SEQ ID NO: 151524 - DNA, 372 bp, Zea Mays
ggcaaccttcctcgacctctcctacagcagggctgtcaacacgacgctagtagttgaagccatgtatgcaggcccaggaaagtcaaagggctatggaggtgacaggtccaaccaaggtcctgagaagcgacaaaggttggtgatccgaccttttaatcaaaaccgttcttcaccacgtccaccctcctacccctttaaacaacctgtctttatccgccctgccactgcccctacctcaacaaatcagccgagtgcccctgatactcgtttccctgcactcccgagttcatctactagctgcttcaattgtgggaagtctggacacttcattaaagactacccatatccgaagcggaacaactccaataatca

SEQ ID NO: 151525 - DNA, 296 bp, Zea Mays
cggcggccgggtcgacggagatcgcggcctctacaggcggcgcggctctccctccccgaatcggtaccatggtcaccatggggtccaagccgttgtcagggacatcggtcccgtcggggggtggcctaccctcaccaagaccaactacgtcgggtgggccgcggtgatgagggtacggctccaggttcgccacatgtgggcagcagttcagtacggcgacgtcgactactacgatgatcgtcgggcgctagatgccctcattgctgcagtcccgctcgagatgcagttttcgcttt

SEQ ID NO: 151526 - DNA, 444 bp, Zea Mays
caccatgtctattgactggagtagctttattattgagaatgctgaaaataaggataatggggagacgggtgatatgtttagaatctgtgatgaggatgagatgtatgcgttcttgggacttggagatgaggatgaggagatgaatcgaacccacccgaaaccaagtaactttgcatctcatttttcatcggaaagcaatagttttgatccaagtgatctagatgctgccatgccagttgatgatgaaaatgcagaaatggtcaatatattgcacgatgttgatcaccctgatctaaagttgggtaccctctatccatcgatgaaagagtttaggctagatgtgaggcaatatgctataaatgaggagtttgagcttggcataacaaagtcagatagaaatagatatagagtgtactgcaaagggaatgattgcacatgcccttg

SEQ ID NO: 151527 - DNA, 292 bp, Zea Mays
cagcttcccgctcaccgtcccgggctggcacttcatccgcctctacttcttcccgctcaagggcggcgacgtggacctcgcgtcggtgacctttagcgtcgtcaccgacgacaacgtcctgctccacagcttcaccccgggggacaagcccgtcatgaacgagtacctggtgaacgccaccgagaaccacctggcgctcaagttccagccgctcagtggctccgccgccttcgtcaacgccatcgaggtggtgaacgcgcccgacgagctcgtcaccgactcggcgctggcc

SEQ ID NO: 151528 - DNA, 315 bp, Zea Mays
ctgggttcggagcatccttctttctggcacgtcttcggtgttactcaatggtgttcctggtaagccctttcattgcaagagaggtgttagacagggtgatcctctttcgcctctgttgtttgtcttggcagctgaccttcttcagagcattattaataaagctaggctgtggaatcttcttaagctccctttaccggatattggtgaccaggatttcccgattgtttagtatgctgatgacactcttttaattttggaggcctgccctaagcaacttttcttcctcaaggcaatcctcaactcttttgcttcttc

SEQ ID NO: 151529 - DNA, 3700 bp, Zea Mays
cccatctcgaccccgttctgccgtatctccgatccgcctccgccgccgtctcccctgcccaggcgccggaagtccacctcgggctccagcatatccgcgatgcatctggacggcgtcgacgacgagctcggaggcggcagctgcgccccctcccccgcgcgctttgagctccaagaggatccttccttctggaaggacaacaatgtgcaggtagagttttatccgcctcaatgcgagttgcctcctccggacctccccttccactcagccatcgtttctctcccctagctggagtgctctagtctaagctcgcgcgggactgcgcccgttagcatttcatcgagcacatctatgtttctagtcgtttaactgctccaatctacaggttgcgatccgtatccggccgctgagcggcagtgaggtgtcgatgcaggggcagaagcggtgcgtcaggcaggatagtagccagagccttacctggattggacaccccgagtccaggttcactttcgatcttgtcgctgacgaacatgtcacgcaggtgcttttgctgctctcgattctcagtttagcattcgtccctctttccatctgctgacttattttcgtgctaactgtgcaaaatgcgtaacttcaggagggcatgttcaatgttgccggggtgcccatggtggagaactgcatagctggctataacagctgcatgtttgcttacgggcaggtaaactgcaggtttcacttgctagtcgctgctgtaaatactcaagttttaagattgcattattctgttattacaaaattatctgcttctgctagactggaagcggaaaaacacatacaatgcttggtgacatagaaaatggaacacggaggaacaatgtgaattgtggtataactcctcgagtgtttgagcatctctttgtaaggatccaaaaggcaagtctcgaagatctgttgctttctagacgcctaattttgggcttttggctgacatgacatgttactgttcttagctaaatgtactccttacggtttgcaggaaaaagaattaaggagagatgaaaagctcatgtttacttgtaaatgctcatttttggagatttataatgagcagattctggatctgctcaacccaaattctgtaaacttgcaggtaattcatgcacggattttgtagttgtacatatatttgcatgccttgttgtagttatacctcgtgttaatttaatggtccctgcttttttctttgttgcatctttttatgtgctgttagcaaatgtctatatttcgagatatacattattcatatcattagctgattagctctagtttgattctttcagataagggaggatgccagaaagggtatacatgttgagaatttgacggaacatgaaatctccaatgctcgagaagcgctgcaacaacttattgaggttgtttgatggaataatttcattttattctgtattttatgctgaggtttgtctctagttgggattgttggaagcttgaatcccttttgcctgttcaaacagaatcgagtttgcacaattgtctggttcctaagtttaagattcagtacatgactgaccttaatatacattcttcatttctttccagggagcagcaaacagaaaggtagcagccaccaatatgaaccgagcaagtagccgctctcatagtgttttcacctgccttatagaaagtaaggtacatgaaagatgaaacacatattctccagagttgttactggtttgtaataagatctcattgtggttctctagtttcaaggtgtcatagtggtattatatattcaaccttattattgttcgttatgacgcacacatattgcccttactttctcttgaaattaattattcagtgggagtcacaaggtatcaagcaccaccgcttttctcgactcaaccttgttgaccttgcgggctcagagaggtaacttgcataagtaacatcacatataatcatctgatatgactataatggaattttagtgcggccacttttcaatgtctttcactctcctgtttagcacgcatgacttctgccttgcaggcaaaagagctcaggtgctgaaggggagcgattgaaggaagctaccaacatcaacaaatcactatcaactttggggttagttgattattttctaataataccacaaactgtggaaaatcttttgaaatttgttataaacttagtatgtgagtcagattaaagtcatagcatgacatattttgtaactattttggtcaatggcatcattgcagacttgtcattacgaacctaattgctgtgtcaaacaaaaagtcacagcatgttccatacagagattcaaaattaacattcctcctccaggtaatatcagcaactgatgcagtaaagttgctcatgttgtaacttggcatctaaggagctattatatgattgcaaaatttttagatgtgagtttacattctctttgctgataaaagatttggtatgcctttcactgctttccaggattcccttggaggaaattcaaaaacgaccataattgcaaacataagcccatccagctggtagactcctaatcatgattgttctattcaactaccctttttattttgaagcttccattccattttgaaagttacacatttgatatttctcgctttctatccagttgtgctgctgagacattaagcacattgaaattcgcgcaacgagctaaatatataaggaataatgtaagtaacctgcacacatttagaataccaccttttttgtgcaagcgtcggccgtcagctgactattactttttgtaggctataattaatgaggatgcttctggtgatgttcttagcatgcgtttacagatccagaaccttaaggtatatataagttgatactttaccagatacttactgtatattggagacaactgcctaaatattcttattggattaacatttgtagtgtgtagattatcattcatcttaaacttacctgcttttgcagaaaagtaatcagccgtttgcaaggacaattgggttctgataaaacagaaagcattgcctctcatgggtttgtctgcgagtcccctagcacattcaaatgggatcagggtcatggcatgttcactccacttacttttgataaaagggctacacaggtattcaaagctcttcttgcttgcagaacttgatgtgcttgcagtctacttacactattttgttggtaccttgtgttcagaggaacgattgtgatgctgcccttgtcgctgcttttaggagggaacaagagaaggaagcacaattgaaggcagtaatagatgcaaagcagactgctgaacagctggtctgtagttcttcatgattttgcatctctaccttcaaagcacttaaagcaaaaatatacatggatagccatgtgtttgctgattttaatattctgttcctacgcaggtagctcaaaagacagaagaggtaagaagtttcaagatgaggcttaagtttcgtgaagaacggatcaaaagattggagcaggttgcttcagggaagttatctgctgaagcacatcttttgcaagagaaggaaaaccttgtaaaggaattagaggtcctgcggggtcaattagatcgtaatccagaaattacaaaatttgcaatggagaatctacaattaaaggaagagctacgaag

SEQ ID NO: 151530 - DNA, 357 bp, Zea Mays
gtgcacaagctcgatatagttttaatctactgatgtcgacactcgtcactcgactatactatagtagcaaagttgtgcagcaaagtcaatgttacatggatatgcagataccccaccagaaacagctaattatgatcatatcttaggtgtgtggcatagacaccgggagagtaacagctacgtttgcatcttctgaacatccatcacgccaccaaagcatcattttctaccgcgtaagctgatcgattaaccacaagagtagcaaagtacgacacgcctgagtcttcattgcatggttccctcttgcagagctttcaccttcacaaatcacaagtgagcggcaagcagcccacaaat

SEQ ID NO: 151531 - DNA, 303 bp, Zea Mays
gtgccggacacggcggtcatcatccggaggcacggcgtggccagcgacctcttctcctgcctgctgttcaatgagctggaggcgttcagcccgcgggaccagctcgccttcgcctacgtcagggaccagatgagccccaagctgagcatcaacatgttcgaggtcgaggtgttcgagcagatcgccgtcgagtaccggcacaacctcaagcctggccgagggaagcggcagcaggggggcactaggatggcgtcctcgagagacatcgccgggagcagctgcgaagagtaccttcaccagatg

SEQ ID NO: 151532 - DNA, 295 bp, Zea Mays
catgagggatctgcccaaactatttggcagggataatcttcagtgtcctaacaagtatccatgcaatcaaaccaccccaaacttgttgcaacgcaagatcaatcaaaacagagaagagaaggggaaggaaaaaaacaaatccgaaatcaaagcaaacacatgagctatgaatttcagaggaaagattgctttgattcaaccctcacggaggttttctatgctaaccctgcaagagggagttccactaaggattaggacaatggtcctattctacgttgatccctttggattcgac

SEQ ID NO: 151533 - DNA, 530 bp, Zea Mays
cccagattgtttgccacacgcatgattcgcatcgaacgacggggatgagcttaggccgaaccggtacccggtgttctaatcatagccgttcatcaaccgatccacgttcgaacttcgccctccccaaaccagctacccgacggcggcgccgccaccatccttgtcggggatcgccggagttaggcgatttggccaaatcgtgctcctattatatcatggctcggggttatacggagtacggaatatgacgaacacgctggtatacatcatatcgcggatggacgcctgattgctgttggtcgcggcgatgggcagatctgtcgtggtccttcgagtccgatgaacaattggtgctaccccagtgaacctttctgcccagacaggtccctcacacacgcggccagagcccgccgatgtccccggccaagcacttgcgaatatggtggtgttttccgtggattcgcggtggcgccacctgttcccccttcaagctctcccaggtaatggcggtcggttcttttgagttctag

SEQ ID NO: 151534 - DNA, 539 bp, Zea Mays
agatgttggttgaagtgctaaagacatttgagatataccttcatcagcttactcctaaatccttaattaaagttggagtttttatttggactatgagaagccaagggttggagccaaatgccaagtgcttctgcaatattcatgagttatcgtactagacgaaggcgattgggaaggagtagtatcataacaacttcggttgttatagctttgtgccttgttctgatgtgaggtatcttgtgccaacattatgaaagaaatggcccggttcttggatgaagcagtggttttacgtgaaaaatgatctgaatcagagggaggatgtgagaggtgtgattcaacatcctatatggtcacgcttcggcatcagaaggccatcaatcacacttgggaatgaagtgcaagactaccaaatggctttcaacaccatatgcacctacattggcacaagagatttagttcaagaacacatcgcttttagagtgtggcctctggcaaatgagtgggaaatgccaaaggaagctgccactggctccagc

SEQ ID NO: 151535 - DNA, 555 bp, Zea Mays
gggattgggagtccagtttgtcgtacgccgaattctcatacaacaacggccatcaggccaacatcaaaatgtcaccgttcgaagcactgtatggaagaaaatgccagactcccctaatgtggtccaatgtagggtaaaggacactagaaggacccgactttgttaaagaagctgaagagaaagttgccttgatccgcaagaggttacttgaagctcagagtcgacagaagagttacgcagacaatagacgaagagaactcaggtttgaggaaggagacttcgtttatctcaaggtctccccgatgcggggtgtcaaaaggttccaaatgaaaggaaagctagcaccacgtttcgtcggcccctaccccatcattagccgagtgggacccgcaacatactgccttgagctaccagaatctatgtcagatattcacaatgtgtttcatgtgtctcagctccgcaagtgcctacaagtaccagaaaaccacatcgaggcagaggcaatttagattcaaaaggatctccagtaccgagaaaagccagtgaagattctcg

SEQ ID NO: 151536 - DNA, 678 bp, Zea Mays
ccagtttcctcttgatcgtgtgcagccagtcgtcggcatcgaggggattgctggatccagcgaacgtgggaggcttgagtctcagaaattctctcatcctgtcctgtggtcttccaccacctgggcgttggttctccagacttctagtgaggacttcaatgagtcgggtttgattggctagaacttgggccaaatctagtggtagttccggaggtgcggggaggtgggtctcactcccttctcctccagcttctccttctgctcctaggggaaaccctgctccaatcctggaggtggtaggcatggttttatccgaagccatctgccaggggaaaagagttactactatgcacatgccatatttttttaacaagttactttattcattaaacaagttcattacaacattcaattatcataagttcattacacacgagtgctatctagggtactcccgaactccttctctaaagtgtccccaaattccttgagaaggtcatcaaggctggctagggacatttcctcggtgtcggacgagttccctattctggtaggaggtagggctagagggtcttcttccttctgctcggtctggcatccttggcttttggtcttcttgcggatttttcttgcgggggcgagcttctttagcttcttgtcgtaatccatcttcagagt

SEQ ID NO: 151537 - DNA, 401 bp, Zea Mays
tgtatgtacaaaatcgtttctacaggtcttaatacacactttgacgttactatataacgtattgatatgcgtaggcacacaatacaaacgtggctatatcattgtttctacttttgttaacacgcgttttggcattactataaaatgtatcactcgccagttcagctgacacgtcacctttccacatcacctgccacgttatttttccacatcacctgccatgtcacctatccacatcacctgccatgtcatcattcgtgtcacctactacaccgtctctatactccttaatgcgcaataaagcgtcactataaaacgtgactatagtaatacacatgaattatgaatgtatctataatatcgtatctatattttttcacacataataaaacgttactata

SEQ ID NO: 151538 - DNA, 578 bp, Zea Mays
gaattatattttaggactctttttttcatcaacatttacatacatacaaactatattaattaattaatatttgtttaatctaaaacaaattatattttaggatcaacgttgtatatctttccactagttctttggtaggacctgataaagggcacctgatgctctagtcacttattataataacagaattctaaatttctcggcagcgacggttcctgtgcgccgccgccctgtcgagcctgccggtgccgcgagcatcgactcatcccgttccaaatcgacccaaacccattgcagaccaacacacaatatggcaagtgcggtgccgcgcgccctgcgcatgtcccacgcgcaattcatcgagcaccttcgctgcgcggcctcgtccgaccgcacccctcgcaccggcgaggctcttcacggctgggcgctcaagtccggcgcagcctcccacgcgcctgtctccaactctctcatcaccttctactgttccctcccgcggcctctactcggcgcagcctacgtcgtcttcgccgacatccccgccgccttgcgcgacgtcgcctcgtggaactccc

SEQ ID NO: 151539 - DNA, 2316 bp, Zea Mays
aaagaatgtagttggcattacgtgaccatcacacagtagacaacctagacgatgtgcttatgacttctaaacagaaggattttattctgcattagtaaatggcatttaaagtcgagactggaacacagtaacacttgtaaaatgaaggactggaaaaaattctttcaatgaggaaaggggactgcttcatgttacactacacaaatagcaccgacgaacctttgaaacattgcgaagttgactacaatattcaatttctttgcttttcagtttagatgaaactgtatgaccaatgcctggaagtgctttgatagagagactactcagataatcatcagcctgtaagagatacatgttgcagtcagtaaatcacatgtccctaactccttatggagattatgatatcaacttatttagacaagctacatacagcatgtagtacaaagtacatccttttagagggagtggcaccactagtgattttctttaatcaggtaggaattcaaggaaagacaaacaaattagtaactcaattcaatacccaacaagcttgtgggaatgagtagaactattaaatcaactcccagaaaaaataactgattcaacagccaatattttcatagagatattgaacaacatagatgtgatatccgaacctccaagcttctttttaggtctgttgggaacagacgaatgttgcaggcagtgtattctcttcacaattcctgtgtcagttcccttttttcagattgggccttaagtaagactcagctgaataaccattaagaccttctaagctctagggtagttaagcagatttaatatacttaggaaactattccaggtaagatcatacatgtatccgtgttgcctgtattaggagctaacaggacaatgatactgtaagattcattgtatcctaagcttgtttaactgttttagcaatccattcattagctgtgtgacctgtttagattgaaggaatgaaaaataggccaaatatttggtgcaaagtgccaaccgccctgtctggtgcaatgcaatcatgaaaaatcccttgaaacacatacctagaaattctcaaaatttttgaaatggtgcacaaccatagtgcatatatatgttagaatcttgtctagggttaggttagggttctcttgtaatgggcttggcccacctaactcgtctatacaatatacacccaaccctaaattagggttggggtttcactctccaacatggtaccagagcctagttcttcctcccctctccctgtaaccgccactagcagctgtcataggcagccactcataaacgtcgccagcgccgctcatcaacgtcgccggcgccgctcatcaacgttgccggccttccctcccctgccctttctcccttcctctacccctccctccctctcctctgcgtgactgcacagcgccctggtgctcgcagacggcacgggtgcacccgtgcggccctctctccctgcctcggcggcgttctacattccccatggcgcgactgcgcccatcgcgcctgctcccgccgcgggggccgcttccctatatgcactccacttttcacttactaccatcactgaaagagcatcttttatagcaataaatctcttcaacatcacaatagcagaggcaaatcttgtgtcagcaattgcaaggaatttcaggttgctttgctcattgaacatagccaacctcatggagtgattcatgatggaatttttaatcatgctggcatctccaatgacttcgctaatccactggaattaagtataaagcacatcttcaatttccctagcagcacatatgttcttcaaagcaagatttcaaagtatgcacaacacaaggggtccaaaaaatatgagggtgcttctgctcaattatgacggcagcggctctgcaattggcagcattgtcagtgatcacttgcacaacattttgtgccccaacctcatcaattactgctaacatcttctctgcaatatactccttggtcttggatattccctcagtgttgatcgctctaagaaacattgggccatcttctgtaacagaaagagtgggcgtctttgagcatctgaccatccatctgaaacaaaacttacgcctttaaagtagagatggccaaatgggcgccacggcacggcccggcccgggcacggccaggcacggcacggttagggcacggcccgtttggcccgtttaatagccgtgccgtgccggcacggcactagtgcctgaggccaggcccaagcacggcactaagcctgcttagccgtgccgtgccggcccgtttagc

SEQ ID NO: 151540 - DNA, 1026 bp, Zea Mays
tagggtttttgccctagggcaccacatcaatgttgcaaagcaaacaaagaagaacaattttgctgaagagggcaagccatgttcttgtgagaaatttgaagataatcatgctcaaagtctggctgtcagactgataaaggactgaaatcaggctaacagtgaactaccatcaacttcaagcccaatctcaagtatgattcaatggcttttagtggcaacaccatatggcaacattctagatggtacattactctacaattttgctacagagcttgacatgaattatcattaggaattgagagaaaattgggctccaaacttgactgtcaggctgtctgaagaacactcgccatggtacagtactcggttgtggatcagatcggccgcggcagaaaaatcttcaccgccgacgaccctcaccgtgattcacgccaccgctgttggattcgcgtcgccgatgacccgataaggccgccaggtaaaagccaccccctggggataactctggtgactcaccgtggctgccccttctgctttgcggctggagcggattagctcgccggtgaaccaccgcctcccggccttgcgtcgcgtggctttgctttccaccgcgacgccgtgactcgctacggctgtccaatcgtcgccggtgagctcgccacgacggtggccacgaattcacagcgcctaagttcttcttcatctctggccgccagcacggctcggccaaattgatcactaccgctcgctcctcctataaattgagcccgcggctagcttcacaacatcatcacgcaccaagccacccagtattgcccccagccgatcaccagcgagctctaattccggatttcccccaattcgggtttccgccacccgaaaccgacctcatcgcggccagctcccttcccggtcagtccaaccctccctctccctcgtttaagctttctcacatgtctacgatgcttgccgaaccaccaatttggactgcgggctcaccaatcaccgggaacgcactcaattgtc

SEQ ID NO: 151541 - DNA, 1004 bp, Zea Mays
aagcgatttagatttgattgagattccccttcacggcttagcatacacctggtcgaacagacagagggatccccttcttcagaggctggattggtttttcatctctcaagaatggtcgatcgtttatccggattcctgtgccaaaacgatgccgagagacatctctgaccacgttccttgcctggtttcttttaagtccaagatccctaaacctaaaatttttcagttcgaaaacttctggctggaattggatggcttcttgaatctctttcaatccacgtgggttgggcttccttgccttcctgacaaggctaaaaacctgactgccaagtttaaatgtgttcgaaaggttatgaaggattggcagagatcgcttccaaaaattgataaaatggttcaaaacatcaagcttctaattgaatttgtagacaatatggaagagcatcgggatctttctattgaggaatggaatttcagagatattctgcagcaaaaagtggtcgatctgctgaacattcagaaaatttattggaagcagcgggcggctattaagtgggtaactgatggtgacattggatctcgtttcttgcatgctcatgccaccattaaacacaagaagaactcaattgccactttgactgacgagaatgggattattcattatgagcacgaacataaatctggcctcctctgggatgctttcaaatgcaggttgggatcgtccgatttctcaggaattgattttgaccttccagagcttttaatccgtaatgaggagcttcacgagttagacaccccgttcactaagttggagattgacaacattataaaatcattaccttcggataaatctcctggtcctgatggtttcaataccaacttcattaagaaatgttggcatatcattgctcaagacttctatgatctctgtgaaaaattctatcatgatgaagtttgcctaagaagtattaatgggtccttcattgttttgatcccgaagaagg

SEQ ID NO: 151542 - DNA, 813 bp, Zea Mays
acggcatgttgattcagcaataccgcagggtctctttagaaaacaaatccctatgtgaaggggtattagagaatctttgacgttacattggggcagacggttgtcattagatctaggctcaggatcgctagaaattgcccgatttgagatctgtgttttggatttaaagggctcagcgaaggggtgtcgggctttagagcccattggattatagatctacgatcctgattagatctaggctacttgaattcgagccaaaagatgaggagtcaatggtagagatcaggtgattggggctggtttgccttcctcggttgggtggcgcaacaccgctcacgagacgctacagggcttcgccggcacgtgacaagaggatgtttcccctagggttctaggctagaggaatggcttggtgaactcaggacaactttttggtctcaagaaaggggcttggtgtggacagtgatggccgaaggagggttcattgtggcccatgatctggcagcacatctcgctactctagtgagcaactatggccatgagggaggctaaatcggcactccgaagcgaaggactagtgaggtgactagaggggagtgaatgggagacactaaaaaattctctgcacgagaacactgtgacttgattcccgaatccaatgcaacttctacggacaccaaaaaaactccacaaaagaacagctcaaccatagatcgattgggtgcccctacaagttctagagaagaatatattctcaatgggacataaaagacttgatttaaaccaaaattttcacaagaaactccaaacaag

SEQ ID NO: 151543 - DNA, 622 bp, Zea Mays
ttctcaatttcagggtatgtaatttttattgtgcgtttgaataatgaattacatttggataatgtgttcgaagttgtcatttggatctgtaataacaggtgccgttctgctttatttcgagccattcatgatccaaatgtattgcaacgcataacacaaactaaacatttggatctgcaatagccagacacagatcactgcttaatgcttcaattcactgctgctgcctccaatatacacttggaattggcgggctaatagatttcgggactcccttccatgttgctacatttggggggaggaaataggtctaaataagaactttgtaaatttagaaacttgattgaaggaactgttatagcagttttttttgttaatattcccgtaaaccaaaataaaggatgcatttttgggaaagctgctctgtcggccggtagggctatagaaaagagaaacaagcctttcgaacaaaagatataactttttagagaaggttagcttatacatgcaacccatattgtgcttcccctggccactttccggatggttaagagcaatacattttaaaactaagcacaaaaaagtggacatagcaggctatgaagcaggacatgattgcatt

SEQ ID NO: 151544 - DNA, 388 bp, Zea Mays
catccatccaaataatcagtagggacagctcaagcatactttaaggtggcttcactcatacacatgaatacttgtagtagtataggagtagtttttatttagcaacttgatgagccgaaagcagagggcacgtatgcacttggcagataagcatcagatattaacgtctataatacatactttctctgttctaaaatataattcattttaaactaatcatatatttattaagtaacatatgaatccagtttatatatagattcgtattcttagcaatttagaatctggagatgatataatgtgtcctcacccatcaaataacgctaaaaacatatttaaaccgcgcaccgcaggcgatttttgcgcaaagtatttccctcaaaataaa

SEQ ID NO: 151545 - DNA, 510 bp, Zea Mays
tgacaggatcagacctgatttgcgctggccgcggcgaggtcaagctgtgcggtgttcctgagcgttttgggggaaatcacgaattgaagctttctggtggatgattgtggccgattagcggtggttagctggctgactacctcacggagctagacacgggctcaatttatagagtccgcgggcggtggtgctcaatttggccgagccgtgttggcggccggagataaagaagaagcttgcgcggtgaattcgtgtccgccgccgtggcaacctccccgtcgacgatgggacgggtatagggagtcatggcgacgcggtggaaaggtttggacacgcggcacacagccgggaagcggcggtcaccggcgagcacatccgttccaaccgtgaggaggaaaagagagacacggggaggtcaccggagtgatttccagctcaccgtcgacgaagatcttttaccgtgtgcccttatttgcccatcccgtgcacaagtcaggccggcaacggcac

SEQ ID NO: 151546 - DNA, 657 bp, Zea Mays
gaattatttcaattttaaatcctgcacatccaaccattcttttacaattcatggacagccatgcatgtcgtagatagacccctacctgatgccttgatgagtttccatctaggtcgtttgaactgtttcaatttcacttgcacttgagttttatacggatgtgtaaagacctctatttcaatttaacttggtgattccgtgcatgcgagaagaaattatctagaacatgcagcacacctggtggatcctagtgcataggaatctcattgctagttttgctttaatcctctctcatctttatttgcacaaagatatgtgctttcctaaagtttatacctttgagcaacctcctctctagctagctatgcctgggataaccctatagctttcaagaatgtgaaagccatgcatgcttttgccccaatagcaaatgcactcttctttattttcagcctaccatgcacctaagaatcacgagagagatgcgtatgtttccgtgtccaaattatatgttcatggatttaactgaaattggaggatggaaaggtgaaggtggaatgattatatgaaatctagtgagcgatatcttggcgaactatgtttgtcgatcctacagttgtttaagagaatgtttggatccacagtgctaaagtttaa

SEQ ID NO: 151547 - DNA, 287 bp, Zea Mays
cccccatatttttatttattcatgacaccgatccccaaccgcgcgtcggtcgaacacttggccggaatcacgtgtactcgccgatggtgacatgctccgatggtgtggagtacatgggctccatctccgatgctacccgaacacatccataggttcaatttgaccagtccgacaataatccatatctgtccgcgacaaccgtggagcaaaatctccggcaagcccgtttcaatttacacaagtcggtcgcattaaatccaaggactcgaaacgaattagtgacctac

SEQ ID NO: 151548 - DNA, 475 bp, Zea Mays
gtctgtatggagtggttgatgcttgtattgcgtataggtgagtcgatgttgtgagccggtgtcacgagttgtctctagatgtggctgttttatagagccctttaagggttcctagctcccttttatatatgcaagggctagagttgcaggtcggttatgtgctatagatctaacttaagttataacccgagtataaatcacaacagagatcatagccaagtagaacttcatattgtgtttgcaagggatatgtcatcttgtattgtatatccttgatgacgtgggttgatccaccaataagatgtttagtctccatgagctcgaggaaccctatgtgacatagctcccacaaagacgctaaggataattcaaaaggtggtacacatgctacaaaggcatatttgtatcttgtatactttagcatcacttagtagtgatatggttgttacaaatttcatatgtacgcatgtgtgtg

SEQ ID NO: 151549 - DNA, 447 bp, Zea Mays
caagggtatgagtacaataaagaatagagctaaggtaagactggcacgtgacaaagatgagattacgaccaagggtgggataagtagaacaccactctcgaattgagaggggagaagggaggttttaagtggcagacatatgacaagcatcaaggtaggatcacaagggtaaaggcgatagcaaacaaaacacattaaacaatgaagttgaaagtttgcaagcagcaaagaataggatacatcaagaaaaatgggtaagatacaactttcaaattgagacagacgagagaagattttatagagggaaggtataagcaacagggtgagatgtagaggtgacaaaggtgaagatgatatcaatgaaagcatgacaaagaatagaattagggtaagactcgcggaatggcgaattagaagaaacaatctagggtaagataggtagggttt

SEQ ID NO: 151550 - DNA, 1034 bp, Zea Mays
aataaactaagctacacagacgtacgtaaagcgcgcgatccacgtccatttgaaacctactcctagtctatcgcatgcacatggagacacaagctaggatcgatcacgagctttgcgcctttgcccaccagctatgtaacacgatacacatgcacggtcacacttctcctcctcttctacaagcttgccactagaaaacgattgtgccctgccctgctgatttgggtggttctaagattagtggcaacggtgcccgctatcagtctcctcccctaatactgtaggtacgataggggatacagtgtcactctatcgctcgcatcgtcgcccccttcgtccacccctacggtgttgtgagcttctctctccctagatgaagagctaccctttgagtcccccaacggtggcttctcgcgtacgcaaccactcgcgcgcgcgggtggaaacatcatcttccgctcccgttggcttgggcggaagtgaggagtcacgtagaattcctgccatctcccgagcttgacaccgtcggaaggtcgattcatagtcgttagtcgtcctcggtgatgaagtcacggcgaacaggccaccagttttgaagtgggttagtcgttcaactcgcagcaaggagaaggttaggcgtcatcgtcgtcgtcgatcttccccgagtttgtcaccgtttgttctgacctttgtcacatttgtcgccccctccgatccatgatttcttcaatcgatgcagtaaatcacccacgcctaaatcctttcacggttcgaatccaagttcttgttccatttatgtgtgcaccagttgtcaagaaccaaatccgagcacttatacactgttttagtacatagatctggttccccactttagcgaggtactacatctggttctcatcacttgtgctcttatgtttgtaagtagtagagcagattaggttttaggaattatgtaccattaatgaacaaacaaatacaagcatttgtgcttagttttccatggtacatctaaatttctctcttcagtcttcacc

SEQ ID NO: 151551 - DNA, 712 bp, Zea Mays
aagacgaacatggcggcctaactggcactcatgacaaagatgctcatcatgtgatctagtacatgagatagtgacactacgagtaagttgcatcaaggcatcgcatccggggtgaccaaggcgacgatgccaggtggtagaagacgtggtggcagaaaaaacagtagctgtggcaggtgacgaagacgaagaagaggtggcgtgcggaagccgaagggtgtagaggggtccggtgctgtcacatatgaggagggggcgccgagttgctgagtccttcacagtaagaccagaagagtcaaactcgacagaacaagaattatcaacggtaaaacgacgaatagaaagaagattgtggaccaaagaaggagcgacaagaacatcgggaatgcgaaaagagccgggagggccggcggcacccacagatgtgacaggaagacacgagccatttgccaccatgatggacgaagggagagaggaaggagggcgaacagaggtgagtataccagggtcgggagtggtgtggtaggtagcaccggtgtccgtgatccactcgggacccatcagtagagtcagagtgggagtctggaaggcagccagggcgatcgtgtcccaaccaaccagcccgaacggtggagcagccagcggcgtgggccacgacgaggcggcaggtgtcgaggtctagggcgacggagaggcgaaggcgaaccccggc

SEQ ID NO: 151552 - DNA, 553 bp, Zea Mays
taataaagctgttgatgagattgattcatatcctcactgcttcaaggcagatattggaatggggaaaccacttgcagcaatcggcaagttctaatgctttgtacaggtggaccagtcaacggtggacatcaaagagagatttgggaagtttaaggatgtacttgatcctggatgccgttttgtgccgtggatcattggaaaccgcgtcgaaggtcagctcacgcattggaaaccgttgtgagacgaagacaaaggtattgatatctcacttctgacttgtcacatgcaagattcagcttccatgttcaatataggtagtatttgttaagatagtgataagtttttaccgcctgtttgcaggcagcattcttcagatcttttgctcaccttatctaataatgtttttgaacgcttatttgtttaagcatcctgtcgcaggataatgttttcgttacggttgttgcatccattcaataccgggcgatggaagacaaagcatgcaatgcatattataagctgagcaacccaaaagctcaaattcaatcatacgtcc

SEQ ID NO: 151553 - DNA, 661 bp, Zea Mays
attgttgacttttgaaatatgtgctgcataacacggtttcattctttagttggtgcatctggtagtacttgagattgctagaggaaatcgttcagaacggtgatccgtaggcttaattcttctgactttttcatctacacgtatgccccatgcatgcgtattcaaaggctgctgctatccttggaaattcaacttgcacagagaaaggcaccccccgatctgctctgaaaacgacaactaagggcgatccgattatttgtgatcttttctttttctataatgtagtgaggaaatggtgccgacgcttcttttcgcaaacgtttcagagtatcacagcgaatttacatgtgcctgctaaacgaattaaatccttgcgaaaaaaggctaaacaaactgaatgaaatggtcaaattactgcatttcacgcaacggaatagcaattgcatgatgagagaagtagtgatattttcatttggcagaatgtgcagcttcgatttcgttatgctcatcggcgctcctgtttttgcttcgacggggaggaaaaacgtaagccatacttgttgtggcgccgccgcgccggtggtggctctcggacgcggcgtttgtttcttcatgcatggcccatggccatgggcatgcccaataccaacgttcagcgggt

SEQ ID NO: 151554 - DNA, 1153 bp, Zea Mays
cttcgactacatcgtgttccttggccaaccttatctcctagtcctccaagcgttagcccgtgctctcctgctccagcattgaggctgagtaccgcgtcatggcgaacgacgaaaccatctagctccgacatctccttcaagagctccacaaccccctcactaggagtacacttgtctactgtgacaacctcagcactgtctacctcttcgtcaacctggtccaccaccaacgcgaagcatgttgaggtcgaacttcactttatccgtgagcgcgttgtcgtcggggacgtttgtgttctccacgttctgaataacacacagtttgcagacagcttcaccacgggtcttccgtcctcgatgttctcagagtttcggtctagtctcaacatctgtcgtagctagagtttcaaatgcggggggggggggtgttaaacttctatgtatgtgttatgggcctagagcaaatcccatgtagcctttcctatatatgtaatcctcttaccctcaatacaatgctctatttttctctctctatcaggctatagaaagagtaaatttcacctaacgttcttaaatttgtcccgagttctcattctagtccgattacatgcaaattaaacttaactcccttgttccgaattctcatcccgataccattacctttaagttgtgcactcagctccctaaacatgttatgagttctcattcccatactcgtatgccatcccagtccaccctctccccctgcatcgtcgccacacatatgcacacctcacctaagtcgcactgcaccatgatcgctctaccaccccatgcctacatgtgttgatgccacacccattgccatgttcacttgcaccactacttcgagcgaacctagctttctcaaagacaagtctagccaaacccttgtcgtcatggccctctatgctcttgctcgactcgctcctacaccttgcgatgccaccaatatcgacccttgcccagcagtaactgcactctacacccaacattgataccaccacagtccttgtctcctttctctcccccattatgcatgctctcatgctcgccatctcctcgcacacactcttcaccctcccgaccttcctcgtctcttgtcccgacaagctcatccgcatggacgtgcgcc

SEQ ID NO: 151555 - DNA, 751 bp, Zea Mays
gagaagatgaagatgcgattgttgctgcggtgatctgatctaggacaggggaatgtgttcgctcgcagaagagagccgatcgaggccacaggaaaaacaaatcaatcgtccaaatcctagtgtcggcggaagagagagggagaggcgagagagagcatggcggcagaagagtccaaaccctagcgtcggcgggtgcgtctgagagaggcgtctgaggagtgacgggagtgacgggagagacgggagaggcgtctccaaaccctagcgtcggcggcttcgtctgagaggcgagagtgacgagagtgacgggaggagagagtggcgagagtggcgagagtgacgggaggagcgtctgaggcgtctccaaaccctagtgccaagtgagccaggccgcggagcgaagctcgaatgctgcgttcctgcggagccaggcccaaaattaaatctggctcgcctcagccaggaattcgagttgggccaggcaaccaaacacagttaacttgtacgaaacgggcctggtcgtgggttgggccaggcaaccaaacatgcccttaaggacttttgtccgaaccttttaaatatgctctagtcaaagttgctatgaatggaaaaatatctaacatatcttttcgtagagctattgtcggggtgaaactggttgtgtggaataatttattatatccaatggcaactgctcatttaggttaatcgagagacaaatttatttaggggcacatagagatggactctt

SEQ ID NO: 151556 - DNA, 308 bp, Zea Mays
gcggtacagtgacattggtgggactaactccatcaacgtaatcaagcttcctgaagcacaagaagaaaaggaaaattaagtcaatgtagttttattttccaatttgtacaacaacaaccatcttaaaaagcctttctcaataaaactgtgggtggtaccgtcttaccaacaatggtgccaaatgtaaccaacaagaactgtttcaggcctagatttagtgcatccgactctttcgctctttctagtccagaattaatccaattggaacacttttgcctagaacgcttcttctccttgctcggcagcct

SEQ ID NO: 151557 - DNA, 336 bp, Zea Mays
cgcaatgctcctggaccacctgctggggttggagggtcgccaatggggtagatcgacggtggcggcttcatcttctccccctgctccgatgaggatgctctctaccctcggtttctcgcctatgatggaaggctagctgatgggaagaggggtcgtaggggttcacattttatagtgccacggtggagagatcccaatcgcaatggcctcagattcttagtgagttatttgctcgtggagctcgtcgcgatgaagggaagctgacatgtcggtcccacgcggtagtgatacgtgagagcgtgtggatttcggaaaaagaggggaggctggttgagc

SEQ ID NO: 151558 - DNA, 1384 bp, Zea Mays
ccaacgaaaatacagcccaaactcgccaaaatttaaatcatcccactcattacccatttaccctcgcgcggtcgcccctcatcatcttcaacgtctctccagctcgtcttcgccttctctccctcttgaatccctcaccggcggcgatttaggggtttcccaccggtaccgatccccagcgactccggccggccgcaggactcctcgctgcgcctatggagggactcttcctcatcgacgtctccaccgaggacgatcttctcttcaacctcgtctcaccggccccgcggcgtcccgatccgctccacgcaggtgaggtgttgcccccccatcgcgcgggattggtgcctgctattttggttgcgattttgtggatctgacgggcgacgattttccgttagagtctctagtgggagccgaggcaacctcctccggcgtttctccatcggcggtggttcgggctacggatccggactgtgtgatggaggagcgggaagatcccgagcggacggagtccccggagcagcgcaaggccaagaagggggtaaacctccgcaagagcttggcttgggacagcgaattttttaccagtgaaggttcatcttcgcttttgttttttcctggtccccacccatgtgaaactctatctgttttctggaattattgcctctcgttatacactctggtaaaccttaattatgcagattgatcgcaactcttaatctttcctggtctatgcaggggttctcgacactgaggaattagccattgtaaacagcacctatcgtaaggcccaaggttccaggctgcctggaatcattgaggaaacgaggagatcaggggagtcaacaacctcaactctggaaagtgaaacctgggcgatggaaagccttgagactgaactatttgataatgtccgtgcttcgatccagagatctcttggcaaacctgataaactttcaggtcggcccgttgctgcctcaaaccccccaaaggccacagcaaatgcacctcgtgttgcaggtaacaagcctcaaatgctgacacaacatgctagttaacatccaaaattttaactctagcgatctttgtctgctgttgataactgatgagcatattccattgttccttccagctagaaaaggtgttgatcggatgccacagtcaaaggtatgctcagttgatcatattgttcaatttcaaatttatgtaatcatttatcatcactgattacatttgcttattgtcagatgagggcccctgtttcaacaagccaaggagctgttagcagacaaaggccccaagtcaccatcaacgagcctgtggctgcaagagatgtatgtcccctgtcagtgattcccattgtagttttttatccattcac

SEQ ID NO: 151559 - DNA, 790 bp, Zea Mays
ctcacaacaccagagaagaggactgaaggaaggaggaagatggggctggaggatgtgaaactaaaaatggggaaaggaggaggggagtggaaccaaacgaacttacaaactccacaaagcctagctcaggacacattggagggcaacctggattcaaaacacatatgggatgatggcctcatccgcacccttgtgaacttccatggccttcgtgagccagcgagcgatcttcacgttattaagaagtggagcactcagccaactgccatccgatggggccttggtagtcatcgtaaatagtggcaatcgtctgccaatgagaggagccacccccatggaggtaattcccaatcttctcgccagcgtgaccccgcgatcgcgaagaatggacagcgccgcaatggccccggtcgtccttttctccccttccttcgggacaccccatgctcaagtttgaggggccttcgagggtgcctcaggaagaatagcaggaaggccatggacggcggcggatggagcctcatggttgcgcaggtaaaaccattggttgtgccaccccttgttggacgatcataaccacaaggggatttaccctttgaattgtgacccccacaagtggatggtcgtgcacccgatttgggttgccttagctagggcatccagtgtcggccgcttatgaagcaactcagccgagaagaagtagcaccaaagaagaaaatggggggacatcccgagatatccctcgcatagggcagcaaaagcggccatatgttaaaccctattgaaattt

SEQ ID NO: 151560 - DNA, 509 bp, Zea Mays
caacggatctggaaaagcgaataggagtagcgatgggggagacgaagatggtacctgcgtagacgccgagatgggaaagggggggaggagtccacaggttgacgacagcagagggagttcacgacagagttgccgctccgcggtcaaaaccctagcgctgtgaagggttacggagccatcaaaacgactgcggcggcggacgagaaagtagagaagggcggcatggatgacagggcttaccggcgaagacgacccgcgcggcggcgggagatgcgatgggaggagagctgcggcggcgatgggagtagcgatggggacgagagagctgaggggcagcggggtgcgaaccctacccaaatgatgcggctttctgcggaagtggcctgaggacagcttctgtcttcgcgtagtcggccggcttctcagcgacgcgcgtcagggaaaagcgggaggcgaagcggcgcgtttgggaggagcttcagcttctcgcggccagaatcccgccagaa

SEQ ID NO: 151561 - DNA, 281 bp, Zea Mays
gcgcattgccgttccgttcgtcccgtccctgcaagctctaaggctttcgaagaattgaaaccggggttcttgggctttgcgcctcgcgccgtgatgtaaacttgaaccctcggatcgaaaaggccgtccctttgcgccggccggccgaccggaggtttggcgctgttcggcggaggagctggggtggggtgatgaggatagaaggggatgaggctgcgcagatggcggtgtggagcgcgacatgcgggtgagcgagcgcggaggcgccgttgcgttctgac

SEQ ID NO: 151562 - DNA, 510 bp, Zea Mays
gtggatcttaaacccaaccgaccatagagcgctcccacccttatatgcatcaattgtgtttaatttcgatgcaatcatggaagcaaaccaaaagccatggctggccagtggccatatcaacaatgaaaggttatgctgcatccaggaacaatactacagaaacatcctgtaatgtagccgatacaaaaccatgaccaaacagcgaagcgtaaagctctacccaatcccttctccatcaggtacaaaccagaaacaacaatgaagagaggttgctatttcgcaactcatagttgctatcagcgcatatccgtttggttctacggactcatttggaagtcaaacgtccgagccactaaccactagatgaagcaagtgatttctgcaaggatctcaccaaaatggctgggaaaatacgtcatctcaatatctccggaaaataacatgtcagccacactaagcagcaaagtagactgatcaaacacaaagcatgcaagagcataaaaaactagg

SEQ ID NO: 151563 - DNA, 330 bp, Zea Mays
gtaccctccaaaaattaacgtatgctgtttaatgtggagagcacacagcattcttctattctcagtcctatagtaaggctatctccaacagcccttaggctatcggctatctccagcagcccttaggctatcataagcagtctctttgctgctataaataaaaggtgcattgtatatgcaccaaatgctggcctaagaatatagggcggaagaatagttagctgtgtgctcaccacgcagctgcgtgatgggaacctgagaacttcgccctctttatgtaggcggcctctcttctgcctcctccttccgcgaggcgatctggtgctattc

SEQ ID NO: 151564 - DNA, 394 bp, Zea Mays
ccgcccgatactgggctgaggcgctgaacacaaccacctgcctcctcaaccgttttccctctaaggcgccccccatcgcacttcgttcttcaccccctttggcaccacccccctcttatgagcaccttgacatcttcgtgagtgcttgcaatcccaacaccttcgccaccgctcatcacaaactttcaccccgattctctcactgtcttttcctcgggtactcctctgatcacaaggggtaccagtgcctagatcttctcacccaccggccaccgtatcatcatctctcatcatgttgtctttgatgaggatgttttcccccttctagctcctctccacccgtcgacccaattcccttctcgatgtcgattgcgtcgacatacctgctcttccc

SEQ ID NO: 151565 - DNA, 604 bp, Zea Mays
tgagtcctctatatcagatttcgcactgggcccctgaaaagtcacgaacggccctggtaaatagtctcgccccacgaggccaacagttgattagcgtgatgctactgaaaatttcgcaacctcaaaactcaaagcgagaagagaaacggaagagccatcggtgaggaacagacagagacagggagacgaacgagaagtgcgtgagagatcaaagaggaaggaacgggcgagaaatgtgtgagagaagataatgtatgcacggacaacgcaaagagagagagagtctgtgtgcgtgagacgaaagaggataatgtagagtacgtgggagctttgtttgttgtatccattgctctacagtgtttgttctcggcgtaacgaaacagctagctgcaggttgtgtcgtcggtcttaagctacagcaacaacatcacatgattattgcaggctgcatacgggcgacgacaagtttcgtaacctggaatgtgcttcgtcaacatgacactctgtgtacactgtttctttttaaacgttttggagctttcaaaattagggcaccaaactcatagggagactgtcgacactgcttgtacatatgaagtacaag

SEQ ID NO: 151566 - DNA, 480 bp, Zea Mays
atacattatctttttaacaaaattcttcctgatgatggtagagaattgtttcacattcatgcatttttgctgttagcaaccaagtatcatagttttttaagaagtatgataatctaaggtggtctattaaaaaggatgaaatgagaaccatctttatgcaatttcctgaagcttatgttgccacaattactactttgtagatagatggatcagttgttgaggacatttcctgaaagcacaaagttaggacaaatgtactgattgaaagaacactcctttataaccacaccacaacctatgatcatcccaaagaagacccaagtaaacagacatgcttaaataaaagtcagaaaagacactttaagatttgagatttgatcctgtagctggtcaggtggttcttaccgcagagcagatgaggatgattaaatgtctgaaatttcttgaattcttgagaaatcggcgtgcacataggttgga

SEQ ID NO: 151567 - DNA, 302 bp, Zea Mays
gaagtttcacatgtctgcgtatcttcagagcatcagttaccgagtttggcaaatttaccttgatgcgaatttcgatgctacaagtgaccggatcactccaattcaaatggagttccatgattcgaacaacaaagctcaaaacactttgttctcgtgtctctcgcttggtgagtttgagcgagttggacatctgactacgactcattagatctggtctaccctcgagagattccatgagggcaacggtcatgtgaagatcagactatttgagacgtacatgcgagagtatgaggacttcacac

SEQ ID NO: 151568 - DNA, 394 bp, Zea Mays
cacggttcacgcatacccgcggagttggagacattcttaacgcgttcctaatgttctagcgcagtataacttaatcggccaggccaacaagcatcataagcatgcgggagtagtgaaacacggacaacgcggacctggaaatggctggccacagcgcgaggtcacactacaatgcggaaaaccaatttgggggaaattgcgaattgaggagctacggtggacgattggaggcgaggagcgatgcactgggcacgtaacaacctaacggagcacgctgaacgctcaatttatagtgtccatgaacggtggctccgaatttgaggagagaagctggcggccgaggagaggggatgagtcaccgtggcgatctaccgtggcattcactggacaaagg

SEQ ID NO: 151569 - DNA, 910 bp, Zea Mays
gggtccgatccctaggatcgacaccccatgcctcactctggggtttttcccggtatggtttacacatgtgtgtgcggtcagtggttctgcgtgtttgccacacactagatgactaggcctctcaatccctttcgaatgtgtgtattggacacatgtgtgcgtgtggtgtggtgtgtgtagtgggtgtgaatttgtggtgtccttgtaccctatcaaaaaactgattcaagcaacaaatccaaaacaaaacaaggaaaagcaatggccaaggggaggtatacttgagaaccatcagcagcaattagatttgacctcaaataaaattcagtccgcatcatggttggattaggcaatccacatcatctagttctcaaaaaatcgctgctccagaaatacatgaaacgcaaccaaatcagtatcatattaagcagcacaaaaaacgtgacaggagaaagcacacatgtaactatgtaagtaaaggctcagatgaaaaatgggtaaaaagttcgtttgtcagcccaaagagagaaaattccctcattcagagtggtgcatgactttgtatcatcattgcccgtacaacctagcttagtagctttcctctgcaaacgaggaagaaagaggaacaccagaagctataacagacccaaaatcaagcaatgaatacacggtcgccaatcgaaatacacgatctagaagagaaaacagatccacaatcaagcaataaaaactcaagcagaaggaacaacgagtgagctactgtgctgcctctgcttggcagaggcggcgacaagccaaggcaatgattccatagctgctgcggcggtagtaacagggtattactggataaccatcagaggcaatagcgcaagtgtattgactacctagcaaagcacagtttcgctgaaga

SEQ ID NO: 151570 - DNA, 920 bp, Zea Mays
gaggaagtcttcgtcgaacagccgccggggttcgtgctaaagggccaagaagggaaggtcctgcgcctcgtcaaggcgctgtacggactccgtcaagctcctcgcgcctggtacgccaaactggacagctccctgctggaacttgggttccaacgcagcagctccgagcatgctgtgtacttccgcggtgctggcggacatcgcctcgtcgtgggagtgtacgtcgacgacctggtgatcaccggcggcacccaagacgacatcgacaagttcaaggtccagatgaagggcatattccacatgagcgacctggggctgctccactactacctcggtctggaggtgaaccagactagggacggcatcacgctcgggcagagggcgtacgcggcgaagatattggagaacggcggcctagctgagtgcaatcccagctgcatccccatggagccgcgcctcaagttgagcaaggcgagcacggctcccgccgtcgatccaacagcgtataggagcatcgtcggctcgctccggtacctggtgaacacaaggccggacctagcattctcggtgggctacgtgagccgcttcatggagaagcccaccaccgagcatctggcggccgtgaagaaggtgctgcgctacatcgccggcacgctagactacgactgctactacaccaggaaaaaggagggtcagctcgtcgggtttagtgatagcgatcacgccggcgacgtcgacacgcgcaagagtacatcaggcactctgttcttcctcggcgacaatgcgatcacctggcagagccagaagcaaaaggtggtcgccctcagctcctgcgaagctgagtacatcgcgggcacagcagctgcctgccaaggcacttggctcacacgtctcctgtcagagctgagaggcaagaagga

SEQ ID NO: 151571 - DNA, 719 bp, Zea Mays
gtaatgttctagaaagcaaaaatatgaagtaaatattttactgcgaccataattcctgtatgtgtaactcgatcaagaaatcaagagagtttcccttttaatgttgaattcacaattatgcctgacttatgctcaaataccttgtccagaagtgaacaatataagtgcatgagttgatttggaaaaagtacatggttaatgttgatcttttgcacggaagttatacttcatctaaaatgacatgtccctcttttgcagggaaggccgctattcttgaagttgaaacactaacctgtcttgaaggttctggtgaagttttgtgtatgaataggtcggtattttttttagaacaattaagctttacagcttgactggaatgagtgaataacccattgatgcgacacctggaacaggagtactatctatttgcgtggtgctggtggcttctccaactcttcacaaccgttctcatatgccacttatccttctaatgaggtttccaatgttacattttcagattccacaccttttgctgtgtatgaagatcgcattcagaaatcccaggtatggtacttcattccatatgtaaatttctttctgaagttgtattgcattccttatttctagtgaagttgtattttcaatttctttctgactcacctggtcatggattcaacgcagcctctccgcatttacaggacaaggcttgcctcggttta

SEQ ID NO: 151572 - DNA, 317 bp, Zea Mays
gtgaactttgagtgctcggggtctgaggactattgttagtagctgcactgaaacttgacccctgtaatcccccctgtgacacttgtggtgttacggttatttgtggtgtcactggtgtgtgaggtgagggtggagaattttgtgcaccccctgaatcttcaacacttccacctgaaacacctggcggctgcaacacctgaccaggcacaatgtactgaaactggaattcacaaggaccagattctgtctcagcttgctgaacattttcatcactgtcccaattccaccccacttcttcttcaaacacaacatctctg

SEQ ID NO: 151573 - DNA, 402 bp, Zea Mays
cacaggttcatgatgtagaagctcttagtatccactggaagttcagaacaacctgagagaagtatgaaacagaacgatacaattggagactaagcaagcggacaaaaaaaacataagactaacaaaatccaacagtttttcaaagagtactaagagatgactcaattcatgtgaaaaatacttgttcactcatctatacctcctcttgttgttccatgtattgacgaatccatgcagcttgtgacaatcgcccatcatccagtgacacattctcatctctccgcccaccaattctaacttccaacccctcggtgctcaccttcacctcctcaggttcacgactctgtggcacccaattgtccttggctgtggacagtactttaacagaaccttcagctccta

SEQ ID NO: 151574 - DNA, 913 bp, Zea Mays
gtccgtgggatcacagatcgacggcagaggttttaaagaggtaaggagggttctggaccgcccgatcccatccaacgacccggatcagaagtcgcgaaggggtatcccactgtctaatctcaatcgtccagagaacaatctacggccgaagcgcatcttccccacggcggcgcggaacgagcctgcgagacgacctgttcactcctcgcggcggcgccatgaacggaggacccgagcgagcgccggcgagcactaaacctagcgcagttatgcgcaaaacggagagagcatggtagcggttagtatcgaggtagtcttaccttggattatgcgcactggtgccctgaccacggcgcacggcggaatgccccggactacacgacgtcggcgagcaatccccatgcttcacaagccctcaataccgccatgtgaggtcgcgaacgtgttcggtgtgctctggagactctcctcgaccatcaaccaagcccagagtaaagctcctgacgagatgcccatgcgagcggacatacatctccccatggtgctttgaaacgacatcttcttgcacacggcgggcagcaccagttccaagggatcccggggatggagaccaaattatataggctccgggtccaacagaaacggcccgagaaaaagggggagagatacgagcttgcgatttcggagtccgcgctttggttacgagaaaaggggagaagaaggagctgaccgctaggccccacagggtagcgacggagcggctgccctgcgcgcagaagagacactgaccgtcgggtccacgcgtcagcgaggctatagggtgtgtggccaccaggagcaatgggccgtgcgtgtgaagtgggggaaagtgaatgggccggcgagggaaggaaacggcccagagcggttttgt

SEQ ID NO: 151575 - DNA, 882 bp, Zea Mays
gaggtggcccgttacgcgcctgacgatgtcagcaccgagtctaggaagatggcccatttcctgaaaggactaagacccaagcttaagaccatcctcgccagccaagacttcctcaacttttctcacctctccaacaaagctatccaagtggaaagggcaaaagaggaagaaaaagggcacctcaagaggaaattccaagttctccgagctcaacagcaagaacgtcaccagagagctcgaccctttgggcttccacctaggggaccaagcttcaataaaccatctggacccactccatcgcgctacagtcagcagagtcagagctcccttcaggcaccctccgttgcaagtaaccaaccgccagcaaatgcctgttggcactgcggagaccccagtcacttcaagaataactgcccccagttgaaggcacccggacctacctactccaactcggtgaatggccccaagattccctcggcacctacctccaaggaacctccttccaacagtcagcaaagcaggactcagtaccagggtagagcccaagtcaaccacgtcgacgctcaagaagcccagcaagccccgggagtagtgctcagtgagttccttgttgaatttactcccgctactgtgctttttgattcgggagcatcccattcatttatagccactaagtttgtggaaaagcatggcatcccctctacacccctagctatccctttggtcacccgaaccccgggatcagacctcctatgccaactcaggtgctcccaagtcagaattctcttaagtggggtagtgttcctggcagacttaaccatcttgccatcccaagggattgatgtgatcctaggaatggattggctcactaagcacaagggt

SEQ ID NO: 151576 - DNA, 314 bp, Zea Mays
cataaatccaacaaatatagctgtcgcgagaatttggatatcgtaagacttgcatgtggataaagatgaaggaatctacacgatttagggtttaagaagtgacagattttcccgtcacaatgactagacggactctgcatgtacgttgatttgagcgattttcgcagaaacgattctcgcaaaagcgcactgagaagcaatgcatttggctgccaaaattctattctgacggtgaaaatccaaaacaaacgtggcaataaattatgattttttgctactagattatttcattgaatgagagaaaaacgattctt

SEQ ID NO: 151577 - DNA, 712 bp, Zea Mays
actctacctttcatatactgtatggaatatttttccaactaagttccatgtttcttgcatctatgcccacctttactgttggtggggtcaacaaagcatatactggcttacagtggttcaatcatcattcgctagagtttaggctccttatgatctttaggtgagtgtgttctccttttcctttattttttatttttttggtgttgcatttttatagctctaatctttgtttgaaggattaatttctctgtctacggagattggtagtgcctacttattaacataaatgtcaaaatagaaatgtgctcttctttctttgctcctttccttcccaccttcccccttcttgtaccgatgccatattcatgaacacacgcatattttgtgttacaccatagcaacacctagtgttatttattgtatcctttattggaaataatcgtatgtctaggtgcaatgctagtgtctaggttaatagcatttaagactatgttacttcattgtgataatgtagctacaatcaacatagcaaataattcagtccagttttacttttacggcatgaaacatgtagagatcgatagattctttattaaggagaagattgatgctgcggttttgaagttgaagtatgtcaagttttgtaaccagctagcagtctcacgaaaggtctaggttctaaggataatgagttgacatgtaacaagatgag

SEQ ID NO: 151578 - DNA, 550 bp, Zea Mays
gaaccgagggagtacttagtacaaacgagctggaaaaagttaaataatattttaaaacggctggggaactagtagaaatgcaaacctgattgtggggaaataattgaaaaattctaaaaatggtaaaatgtgaacgaaggacccggcgagaaaagagcctgctacctgtctctcaaaaccatcgaccacgacagcgccattttcctccgtctctctcctccgatcctctcttgccctagggagagggagagggagaggaagagagagatatccgcgccgtccgcccagggagagaagcaaagatcggcaaccactgaaccgcgctacgcgtggtcgtcgtccggagccacgcgtggcgccgcggcgatgggcaactgctgcgtgacccggccgttttctggcaagcggcgaggcggctcccgcggtggcgctggcgggaaccgttgcgggcgcctcggcggcgccaacgtgcggtcctgctccacgctgtcctccatctccgacgcggcgcgcaccgccgcgacgcaggcgtggtcgccgctgaccgtgc

SEQ ID NO: 151579 - DNA, 573 bp, Zea Mays
ttatggtcggtcttagcgcggatggtttgatgctgtcgcttctgcttttgttgtactagtttggctgcgcccttaggcggcttctgcgcggagtcttcgcgagagacatcggaatttttcgcacttgatgtgtttagtccggctgcacccttaggcgacttctgcgcggatggtcttcacgatagacattggaatttttccgcacttgttgtgctgagtccggctgcacccttaggcgacttctgcgcggatagtcttcgcgatagacatcggaattttttcgcacttgttgtgctgagtccggctgcacccctaggcgacttctgcgcggatagtcttcgcgatagacatcggaattttttcgcacttgttgtgctgagtccggctgcacccttaggcgacttctgcgcggacttgtcgcacgcgagggtggctagcgcttagcctcgcggtgacttcgaattggtcgaatgccgaagaccgttgtcgcggtcttttttcgacacatgtttttgcgggggattttttttcacatatattacatggctccgcctcgttaaaaacctcaccccc

SEQ ID NO: 151580 - DNA, 478 bp, Zea Mays
tggatatgaaagtactacataacacactactagcttgttcaatcagaatcacaatctataagtaactcatcttcagagtcattcgtcgtgcaatcctcaacgacaacctcgttccacttaatgcattgtccagtatgacacttttccgcgtttctcttataataattggcttctgcttcatctgcagctcgggagaatagctgatcctcagccttagtttcatcgcacttctgcttgtaataagtggcctctacctcttcggcggcctgagacataaactcgtcctcctcttgagcacgtaatcctgcctcagctagtgcgatgagctcactcaacattgatgtgtcctcctcctcttccccatgtaatcctgccttagcaagagcgataagctcactcaaccttgatgtgtcctcctcctccatcagctccaccgttgccatttttcctgaacgtatcttgcacgtgcctcatctgc

SEQ ID NO: 151581 - DNA, 293 bp, Zea Mays
ggtctatggctgatcaataagagtcatgacctaggctagtggcctgaagggaaaatgagctttaagctacttctatattgtttttggtgtttgatgaccattacaacttaatgaactaactagtttgcaaagtggatgattgcaagttcataagaatggatgtggaggattaaatgtgagtataagctcaaaacttagaaaaaatgatatatttttggaagagaagaacattgagtggtatgggtgtttggataagttctaaaaggttttagtaacatttttgaaaacctgag

SEQ ID NO: 151582 - DNA, 1252 bp, Zea Mays
ttgaagacctaacataagagaacaactttgcttaagaaggaaagcatagttattaagaaaaagtcagagataattaagccccaagtttggctgtcaggctggtccattctgaaattcagattctcagtggaacagagccaactttgtgtgtgaattcaaacttgaattgttgagaaattgatcaaggttgttgtgacaaagttgtagctggtttgtcaggctataattttggtacagggagttagcttggtcaccacacaagattgggagaaaattaagctcaaaaacggtctgtcaggatgactgaactccattcgccatggtacagtaagctccaaccttaagaagatcacgattcacccccctgctcgtcgccggtgacttttcgccggggttgctgacggatcgccacgattcgtgcaccgtggacagcagataagctcgcgctggtaaatatcttgcgaccggattgagttgaacctcgtggcggctaagcccgtcgtacttcctccccagctcatcggccgaacggatagcctcgccgtcgtcgagctgttgccgttgcgcgccacgtgcttaagcactagtcctcatcgtggtgactcacggtgtgcatgtccagtgctcgtcggaccagcgcggctataaatagcccatgatccgcggcaaactatgaacaccacgcacaccgtaagtcgatccgaagcaaaaattcgcgctgcctctgccccctcctcccaaattgagtatgcacggtgaagctatagtttcttacggccgtgtagcctcaatccccacccccaatttcacctagaaccgccgcactgccgtttttccccaattcggtcgactgcgccgccgtaaatcacctgctcacggccagaggattccaggtccgtcctcgcccacgttgttcgtgtttcagcacccacatatgcttgtgatcgttacctgcccagcccttggatcttgacttcacctaattaaccggaacaccttgatctgagttctgtatccgcggtcaccgtggtcaggcacatcctggcccaaattagtccgattagagcatgttctagggtaaccttgggtcggtcatgccttccccgtagctagacatggcgaccatcgccggtcatggccagcctgtgcggtgtctgtgatgaacgacaagcgcaccgtcgccagggacgtttgtggagaagaaatagaagaacgagggtatttctgcaaatgtcagcgactcgccgaaata

SEQ ID NO: 151583 - DNA, 511 bp, Zea Mays
ggtcagatgtccatgtcagatgcacagcaggttgtgcactaaggactcccattaactggtgaatgtcaacatcaacggaatcagatcctctgactttcacttgaacaggtacggcatgcctttcatgtatcattattattattattatggatgaatatatctgatgagaaattgggacggtcaataaagcttatgctctggtgacttttgaattccatttgtttatttgaactccggttgctattttgttgcttgtgacgatgaaacgcgtcataatatttgccaaaaagaagggaacatgttcaggtgtgatttttaggccgaggaaaaggttttcatgctatcttgatttgctttggcggactagatctagtgcaacctgactgcaccagtttagactgagacgttgtcagatgtttcaactgcaaccatacgtctgtgcaggtttagctaacgctttggggaccatttgtgccatacgtagcttgccaaatgccatgatggaagtggg

SEQ ID NO: 151584 - DNA, 470 bp, Zea Mays
tgatattcggcgccgcttagcttctccagtgtgtccttggcgtccgaatctcccctcgaccttttggctggtcatctcttttggtcgttgcatattcatgctagacacggtttcagttggttatcttcttcaagctgctctaggaggttttgcaaagggtttcaatgtatctcagctatctgatcgggtttttcgcttctcggtattctccaaggccgttggttttcatgtctacaattctaaatgcattgatcgctcggaattcagggctttcttcaatctatggaatcatggtggaccgaattggactcatgaatacaggaaattcattcaggaagaaaatgccaattggtggattattaaggccaagaagaaaatttcttttgccaatattgttaagcttcctcccctatctggtgcaaatgctatcccgattcatcgtagaaaggtgctttctcattctgctggga

SEQ ID NO: 151585 - DNA, 671 bp, Zea Mays
agacaaaacccgagcaaaagccgcctaagggtgcagccggatatgcacaacaagtgcacgatacgaagtctatactataagacatccgagcaaaagccgcctaagggtgcatccggacatacataaatgtgcgacatcaccctaatggcgcaaacgtcaattacgatcaccttaaaggtgcgaagtctttgccatctgacacggtcgaacaaaaaccacctgaggacgcaaccaggtacgcatcataagcgtccaccatcgccgtggaaagcgaggtccccatcccatttcacaacaagcaatttcaccatagtttacatacacacagcgaagggccgccgaccacatcgcacaaataatacagatcacatcttgttgccctccctctctattgtgagccaggggaggccagcgttttcactcactaccacaacacgagagcgagggcagcaaacatgctacattggctcagccttcgaaataaggcctgcctcacaaaaattaaacatcatcatcttgaactcttcgccctcaaaaagattccgcagatccccctccccaatacacgtcccggacgtcgatgacaacaaatctcgttggccaccccgatctagccgaagacgggatcgttccatccccatctgtcgacgcctcccacttcgcgacatctc

SEQ ID NO: 151586 - DNA, 746 bp, Zea Mays
ttgttaattccgaagctaaaaacaaattccgaagctaaacctcagtaaagatacctataagccttgcacactcggcagcttcttcaactcgtttggcttcttcttgagcgtcgtgagattattttcattctttctaatagcttcatcagctatctcacggtcgcccttcatccacacctcagagtaaaatttcccgcctagcgcataagcttcgaccgaagggtttttaatgtctttgtctgagaaaacaaatcctggctgaactacagccttggcatgttcgcagccaactttctctaagatcgacgaggccccccgtgctccagcgaaggcgcagaaatctcctcggtcatttaaaatttcgtcaaaaacttcggcttctccgctgatccactggacaactccatcagggtcgccacggatgaacttttgctcagaagaatatgccccaaccttagcaaagctgacctttaacttcttggcgcattccaaggatacctcataacatttttctttcgaagcacggagctcatcggcgttcttttgtgctcttgacctcttgatctcgcaaatctcatgcttcacagcttcgacttcaaattttctggttgcttcagcaaccttcgtttttagctcttccacttcggctttatgagcttcgacttgtgcagcaagactagcctcactagatttcagcttctccactaaggaaagtaatatcctatccttttcaagagctttgtttc

SEQ ID NO: 151587 - DNA, 417 bp, Zea Mays
tcctcgcacggcgcatctgcaaaatcgcaccacccacgagctggtgctgcccctcggccattctagaccgacaatggtataagtacttccacaagccaaaatgaggcagaattccgagataggcttcacacaagtgaacgaaaatagaaacttttagaatggagttgggattcagatgagtcagattcagatggtagaaatcaaggagaccgcgaaagaaaggagaaataggaagagcaaggccacagataagaaaaggtatgtaaataacggactcatgggtgtcctccgttgggacagtaaccccacaacagatccgccaggagcaaagctcctttgggggaagacctacgacagagacaagatgaagaaggtccgactcggaaacaacagacatgtgattacctgcaaaagaca

SEQ ID NO: 151588 - DNA, 284 bp, Zea Mays
tccagccattcttgacaatcatttttagttggtggcattttgtactacattctacataacaacaccttgagtcccccgacgtgagtgcatatactatgtggaaactatgacagccacttttttgtgattaaaattatggcttgattccaatgtgttgcctctagcttttgccttacactatccttctttcttacagcctggctaattttcagactcccgtttcaagcgtttgtgttgccaatctgcttggtgcttatgcgtatctctctgatactttggctgag

SEQ ID NO: 151589 - DNA, 443 bp, Zea Mays
gagttttagtacaactctgcatatcacactagtttgggctgctctccgtttaaagccttatatggttatgatccagtcttagctgcagctcctcatctgttaggagacactgatcaatctgttcaggatttgctccaagagaggctggcttattcggagttgttgaagactcgcttagctgctgctcagaatcgcatgaagcatcaagctgataagttcagactggatagggactttcaggtgggggatagtgtacttctgaaattgcaaccctatgttcagagttcagtggtcaaccgagctcatcccaagattgcttttaaattctttggtcccttcaaagtgctacaacatgttggatcagttgcttataagctggatttaccttctacggctttggttcatccggtgtttcatgtgtctcagcttaaaccatttacgcc

SEQ ID NO: 151590 - DNA, 470 bp, Zea Mays
gccctttgactattggaattgcgttatgttgaatttaccgttcttgggatgttgtattgcacaactgtcagatgcttcagcaccatatattgcagatcttatcatcatgatatcatgatgcacggatggtcattttgtgtaaatcggggaagggaaattacaaattggagaaatgccctttgacaacatatagggtcatatgagtgtcccctttgtttcaaaaattcaaagtacaccatgttttttcaagtacacatgatgctgtacctcatatgatgctttagttatgagcgtccccgtatgatgctttaaattccttagaaaaaaagtttcatctacgattctatgtatgatatcttccttggccatttctgcatatgtacagaacatagatacattttattatgtttcagcctctttttatgctttggaacttgtctataaggaacgaacatgcaatgtgactcgca

SEQ ID NO: 151591 - DNA, 533 bp, Zea Mays
gtttgttgttgaactatagggacagggtgacatgcattgcatagtggtctctgacggccatactacacctccttgacctcaatattgtccatcacaactgatatgatagatgaaattgcttatcatgtctgcctagtatcaagtgatcgtactatgtagaagcatacatggtacaagggccataccatctggggttgtcctgctctaggaggcataaccaccaggcgtcgtcctgccttgagggcgtatactttcgaggctgctttgccccagagatattttgaaggatgcctgagaagtctacttatagacatatcttgttgtgaggggtctagatttgaacgagcatgtaggttagctcctgacatgtagggatccgagtgacttgaagagccttgtactctgagagggctctaggatctagttttccgatgtagagggtaccgaaggcggaagagctccggagaccgagagggcccttggccctagtccctcggtgtggggtcctttgattgagttggagccaagcatgg

SEQ ID NO: 151592 - DNA, 980 bp, Zea Mays
tgctgctgtattctgaattttcagattggaaacagtaactaaaactgaatttcagtgttttgatagcagttttgaagtctatttgtggctattctatagggttttaggctatggtgtttgtagatgaaataaagaccatatgatagtgaataattttcagtaagtgggtataacatgattctacacgaaaagtggagtaaaactggctcaaagttggattgtcaggtgactgaaactgagttatattcagtgtactgaagactgaatttcagtgttgggttatctgtttggagctctgtggtaattaatccatggagtatgagccctactatatgtagcaaagttaaagatcatctgaagtatagcaagtttcatgtagagagttggcttgatatggtgtaggatttagagaaaaaggggtggcaaaaccctctgtcagactcagtgtagtgttgttcaaacttctcaaactgaattttcagtgaatttgctcctttttggtgcttcataaatattgttctgagtatattcagccaaggagtgttatactaaatagggagagctataattggagagtaattttggttaagaaaggtgggcttgttgttgaaaggaattgtgagatactagtgactgaaccgagaagagtgggatggaacagcaggactgatgaagttggattcagtgcctgggttggtaactgaaggagaatctcactgctgtggttgcacttgtgtgtatagttggagatatggatggagtacaatgataaggcctagaggcctcacttccaacagaaattatttactttggatctctttgagcctatccacaaccacaagtggagtccacatttgttttattcgctatccgcagaattagaccgcacaggtttttgtggtctcactccttcaaaaatatcatgttttggactatctatcggcagtaagtccttatctgccctttctcctgtttaagta

SEQ ID NO: 151593 - DNA, 759 bp, Zea Mays
tgatatgcgacctctcccactctctttagaattaagaagggtccaatgaagcgaggagataacttccctttcactttgaaccttctcatacaccggattggtgacaacttcaaatagacatgatcaccctccttaaactctagtagtcttctctgggtatcatcatagcttttctgccttgactgtgcagttctcaaattctctcttatttgatggacttgttcctctgactcttgtataattttaggtccaaagaactgtctttcaccagtttgatcccaatacagtggagtcctgcactttctgccatacaaagcctcaaacggggacatcttcaaactggcatggtagctattattgtaggagaactccgcatagggcaaactcttatcccaactgccaccatgcttaagagcacaagcccttaacatatcctctagtacttggttggttctttcggtctgcccatcagtttggggatggtaagccaaactaaaattcaatcttgtatccaaggactcgtgcaacttcttccaatatcgagaagtaaactgtgatccacagtctcacacaatcttcttaggcaccccatgtaagcatacaatctgtgccatgtacaactccactagcttggctcctgaatacgtggtcttcactggaataaagtgggctactttagttaggctgtccacaatcacccatatagagtcatacccagcagatgtgcagggtaatccccacaatgaagtccatgccaat

SEQ ID NO: 151594 - DNA, 448 bp, Zea Mays
ttttcctattcatacgattccaaaaaaaaaagccaattttacggtcatccaaacaagagatgaccatatagttatattatgagtattatctttttgcctatgctctcaaagatttctgggtctggcactaatacgtgtggatgcaatacgcacagctactacgtacgtaccatacatcaatgcaacttataccgaaccctaacacaaactttgcaaaacattcagttgtgcaggtgaaaacatgcgatagataattccaggcaggtcaccaatcagcagtgcatattctttcccactcccgccacctatatatacgcttcccacacgagcccatcatcttccattcctcaccacaagctaggacaccgtcctccaccacctccccctctcttcaacaaccgccacgaaccgagctcctcgacatggtgcctgcggaggccatagccat

SEQ ID NO: 151595 - DNA, 651 bp, Zea Mays
tggagcctagcgtcttgttttgcttgctcccgctcgcgttcttgagcttggcgacaatcacggcagcgggagttgcgctgttctcggtgtgttctttcgtcaggggtctcccccatttccgaagcttcgtcccaggatatgggctgagccgtgtctcgctctctgccctcgtagtgtcatcgcatgtttttgcgtttgtttcgtcgacgtcgtgcatcgcgctggtgaggctcttcccccagcacgatgggtttgtcgtcagagatgggcgacgattctagtcttccctgaatgaagaggatgtctaggaagaaaggcatgggtacagtggtgcgctctttcccgttctcccttgagagtggagtaatcgggacggcagcccacaacgctttcctgcctcgtttcggagtgctcgcctccttctaccgggtgatccatgtccactccttagtggctgaggtgcacaacggagtgcgtcgagttgtggacgccatggttggccggccttctaccctatgggggatcctgagcctagcttcgtgcaggaccacaccccgtcgcgccattggtagggttgttggtgtggttcgcagcttcgtcgcagctccctttggcgatcccaaggaagatttcttctcaggtgaagttgct

SEQ ID NO: 151596 - DNA, 679 bp, Zea Mays
cccgggcaatggggaggtgtgctagcacaaggagaggtgggtgatcatggggccagactcaatttggccggaggcaagctagggagggccagccacggtggggtggagggtcaccgtgatggtaatgctgctgacgaggtggtggtggttgattgggggtgaggagaggtgcattgtggtcatgaggaagcagtgaagcttgtgcgctagcttgattgagctctggacggctggaggaggatatggagatctcaccaaagttgggggagggtggccgcgtgggcacagattgagctcagggaggagggatggtgagtggtgcgaggtgaataggggctttgggcggtccttttataggcggtcggggagggagcttggttgccagctggatgccggcaggaagtgaaaaagggtggcgcacatgggtggcgatgtgatgccatgacggtgaaggacgatggtggcgtgtaggtacatgcgcacagcgggcgagggaaaaaacggtgcccagctcaactgtgtctatcagcaagggggaggaggatggcgatcgatggcaagggtgcgagcactttgagttcctgaggaggagggagacgatggtgctgacaagcggggccgggttggcggagagggagagggcgaggggtgggtcggagatgggccagggggaggacac

SEQ ID NO: 151597 - DNA, 301 bp, Zea Mays
ggggtgctgctggagcagcgttggtcatggtgagttcctcgagagtaagatcatcacggacctgcaaaaaagtggggagaggagaggtgcgatggaggtgaagaccgtgcgcttgaaagcgttcgttgaggccacggatgatgttgaggacaagagtcttgtcggagaccggctcgccaaggtcgcgaagatcttcggcgagctttttgtagcagcggcagtactcagcagcagaaagatcgccctgagtgaaggagcgaaaatcttggtcggcgtagagggtgcgcgtcgtgcggttctc

SEQ ID NO: 151598 - DNA, 407 bp, Zea Mays
gattaaggaaggttagcacgaaagcaaaggagatacatggttatttgtaggttcttagttctcattgaactcttctaatattaaggaacttccttactacttcgctctgcaatgtatactaatcaggcgaccttcatcatcatacttataaaatggttggtcttctgaattattgcttaggtcatgcttgttagctttcttctctagtcggtctagacacttcttggagcattcgcgaataacatgtccttcatttttgcagtagtagcaaacacctcttgctttgagttctttgtgagttaactttgcttgaacaacagggggtgagggttgattgggtgtctgtatcttatatagccgagtctgacttgattcttctgtttgggtatccatgtgtttcgtggctt

SEQ ID NO: 151599 - DNA, 1082 bp, Zea Mays
tacttcatcaaagtctctatcgtgtagagcactctctctaatgaagttatgcaatgtcatacaagcaataattatcttggattgtttggtaagcgaaaaagaagggagactaaatagaactctccacttcattttaagcaccccaaacgatcgctctataacattgcgtagcgaagagtgtgcatagttgaatacttctttgctaccaataggttgcctcgcattttgccattcagaaatgtggtacttctgacccttataaggtgcaaggtagctctttctatttggataacctgaatcgacaagatagtatttacctgcagaaacatgaaatacataagttcaatacgtaagccagtaattaatagcatatgtcataaaaacaagatatataattgtataccttctggtggctgggggaacctgtccgcataagttatcaaagtatcttgtactactctagtgtcatgtacggatctaggccatcctgtgacaacaaatgtgaacctcatatcgaagtcacaaacggccattacattctgcgatgtgtaaccgtgccgtccaatatatttggcttgctctgaggccgggactgccgctggaaagtgactaccatcaattgctcttatgcagtccttgaagtgtggccaaaatctcgcctctcgcaaacgcggatgaatctcggtgaaatatgggtctttgggcttaatgatgtcagatgacatcttaaacagtgcatcaaggacttcactatacttgcgactaattgtttccaaggagtgaccaaacttattttgtatttgcctaaaggactgtggacccccacatgcccacaagaaaatgccaagtgcttccatagtactgacaccccggcttggaatcagaccataattgtccaccaatgtgtcatgcaatcgtctaaacacagttcgtcgcatgtgaaacatatcgaagcagtcgttactattctccaacgttctctccacccattgaataccagtttcaaccaatgttcttctaggaacctgactgatattcctgccccaaacatctacagcacatatagcaaccaccaattctgc

SEQ ID NO: 151600 - DNA, 615 bp, Zea Mays
aaaatgagttttgaccggcacagattagatgcaagaagataatgaaatgaaattgatggctatcagaattcctaggttaactaccgacccttttcttttgcatgtttgtttgagccaagcaactcatgtattatatcatcagttatcaactatgaattatcaattatagtatttttgatatcaaactctttgatgtgtttaagctatacattagaacctgcaatttactgtagcacttaaacactttctcatatataactaaatatctcatttaggatatcttagtttgcaccatggctgacccattacaaataacattttactctatgcagttcatgttctgaatgaaatatttagattgcaggcacaagatggatgatatatttagattgcagttcatagttattttatggacatgtctgatgttttgctcccacaacagagctcaataactgtgcaattttttctttcatcatttcccgtttgactcattgattttcttgtggatatgttattaatggatgtacgggttatatatattttaatgagtatccatttgaattataagatcttgtcatctttcctgaggatttatataagtttataatttatagt

SEQ ID NO: 151601 - DNA, 844 bp, Zea Mays
ctccttggttgaaatttgggaatattcaaggtaagttcaagtgtcctctaaaagcagaattcttacctaaatgacaacatactgcgaactttgggagcagcaggcatatgcataaacagagatgtggcgaaaaatgaaatgcgtcgccgagcctctaaatttgatggtatttccgcagccttttcttttgtactaagcaaaagatagaagcgtttaacctgaacatgcaatgtcaattcatcattcaaagagttataatctgttcctttgtcctcgggtaatcaaagatttgctcggacctgttctttttgctgatcaaaatatggatatcggatgcttgttcttgagctgactgatgcaaacagctctggttcataatagctgaatgctccatcatcatcagagatcaatctctttgaagagttaaccacattcagtatactgtacaaagaggacgttattgtactggtatacacaaaaagatcaaagttttattaaaaaattcttacctttgaggatccacaatcatgtcctggactacaatatcaacaatatcttggagcagaattgtcacctcatgccgatgtttttgttcgtttataaactaggtaacacatgccagaaaaatcaattatattggcgggcacataaagaggattgaaaagagggctgtctgctacgtttctaaaaatgtgatgctatgtttgtaaaactcagctagtggggaaagaccacccaatggtattgcactgagaagaagctcagtcaaagtgagagaaaatccagaaccctgcctttaccccatagtgccgcactgtgacctggactgatcacgacctctggg

SEQ ID NO: 151602 - DNA, 272 bp, Zea Mays
ctggggctggtgtcagttgacaagtgttcggtaccagatctgcaacagtggatgcagacttgccaaaacatgttgcaacaggtgaaactacatcttcaaagagcccaggaccgcatgaaaaagcaagccgataaaggtcataaagaaagggagttcaaggttggagatcgagtacttttgaagctacaaccattctgccagaactcggtaactgagtgactgaaccacaagctagctttccgctactttgggccttttgcagtgaccaaaag

SEQ ID NO: 151603 - DNA, 1425 bp, Zea Mays
ggggccgccacggtcgccgccctgtggccgtgcttcctttccccggttcgtcagagcttcaccaaggaggtactggcttctatatacatttacctgtttcgtggttgggcaattcgtcgaacaggttgtaggtggtgtctggtaagagctgctgcgattgtgattcggttcttctactcaagagttagagtggatggcgtggaattgtggcatcgccttgttgaacttcggaaagtttgagccactatcaaactggggctcaaatgatttggataacctgcgtgattcaggatatgcttttaaccaatgcggtacataggtcaaatttttgttgtcgttggagtgaattcatggatttcggccgtccaaaaaggatgatggatgcatttttcatcttgctaatgaattggcattgtgtaggatccattggttggaactttggaacacctaaaatcactcaaatgccagttgcagcttgtgactacttatatcctagctgttcctatttgcccattgcaaattcacaatgataaaccatgtccttgtcctagttgcgaacaatcctttttatttgtgctcctcgtaactgtgttcccttgtactgctctgcatatggaaccgaacaatccttttggtttgtgtgttactctcattgcgtttgcttgtactgttccgtgtatgccgtagctccttatcagcatatcttgcaatacatatataaccaaaagtttcctttcgtttctgtgttcatcgcatcttgtttccttgtacggttgtgcatatgccactcgcagcatgttatcagcatctcctgtaatagaacactgaatcatgttcctgttattttcaaaggctaccgtactgttatttcctatgtctgaattctcaacttctgcctctgatgagcagctaaaccaattccaacgttggaagctacctttgaacggtaaggcagttcattctccagtcatcacaagctagaaacatcagtgtcagggtggttgttctaactcaaaccttggagctcacatcagcatctcttaaaatgaacttgtgcttgcagctgccaagtcgcagagggagtcatggaaccttgctgatcgctcaagttcaggatcttctgaaggagttgctgctgctagcagacccgcagacgctcccactgctcagagtgctctgcccatgacacgtagcgtggatgcggtcccaggtgcgcctattgttatttctggatactggactggccccggtgtagatgatggctgtggtagtgttgaggccgtgctccagaggattgcataatgttttcgcttgcggttaactagggcaattgtaacctgtgtcaaagcaacaactggaccatataaggttatatttttctttattcagagctctattttcccttggggttagttcttttcttcg

SEQ ID NO: 151604 - DNA, 510 bp, Zea Mays
cttgttcttgatggtgacttcatttaacgatcggtaatcaatagacattctcatactctcgtctttcttagagacgaacaagactggtgctccccaaggggatgagctgggacgaatgtatcctttttgctagagatctgcgatttggagcttcagttctgctaactcggtaggagccatgcggtatggtctctttgcgatgggtgccgttccagggatcagatctatgtagaattccacttctctttctggtggcattcctggtaattcttctagaaacacatccatgaattcttcgaccactgatatgctttctgctgttagattgaacatcattgggtcattggcaggtggctgggcctgacaagagactgactttccctggtggtcggtgaggaggactgtcttgcttgcacaactgatgatacccttgtgtttagttaaccaatccatccctaagatcacatcaatccctttggatggcaagacggttaggtctgccaagaatac

SEQ ID NO: 151605 - DNA, 274 bp, Zea Mays
ctaaaaccctgcattccatggctcccaaacaagtcctaaaagttgcattttttactagcattatcgcatggatgtcttgactccattggctaaatgaattttatctagaaatggttaaatggatatcaattctgtagcatttggcaaagcatcactcaatgcaatcttcaccgtcaattttggataatccgatatttgggagattttggataacatcgttgtacatgcgagtttagtaaagtgtttttatgccaaactttatgtttccaatggc

SEQ ID NO: 151606 - DNA, 397 bp, Zea Mays
agaatcttcatgccatatctaagtgggtcatcatccaaaactaacataagttgcagtgcatcatatggttttagcggtctgaagtatggttgaagggttatgtacatgcaatagaattgtatttagttgtaaaatggcaggaccaataagaaaaaatctaacactgcattcaagggccaaatctctattggtttcatgtttttgcatatatcatttatggtcatctttttggcgtgtggaatatttgatgtgcactggttcttgtttaagcctgtgaaatgaaaggtaaaatttcaataatattaccaatcattagacaatgaagtacaaatatgcggtctatgtaagtagtctcttttgtaaggttggccagctatgtactatataaacaaaaaag

SEQ ID NO: 151607 - DNA, 549 bp, Zea Mays
gaatcattccctttttgcgtccggggcagtccggttacgaagtccatgcctatttcttcccacttccattcaggtatcgagaggggttgcaataggcctgcagatttttggtgctcgtccttcgttcgttggcagatgtcacaccgggccacatactgagctatctctttcttcatccccctccaccagtatctggttttgagatctaggtacatcttggtagtccctgggtggatggagtaggttgagttgtgagcttcttcgagcaggacctctcgtgcctccccttttggtacacacagacgatttttgaaccaaaggactccttggtcatctgtcctgaggtccgggagttgttccttacgagctttctccacaagtcttgctgtctctgagtctagacattgagctctgtatatgaggtcttccagtactggtctgacttcgagactgacgttgtttcccagacatgtatttagttgagctgattctttcttccaatcttctaaaaagttggtcccctttattccgaatggttttcgactgagg

SEQ ID NO: 151608 - DNA, 842 bp, Zea Mays
aggatcccttgatccacgccagaatttagaaagaaattctctgcatcatgcataattgagaacttactacatcatgtacgggttgaggcgtacttaaaaaggtttgttgaaaacttactgcaggtacggtgtcacttcgtcaaggttggtcaacacatataacatgatatggcaccactcttgatgattcaaggtcttagtggtcgaaccacttgcgcttccgagttgcccacagaaaaggctgaggttcgattcattttcgtcagcattgtaacgagggggtggattatgcacactagggaggttgtcaccatagtatgttgttgtgaagttcgacacctcctctagaatgtatgcctctgcaatgaaagcctcgattttgcatttatttctacatttctttcgaagaacctttaaacatctctcgattggatagcaccaacagccctgcacaggcccccccattcgtgcctcatatgggaggtgcaaaatcaaatgctgcatcggattgaagaagccaggtggaaatatcttctccaacttacacaacaacaccgatgacatcctttccaagtctgcaatcacggtccgagataactccttggcacaaagctggcggaagaaatagctcaactctgcaagcactagtcagacatgctcagggacatagcctcgaaccatcgtcggaagaagccgctcaatccatatgtggtagtcgtgactcctcatccctaagactcgcatagtagataagttcacccccctactcaggttagccgcatacccatcagggaacattaatgtcttgatccatactagtacttccctcctctgtgccttgc

SEQ ID NO: 151609 - DNA, 435 bp, Zea Mays
caaaatttgagcacaagcagtagtacccctcgctactgtacgatgctgcaaaatcatttcaggaacattgaaagcaaaatcaccagtgggaagagtaggtgaagctttcagaccgacacccaacgccttcttcagttgcgaaacatgaaataccggatggaccttggacgtatctggcaacaacaacttgtaggccactgctcccacacgctgcaccacacgaaacggcccaaaaaacttgaaagctagcttctgatgcgcacgtggagccaccgaagactgcacatacggctgcagtttcaggaaaacccaatctcccacagcaaactccctttcagaacgtcgtttatctgcctgccttttcattcgtaatttggcacgttccaaatgttgacgcaccaattctgacattagatgacgctcctgtaaccaaac

SEQ ID NO: 151610 - DNA, 377 bp, Zea Mays
gtggacccagctggcttgttgaagcttggtcccttgggtggaaacccaaaagatcgaactctctggtgcctgtcctgctgctgagctcggaggacttggaacttcctcttgaggtgacccttttcttcttctctagccctttccacttgtatggccttgtttgagaggtgcgagaagatgagaaaatattggctggcgaggatagtcttgagttctggtcttagccctttcaagaaacgggccatcttcttggcttctgtgctgacatcgtcaggcgcatagcgagccaattctgtgaacttgtggacgtattcactgacagatctccctccttgagttaattcctgaaattcatcttctttgagctggacgatccc

SEQ ID NO: 151611 - DNA, 296 bp, Zea Mays
ttaaaaggcatgtcccatgcacttttataattcttgataaggagaattttcgtctatgctacttgtccagtcatggttttggtccatgccactgtaaatacttggttaagacataagaatcatttgcgttttaaaatagctccctccactccctaaaagtagacacagctgttatgaccttcgttcgataccttttcaaaactgttttgtccacccccagcaagtgtagtagtaaacaacacggccaaaaaatgcacacataataacctactttttttggcgagaaacacactata

SEQ ID NO: 151612 - DNA, 394 bp, Zea Mays
ttctttggatccacaactagtccatctcggtttataatatgacccaagaacagaacttcgctgatccagaactcgcacttgctaagtttggcgtacaactggcaatctcgtagcctctgaagtactttcctcaaatgttcctcatgctcttgctcattctaggaatatataagaatgtcatcaatgaacaccactacgaacttgtcgaggtagtccatgaacacactgttcatcaggtacatgaagtaagatggcacattcgtaaaactgaatgacataaccatgaactcatataatccatacttggtgattaatgttgtcttcagtatatctgaaggtcggatcctaagctaatggtaacctgacctcagatctatctttgagaacacactgg

SEQ ID NO: 151613 - DNA, 430 bp, Zea Mays
caaaatttggctcaaccggttttgaaaaaatatctgctgcgactttttctgacagctctgactgtcagataggtcagagctgaggtggcaggtgaatagtaccgaaaccggttgaaccggtttcaggaccggttgaaccggttttgggggctgaaaccaaattttgagtattttgaggagaacaaaagggaagactttgtgggaagtaaaatttgtttttctcaagagcattcatgatctgggaaaatgatctccaaggagttttcaaaagattttgaacttggctcgtttcacaacttacttaaccgtcgcggatccctcttaattgtacggcgattcctatgactcaagaatcataaatttagcaccgccgttgtttcttagcacttggagcacgccatttgatgtggaattttaaatccgctgtgct

SEQ ID NO: 151614 - DNA, 1322 bp, Zea Mays
atcacaaggaaagttctcagctgatgaaattcttgaacttatactgggtcactccaattttgtatcgacaataacatgcaatgaagtttatgagtatccatatgcttgtaacaccacaggggggatgctacagccagctccaagtattttgaaattagttgatttttctttcatggaagaaaataaggcagaaattgctattgcagaaaagagaagagttgaaaccatcagattactaagggtactgtatgatattaagagcagacaacagaataatagccaattgagtggatgaagaaaattagttttcttgcttttgtctgtttatggtgcaacccttagtgaaacagatttggagttatttcaccttatgaatgagatatagtcacccgtgtgccaaaccattactgaagttgatcatctgtggggagcttctgctctaaaatttagagaagaactgaaactagatttttcaaaatcagatacgcgtaacacagagaatgctgaaattactaaaaggagaagggtgctctttcgggagaacatacctgttgattccaagctctgtgcaaagacatctttgctatattgctataaaagatctacaagggcttctgttttctcactggaacaacttcaatgggataactttgctgatagttttgaggtaatttctggaataatagtgtcaactgaagtttgggtattattctaggttttgtggtttcacaataatgttatttaattgtaccttgttgatctatcttcatctgattctggttggcaggtaacatctcaaaaaatggatgttcaggtttacgatcctttttttatcttgcgattctcaattcatactcttcacatgggttacattgaacctgctcaatttgcccgattagggcttcttgcaatcacacttgttagtatagcatctcctgatcatgaattaaggatgttgggctacgagtgcctaggaacattcaaaaaatcccttgaggtacctgttgtttcatgaatctctaaattttacctggtttattatattcttatcaactactagctgcttatattgaattttctatattacaacttatcttcgctgggcgaacatattgttggttaatgtatatgcttgtatcagtatgttcaaattctagcatttgttaaaacgtttaatgtgcttatttaagtatgttgaaattcctgtagtttaaatatttttaattttttatttgttaatgatattcacttgtgatggcttttatgcctattgacttgaatggcagcataaaattatgcctattgacattctgggggcattc

SEQ ID NO: 151615 - DNA, 426 bp, Zea Mays
ccattatattgggatcaaactggtgaaaggcagttgtttgggcctgagattatacaggaagcagaagaacaagttcaacaaataagggagaatttgaggactgcacaatccaggcagaaaagctatgctgatacccggaggagactgcttgagtttaaggagggagattatgtctatttgaaggtgtcaccactccggggtatgaggagatttaaagttaaaggaaagttgtcccctcgcttcattggacctttcttgatcttaaagcgagtgggagaggttgcataccaattggagttaccggatcatcttgcggatgttcatgatgtctttcacgtatctcagctgaagaaatgtctcagggtacctgaagagcagttaccaatggaggaccttagtgttcaagatgatctgacttatgctgag

SEQ ID NO: 151616 - DNA, 433 bp, Zea Mays
agggagttctcaccgcaaatcacaaagtgactagctcagtccatggtagactgcagcgctgcagttgtaaatgtactccggtgagcaattcacatcccatccgccattctccgtaaccgccaccgccatacacacgctctatttgatcccacgatgctccaaagccatcagtcggtgttggagcgacagcgctccatgatttcacccgcggtggatctatccttccacctatgggtgccctcggttagcttagctctttggttgtgctcgccctattggttcttggggagggggcggtgcacgagccacatatataggcatggattaaagagtccgaggtgaactcgcttggcagttctgccatacgcgccgagctccccccattcggttgagaaacaaacgggaggaaggggatatgcctgacgaacaggtc

SEQ ID NO: 151617 - DNA, 481 bp, Zea Mays
aagacattcatgaacctgatgcagatttatattccgtagtccactgtctccactcatcacaagtgtcactcttcgttcattctgtctcagttcctgtctgcattacttttgtcccacctctccaaaacggagctccttgacaatttcggttcatacttgcgtgtggttgctacataatgatccgtgtcctttgcatggtctgacttcctcaactgcaagattggtcctctacatccatgaaaggatggcctcaatacatccatgaaaggatgccctcaagggttctactgttctaggcatctttgaaacggttagcttcagtcaaatacaagctttttaaatcctgctgagtggttttcaatactttgaacatgaagataacagtttactagaaataacaagtttcagctgggttcaggcttctaatgctctaaaccattctctgttgtggcctcatgggttactgttatgtacatcgaga

SEQ ID NO: 151618 - DNA, 298 bp, Zea Mays
tacagagcaagcgtctaccggcctagagcctctctagggtgcctgcttcaagtgatataagaacctacttatgcagtggatggatttggtctctctcgagtgcttgcttctaagtgagtgaagattctaatcatgtagtggttagatttcaccataagtctgtccgcgctaaggctatttccaatggtagtttcatgtagtggttagatcctcttccattccttcttgtacgtccaacaaacacatcttaaatagagagactaatctttagtctcttacaaacaagaccttatacgac

SEQ ID NO: 151619 - DNA, 340 bp, Zea Mays
gtcgtcggttaacggatcaacggcccgcacggcttctaccctacaccctcgttcaccggcggcgggcgacagaaatccgagcgccgccgcggcaccattgccggcacccgacgatacgacgctagcatgacctaaactcgaattcaatcggcgctacacgatgcacaagctaaagggaagagttcggacagctgctcaccgacaattgcgacccgcagtgccttggccacgaagaggtgctgttctccgccgcgaacgcactctggtgagaaattcgccggcgccggacgctcccaacccgatgccgctgccgcggaatcaattgccgagccgaggcgaa

SEQ ID NO: 151620 - DNA, 492 bp, Zea Mays
ggacactggcagaaatagaagactgtccagtgtgctctcttcttgaccatgacaaaaatattgtggaatataataggttggactttgtgcttgacataaccacgaaacaaattatgacatcaaaacttctgcattcttggctgttttcttaaaccaactgtagtatttaactgaactgaacataaaagtataagagtaatacaacccagcacattgtagtttgatagataagaacatcaggaaaatgctgtttctaagatataaataatggaggtgtgggcattagaaaacaatcttgaatacattttgagatgactactttagcagttccaatgaactatgacaacagaacagaagtagtttgcaacttgctgtacatctgaatagaactctagatgaagtatgaattgttttatgcacatctcacgaagctatttacaatacaatttgtaattcgtgaagtcaaattcacctgcaacagtctcttggaag

SEQ ID NO: 151621 - DNA, 497 bp, Zea Mays
cgacgcccattggatcaagatgccttggataatagacttcaccaatccaagtgttggattaatgatgtggcgttcttcaggatctttgacacgtcatccttcaagttctatgaaatgcattgtgacaaacatgcatgaccgaggggaagtgtgtttggcttagacatgtggctgggcggtcatggggtggacgagcggctagggtacaacatgctggccatgggtcctccatgatttgaccatattcactccaaaattttcattgcttttgcttgttttcgtaacatgtgtaacaccataaatttgggggtataaaatttctttctaatgagtaatgatcacccaaattcatgtgttactcttctctctctcatcctaggttctatcactctctagattctctctccctttttctctttttaagtagaattagcttaaagttagggggatttaattatttatttttgccaaaacattatgagtcatgacatgttgtg

SEQ ID NO: 151622 - DNA, 340 bp, Zea Mays
cttcatttgtgttctcattaatttgattttttaagttcatgatgaactcataactgatagaggtggtcaaacacacatgtaataagcgccaaaggacatttgacatacgccactgcacaaaaattcagaatatcacttcttatgacctgaaagacagtgatgaaagtaagtataccttatggacagtaattgttacagaacagtaaatatgtacatgaataagttagaaattgactacgccttctgaataaatgtcaggtggtgatagtagtggaaactgaaggagtcttatctcttatatattcctattctttaaagccggttcaaaacggcttttgtc

SEQ ID NO: 151623 - DNA, 1396 bp, Zea Mays
ctcctgccgcagaccccggttccgagatgatgagagtcatgtcacgatggagattcctcggatctagacaccacgccctcaacacaaaggacaataggtcaggctttaatgctgtcgccgggtgcaactcggaaataatgcacgagtctcgcaacagatgatctgttgtagttctagaccatgcatgggccggaatgcccctgatctccacattaaccaaggccgggagcgatgtcgtagccgcatttgcacaacgcgtccacctcttaaacatgagatcaaattgtggtcctctgaatattcttccaccattgaacacccttgaagctactctctcatccggcaagaacaaaatgaaatcctcgggcattgcctgatgaatggacattgcacccacctcgacgtcaaaacttcgagcaacttcatcgatgatctcggcccctaggacctctggcctggtaccaactattgtgacaaacagcgccttccgcagtgctacgtcctctcgcgccatctccgccgagaattccagcacacaggagggagggaacatgggcctgacttgttgatcgtttttctgctcctccgttgtaacctcctccgaagtcgtcggagcaacaggatctttagatgatacagaagctggtgataattgttgcatcaccgcttcccgacgcctctttctctttctatgatgaactggcggagcagcctccccggagcccaacgccaacaacaggggtgaatgatagtcgtccctggtggccgactgcaacagggagattcgcttccacaccgattccttgcgcttgaacgtctggaaatcgcctccttgagagctggaaccttgcatccttattaagcgctgccacaccggaacgcgagaactctggcgcgcacggtgcgacctcactgtcttctttgtatctgcctagaacgagaacgcagaagctcggtggccgataccttggcacaccaaacaacgtgtgggtcgtctacaggtagcaacgaagtgggagggagacagacaattaaagcatcttcctcggagatcctttggggaccatcgacgaggatcagatgcagcacgtctagctctcctatgcaccacctcctgccattcgccttcagagtgagaaggaagcgctggcgtctcagactgcattgtcggacgcctacaacccgtcttctctatcgatatcaaccggtgggcaaccttcggtggagagggaacgtcaacgatcggtggggaagggttcgctctcccaccaatgacgagcacaacctctctataggaccgggacaccgtccctgagccgctggaactcgaagggacagggctggcgtccttccatctttgagactttgcccgcccactctgggaagccaaaacggt

SEQ ID NO: 151624 - DNA, 377 bp, Zea Mays
gacacagcaaaccatggcaggcctctcttcgccggtaacactctgtcctgtagccggcgacggttgggtcattgcagtggccacggcggagaacgaggtctttgtctttcctagcatctgctacagggttgggccgttgggaaatttggagcgcgtacggcaggaaggagagatcgttggcctgggctttacacgtgctagggagcacaaatgggccatgagcccatgaccaaagactcgtgattctgtcttacgttacgtacacctgattcgatgcgtacggaaatgttcaaccagacctgcgctccctagtccctccgactcaaacacgcatagtaaactaactacaatgttgccatgttggcatgctgctcact

SEQ ID NO: 151625 - DNA, 336 bp, Zea Mays
ggaggatgcgcagaggtgcagcggaagagtgagaggggaaggactagtcccggtctcgtgataccatgaaagaggatggctgggaaatgattgttggattgattattgagggagcccaaaggctcagtacatataggcaaggatgtcccagaaataggaaagtgctaatctagagaatcaggaaagtgctaatctaaggacaccttgccaatcagatccaatactaccaaaaaggggagaggggctgcagccgccactgctctagggttgcagccgaccaccctcctgggccaaccgaacaccctaaaggcccatgggcctatacagcatgctaac

SEQ ID NO: 151626 - DNA, 613 bp, Zea Mays
tttgcaataacggtataagtttcacatttaactttgtattatcaaataggttgctaaagtgtacctctaattatttggtaaaaaacatatgctcacgtgtacctctaattatcggttgcttaatcttacatcggttaagaatggaactgataaaaaaacctaggataccagtagcacacagtagaagtttcaaatacatacactggcttgtcaactacatacactgcatcatcgtacctgactgtagtcttcctaggcgagagtagagaaggatggggtttggtgtggtgtccagcttgacatgttatcaaataggtcatgccgtcgatggaaacctttctcagtatccatggagcggtgtcgatttgggctgattggccggttgaagggtgctggtatcggcggattggaggatggcgggattgagagccggggcgggggcaaagcagatttggggcgagctttgcgaccgctccttccatgcatagcgtgggcgagctcaggtggcactgcaattcatgatcacaaggttattctgctattctgaatcaccaaacaaaaatgtggataagcacaatagctcttaagaaacagaaagcaaaccttgttctac

SEQ ID NO: 151627 - DNA, 955 bp, Zea Mays
gaaagatgttatgatgggcataccttatgaaagaaggtctaagcagcctctaggctggccccactaagaggccgatattagatgatccagggagatagattagttcatatggatacaaatagagtttgttagaataaagatatggattacaaagagtttattaagggagtttgttaggctgaaaaggacaagatataagtcctacgtctatacctagattggtttaagcaatattaatctaaagaaaagagattgcacttgccttctgttggggttaaggttaactgacacgtggtcaggtgggcccaaacactcaagaaggggggaacaagtgctcaacaaaacattaagcagggaactgtagcttcttgttaagcatgtcccatcaatgtacaatgcgatggtatttacaggtaaccgagtaggtgggtgtgccctcctaagtattgttatgcccctgattatctactatagctccggaatattcccccttatggggtcattacagcgatgttaagtatagtctgatttaaatgtaccacagaccctaccccaaggaggggcttacaaatgggcccaaacgacagcggaacgcggcctgggccccgccgttgggcatcggttcctttgcccgcgtgcagcacccttcgcccatgtgcgacacccttcgccctatgaagccgggtcttcgaccttactgagactgtcgttgttcagaactgttcgagccggcggggacgccttcgcgaagctacaaggagccccttttaaatggtgcggcccttcgctttgatgccttcgacagctctggtcgaagacctcgattccgataccggtcgaggtacccttcgcttcttgtatctgcgataaaacctgttcaattgatgttaaagaaaactgatcaagtgaggcgggcggccttcgttccaacacctccatcctatccttcgttcac

SEQ ID NO: 151628 - DNA, 669 bp, Zea Mays
tggagcctataaattgagggcggggatagttgcgccatataatcgtgaagctgtagcacccactcccgtctccgattaacccccatagccagagaattgctcattcccccaacttcgttctccgccaccgtgaaacgagcctcgccgcggccagcgcaaatcaggtctgatactgtcgtcctcagtcttgttctaacattctcatgtgcccttgatgctctccaaaccatccaattgaactagactgccatgaatcgacgggaacacattcatctgcccgcaaggtccacggtcactgcggccagagcaaacctagtagccatccttgcaattgatttgggggaaatgctcggggtagtactgattttgtgtccgctgctcggagaaccctgtcgttgccctaatcggctggtgctagtgctcgccggagctcggctgtgtgcgagcgccgtcgtggaccgcccactgcgaagaaataaaacctcaagggcctctgtgcaaagcgtcagtgacacaggaaaacagtagaaagaccggatcccagttaatgagaaccccgagggtatttttgcaaagccgccagcgcgcgtgggcgcgggcgcatttctgctgttgttgggccgacttggactgatttcggcccaagtctgttcattgttttcctttttc

SEQ ID NO: 151629 - DNA, 628 bp, Zea Mays
ccaattttgagcttgaaaaactcaggattaaactagaacatatgaaaggagtgtgcaaacttgttcaggatgagtctaccagtgcttctcagcaagtaagtttggagttaccgtttctcaatacatgcagctaattgctttccaaattcacataatctgacacatcctcaacgtatgttagatgattgacctagttgaaagacgtgctcaagaggaagctcggctggcggaggtccgccagaggatcaacattaccactgaggcagcgcggaaagagagggagcagcggtacgctatagaggcgcaagctaggcatgtgagggaccttgcaaaagaggaagctttgaaaaagcagaatttgcagcttaggttatcaagggaggctgataatgtgcaaaagctggagaaacttcttgaattgggaggcaagtcatacacagtatttacatgggaggagatggaatctgctacatcatcgttttcggaggcacttaagattggatcgggagcattcgggacagtgtacaagggcaaagtccaccataagactgtggccataaaagtactcaaatctgacgacagccacattgccaaacattttgaaaaggaggtatgccgtgcaccattg

SEQ ID NO: 151630 - DNA, 813 bp, Zea Mays
tagaaggggataatccattcattatttcttgaaatttacaaactgaatttctatttctattttaccttaactaatattgttttaatgtttctatttatttttagaagatggtgggttccaaagtataattattcagtagggacactttactttgatttctattactattccccaaaatcagatttcgggcgttacaaatcctacccccttaaaaataatctcgtcctcgagatttgtaagaaaaggaatatagaaagccaaatatttggttgcagtttagcttcgagttttttttaaatggttttaagcacaaatgttttctatatacttttttttgtcatttaaataaggaaatgattaggaacacatgggtatactatgtttagctattaggcagaagtagagaaggttgcggtaacaaggattagggcaaagaaagattccattacggatggtggatcttgactcatctgatgattccgttttgccctttgaagactgtagttggtgcttatcctcccttgacgtggttggtcttctgtggccctcagtcctggagttgccatccgagttgaggacatatggctatagctaggatagctagggtacatgaggtggttagatttaaacagagttttactttgtttttaggatatctagattaggcaacctatgatgtaggttaggtggttgtttacggacgagttagtccaaggtattaatttagggtaagatatgttttatagattcatggcctaactttttttttgttgccaacattatctaacttatttaagtaactcaatttggatt

SEQ ID NO: 151631 - DNA, 408 bp, Zea Mays
gaaacacattgtggatatctgacatggattctggcaattcaaggcggtaggctgcgggtcctaccctgccaatgataggataggggccgacgaaccgcggagctagctttcctttcacttgaaaccttttgactccatgcattggggagaccttgagttagacgaagtctccttcctcaaacctgagttccctctacctgttgtctgcataacttttctaccgactctgagcttcaagaaatcttttgcggatcagggcaactttctcttctgcctctttaacgaaggcagacccttctagtgtcttttcccctacgttggaccacattagaggggtctggcactttcgtccatacaatgcttcgaacggtgacatcttgatactggcctggtagctgttgttatatg

SEQ ID NO: 151632 - DNA, 2982 bp, Zea Mays
ttctttctgtctccagcaagatctatgggaggaatacattgatctgatcatgtagtgcatgtgcaatgatacctgtgaaatagaagtcgttttctggggggagctccatcgtcgggaagaggggtcatggctcaccacggacaaaaggttcgtgatttccatcaccacgctcccacaggttacaattattttcttgaattttccattcgactatatcactttctaaatcccactggttatgtacatgagcaagatttttatacttaaataaatattgcttgctgtttccttggattgtaagagatgctaataacgaagctgtcccaattagacggcacactgagcttgcacagtcaggtacagttttggatttatgccttaagtcaaacagttttggagggcaacacaacgctcaaagctaacttttcatgattagttatgctgaatcacgagcgtccttcgatagaaaaatggggggaatcatagaaatttatacagaactgactgaaaagcttactgtcttcaagtattccatagcagcagcccagtcagattctaccaacaattcaccaagctccacaaatgcctgcaaaataatctcattaaaataggttatatgcaaacatgaaataatcgatcggtaaagttaatgtgtggcctcataacggagagtaagaatgcaactaggagtctaggactaaacacaaacaggaagtaatttgaatagacatcatactcatcatctgatattgaacagcttccacactttgttttattcattttttggttaatcactctgaaactatcgtccagtaacttcataatacatgacactgtagtaagtcccaaaaatgtagtactgtgacacataaattagtcaaaagaaaaaacagctaaacaacaaatgtccttttttttgcaatcatgaagcttggtatgggtgtcttatccttttctaaaacaaatatagcagacgtgagagaaactatgaagataaagaatgtttctcattatagattaataattaaggtaacaatagaaaatctgtataccaatcaaaactacacattagggcaaatgtagtgtgttcctttcatggaccaaatacagatcaaatcgacaacaaaaaactgactgtaagatgctagcattccaagttttcaatcaacttcatcctagatcagcatcttcattgttgcaaatcatcagcattcaaagatccagagatggaccaaaattcagtgttcaaaaatatatattttttgccatgttcatatggagtaatttatgttcagattgagcatttgaaaatttcatcagtacattcatcctggaaagcagttgtactatttatgtattgacatgttagaaacaaattagtggcagaattatattttgggaccatgttacagcacttcttttgacccgaatacatgaagccatgaaagtaatggttgaggggagggggaagcaagtacctgatgatcttttgggtcaatacgggtaacttccttgaaggtttctatagctttttcagtttccccagattttgcatgtatgtgaccaatagcctagaagaaacataaaaatcatttcacaaatacaacgctatgttgcaaatacatgaactgagaataagcgtttgattagatatatgtcttaccttcaaactttcacaattttcagggtgcacctccaaaactttctcaaagctacctaatgaacttttgaagtctccaaattttaactgaatttgaccaagtcctggttcagatcaaattgtgttataaatatcaacttaatatacagtggagtgctccaaatgaccaatcatgctaatctaggctgcatgcatcatgtgcaaacctaaggaagaagattgaaaagaaaattagaactattaattttggatgtcatatataggtagtttatgatcaagctggtgtgggaggctcaccacggacaaaaggttcgtgatttccatcaccacgctcccacaggttacaattattttcttgaattttccattcgattatatcactttctaaatcccactggttatgtacatgagcaagatttttatacttaaataaatattgcttgctgtttccttggattgtaagagatgctaataacgaagctgtcccaattagacggcacactgagcttgcacagtcaggtacatgatcccttgtcactgtaccagtttctgtgcttctctctcatgaaaacaactgttgggattatttgtttctgaagatcagtgcatttattagttctctcatgaaacacaacactatgatttaaatgctcacattttgattactgtgtaaacaatgggacatacaagatttttttaggtttttgtagctcattattatagtatgtgttattaatatgatgtagcaggcaacatagtatcctgcgattcctaattagttgatgcctaagggtttttgtagcttatgcaactaagaaaacttcttcaggctagaaaaaaactttgaagtgtgggacatggtgcttagaaagtgtggcaagcatcgaatttacattgatgtagtccatggtgtaggatttttagatggcaaacacatcataatttgtgtttacaattgtttattaggaggcacattgaccattgcttccttccaaaatttatatgttgcagtttacttccttaagaaactaactgaagcattatgaggagctgtagcaaatcgacaatccatctgctattgctaataatcatgctattttggcaatggcaaaatttatatgttgtagactacaacaaacaatgtctatgaagtcgttgacatctggattatattctattagtgctgatctggatcaattcttgtttattaggagacttcaaatgttttctctcccctataaaaacactttgtttcatttgcttataattaactgctgcactgtccatggattgctctctcattctacttcctatgattttag

SEQ ID NO: 151633 - DNA, 526 bp, Zea Mays
gatgggttcggtcactgttgcactgagtcgctgactgtttgcagaaaagaccctgtagttctaatttttcacagggggaggtccacgacggcggtgagcatggggaggctccggcgagtttgcagactggccgaacggggccatgaccggcgctcccgagcggcggacacgaaattggatccaccccgaccatttcccccaacacaatttcactaatggtcacaaggtttgttctagccacggcgaccgtgaacatggcggactgatgagcgcattcccaatgattcatggcgatccagatcaattaaaggggtcggggagcatcaccagcatgcaaagatgctagaacaggaacaaagagggtatgagcagacctgtggagggctggccacggcagggtacgattcacggcggcggaaactgatttggggagaatttgaaatttgtgaactctggagaacgattgagggtgggattaggggctctggtttcgcgatgatgtagcacagctgccccagccctcaat

SEQ ID NO: 151634 - DNA, 2747 bp, Zea Mays
ctcgttgcgcgctcgtcctgttttagggcttgtagaataccgttcggggatttcattcgctttgttactctcatgcccgggctgccctctgctgacgcccacaaggtgtttgatgaattgctcactgacttttgaagcttttggacaagaaatcctctgattcctgctcaaaatgtgtaactatccatgatataaactacgacttacctctgaatcatgcaaaccacatgcgaattgttcactttggcctctatatttggtgatctacgtggaataatgcgtttttgttttgctgtgctgggtttaacaaatatacatttagattaaatgagcaatccaaaaaagctcaaagaaatttatagtttccatgttctcccctttagtgaatctctcctaatggtttaatagttgggttctttgctgacctaactgtcatggccggtccagcgacaggaggcggcatcgattgatttttgaattttcaacattctgtaaggtgttgggccgtgtgggccggatgatgtgtaagggtgtgaggcccatgtaagcgactgcttaaataattctgtgtgagagaccagggagctaacgaagaagagaaacagaactccacaaaccgtggcaaaccttgcgtcttctgtatctctgagaatcaccggtgatcctcacgtcgacggcgacgtgacgtcggccacgggcatcacaagtggtatcagaactgcgatcctcggcagcaaccacgacggctcccaaggcgaagccctccgtgcagactcgattcattttggaggccatggccgaatccgatcgggcggtgcaggagaggtggaatcggatgttcgagtcgatggaagcactaacggaagaggtgaaggacatgaggaaggtatcagactgatgaattgtacctgaagctggaggagacgggtcgagagatggctcaattacggctggatcagatgggaagagagctggagaattcatcaggggaagtggagaatcgaggaaggaggaatcaccagcagaacatgggttttgagcgaggatttcagagaagagaccattccgagccgagggtggatcgacatcgagaggagaggccgatcgggcacgcgaacacgcaggtactgcctaagatgtctttccctagattttctggtgatgatcctgctgtttggatagataagtgcctggaatattttcacatgtatcaagttccatcgtctctgtgggtttcggctgcttctattcacatggaacagaatgcagcgagatggtggcaggtgcagaaattgaaacaaggagcgagggtgtggacggagtttgtgacagcagtagagggcaagtttggggcagatgcgtatgccaaggctctgagaaaattgagaaatctgaagcaggtggatactctggattcatatgtgcatgagttcgaacaggccagatatcaggctgctgtgcataacacaaggttggatgaactgttttttgtgacacagtttatacatgggcttaagttggagattcagcatgctgtgcagatgcatcaacctaccactgtagataatgctgcatcattagcccagttacagcaggagatgttggagaaaggaaggcataaggttgccagacaagggtatgctacgaagcaaaacttggctggtaataaggtagatggaagaggacaacaaatggggggagaattatttcgtgagagacaagttagagagtttcgcaagcttaatggactgtgctatgcatgtggtgagaaattcgagcctggacacctggccaagtgtgtaaggaggaaacccgttcagttgaatgcggtggttactgaggaggagccaatggaactcactgatgacgttctccggaaacttgcccaggaggatgagagggaggatcactgctgtcggttatcttttcaggctgtatcaggaactgacaatgaacaaagcatgaggatcaggtcagtggtgggaaaacataccatgttaatgcttgtggattctggcagttcctctaacttcatcagccaacatatggtgcatatgttgggtttaaaagtggaacactgtcagccagtgaaagttaaggtggctagtgggcatgcattggattgtaacactatggttaaaaacttggagtggtggtcacatggacatttctatcatactgatatgagggtgttacctttgggggtatttgatgccatacttggttatgaatggttgatggagcacagtcctatggagtgtgattggattgataaagtattacagtttaaggatgctggccaacgggtgaagttgtatggagatggtgctgggaacaatacttccattcagaatgtgtcagttctgcaagtgcagaaatggctcaaaggtcatgaagtgtgggtcatggttctgctagaggaggttaaggagaataacagcactgttcagcatgaagatattcaggctttgctgatggagttcgcagacctgttatctattcctactcagttacctcctgtcagagaatttgaccatcatatacctctgttacctggagcagttcctgtgaattctaaaccttatagatactcaccttttcacaaggatgagattgaaagacaggtagctgcactgctgaaagctgggctcattaccccaagtgctagtccttttgcttcaccagtgttactagttaagaaaaaggatggctcgtggcgtttttgtgtggactataggaaattgaat

SEQ ID NO: 151635 - DNA, 552 bp, Zea Mays
gagacctcatcagagcacctgacagatcatgtttaggtcacattttctctaaaatttgcatgtgaacttcatcaaacctctgtaccaaagttgtagagctatagttaatcttaaactttgccacaatgcttaccttcaaatagtcactgaatcccattcaaaatcaagctcaaagttcactccatcacactgctactaaaaattcagtccagggattgcctgacagcctgactttgagctgaattatctccaaatttctcacaagaacatggcttgcactcttaagcaaaattgttatccattaataggtctataagtttgatatggtgccccagggcaaaaaccctatattttaaaagatgcaaggctccaaagttgagctcatcaatctgaaattcagacttagcatgaaatcacaactaggggcctttttgcaaatgaatccaaatcttagggtttggcttccaaattcacaccaaagtgaaccaagtgacttaagatactttattaacttggtttttgcactttagtccaaatgtgcatcaattttgc

SEQ ID NO: 151636 - DNA, 420 bp, Zea Mays
ccgttgatcctctaaccaacggctaggattagtcgggttaccgcttcatccggatgtgatcggtgccgtcgatctcgagggagattggaccttctattccaacccacggattgactgcgggtcatcggattttgatccaaggctccatgttgcgtaccgttttggtcaaagtcagatttaatctgcactgtgcgcctctgatcgtgcggctgtattcgctccatacccctttgctgaagccattttgcaaaagtgtccctgtggtttcccaaaaataatctgctgatcatccagtgttgttgcattaacagttgcgccctcggatttcacaaataatcccctggactttccaaatagacccttgggatctattttgaggtataaaatttaagtaaaatgattagaaaacttgtaaacccc

SEQ ID NO: 151637 - DNA, 438 bp, Zea Mays
ggccctgcgtcggcgccaccgtgctcgcccaggcaacggacgagggcggaggcggcgccgtcgctggcgctggcgctggggccgcggcggcgacggagcccggcggcgcgcccgaggggacggacgacggagacggagcgaggagacagtagtaccagtagagcgtggcgtgctgattgacaactggccttgtaaattgtctcctccccggaccatgaaacgtgcatgccctgcgatcgttggtgtcgggaagttttggaatagcctgtgtacgcctctgtttggaagcgatggatgctggtggtggtggcgctgtttgaatttggcgtgcacaagcacaacggagtggatttgatgttttggttttactactcgctcgctagtcatatacattgcctgcctgcctgcctcattgacattgaagagtcgtcacatatt

SEQ ID NO: 151638 - DNA, 1056 bp, Zea Mays
ctgttgcctcctcagctgcttctcgtgagtacttctttttctttcattcttgccttcgcatccaccacccgcgcctcgctgcaggttagtcgtgcgccatggtttgttgcatgaacccccagaagaagaaggccgtgaacagcaacacgtacaccttcacggccaatattcttacctttggtttgaaacattttagatttttctataggaagttatcgaaacattttagatttttctgtagctaatattcttacctttggttcagacttttttttttctaacacacatctctgacattctagatttttctataggaagtaattggacataaatgttactgaacagagctaatggacagagtttctgaaacattgtgaacagagctactgcagttggtgtagtttacgtttagcatatctaggatagattacaacaattttatttcttctttgtcctcctcatcagattttcttccatgaacaagcattttatcagttggtagcatctttctattcatttatcaatcgtatctatcttatcactagccgtgcagagtacaaggctgagcacaccacagctcatgatctaatcatttcatgtgaagattaaactacatcatagctatattattctatttagaacatagttacctggatgtgtcgctaggttgaccacccagtgttgtgttatttgtaactagtgtatctagctaacatattttcttgctatggtttatatgttattattaccagatcctaagtaattcgccagatccgtcacatggcgactgtatgttttggatctggcaaattatctaggatctggtaataatagcatataagcctagcattattgtcggttttaagaaaagcccagcatcatcaacatatatactagtactaaccacttgcatgacaaattttgtagaaggacaactaatatcacttcccgacacctcatcgttccgacaaccttcggttctcaagaagtgaatcttgcattcttgtatcaccgatccgacaacccccgacgcctcactggtctgatactgcctcc

SEQ ID NO: 151639 - DNA, 471 bp, Zea Mays
gaggatatttgttaagtttagatctattagattggatctgttatccatttagattggatctgttaacagatcctgagaacctctcggtctatataagagacgctggcagattcatcaaaatgtcagcagctctccggtgatcttcctccttcctacccataccagcttcgttctcttcctcaatccgcttgtgttttgcactctccctggcgcacacccccaaggaagtgacgcccacatcagaaattgtgttgtccctggaactacacagatcacgttatcactatggctaggattgtggatgctccttcatcctcattcccagtgaaatcccatccagattatcaccgtcacagtgaaggtagaaaactgctatgataaaaaaaatgtaaatgtgtcttggagaggatccattatgagcttgacccatattattgagtatgtgggcacatcaagaaagaaatatacgtg

SEQ ID NO: 151640 - DNA, 440 bp, Zea Mays
atgggtaggctattagtgggattctgccttggcaccacagcgccacctgccctcgctatctcacaagggtcccaccaagccatcacaacgcgacaatggctatcgtttgccttcatcgccttttcgcctcatcgtcgccatctaccgccgcaccgtcgcctaccctcgctatcccacccatgttgtcgcctcaccatcgtcattttgttgtcgactcgctgactctccacaccgacgtgccgatgcagccgcttcaccctaacgcccagtccccgccagtccacccctttattctctccaactctcctttagggtggccaaaatgaattttcggtattcatgttattttagaacacctctcatattatcacttaatctccatgttattatcataaaactatttttatcaaatggtctagtatattgatttgtctcctacg

SEQ ID NO: 151641 - DNA, 480 bp, Zea Mays
aaaccttccagcagccatgtcgacctgagctcgcacgatgaggaagtaggcgtggccgaaggtgccgaagaacttggtcgactcgtcgaccccgaaccttggcgcgccggcgccgctgagaagcgagtcggcttcgtcgtgccgttgcagcctcagcaacgcctcggcttgcaacgccatcacctagcagataagttcaccgagaggaacacgtttgtcacacgtgcagtacaggggtcatgcatggagctgtgtggcacatatcgtggcggacgagcgctgacctgcggagcacagtcggcgccgtcggccacggcggcctgcgcttcctggagcaccgtgatccagttcttgagcctgcgcgcgtcgttgctcctggcgatgcggctcttcaccgattgcgcacgggaaacgtctgcgcccgcggattcgttggaggattgcttcatgtggtagatggctttgtcaggttctcctaat

SEQ ID NO: 151642 - DNA, 571 bp, Zea Mays
gaaggcgtatgctggggaggtagcaaagggtaggtttgacgttcatgtgcctgggtctggaggcttgatattatccactatcggtgacctctctgcctatttctttgctgtcgtctgtgccattgttcaattgtggatatgaacttgcgtggtacctatgcatggacgccgcgtgaccatgctcaagccactgctgacagcgcaccaccttattccttctgtgtctagcctcaccggaaccggtgcccgccagtctccttatctctatgtcccgcgatctctgagtttggcaaaattcgtcgtgtccatgcatccatcacccaaattgactgcgcagcgtgctttgccattccattgcgcccgtttagcctcataattgtcgattgtctttccccgagtcctctgtgagacgtcttgccccgccgatcgtcgtcgcaccatccaacctccgcctcaccgcggccaaggttgcacgacatcgttccatgcctttgttcttgtgttctggattcccttgcttgtggtgaagctcatagacctgttcgtttgaactctactgctctaggttgtc

SEQ ID NO: 151643 - DNA, 2004 bp, Zea Mays
ctcatttctgtttcttagtattacgacttgaggaaggtttcgtagatgatataagagatgacgaaagcagagtgtcaatatcctcgcgttgtcgttttctttctgcaaccaaatctttttgactagttaacttgctggatcggcttttcttgagttctggcacatggctacttgcttcatcaaaatgagatggacgtgcaagatccacttgagttaaattcccaggtcttggttgctcagaaaacttcctagctcctctagccttattagctttcttcatatcagggtctgttggtggataagcaccatcattcttattcgctggatcataattttcatgatttaaattatcacatctaggcttctcagaaaccgtccttggtgcttttgacttttgtatcaacttctgctgaccaggaactgccggtggagaaacatcatttttcttgctgttttcgctggcactctttttattacatgtcctcacctttgaattctgaaacaactcttggtcagttgaagctttattagtttccttacaaagattctgctccacagtcatattcaattctgtcttcattgtgacaatagagccatcatcacctcgtttaaccaagcctttagaaagccccagatgtttatcattatgtacagccaattttttatcatccatttgttttctgataacaaaatcctgatccatgttttcttgcagtgaacacttggtgactctcatattaccactatgcttctgtgacttgtcttcactagatctcataacggactcttgagttccaggaatcttttggtcccataatgatgtccattttgattgttcttttgatagactttctttttctacattccttatagcatgtgttggttgctcctggaatttaacaccaactctctttgagctcatcaaagcagcttttttgttatccttctgcttaagatgactagtgtacctatgagtatttctggaatgaggttggcccttttcaaacatcaaaccatatggccgtttaattgagacaaacagattccgttcttcagcgtcacatactaaggaattccagtgtgaattaatccgcaaagttcttgcatttccaacaatccatagagaaagcctggcacgtgttagtgcgacattcatacgtctaacatctgcaacaaacccaatgctgcgtgcttcaccagtgcgatggctatcatctgaagaatttgaggctctaacagttgacaacagcaagatatcaacttcacgaccttgaaatccatcaacagtgtttatttccatctcggcaacaatctcaggcccaaaagaggaagtgaactttgaacggagtatagagagttggcttctgtatggagtaatgattcctattttcctagaggtgaactccaatggatatctgttcacagagaaagtatatagccttagtttcctacacaataataaacatgagcaggtagagagacaataccctcacctgttatttagaaatgacagtatttcaagagctgcatcagcttcaaaatcattacagagtgactgtgtagcagcatttcttccacaatgttcacgtccgtcagcaatatcaaaaaacatgtatggaccaagacactcatgaaaatgaaatgaagctgatttatcagccacctccacaccatcaagcagtttattttcgtagaaatgtaaagatggaaacctgctaatctctggatgcatgcgatactgcagacaggtcaaaagaaataattcacaaggatttagcataaaagtttaatgctatttcacattttgcataaacctgctaatctctggatgcaggtgatactgcagacaggtcaaaagaaataatccgcgaggatttagcataaaagtttaatgctatttcacattttgcatacatatctagcaatagtgaatcaataaataaagaaacaaatacgagaaaataagggtctacctgtggaaattcatgataaagaaaaaaaaaa

SEQ ID NO: 151644 - DNA, 484 bp, Zea Mays
gtggagcacaacaagcgtgcatccgagtaaagaaacaatcaaacgatgctgcgagagaaactcaagtcctagaagtaccacctagcaatcttgtatggactcatatgtaccacctccaagcatttaagagttatgtcatggttttgaaatcccaggattatagattagtgttcgctgtggatgcaagcgcagactcattccgaatggttaatcacgtagaatcgagcagggaaccggacactaggtttatactggttcaagttttcgccctagtccaatgtagtgctcactgtagtattactttgaggcgtgtgttacaactggtgtgcttgtgtgcgtacgaggagagagggattctcttttatacttcaagggacggtccttacaagtgtgtgtgagagagagttcttcagctacaatgcgcagtggacccctctagggtcaatcttgggtcatgcctgcgcacggtatggctccttctaac

SEQ ID NO: 151645 - DNA, 676 bp, Zea Mays
atttggccaatttaataatgagtacagctcaagtgagcatatgacttttggtgggctactctgatgaagcacaggcacataatacagttttggtcatttacttcttgatgagtagtaccattaagtttcgctaggtcccttcagaaatggataacaaatgtaagaagtgtcctagctacttgaaaaaaatgcagtactcatgctggaggagtgtacggatgcagcacatatgttcgaggcgcttagctgtttgtaccatcgcaaagaattctaaacaagggtgctttgtttagcacagtaccgcatcattatatcagcagtgtcctctgtcccatggcaataaattatggtgtactgacatgttcttaccgaaacactgacgctgggaacgcactagactgccggttcccacttgctagctgttgcatgttccactgtcctctatgagagtagctgaatgttctgaaattttttctcgaggtggaactaattatatctgatacgtataaaatttcagagcgagagcgtatgcacttgggctgacttagattaccatttttgttggagaatctgatccgcccatctgattttttttttttttttgctcgcattggtggtcctaaaggcaccgaacacatgcgtgccaacaagtcaaggaggttttcatctgctcagc

SEQ ID NO: 151646 - DNA, 543 bp, Zea Mays
gagaatggcagctgaaaagattcatgcacaacataccaaaactacaaaaacacacaaaccaacactccaccctgcaatcaatcgaagtaacagatttcaaaaactctgggctctatttagtacaccaatgcatggtggcacacaaaccgacactcatccataagtaacaaaaattcatgtcaaactaacaaagcatgcaccaattcgactcatgcttcactcaaagtttgtttacctacttagttctttgagtttgatggtacattcaccggtctatatggcttgcactaacaaatcaagggatcctcaggtatgggagaactttacatacaaacaacatgtgacaatgaaattaaacactccagtggtctgttgcactactaattcaacaaaatagatgatacatgaacgcaggtggtagaaagggacatcggaggacttaccggacctggcaatgcgtcgaggaggggacgtgagctcgagctcgcacacagaggacagggtagaatgggaacagagtcgattgtcctcgttctctgggga

SEQ ID NO: 151647 - DNA, 519 bp, Zea Mays
gaagagcttaccctatgctgagtttcttataataatagctaccaggccagtttgaagatgtcaccatttgaggctctatatggcagaaagtgtaggactcctctatattgggatcaaactggtgaaagacaattctttgggcctgaacttatacaagaggcagaagaacaagttcgaatgataagagaaaatttgagaattgcacaatccaggcaaaagagctatgctgataataggagaagactactggagtttaaggagggtgatcatgtctatttgaaggtgtcaccactccggggtatgaggagatttaaagttaaaggaaagttgtcccctcgcttcattggacctttcttgatcttaaagcgagtgggagaagttgcatatcaactggagttacccgatcatctgtcagatatacatgatgtatttcatgtgtctcagctaaagaagtgcctcagggtacctgaggagcagctaccactggaggaccttagtgttcaagatgacctgacttat

SEQ ID NO: 151648 - DNA, 804 bp, Zea Mays
caagggcaggggcggcggcggcagaggcggcgacaggaggaagaaggaagagaaaggtacgggcgttgttctgcgcaccacctacgcaacctactacctcctcagtctccacctcctttctcgttgtatgcacgcacgtacgtacgtgcatggtgaagactgaagaacccttgttgttctgcttgacaccatggatggatggacggacacgacagacactgtgttgccgatcgcagtagcacttgcatgattgtagttttggctgcttttaattagcatgtgaatggaaaggggaaaaaagaaaagaagaaggttcttcgtttctttatacacgctgccttcctccctagctactaccgatcactgcaagcagcggatttcgtccgtctctgatgaaggatcctgtctctttccccttggagcgagcctggctggcgttgttgccacccaatccatggttattactactccttgtccttggccgctccttcacgagcgccccccgttcattcccgtgttcagaattcagttaggaggtagatgcagaagggtagcagtattaagcagctagtactactaccggcagtctggttgggtcatgcggtttgcaagggcggagtgaattgcgctgccgtacctggtttcagggactgggagaagctgtacgtttcgctcacctatagaacactggttgatagttgatactgagaactttggtttgcttcttgtcctttgcatgcagtggtgcccagcgtggtggacgtcacggtcgtcaccccctacgaatcccaggtgacactcaag

SEQ ID NO: 151649 - DNA, 313 bp, Zea Mays
aactgctatgttcttactttccttgaaccaagagtaaagaagactttgcaaggtatcagcacggatgcctttcttccccttctgatcccaataatattaaaataaccatcacagaagtataaatccatctacgcatcctttgtcatctacactgtcgcaaaacgggaaggagatcaagaacgtcaggccaagcttctcgcaaggaggagatcaagaaacccggcctagggcaatccggtcgcaagtcgcgacgacggaatcatgggtgttcttggcacccttgctagaaatctggacgcccttgttgggtaag

SEQ ID NO: 151650 - DNA, 468 bp, Zea Mays
ggagagcaagaacggcagcggcagtgtgggagagaagcgcggaagcttgggagggttctgagctcgctcgctctgtctagtgtgggcagatgtagatgtaccagcgagtaggcacttcttgtaaatgaaatgaggtgtagggagtgagatgagaagaagcgtcgtgtttgtcgaactcttaatcaatctttaggaaacattctgtgtgcatcatgttaccgggcattctgtccgatcgagcgaaattcgcaactgaatttgctcatgaaccatggactatgcagagtttgctattcagttggcccattgttagtccaccctctttcactgaacttcgtcgacctcctactaacaagtgttccaacatcccccacaatgcttgattactggaccagcagcactggtggtggtggtacatgaactctctccgaccccccagcaatccgtcactgattcgcagcgcatgtg

SEQ ID NO: 151651 - DNA, 683 bp, Zea Mays
atccagtacaccaccagctgaagctcgactaacaggacctgcattctgggcgacaccaatcaacacattttttctcctgcataaatccattctctaaccgacactcttgttgttcgcttattactgcaacctggttgctcggcccacgtgtgatgctctcctctacagtggccatccatcacaacaccgggaccgactacacgctgattcgcaatcatttcggtcctatgtttcctatcccagctagcagaattactcatttgccgtgtagccactacatcaagcttcatacgcttgcttctcatcccttgacctccaccactttgcggcctactctcctgtaatctgtttgtcccagcagcagctatgtgtccctgtcctatgtttggcttggttgccacttcttcgccgttctttgtgtaattctttgtgacagccacctgaccattttgcttcgccatctctgcctggagactttctgcagcatttaatatgtcgcactccactgttcccactatgatttttgagccgcttttgcccagcggctcattttgcccaccaacacccatacacagctctttggcatccgctgggttgtgaggagaccatttcttttgcatctgcgagcgcaactcctcgggaccttttgatatggcaacagccctgagccgactccccatact

SEQ ID NO: 151652 - DNA, 494 bp, Zea Mays
accaaacgcataaggacataaagttcaattgtaaacatgcatatgcaaagtctcaatgtccacatgagctccccctgaatatgacatcccccaacttctcttctcttctctcccccttttatcaattgccacaaataagggatctcattgatcaccaggtggagggtacatgctgtagtaatgagtgctgaaggtgtcgaagagagaggagaactgcccgaagtcggtctggagctgttgttgactctgacggatatcctaaatgctttcattggtggataggttgtcaaattgactggacaaggctcccatattatcctgaaaactctgttgcatgttgttcattctagccataagaggaccatgaatagtttcttggatgtgagagcgaaatttagaaagctcagagttcagcgcatcaagattatcatcaaagtgagactgcatggcatccatgcgctggtccatatgagtcatcatgccctgaaagcggc

SEQ ID NO: 151653 - DNA, 1621 bp, Zea Mays
aattagaggcaatatttttgagacataggaagcgacagggaaaaaaataccacggatgccaggccatagaaatgatttgttttccctctgtttttctcagttcatcatctgatgatattggaaattcccatttgcacgttggaaatatgctttgtcattttgcagcagtaccctcatatttatgtaatgatatattgtacaactaaagaatgtttttgttgtgttatcatttgaattttgaccgtctactctttttttcaggacgaagaagggacagcaaacatagcatttgaacacctcgttagcatctatgcagttggcttcttgggtgctttgtcgggtgcaacagtcttcatgttgtacacccgcttttcaggcacgacggcttcgcttcagcacttctcctttgcatgcgttgctggtgccttccattggttgccagctgtccttgccgcttatgccgtgattgtccgggagacaaagacaaccaagagcccagtggaatttgctctcttcattgccttcgcctacttaagttatgggatcatcgttagtcttctcgccagtgtcaccaacaaagctctggctacaaggtcagggaccaagaagaaggatgtagcacgtttgatccagcagcgcataaccatcgctgcacacctcagatttgcaaagatgatatccggtacagaagccttttgcatgtacttgaggcttcttggagcaaagattggcaggcattgctccatccgagccatcaacccggtggcagatcctcagctgatcagcatcggtgatggggtccatctaggtgatttctgcaacattgttccaggattctactcaaaggggtttaccagtgcagagataaaggtccgggacaacactgtggttggcagtggcagcttgctccttcctggctccgtcctccaagagaatgtcatcctgggagcactgtctgtcgccccacagggttcggttctccttcaaggtggcgtctatgtcggggcgcagtctctgaccttggtgaagaacacattgctcgcagaagatgaacggattgtggagatggacccgatgtataagaagattgttgggaaccttgccgcgaacctggccatcactaccatgaacgtcaaatcaagatacttccaccgcactggcgtcagcgggcggggggtcctgaggatgtaccaagacataccttcgctgactgagcacaagatatttggcgctggaaagtctttcccggtgattgtccggcacagcaacagcctcagcgcagatgacgacgccaggctcgacgctcgtggcgcagcagtgcggatcctctcggatgatggcgaggtgcctcttcttgacctcacactgaagagcggcaaggcgttttacgcgcgcacaatcgccgacttcgccacctggcttgtctgtggcctgccggcgagggaagaccaagtgaagcgtgcaccgcacatccgcgacgccgtctggggctcgttacggaacaccgattcgtacaccaagctccattactactccaacatatgccggctgctgcggttcgaggacggcaggcagatgtatgcaaagttcaagcttcgtcctgcggaccaagccatctcag

SEQ ID NO: 151654 - DNA, 509 bp, Zea Mays
gtcgtacctcccacgtcgtgtagcactcgtcgcgttcagatttatacagagaagtgggattggggggttgccggcgggagcacatcggcgcttcgccaccgtcggtctcgcccagctccgtatggaagaagacgctctggcgccgtctgatctgcgcggacggccgagattgggccaaggccccccttcgcgctagtagttctggaccgctggatgtaaatcgtgcgggcgagggggaggaatcaagggcattttggatctggggcgtaggtaggtaatcctacggtcgtgatcgcgtacccgttcgcgaggtcactggtctaatcgggtgcgtccattcttgatcggtcggctcacgggtgccgataccccttcgcgatggccaattcactaaagagttcccctgtttatcttgaaacaacccgccgtccgttgtgggattctctgagtcttggaaattctttcacgttagtccctgcgctttctgggaattggggcctagtccagac

SEQ ID NO: 151655 - DNA, 483 bp, Zea Mays
ggaaggtgggcctcgtcaaggtcccgtccacagtgacggcgttcaacatcgtcaagacggtggcggatcagggagccgtagacgccctgacaaagtggcaggacgtcgcgcctggcctcccgaccgacatcactatcagggtcatcatccagggacagcgcgcgacgttccagtccctgtacctaggcagctgcagcgacctcgtgccagtgcttaacagctccttcccggagctaggcatgacgagcgccgactgcctcgagatgacctggctggagtcggccgccttcttccagttctggaaccgccgcacgccggtggaggcgctgctggaccggaagaccagcctgagcaccttcaccaagaacaagtccgactacgtccggcgtgccatcgccaaggaagcgtgggagagcattttctcttggctcaccatggatggtgccgggatgatcatcctcgagccccacggcgggttcatcg

SEQ ID NO: 151656 - DNA, 1186 bp, Zea Mays
atataactctgagccacatttcagtgacataatatcagtgtctgaacaaatttggagacttgacctcggaattgccatttagttttctttagaaatagaaacaataatttattagattgcttactgtgatgaactttgagaaaataaaaccaattgcttttgatgacatcaagttaattgtgattttcatgtgagatgaaaatttcaatcaacaaaatcagtataatgtacatctttgctcaaatagcaagataattttgatcatacctgtatgttttcaattgacaattatacttcacatgttatgtttatatatgtgttctgaacctgccatgctaagagtaccttgaaagcaatgctttatgattttttttttggaatactaagttttccttgagagttgagttggagcatgctctttatcttttgacactagatctttagaagagaaccagtagagaagatctggttattcatggtttaccttgaactgtacttccatttatccttttagtccattgttggttccatttgtactctatttctgacctaggctgcttatatacaaaaaaaagcacttgtctgtacacaaatgctcatgtggagagacatatgtagatagaacagaatattgcatttgtattgtaaggtcatcatgaactgtctgtcaccttattctccacgatcatgaacaaattagaaaatgaacatcctggtgcctgtcatcttatttgcaaaacatctcttgcgcagtacatcgattggtaatatctcttgcatgggcagagactgtggaaggcaatggttatttttcaaatctgatgagcgagtcattcagcccactgcttgaccttgaactgaataccaattctcaagatcaactgtcacagaatatggtagcagcaccaaccgagagaccaaatcagagaagatcaaagaatttcagcgagcaggaagatgcactatcggtgtcatcttgactcaatgttagcatggatttagttaaagaagcaaccgaactaggagcacctattggaattgaacctatgatcacacttccattccaacgaggatttcccctcaacgagcaaccaaaatcctctgatgcatcgttggggcacaatgtaagagaatgccaactagttagttggatgcagacacaaattaactgtaggggccaaagtgg

SEQ ID NO: 151657 - DNA, 716 bp, Zea Mays
aacatatatgttcagatacttctgaaaagtccacgaataagggcgttgaatcagccattaatgatgaatgtgttgctagcaatggagtatcaggatcagatggctcagtaacatatgatccagaacaaagctgcctattaggtgattcattggtgaagttggaagctaacatatgggttgacatggtatcataagcagccatagaagtaccaattgaggcgacagaactaacaggtaatttcctttcagcaaaagatgatctctgttctgtaaaactaggaaatgatgcctctgagaacgctggtactggtgttatagctgatgaaaggcatgggggaactcttccactgtgaagccgattcatggttgatgtatggctgcatgtaatacccatcagtttaatctgttcaagtgaagctttggtcaaatcattcgtcaagtgcggagatttatttcatcaatcttatgaacaaaacttggggaaaaacaagtgcctgcaggcaaactaaaggttgtaatcatgatgtaatagagagcaaatcgctaaggattcacaaaagacatttagcatgagttaaatcactccttaaacataaagataaaaggaaagaagcatccgataactgattagagtaagatacgcctaataaagtagtttatgaaaaagttaataaatgcaatgaagaatacaaggaaatataacaccaaataaatga

SEQ ID NO: 151658 - DNA, 403 bp, Zea Mays
cgagaagaccggcggtttccgcgtctgcgcgtcctgcaacgagaatgggcttgtccgctgtgccgcctgctcctcctgcagctaacgtgcacagatgagacccctatcccagagtcgatcgtccaattggtttttgaagacaaaatgctgacgaattcctagatcattcgtgcctcgctggattcaaatctaattaaagatctcggttcatcaaaccggaacgtgtacgaatttggcattgttcgatcagagtaattgtgtgttcctgagcgtagccaatgttcaaggttagaaacattgaggaataagtccactttttcactgatccctccagagtttttgttgttcgtttctacgttcacgatgtcttttatcaaaggaaatgagcaaccgtaaaactccc

SEQ ID NO: 151659 - DNA, 974 bp, Zea Mays
aaatgcgcagacttagtcaagcgatccactaccacccatatagcatctctgccccgaggagaacgaggtaaacccaccacaaaatcgatggtgatatgctcccatttccactccggaatttccaatggcttcagtaaacctgcaggtcgcttatgctcggccttcacgcgctgacatacttcacaggcggccacatacttagaaacgtcaaccttcatccgcttccaccagaagttttgcttcagatctcggtacatcttggtttcgctagcgtgaacggtgtaaggcgttttatgagcttctctcaatatatccatcttcacctctgatttctgaggcacacaaaggtgacccttgaaacgaaccaaatcattctcatcgatggagaactcccggggtttaccatcgccaaccctctttcgagctttctgcaataaacgatcctgctgctgagccgcacgcactctctccatgagggaagattgaataagcatatgagtctcctcactagcggtgtcgacatagcacaaggcgatccccaaacggtccagatcagcaatcaactgcaaggccacttttggaaccccggacctgctaagggcatcagccaccacatttgccttcctcgggtgataatgaatagacaaatcataatctttaatcaattcgagccaccgacgctgcctcaaattcagctccttctgagtaaaaatatacttgagacttttatgatcggtgtaaatgtcacacgtctcgccataaagataatgcctccacgactttagagcaaaaaccacctcgaccaattcaagatcatgagttgggtaattcccctcatgcttcctcaactgccttgagccataagcaatcactctgccttcctgcatcaacacacagccaagaccaatatgcgaagcatccgtataaattgtgaaacgcttactgctctcaggcaaagctaggataggggcgtc

SEQ ID NO: 151660 - DNA, 1454 bp, Zea Mays
taattcatctttaatcaaaattataacttaatcaccgattatattttagccagattataattagagatagattaactttgatcaccaagattaatctactaaacataggttaaataaatatccaattatggtacaattgatgttgttacagcgtagaaaatgttattataaagttaacgcaactcgaacgggttaaaatggagataaaacgcggtagatatgttttttcgaaccttctacaattatttttatattataaattggtttcttgaatttctttataaacctaggggttgttttacaaatttcaaggacctagatgtaagaatcccctagcggagggatggcgggttggtttgaagaaactcgagggtctcttttataatttggctgagtcgaaggggtatcggacaatttcgaccgcacgatgaggattctatgacctagattagatctagccttatgcgaatcggtacgaagttatggccgtcggattggagatccatggctcccattaaaatactcgatcatcccatcaggtccatccgtagttaatccaacggcacagatttgatcaccaaagggtatgcacgctatctaatctggatcatttgttccggaatcaacgaccaccacctcatctcctccctcccgctagtgactagtggtggcgcccaattctaccgtggcgccctccccgacgatcccaatctgcatgctctggtgatcattccccaattcgacatagccacacagagcggaggagacgaggaatacgagggtaagcttattaccatggatcgtgcagtgtgttgacccggccccgcagcatgtgccccctgtaaacccgcaacccaacgtcgtcgagggattctggctaccgcactcacctggtgaaaccttgagcacacgtagagcctcctagacagtccctcatgagccgcctgaaggtagcatggacctagccccagatcgacgatggctgcgctccaacttttctgttcgctcaacgaggtgctctgatctcccttccttctagcgtcgatggggggtcaggtgcacaatttggtccaggaggagctcggggctcaaccgcgaggatttgggatgaagatcttgtccctgaaacgcggttgaggttgttgcacggtcgcggacccagctattccatcggacttgagctagcagagacccctgaagaactggcctgcacgacagccacaccgggaaaaaggaaaagagagagaggagtgaatgggtcggtgcacaactattcaacccagtgcgtgagtgtaaaaaggggcagggcgagcctggtgctagaaaaacgaatgggtcggtatggagtacttgggctggcgcgggtgtgatcgattgggctggatctggggaagtcggcccaggtaacagttggtcttctttttttcagctttctatcttctttcttctttttt

SEQ ID NO: 151661 - DNA, 476 bp, Zea Mays
gagttatcaccaagtcaccgctcatattgaggagattaaaccatcataggctatcagtgtagtatcagatttcccagatgtgtttcccaaggagttaccaggtatgccacctgaaaggaaggttgaatttgccatagagcttattctaggcaccgcccctatttccaagagagcctatcgagtgtccggaccagaattggtggaactcaagaagcagattgatgagttgttagaaaaaggctacatcagaccgagtacctcgccttgggcagccccagtgttatttgtggagaagaaggatggcacgaagaggatgtgcatcgattatcgagctttgaatgaggttactatcaagaacaagtaccccctacctagaattgaagacttattcgatcagttgagaggagccagtgtgttttcaaagatagatctgaggtcaggctaccatcagctcagaatccgaccctcggatatac

SEQ ID NO: 151662 - DNA, 299 bp, Zea Mays
gccgtgagatgcgtaataccctacatcatgtttgcggtgggttgtattgctttgatatatggaggtttacaatgagggctagggtttggatgtttgatgagagagcggggggcatgtataaaatcagatgccttagagggatccctcacctgccttatatagttcggcgtggcttgggttacaagttggtttccttctaaatctcctagatagtttagattacaatagagtccttgtcttgtgcgccaagtttgtttagtcagtcggcctcggacccaagtcagtcggttggcctcggg

SEQ ID NO: 151663 - DNA, 479 bp, Zea Mays
gtgcaacattctttccatggcctttggatattcatccacaccgaatttctgcaacactattctagagaaatttggccaatctcccaagtctcccctcaacttcagaatctgcagccatctagctgcatttccctccatgttcatcgacgccgcaggtaccttcattgcatctgggacctgatacatgttgaagtagtcctcacatcgattcaaccaaatcgccggttccttgcctccaaacttggggaaaagcatcttaggtacatgttgttgcaactcccttcctcccggatcctggttcggcatggctcctcttctacctcctgtatccgatgactctggtcccgtgccaacatcctccatctctctcgccatagcttccaacctcatcctggccaacgccttcccattctcctccacgcgcctggatagaagtgtcctctcatctgcagcctgtttcaccgagtcggcagtcaatt

SEQ ID NO: 151664 - DNA, 441 bp, Zea Mays
aggactatgcaatggaaccagaattattataactcaactaggagacacaattatataaggaacaataataacaggtacacacgttggcgaaaaaatacatataccccgcattaatctgacaactaagggcaataaatggccttttacattatgtcgacgccaatttccaatcaaggtttgctactctatgactataaataaaagtcaaggacaaacactaccaaatgtagggttatatttaaagaaaaaggtgtttacacacggtcaactatatgtagctgtgtcacgagttacaaaaaagaaagggctcaaaatattgatagaaaatgatgacggttcatgtggaataataacagaaaatattgtgtataaagaagtactacaatctattgagagccatggcaacatacattgatactattttgaacaaattgtatttgc

SEQ ID NO: 151665 - DNA, 409 bp, Zea Mays
tgtaagtggatcttcactataaaacagacccctgagggaaagatagacaggtacaaagcaagactggttgcaaaaggatacaaccaaacatatgggattgactatgatgagacttttgctcccgtggcaaagatggacactgttagaaccttgatctcatgtgcagctaattttggatggccccttcatcaacaagatgtgaaaaatgcatttcttcatggtgacttacaggaagaggtctatatggaaattcctcctgggtttgcgaatgaacagacagttgggaaagtgtgcaaacttaagaagtcactctatggtctgaagcagtcaccacgtgcatggttcgacaggtttagacgtgctgtttttggtatggggtattcccaatgtaatgctgaccatacggtct

SEQ ID NO: 151666 - DNA, 378 bp, Zea Mays
cccctcgtagcttcaacccccgccgccagctcggtaggtaaccgcccaaccctctcccccggcgccggcgccggctcggcaggtcacacccaacgctcagggcctcccaccagctgaccaacatcgcccatgggcggttccaagcccgtggccatcagcgcgccagctgctggggataccaggaggggggcaccgtcaccgttcctgacgccattcagtcaggtcgtcgaggacaaatctagcaacaaggcaacgacctaaccatccaaagtgttttttttccttttctttttgtcgtcggcgtcgacaatgatgagtaacagcaactgctagagccccagtggccagtgccatcctcttccccctcgtcgttgctgc

SEQ ID NO: 151667 - DNA, 616 bp, Zea Mays
gtggagtggtcctctaatcggtacatttttttggtaattccacaaaatttagactctctacgactctactaaacctttgggaatgctaccctaattttgggcaccgctaaccctcatttaatccttatattcgttttttatcatcgctcggtaaccttgggtcgatgcaccacattgtcgattcctcacagaaactcagattcagtagagctttggattaacctggcgtttatttctcttgacaactggaatccatgatatgtatatgtccacactgaatttctggtcatggctccatgaataaaatttttgaccaacagatgaggaactaggtttttttatcaacataggagtagtggcattgtaaataagaagagatagacaaccatattcgagtctaagaagactcaaatctcgatggtggggttgtacattaagacttcccaccaactaaggtaggcccaactcttatggggttcatggtctgatattttgaaaattggtgttcacctataatattcaccaagaaatttattacctcagaaatttgaattataaagaatactattacaaaatatgtttttcctcaaacacgcagagttttataaaccctcta

SEQ ID NO: 151668 - DNA, 540 bp, Zea Mays
tggagctccaggcttgttcctgactctaggctgttcatgcatatggccatggaagttctccttaggctaggcctagcacaagaaaataggcggttgtcggacttcgagtcaagtctccaaagcagactgaagatgcgtatccttggctatgctgttattgaaagggcacgaaaaagcataattcccgtatgttaagccttagattcggtgatgccaacaccaaattctttcaccgaaaagctagctccaggaggcgaaaaaatttcattcaacgactaaaggtcggcaatagatgggccctctctcatgaagacaaggcccaggagatccaaaacttcttccagaatgcgatgaaacaaccaccgcctaggaatgctgaccttgactgggagattatttctaataggcgacataacctctccagtttagacgcgcctttttcagaggatgaaattaaagcaagtatcgatcttctgcctggcgataaggcaccgggacccgacggcttcaccggctctttcctcaaatcttgttgggcca

SEQ ID NO: 151669 - DNA, 389 bp, Zea Mays
ttattacttggcaatcacagaagcataagatagtggccttatcaagctacgagactgagtatattgcagcagtcgtcgcctcttattagggtatttggctggcatgtttgcttgctgaactgcgaggagaagaagctgaaccggtgatgctcttcatcgacaacagatcagcaatagagttgtccaagaatcatgtgtttcatgagcgaagtaaacacattgatacaaggtaccattatatcagggagtgtgttgaggaagacaggatgaggattgagccgattgacactaataatcaattggctgacatattcacaaaggcattagggcgcggtcggttcgtccatctacgttccaggcttgggatcatcaacacaaggttgttgtgc

SEQ ID NO: 151670 - DNA, 710 bp, Zea Mays
taatccgagggtccggattagatcttcatcacttatgaagcggtatgacacgctaaccgtaggatcaaagatcgaccgtccagatttttaaacactaagccccattcacatccgtccgatctgagatccacgtataggatgtgatttccccgaagcagtctcagggatctaatcccgaccgatcagaccgagatcgatggctcggatacactccggacgaccaggtacgctcaccaaatcccggtcgctagcttctcatccatcgcccaaccaacgccccgcgcgtttcttctccctttcagccaggaacggtggcggcgccagataccgagcggtggcgaacccgccggagctcggctccgagccaacccaacagccccgcccaaaccgaagtccctacacgcactgaggttgacatgttgagcatgcaggtagtcgacttacctgccattgaagcagtggagggagcctgaccaatgtccaacgacatcgctgttcaacctagcgacgaagcgacagagggctcactgtgaagcaattaacaagctctggagattccccgatgccacgaacagatgccataggcactacagatcatcccgaattgcgccctgaaggctatggggcagcagggcccaggttccgcgccagtgatcccctcctttcttctctctctcaacgggacagaacttcttctctctcgacgactc

SEQ ID NO: 151671 - DNA, 424 bp, Zea Mays
agccctggccgcgggagcaagcggcccggcggcaatggccagctacggcgagaaatttcgagtacaccaaaggccccccgatctcccgggttgacacaaccgcgttcgcgcccacacgaggaagcacttgactcccaccttggtaccggaactcccctcaatctgagtatggcgcggcagcggtagaacggtcgggcggcggtgcttggtcggacgcgctggttctaggttgcggatgaagtcaagacggctacgcagggtctagttttataccggtcctatcctcactaccacgccgcttgcacgccgagctttgcggatcttggcacagcccgcgccgaattccgcgggaggaagacgaccagcacccgactgcgggtcccgacgccagacggaaaggaggcaccagaatccggggtccagt

SEQ ID NO: 151672 - DNA, 810 bp, Zea Mays
gtcaacagatgcggctgggcgtggatgaagcatgtgtgggaaggcggcaatctcgagcagggacggatgtttcccaaatggaatatgcatgggcctcacattagggtagccttcctgctgcgcaactctatgatctttcttctgcacgacatcatgtccgttctacatcttccaatcgactcttccccaccctatacagtttctggccatggcgtcacgggatgtgcaatgtacacaccacgtgcccagaagcgaggcgacgcgcgaccgcatgagtgggggtgacgctacatacgagggtgaattggcgaagcaggcgaggctacgcctttgacctgtgcgcgagcaattggtcggcacttgcagccgcctctctcgtcgtcgcctcgtgggtcgttgtgctcgtgctccactccctcgtcagacacagtgatggccaacgaggtatatcctcttcctgtatcttgcccctacgatttctctatcggtcttgaagagttagtcgtgtggctacttttgtgtttgtgatcgtgacacgcaaaccgatgccctggttgtcctatgcaaccgatcagactccagtggtgccaacaaagtcagtcataacttgatagatccgagtgcctcgctgcattccttcgtaatacatatcaatgttgttagactccatgatgaactcccaacatccttgtgtcattgagctgctaatttctcttgtattttaagatgatggaaattacacttgtgttatctggttttgtgcagatggaggagtttctgcattctgttgatgatcttactgttgtagag

SEQ ID NO: 151673 - DNA, 363 bp, Zea Mays
ctccaatccagtccaaaacaggcccggcgccctgagatttagaggtggaagaccggccggaggggggctctcttctgtcccatgcatgcgtcttttggcgagccacacagctgtgaagataagggcaaggtacagtgtcacaaccggggaacagggatccatccaactgctgaaatggaaaacatgcgagacgatccaactgttcacgttaccatttcagcccgaacagttcttcgatgagaggcttcgaccaatcagtggcggactcacgactcagtcttcgggcacgtttgttccagcttttatctgaccagaatttagctgtgcggaaagtctgatcgtggagataatccaagtatcgtg

SEQ ID NO: 151674 - DNA, 1819 bp, Zea Mays
gatacgttcaagtatgttatttaagatggtatttttgtttgtgtcgtcctttgaaacaccaactagtttggtaatactaactcatgtataatttttggtacatccatgtgcagcctcatcaacgagatgtgacgactctactcgctgcagcagttcaggcttgccatgatatggttgcgcgtcttcaaaagttcattgctttgcaactattggttccacttacattactttttttctgaatgcaaaatgtatgtgtaaatgttaggtacctccagatgctgttgaaccactgttcaagcagatagtaaatcagtttgtgcatgaccgttctcgtccagaggtttgcatgccccctttcagcatactatgtgttgttccagctaacaagactgcatgaacatatatctgactttacttcttttaggctattgctgttggcttaaatgttgtgagagagatctgcatgagaatacctttggtaggtaccttaatgtttggatggcttaaacaatactcttgtctgcaatggtactagacagatacccttaggcactggaactgaaatctattgcttttgttagctgtgtttcatatatgacataagcagaggggataatgaccatgttttcactaattattcttttctgtattaattactgatagactgaaaaggttgcaatgttgtgctcctaagtcctaacagaattaaacatgtaaatagctgaattggaataaagttgtgaacggttttagtttgtggttgtctgccattatcgtcattgtggtggatttttttattggtgctcttgctgatgcaaaacacacatgtaaacctgagatttttgtgcattctagaatatctggtcagatgtacagtttctttcttcaacttatctttatacttcatccactatggcaaacctgcagatgatgaatgaggatctgctccaagacctcgttttatacaaaaagtcccatgagaaagctgtttccattgctgctcgttcgctgatcacattgttcagagaggtcagataatttcttacaaattttccaatattttttctatatgttggaatcccctgtcgctaaacctctgttgattgaagttcagatctgtccttcattgttagtcaagaaagatcgtggccgtcctgtggatccaaaggctcggcccaaagcatttggagaagtcactgttgctagcaacgttcctggtgccgagttgctagatgaaaatatttcttcagaaggggaaagttcggacgatgagtctgatggttttcactccgatgatgagatggacttgacacctgcccctcctggaacagaagaaaatatggagggttcatctgttgcaaacaaacatgatgccgatggagataccaaagaggaagatgacgcatctgatgatgaagatggtacggatcaagatgactccaacagtgatagtgatgaactagacgatgactctgatgtggatgtgggtactgatatatctgatgaagacgaaggtgacgacggtgaactgaaagaaagcataaatggttcagaggatgaagctttagaccagaatgaagacagcgaagaggaagacaagtcaaaaggcagtggctctaaagcgcagaagaggaagttaaatgattatattggacagctaaattctgctgatgcaagccttcgagctctgaagaggttagcaactgccaagaaggctgaagaaccatctgatgaaactggtaaaattctatccgatgaagatttcaaacgcatcaaagaactcaaggtatgtggattttggatggcttatagatctaca

SEQ ID NO: 151675 - DNA, 312 bp, Zea Mays
gtagccctatggttcatcatgctagattttcattacagaacctgtagaactaatgaaaatcatgtaagaacacaaggacaggtgtatttccccaaacacaaaacctgatatggtagtgcatttcctctcaacctctccctgccaagccagtagttcgacaccacttcaaggctcttgccatctcaccactgtagttgatcagacttgcagcccaaggcctctacctaaggctggcaaacatttggaaatcatatcttcacacgacacacccaggttttggagattcaggttgctgaagtacaggacgcgtgg

SEQ ID NO: 151676 - DNA, 559 bp, Zea Mays
caaatatttttggccacaaaacaaaattcttcttactttgggaagatattgaagacattttactggtccctgcaaccctatccttaatgggaagtccatctctggtgattattcttcgaaagggcagaggaatggatgcaaagcatggcgcaaagcaactggacagtcaagggagactaaacttccatttccaatcttttgtctcattcaatgtggcacataagtaagtccatctctggtgatgatcatcatatctttgcaacttatcatatgtggttggccatcataagagaatctccttaaaaatggttgtctacctttctgtctatttacacctcacctgtctggtcctatttcttcacgagtatgtttaaaatgccaatggcctgctctacagaacaataacggcactgtggaaggcaaggtccttgacccctgaacaaaaggtagagcttgtagaagaggaatcagaaacagaagagttccaaaacgtggaaggagaatctttcttagggatagaggatgcccaaatgtcaggagtgttctcatccacaaaacc

SEQ ID NO: 151677 - DNA, 300 bp, Zea Mays
gactaggttcatgaaaggactcaattctgaaattcagactatagtcatgcatgaagcatacaaacacatttctcacttgtttttgcttgcatgtaaagctaaaaatgagattctattatacaattatacaagcactgaacatgtcagccatagttcctcttttgcatctgctctacatgctgatcaagaacacaaaataatgaaaccagttgttgtttttccatcatcacaagaagaattgattgctgacacttgtgatagtgaagatttgtgggataatgattcacatgtactaaggca

SEQ ID NO: 151678 - DNA, 329 bp, Zea Mays
gctgggaatagttgattgataaattggaggagcccaaggctcatacatataggcaaggatatccctaataaaggaaagatctaatctatcaataggaaaggtctaatctaggggatccttgccaaacacagccaactaaccaaatacagagggggggaggcagccgccgcaccctgttagggcaggtgagccgcctgggccctatttccctatacatcacgctaacacgcccccgcagtctgaacgtcggtggttagccacggacattcagactggaccgaaactcagagaaaactgtagaaggcagtccctttgtgaagacgtcggcg

SEQ ID NO: 151679 - DNA, 535 bp, Zea Mays
aaaatggcaaacaatacaatcctgacaagatggtgcatgcatacgatgatgaagcatggaaacactttgaagtcattcaccatgagaaagttgaataggcttgtaatgtacgtgttgcgctggccatagatgggttcaatccctatggaatgattgttgccccgtacacatgtgggcccgtgtttgttataaccatcaatctccccccggcgtatgctttcaaagatagaacatagttgtgtcgttcataattcctccacacccgggaattaaaatgggcatgtacatggagcctttgattgatgaattggtctgtgcttgggagtaatgggtatgaacgtattaccgagctatgaagacaaacttcaaaatgcatgtttaggtatcagtactccatgcatgacttaccgacgtatgggctattctgcgtctggtgtattcacagtaagttcccatgccttgcaaggaagctcttagattcatttggttgaagaagggtggcaaatattctccattcgataaacatcgacaattt

SEQ ID NO: 151680 - DNA, 855 bp, Zea Mays
tttggactgaagtgtaaaaactacaatgttgaagcatataaagtcatttggttcacaaatgtgtggacttgtaagccaaatattggattttggacttaattacaaaatggacctcaattgagttctatactaagtctcaaattcagtgttgagagctcaactttggagccttgtatctttcaaattagtaagaatttgccctaggtcaccacatcaaaattatagacctaacataggagaacaattttgcttaagagtgtaagcataattgttaagaagaatttagagaaaaacctactccaagtcgctctgtcagaacagtttcagaaaactaaaactgaacctaaggttaaaacaaggttccagtgaggtgaggtcaagtttgatgcgccatatctttgaatcccctcggttttgacccaaatgtcctgtataaggattgaagactgttgaatcaagaacaaactttattaatgaatctttcctggttattcacaaaaatcatgagaactagtcggtggaagggggtcggttcaggcgactgacgaagatgtgccatggtacagtgtcccgatggatcagatcgccagcggcagaaaaatctcaccgccggtaactccccgccgtgattcgtaccgtcgtcgttccaatccgggctcggtagggaacggatagcgccggagtagataacgcatacgtggcaccataccccgagtccagctagagacctcaccggcggccaccgagaccagtgaattccgtcgcggtggcgctcatgccgtaattctccctcactgtaccttctaccgacgtggtcgacatgcgcttgcgatactatcctcggccgcgaggtga

SEQ ID NO: 151681 - DNA, 611 bp, Zea Mays
ccaactcctcccgggaggagtgcattgacaagcagacgtgccagacccccaactcgtcgcacatggcctccgttagcaccggtttctgctgctgctgctgcgtcgatgcctcctccggtggaggtgggtcgtagtacgcgtaccactgcgaggagggcctgatgatgaggggcttcagctggcgcgcggcgcgcgcctgcgcgaggatctccgtggcctgctccgacagccgcgggaacgacagcacgtggaagcgggtggagggtgcggcgtcgtcggcggcgaggatctcgggcgtgacatgcgccagcctctggtggcagtcggagttcttctccctgtcgacgtagatcttggacccgaacgccttggacaccccgacgaggacgtcctcctgccccagcatgtcacacacgagatacacaaccaacgcgctcgggtgcttccagatgcagtcgatcacctggcggatggagtcctgcgtggcggggaagcgcagggagcaccgcgcgaggaagaggtagtcgatgcggcgggcgaggtggggcgtcagggcgctgaggcagtcggtgatgtgcaggacggatccgaaggggccctcgaacaggaac

SEQ ID NO: 151682 - DNA, 1461 bp, Zea Mays
tgacctttctgctgactttgacagaacagcaagtcccgtggctatgtaggaaggttcatttccccttgttttatgttgggaacacgaggtcttaaagtttcagttgggtggttgttcaaatttgacctatgttatttcagttcctgacttcctgcgtatgagcagttcttcagttaaatttatgtttggatagattattagcaatgatgtctcttctaacctacaaactatgttttacatgtttgctgacttgttctctttaaatatcacacaaccaacttatctttaggttgtaaaacaaaaacaaatattccatggtgctgtcctttgcatttttttcttgaacacacaggagaggtgcgtattattgtattaagaaggaaaaagggataagaacccttaacgaagccagacactcacaccacttcgattacaaagaaacacgtgcgctctttacaagaaaagtcgaccacaacctaaacttaactcttactgcgcatgagggcaaggagacaattaacgccttgtgctccagctagccgccaatagtgcagttccttctagcgattaataaagctccagcgaagcttaggagataccccatcaaacagacacctgttgtgaaggttccatgaagtccaagaacctgagatgataagggagttgaagcccctcttaatctgatcctgcacaccaacagagattgttttccaccgatcctcaaaggatgtttccagcgatgatgtcccaaagtgtaagatattcagagatgactccaacagtcaaagctccctgaatattattaacccaagcatgattggtgagggcctcgagtactgttctactggttgctcttcgcttggatactaatgcaaatacttgcggtgtaaggccagcaactctgtggccttggatccacctatctttccagaaaagcgtgtctgatccattgtccacttcggataccacttccacggagagcttgggcacacttcagaatttgattgggaaaaaataatctaaggtcgactaagatctgtctctgagccacaaccacctcctctgaagtgcccagcccaagttttgaagattggaaaaattcccagcccaccaagctcctttggagacaaactttgaaccaagcacaagacaatggccacctctagcgtccttccttctacgccaaagaagcccttgtttaatcttgtcaattgccttaatcacctaggttggattaatggccatggccagatacgccaacatggatgtggaaattatagtatcagtttacttaacacttagtgttttacgggggcaaaaaattagaattgtggaatgtttgtgctcctctacttgtctctggcagtggctcctgatgcagtatttgacaccccagtccctcctgtatgaaccagctgccctaagcaaccttggacagtgacgcccctgtgtattaactag

SEQ ID NO: 151683 - DNA, 421 bp, Zea Mays
cgcgagtgacagccaccacggactacaggtacgtaacgaggatcgcctcctcgattacacttatccattggtcttcagttgaatctgggcaaaaatgatgtatcgtgagcgatgcctactgacgacacaccgatatgaaaagttgtatcatgactgataggatttgtttgccctgtccacaatatgtatcgtgagcgatgcctactgttctccgtgtgaatggctgtatcatgactgattgggttcgtcggccctgtccacaagttgtatcgtgaacgatgcctattgttgttggccttgtccacaaaatgtattgtgagtgatgcctcggacatcatcaccaccctaagccacaagacaccgaccctaaaaaaggtatggggtcttagacatcatgagtcatgatacaaccattcacatt

SEQ ID NO: 151684 - DNA, 511 bp, Zea Mays
aatttgcagagaagaggagtgggcgaaccataccgagggtgttcttaccggagttagggcgattgtgataggcgagcggcggggcaaggcggaaccggggcggagtacctctccggtgagagattcacaacgccaccattgtccactgcgcaattacttgccggtaccaactccgccacgctccaacacccaccagcgtgcccgaaatcgaccgaggcaccccaccgttagacgcccgcggcgattctctcgtcaacacaaagctcagcggacactgcaatggcggacgattctagaagaggtggagggttgcggcgcgatttggtttgggtggaggatgatgtgagggatggtttaatacggccgcgcatggtagccaggtagaggggaaacggttgagttggagcatgcggcggcggagaagtcggccgcgcagtgcgggctgattcgttttcggccggataacagggacacacccgacatgcgggggccacacaccagtgtaacagac

SEQ ID NO: 151685 - DNA, 388 bp, Zea Mays
aaaaaaagggaaagaataaactgcggattgggcccaaaccacctgccagcccacctaagcctatctacagcgcggcccaaacttcctgtgtgcgcgcatccacccggcaccctatcgtgtgggacccactggtcgggttcgaccgcgcgcggaacgtgggggaagtgccgacaggcgggccccgcttgaccgtttctcaaacgcccggtttcgctgccactcatgtgtgtggcttaccggtggggccacctggtcatcacccttccttgcgccatgctaatcccaacgaactccgccgttctcgcgtaatcagctcacctatctccctcgccgcggactccggatctcctgagctcctggggataagtagcgcgcatgcggccccctt

SEQ ID NO: 151686 - DNA, 276 bp, Zea Mays
gcgacttcagtactggcagtgtattcagaaacttctttagtgcctcagcttctgtggtccactggaatttgtccaccctgttgagcagtttatagaatgacattcctctttcgccaagccttgaaatgaaatgactcagcgctgccatgcacctagtgagcctctgtactttcttctgtgatcgcgatggctccattctcattatggcttcaattttttctgggtttgcctctattcctcgatggctgacgataaacccaagtagctttccgtacg

SEQ ID NO: 151687 - DNA, 634 bp, Zea Mays
caatgcggttttgaagcgcttgatgacaaaggccatctcctcgtcattaaagtcggtcgtctcaacttgcgccaccttacttagaagcgtcgccttttcatttgttactttgaaagcaaccacttgttatgacaacatcatcaatgtaccttgtatctttaaccatcatttgatggataacgaatttgccaagcacttcctcgggtttcatcttagtgtacctaggatttttacagattaaggaaacaagatttgcacctaaaagagtaataaccttagcatgagtcgaacgacttcatgatctgtccatcttttgcttccatagttctgcatttggttcaccagagacttaagcctattgtacatttcttgtgacccttctcccctcttcatgtcgaacctctcaagttcaccctcaatggcctccatcttggtgactctggtcataaagtttccttcgtgtgcgatcttcaatgtgtcccaaatttctttgacattttccaagccatttaccttgttcttacctacatagagaagctagcaaaacagtggtagcttggaagtttaggtgaattaattcttctacttctaacccattataattttcatcatcaacatctggtatatacattcc

SEQ ID NO: 151688 - DNA, 342 bp, Zea Mays
aacctcttccatctttttttatatccctcaaatctccatcatctgtatctacaaacagggaatattttggttgccctaaaataatcgtcgtcggtcccatctatcacatcgacatttttcccggtccacccaactcttgttccacccgcctgcctccatcactagttgtctaccgccaactgcccccacagttctccgtcgtcggccgctcccatcagcagttctccgtcgttagccattctcatcaccacttctcctccacccacccatcactagttctcgcagcactatattgcctcagcgaagagcatccgaggaactgggctatcgtgctacacgcac

SEQ ID NO: 151689 - DNA, 384 bp, Zea Mays
attccaagtgtgggttgccgaccaggtgttcgaagaaataatgatgggggatgtggtgtcgtggaactgcgtgatgcactacaacggtatggttgcctggaccgcgccctacgaaagttccgcctgatggtgagcactaagctggcgcctatagagagcgccatttctttggtactgagtgagtgcgggtgctctaaggacttgcaccatgggcgtgtgctacattgatgggtagtgaaattagaggagcttgatcctgatttgcccctgcataatgcgcttctcgatatgtactgttgttctggtgatctggacactacagtatgtgtgttttagaggatcgggacaccagactcagacttggtgtcatggaataccatactt

SEQ ID NO: 151690 - DNA, 779 bp, Zea Mays
gcagaactgaatgaaggaagaagatgcttacttatgccgccggtttgccatcaattgcttatacgatcaccttcacgtacgttagggagcgtatcagtaagctacgcacaacgatttgtaggtccaatccaaagtaatcgaatgaaccctaattaaagctgcgtgatagtcgccatcctatatatcctaggagcactcatcgatcggacgaccacactttcaaaaaaatacataggaggagtactcctaccgttagtcggaggaagccggccggccggcagcagcactatactatacagtacacacacacagccagcttccgagacaaacacccaattcctcaagagcaacacacacacacacacacctccattcatctctgatcaacctatccatccatcctagcctcctccgatccatggatccgccgggctccaacccagatggagtagtaaacatgacgagggcaatgcaggccctgtccccttggctgaaccacccaaggaggacgatcgcccaggtggaaggtctgatgctaacggccgctgcgctgctgctgatccagctcttcttgggcttctacaggcggcggtgtcgcaactccttcctcagtactgtcctgcgggcgtcttccaagatcatggaggctctcatcatctacactctcggtacgatgcagtcctccccgatcaagaactcgttgtatcccgtctgggctgcttttctcgtcatggcttcggcgggcaccaccgccgtacaggactatgatttctgtggca

SEQ ID NO: 151691 - DNA, 762 bp, Zea Mays
caacatctaccaggccagtatcaagatgtcaccgtttgaagccttgtatggacgaaagtgtcagacccctctaatgtggtccaacgtaggggaaaagacactggaagggcctgccttcattaaggaggcagaagagaaagttgccctaatccgcacaagattactcgaagctcagagtcggcagaagagttacgcagacaacaggcggagagaactccggttcgaggaaggagactttgtctacctcaaggtctccccattccccaatgcacggagtcaaaagatttcaagtgaaagggaagctagctccgtgatttgtcggccctatcctatcattggcagaataggacccacagcctaccgcctcaaattgctagaatccatgtcagatatccacaatgtgttccacgtatcccagctccgcaaatgcctgaaagtgacagaaagtcgcatcgaagaagaggcaattcaaattcaaaaggatctacagtatcgagaaaagccagtaaagattcttgactcagccatccgaaagacccgaaactcagaagtgagactctgtaaagttcagtggagcagagaaggagaagaggaagctacctgggagagtgaggactccttgaggagggaatacccttaccttttctcaaagcccaatctgaatctcgagggcgagattcctttaagtggggttaagccgactactccgttagtagggtataatggtcaccctatgtcgagtaagcacgagcatgttgcacc

SEQ ID NO: 151692 - DNA, 392 bp, Zea Mays
atttttttcaatagccatttttgagccgggaagaccgtcagatgataaataggttgcgcggataacacagatttaactaatgtctctctacctgcctttgagagaagccttcctttccatcctgcgagccttttattgattttatcaactaaaggttgtagctcaattcttttagcggttctgaagtgaagggggagacccaggtacttcccgggtaacttagcgattttactggggaagacttctacaagatttggccacagctcctccgggtaacgaattggaaaaatttctgttttatcgaagtttatcttcagccctgaacacccttcgaaagtctctagaatcgattttagaactttgagatcttctttatccgctctaaaaaacac

SEQ ID NO: 151693 - DNA, 286 bp, Zea Mays
aaaacagtttatcggtgacacagttgtctaatacttgttcactatcatgcatatactgagttagtgtcaatatatctgcccctccagcaatctacaaagaattaacatgaacaccaatgcttccaaaaatgtttatgcttccagctgtagaactcagaaaattgtgtagtttgagaataagttcacaagattgtctaatgcttcagggtaaaatttccttgcaaacaagtagcatggtctcttcagtccattccacatgcaaggcctctgcaatagatctttctgc

SEQ ID NO: 151694 - DNA, 635 bp, Zea Mays
gatgatatttttctcgatttacagaatacatcgttgttccgagagcttctgggatgtagctaggggtaaaacttcctgaggtgttctatattccatgagttcccaatttccatgccgttcatctgagtgaggcgatatgaccccggccgagtgacttctgctactatgaatggtccttcccatagaggtgataatttatgccgcccctcccccgttagaattcggcggaggacgagatttcccactgcgaaggatcgatgttgtatggccttatcatgatagcgcctcagagtttgctgatatcgtgctgattgaatcaccgtattcagtcgctcttcttcgagtacatcaacgtcttccagcctagtagcttcagcttctgctatgttttcaaagattaacctcggtgccccgaacttgagatcagcaagtagcactgcctccgaaccataaaccataaagaagggggtatttccatgcagagctcggctaggttgagttctcaggctccaaaccacatatggcagctctctgatccacttttctgcgaacttctcattcttgtcgaagactttctttctgagtgcttctaatatcatcttgttagctctttctacttgcccgttggctcttgg

SEQ ID NO: 151695 - DNA, 469 bp, Zea Mays
ctcgacaaacgctgtaaggaatcacgatgtcaccccaagaaaggacgatgacgcaccccgtaagcaggctttttacccataccgaagcgctgttacaacaactacgatatgggcatcccctgccctgggggctcgggcgtatggccaaccccttgtcctcggcctcgactcttagtgggaaaacaacaagcccaagtcaacaacgcagtgcatcatcatgtcacccacaggacgccaagacttctcctctagaaacatgacgacccccggttcaacaacgtgcatctcctaggtgtataaatagggcagtcatagctcctccaaggggcaggcaaacattcagtagttttcctccaagtctttcggtattggcacttgcctcaatcagttctagggaattggggacttcccctctcccgctgtgcttgtaatccttactgcaagcaccttggtgcgagtaatataagcc

SEQ ID NO: 151696 - DNA, 330 bp, Zea Mays
cgctaaaataacccagcttcaccatcttaggaagatcagcttcagagatggtggaccttccaaagtccagatgactaggtttactaggcatcccgaagctgtactcatcttcggaaccaatttcttcaacaacagcttgtgttgcttcggcagcaggtgtgtcctctgatgaaacgagcccggaacgcctcattgcttcggaaatcggaacagtttcagtggcttcggcctcgtctccctcacgctcaatcctagcagtggagcgcaatctagccatttgattatgaattcctaaagttttttgaaattaatgaccttttttccgaagct

SEQ ID NO: 151697 - DNA, 346 bp, Zea Mays
gcgatcaagatcggacgggggagatcagactgggggagggtgaacggctgcgggcggcgccgctcctcctcgcgacggtgaagtgctaggctagttccggggtcgtcgggattgggcagagagggagagaacgacacggcgaactcagtggcggggaaaaggccacgaatccgaggtcagagagggggaatggcggggaaaggcctcaggcggaccagaggaactccggtgagggattccggtagctgggagggggcttgaggcgcgctaaggcctgggatggcttcagtagagggaggggtaccttagggaccagcgtcaggtcaatgggccgggctaatttggc

SEQ ID NO: 151698 - DNA, 307 bp, Zea Mays
gtgacttttatgtgccctatgaatggttcgctgaaaccagtctagcccatgctgcctgacggaatgggcctgaagtggtagtactgtaggccttttgactgttgattttctttgccgcaacatacctgcatacgcagaagaatggaagctgaaagatttggccaagttgtgggggaggatatattattcatctcattggattggatgcaaacaacagtgtccatcaatcacatcagacatgataatgtgaattctagtcccaacgcagatgtctctcaaatttacagcaatggcttattggtgggga

SEQ ID NO: 151699 - DNA, 438 bp, Zea Mays
gtactttagcatctatttttggctttcctctgatctctatcgatatcttccttctgtcttgatacattcattgcgtatactatatgaatgtgactgattgggaaaatctattgaaattcctggacgtccccccccaatgggtgtaggcaagggacggcttggtgcgctgagcgtttagcgaacttccactgagtagtaacttgacatgaccgtggggtgtaatcatatcgtccaagcagttgacttcagtcccaatgggtgtcgtattacgtgaaacggcgtctgtcgccttacttgtttccagacgatttgaatggcttcttgaatatttgcgactgtttggtgaccgcggtaggagatgagcggttgccttcttcctctataaatagaacgcttgcttcactgtgtcttcacacatctctctgccattgcttgctt

SEQ ID NO: 151700 - DNA, 511 bp, Zea Mays
gttttagctttctaattctgtgaccgtaattgcttttgagcttcggctttttgttgcaatcatcgctgaaatggccgaagagaagaaaagtgtggatcccgcactcgctggtttctatgaagccatagagaggaccaatgttgagaaaattactgatgagatgttagctaggctatctagagactcaagtgatagtgagagttgtgatattgagagtgacaacgatgatgccgaagatcggacatggaggccaagccatgttgtgtttcaaaaatcctccgttaagaagggacacattgaggcaatgaagggcaaatattttcatgatatatctattgtgagtgctagtggagagaacatcgttccgcttcctgaggctgatgaagcggttgttttcaaaagctttatgaaggttggccttcggttccctctgcataaaatgttggttgaagtgttaaatcgatttgaaatataccttcatcaacttactcccgaagctttaattaaagtc

SEQ ID NO: 151701 - DNA, 619 bp, Zea Mays
gtatatatatatttgacaaattaattcttataggctctctcgtcagaaacactcttggaagggaagatcaagaagtaaagctcataaatcagaaaagaaatatttgcaaactggccctaaacatgtgcatgcagaggcgacgttgacaaagatgccctctgctgcgcaaccttcgctgctcattcctgcaaaacagggtttgcaaattgcaacagcaattggtactagcttgatcgcattcatgaacatgattctccttcatatgtagtagggttttttttaaccaggacagatttcttcagctctgatggcgacctgttgtctggcactccttcgatcaagtcgtctctgactctgagctgaaactccaaagctgaaccgtgccaaggaagatcgacccagcaatggggtctggtccgtccacacaccggtgaccggtgtgtctccccagagcaaaccccgggccagttgggatccaggagaccggctcttggcgcccgtcaacttcgctaaaccctcatcacatcagcaccccgtccctgacagagattgataaagctagcacgcagccgcaggcacaagctgcctgggggcaggacggcgacgaaccagactgaag

SEQ ID NO: 151702 - DNA, 396 bp, Zea Mays
ggttacattcccgttttacgcaaactaacacaactcagcgcgacgtatggtccacggctccacgcccacatttccgcccccgttcgcacaccatggcccaccattcgatcaatcgtgtctgcatcctggccagaccccaccgcatgccccaaacctaaccactcgcccgaacatctagcaaccctaattgatttcctcgtcgctctcgccgtcgtgtgctcccacaatcaccatctccaagcgcccccgcccctgccacaccgtcgtctccatgcgtggcatctcggtcccccaacatcatcgcacggtattgcctcactcatccatctgccatttctcgtcttcgtgcactcttccgtcgtcgctctacatcaacagtgtcgccagatcccactc

SEQ ID NO: 151703 - DNA, 524 bp, Zea Mays
cctaggatccatcttcaacaacagatagtactgctctcatacgaagaaatcatcaggggtagagaggatacaacaggtctctacaagatcttcatatttctatcacaaattatcatcactggtagtttataggtcaataattatggatcttccggcgccaaggaccaatgacatattaatgcccaatttcacttcaagctctgtggtgatgtgggatttcatagttatttgtctactcttctcacttctggtagatcagaggtagataatggtaagcatgctaatgggtggaattcagtgtagttcggctacataaaccccgtgtatgtgtccattcaggaccaacctttaccatttagcttacagcgtataccaaacttgtcaaaggaccatctcgagtcaattcagtgactataagtatttacaattccgagagatgtatgcggcccaagcatagaggtcctagatagaacgagtaaagtggttcgacgggaacacactatggttttcacaccaacatagtg

SEQ ID NO: 151704 - DNA, 384 bp, Zea Mays
gtggactgaagactgtgaaacaagcgccaccaaactttcgaggaagcgcgggtgcggaaagtgcgtcttcgttatgtccatgtgctgagcatcccttcaactcgccccgtttcttagtctgttgcttctccgtcttctcctcctcgcctgctccccgaggtaggccttcttgctctggtgccaccaagcgtggagattaaactcatcgttcctctcgctctgctcacgcgtagagtagagcggagatttacaatccgtaggccactggacaaaggccagatcccgggcgctcggtccttgggtgccgtcagggatacctgaaattggagtccaacctcgtcctcttacgaattcggtagctggtctgagtacgtgaatctttct

SEQ ID NO: 151705 - DNA, 605 bp, Zea Mays
cccaaatgtgctcaatttgaattaattggatattcggactcggactatgttgggtgcaaagttgatagaaaaagcacctccggttgttgtcaatttcttgatgatctcttgtttcatagtcttctaaaaaacaaaattcggttgctctctctaccgccgaggcgaaatatatatcggccggaaattgttgtgctcaactattatggatgaaacaaactctattggattatgtgattatttttaagaatgtgcctctcatttgtgataatgagagtgcggtaaaattggctacaaatctggtccaacactcaggaactaagcatattgatatacggcatcacttcttaagggatcatgttggaaagagagatatctctatttattccattggtacggatgatcaattagccgacatttttacaaagtcattggatgaaacgagattttgtactataagaagtgaaatgaatgtgatcgatctctcaaatgtggcttgaagttgatcgcgcatgtgtagtattgcatttcggttctaaatatgctctctacgctatttatttggtattttttatgcttttttcatcttaaattgatctaagtagttt

SEQ ID NO: 151706 - DNA, 701 bp, Zea Mays
gccgaagcctgaaatgaatagatggatgggatgggattagcagtgctactcatctgaaaaccacatatatgactctcatcggaagtcttcactcggggtatacttcgtcttccagcgggtcgaccttggagaaactcgaccagctgcactgatgcgcttagatcaagaggattcgaacgtcccttcaatcactgccgcctcgacgatgatgcactgatcgaggtagtgagattcggttccatcgagctcgaggtcgatgcctgttcgtctctcccgttgatctcatttctacgattcagtccagcactattcatcgtttcgtcctagatctttcttttacgagttgatccttgaacgcaggagggctagctcgggagtggaatatctactgacccccgactccgcaaggcatgtccaagccagcagcctcaccaccctcttctttgcctttgcccttgtgtccatccaaccaaccagccacagccactagagaggtcgaatccttactttcttgcaaacaatgggcctccttccaatccacagaatcatcttgctgtgtttttgctcgtctagcttattactgcctcctccagtatcatcggacagccgcatccttcccaacaagccgctgactgttggaagcacgctcacctccgatgacggcacttttgccctgggcttcttctccccgtccaacccgg

SEQ ID NO: 151707 - DNA, 442 bp, Zea Mays
gtagatttgcgcaagagaaagggacggcgagggaagagaagggtgtgcgaggctgatgatggattcaacatggaataaagcagaaagcgcgggacaccgactcgctccgcgccatgagagcgggaagagggagaaacggtttgctttgccctttaatacgtcatggacgacatgatcaatggacagcccaatggtgatcatgtctgctgatcgacggtgcttgaaaaaagagcagattagagaggattcacggccaatctactagactactgtatatagagacacgagaaaggagggctagctagcatccgaaaaatttatgtgtcgataagaggacagaaagaattaaaggggcccaacgtcatgatgtatcaacatgcactacgtacacagcacgtggtatatcacgatcatcatgatgaaatcacgatctagctagcta

SEQ ID NO: 151708 - DNA, 360 bp, Zea Mays
ctggaagactgattattgtccagactgtcctgtcttcaatgaatatctacttaatgatggccatggaccttccttcttgggttttcaaagcaattgacaagatcagaaggaatttcctgtggagagggaggaaagaagctttgggaggacactgcttggtagcttggaacaaggttactaggccaaaagaatttggaggattgggtatcttaaacctgcgtttgatgaattgggctcttagattacgctggctctggctgaaaaaaaccgatactggcagaccttgggcatcctttaaaataaatgctcatccttcagttaaggccttcttctcggcagcaatctcttcggtggtgggca

SEQ ID NO: 151709 - DNA, 692 bp, Zea Mays
ggaggtttggaattcgaattgaggcacgaaatgacatggaattgagccgatacttcacgaataggtttatataggtgaatatgagtgaagtgtgtgtttggtttgaatttaggcgaagaaaatgagatttgggcactcggctcggaaacgatcgctcgaaatggggaattgagtgaaattgaagcctggaatatcggattggcgtgaaatttggcaaatatgttactggaggtgttgtgaaggtgcctgaaaaatttgggttcaattggagcatttttggctggtttgggcatttcaccgaacacgtgtgcgaggatttagggttttagggaaatgactatttgaggtgtgaaaaccctcccgaaggagctaggaacctgcaggaatgttcaaggcacacataccacaacttggtttcacaagaattcacagagattttgaattggtacacaggggtggtgcactgcctcactgtcagagaaatagagagatagagatgacagaggaagaggagagctgctcaccgagcgagggagaagggacgagcgcagacacagggtcgccggaggacagatcgccggagaggagggatgatcgccgtcgagggggagcagtcgcagagaacagagagcacagagggagaaatgagtctctggctcggtctcgggctggaggccgttttttaaaacgcg

SEQ ID NO: 151710 - DNA, 480 bp, Zea Mays
ctcagccagcaaatcaagcatagcacttatctctgcatcactaggatccaagggcacctcaaagtggacctgccgttcactatcaggaacttccccgagcgaggcaaccaagacgctaacttcttcagcaaagggtcacactctaaggcccaaactgccgtcagtgacaggtggattcgacacaaaaagagtgaaggccttgggaggaggcaagttccaggttgagtatgccactggggcaccaacatttgataccttacctctaagaatcatctcaagccggttcaccaagtctacagagggaattcttctgttggtaacccgagtcgagtcagctaggcctcggtacagataagccgggtatgccgtgtctttcaacggctgaatattcttgaagacaaaatcagcaaccacagcctcaacagtcagacccctctccttcagcagtccaactttagctagcaaagcccctgcctcagc

SEQ ID NO: 151711 - DNA, 329 bp, Zea Mays
tggcgagcgagccagaggaggcaacgacaccggcgtcctcagagcggacgtcgttgaggaagggttgtagcgaggcggttgccgaggggagggggagaagacgaggcggcggagcgcacggagggagatggatgggagagccagccagcaggtgtgcgacgagagagagatggcgtttggaggggacggaatcagagcgagaattgataaagaattcaggtccgtggccggaggcccgtgaagtgcggagaagaggcgaaatcctagcgtcttttaactaaaggtaattcaaacgaatgaagatggacctagacacatgtataaaacac

SEQ ID NO: 151712 - DNA, 428 bp, Zea Mays
agcgccggtgccgtggggagaaggatagccaccactttcgatcctccccaggagtaactctctgaccggggcgtaccatatagaagcttcgagagatcaccaggaacgagtctgtggcagtcttgggctaggtaacctagccggttgcctggaattcgtcgtcggcgcagttgagtcgtcgtgaaatcgcccatcaccgggggcggcaccaccatcaaccgaatcactggtgagtcatatgccatcacgttcacctcgaccccgtagttgtgaatccatagcctgtcgggagtagggtgctccgtggtgcaggatcggatatcttcggtaaggtcgccgtcgcgggagcgttgttttgtcgtgctcaggtgttggagattgaagatggtgcgcctatcgtctgatttggattgtatggaggagattag

SEQ ID NO: 151713 - DNA, 438 bp, Zea Mays
ggggcatagacgtttccctaagatgggtgatcgcaaacatgtcgagtgtgccatgccaatttaagtcagtgccaacttaaaccgaccgctccgttagtagggcatagtggccaccccgagttaagtaagcgtgagcatgtcgcaccgccttaagtcattgccgacttaagtcgattgctccgttagtagggcatagtggtcaccccgagtttagtaagcatgagcatgtcgcaccgccttaagtcattgccgacttaagccgattgctccgttagtagggcatagtggtcaccccgagtttagtaagcgtgagcatgtcacaccgtcttaagtcattgccgacttaagccgattgctccattagtagggtatagtggtcaccccgagttaagtaagtatgccaattgacagcgaacaatttgagtgcctttgaagtct

SEQ ID NO: 151714 - DNA, 534 bp, Zea Mays
caatttttctggtaggagtaggattcaaggttcttgttgtttctagtacaacatctagcacgttcgccatccttctccttttaggagttgcggtggagcctttttgcatcttcggcactattgcctctgttgaagggcttaaaacttctagcattcttggcatctctacaatttttggccctttagttttatctttgtcagccttcagttcaactagcttaaccaaaggtaccttcggcgttgtagccgactcttcagtcctctgcacgggaggaacggtttcctttgtcttggcagatgaggaggtcccttcgccaagttcaagtatcacagccggttcgatgtagcgtggccggtgagttaggaccttcaatttttttccctttcggcacaggctcgtctggggtggccaaagcagcagctttcctctttttcccctatcctcgtagcggatagcggtagtcagggtaaacgaagccaatggcatcaaaaactctgttcaatctcttctttccccgagttccgaaggctgtg

SEQ ID NO: 151715 - DNA, 604 bp, Zea Mays
gtcaggacatggttgcaggctgacagacccagagtcttttggaagccctgacagtttagtgggccaaacaaacaactgagtaaatataatcttctctatgactctatatatgacagacaagttgcattggtttcctttccacttagagccaccgacatgagttcccttctccttcccactagagcctcgctttaatttggaatgacgcacagtttacccagattcctgctgcataaatcgaactaattaagttctaatctccttcctacgaaacataattccttttccctgtcgaataatcagagtcccttcccttatcgaatagtctgcaaagcaagtggatcccaggagcttctgcagatgataaagcccgacatccacatgggcaactctctctgagtctaaaatccctccccaataaataaagcgaaatattccctcaaattctctggacgaccagcatacagctcattgtatgcattgcgcgtatgcagctgcgacagaggccgcaacaactcagctttctttacgcgatccgattgctacttcccaaagagaagccgagagagtaaacactcaccagcctggcagtgcttaattcagc

SEQ ID NO: 151716 - DNA, 460 bp, Zea Mays
atcaacgcgactaatcatgattagttagacgacttgagagcgggctaggagcggtgtgtcatgccattgtgctccctggcgatctgacacagctcgtgggagatgatgcccgagacttatttgatgacgatgttgttcattgatcccaacatgatttggtgtacgaccaagtgtctgacatgatgtgaccgaagaggacgtaccgattgagagcaagcaaaacctgatcatgctagcaggtgcaattgtcggacgaggatgaccatcaccaacgattggatgtcaggaacgactgtctagacatggaggatggcggcagtggcagccttgtagtctacaacggggtcgtccagtgatgggggctgacaatcgtggggggatgtactctgccagatggcgacaaccttctgcttgagggcagcgacggtggccttctcttgcttaagggtggctgtttgga

SEQ ID NO: 151717 - DNA, 277 bp, Zea Mays
caacattttcttttatttctttactgcggtactctgaattgaagtcaccaaataataccaaagcctgcaacactgaggatgtacattcaaccgttctgccaatagatgaattgagtgacttaattagtttgcaaggcaaatcgacatggcagcatgaaattcagatttagaagagtggccgttgttcttacgggtaatcggcgacaatatttcgaaaactctccgcaggattcagaatctaggatgccaaatcaaacaaagtcagtctacatggatc

SEQ ID NO: 151718 - DNA, 581 bp, Zea Mays
cgatcctggatccagggaccagattagatcccaacccaccaatacacccgagccgcggatcacgagatcgacggccatcatcctacacctgagttgggctgctatgatccagttgtggccgtccatttgcgaaccaacggatcagataccccaagcccaaaccggtaagagttatgcgatccggaacgtcccttcatgatccgatggtttaggttgcatcacgcgcagagatacgattcctcctaatctggcctgcccattacaagaacagcggacaagagccatcacccatactttattcctcagtcccaattctccaccgtcgatccaaggaccaacgaccactactcatgtcccccaaccaagctctcccaacgacggagcacagggcctgtacggcggcggccatggctagcaaacagcgccgatgaacccagttggcccaaaacaccgatccgaatagttctaggcatagaggaagataccgcaaactaagtggtggggttctcaccgttgcgtgtctcgacgaccagtttggccatggtggagcgcgaatcccctgcaatggcgagcaattgccg

SEQ ID NO: 151719 - DNA, 695 bp, Zea Mays
caaagatgaagatggtataatagacaacaactttgctgcagaacctcggataggttgccatggaaatttgagagaaaatcaagctcaaacttgctctgttagtcgactgaataccatttcccatggtacagtgtctgcaccggatcagaccgccagcgcggctgtcctcaccgccgacgaccgatcttcaccgtgattcgcgccaccgccgttgtgattcacgtcgacgatgacccgataaggccgccaagtaaaagccatgcacctggggataactccggtgactcaccgtcgtaccccttgtgctccgcggctgtggcagataagttcaccgacgagagccgtcgtccgaccgtgcgccgcgtgtcttaaccgcgccaccgcatcaccgcgaccccctccaactgtctatcgatcaccggagttactgccacgccataggacacgtattcaccgcgccaggcttcttcctcatctccggccgccaccgcgccatcgtcaattcaagcgccaccgctcgctccgcctataaattgagcccccggccagctgcgctaggtcgtaccaaagccatagccaccactcccgtctctgattagcccccatagccagagaatcgctcacttcccccaattcagtttccgccaccgtgaaacgagcctcaccgtcgccagccatactccggtcagttcccg

SEQ ID NO: 151720 - DNA, 455 bp, Zea Mays
ctctttgcgtatttgtgtctagaatagataggtttaacaggaaaaagtgttagcgtctagtggctaggggaccatctgattttgggggcctcgtgcggccgcaccctcggcacccccacaggtacggccctggtcaacatactgccatggtcaccacataggttggcaagtggggaggcaactggaggtcaatacaaggcgatgaagctgttagcaagcaatcataagtggaaagggatgaacaagacaacagaaacagacgcgacagaagagaaggcacaagcgcagccgaggagatcaaagtgtgccagcccctggccaaatataaatgtggttgtgccacgttgggccatgtaatatgggcctcaatactgatacacttgtgtgaccgcgtccatatataaatggcgtgtatctgtacaggagagggtatcgaagaacaaaaataacaattc

SEQ ID NO: 151721 - DNA, 732 bp, Zea Mays
atagaagtaaagtgcgtccttttggagagacatggacaaacaatgcaggatcatgttcactagaagaaaaaccagcaactgtgatgacagagataaatcgctcaaaccaagcacgaggagcttgtttcagcccatacaatgcgcgacggagacgacaaacatgccctgagggagtatcaacctccggaggaggatgcatataaacttcttcatgtagatcaccattgagaaaagcattcttgatatccatctgggatatagtccaagaagatgaggctgcaactgcaatcaaggttcgaacagtagtcatatgcgcaacatgtgcaaaagtctcatcataatcaggtccttgagtctgttgaaaaccccgagccacaagacgagctttatatctctcaatgaaaacatctgatttggtcttaactttgaagacccatttacatgtgataggaacaacatgcgagggtaaaggaacgatatcccatgtaccagtgcgttcaagagcagccaattcatcaatcatagctagctgccactcgagaagcccagaagcttcctgatatgtagtgggttcaacaattgccacaccagctcgtggaaaaccatagcgatctggaggttcaatggtaccacggtcacgaagacgatatccctgattaaaaacatcattagactcattattgtcagtacatgatcagtatcaggaccagccgtaggaatagagcgggaacg

SEQ ID NO: 151722 - DNA, 374 bp, Zea Mays
ctcatgctcaaccattggccgatcggccttggcctactgcagcccgacgcctataccggtatcttctctctcgctcactctctctttatgccatgtggggtccgtttgtaaggtcttcttctcccaacaccagaagttggacgctcgctcgtacgtctctatgtgccgtcggttctgttgccaccacgttgctgtcagcacagctcttggtgttgcgcctcctccccttcccgccactcgcatgctaagggtactgacgcgcactactgttgtcaccggaaactgttcgtctcctaataaaacgtcgacgccatcaatagacagtaacgtcgctggatctgtgtataaccttcccagcatcgccttggctcccc

SEQ ID NO: 151723 - DNA, 1180 bp, Zea Mays
acggcacctaagagactgacaatacgggagggacgtgtttgtcgcgagttgcttggccaaactctcaggcaaagggagatgagtgggtgtgttgttcggtggagaaaaaacaaatgaaactcgaggacgagtctgagcctgagttggtcattaatttcattagatgactttgtatctttagttgacttgacttggcaacgggacttggtatatagaagtcagatctagaactccttgaggctctccacccaaacaaccacagcttgctggcaagcctctgaatccatgcatccttcatcaccttccattctgcacttacagcagcagcagcagccgccgccacagcttgctgcgcttgttgtgcgacctcagctcgctccatggaccccttctgcttcagcttgcaggtcagtcggcatattactgatctctgctctccactgcaagaagaattttgctagaaagaaatgcatagttgttagctcgtttcttactgttctgtttatattttccctccctttgttttctagataagcggatgtatgtcagttgcgtcatcatttatcactgtccaatgtccatagacatcacaacaagcactcgaagatttgggactgttccaacaaggtatgttctggtctttccatggctttgtagcttctataggcgtataccatatattaccatctcagtaaaagacatttcagcttcctggcccaactcagatgccctgcaggttcccaaaactcatcaaactctgaccatggacattatattgttatttagctatttaggctggtcatcatcatcctgtcacttgttttgaaaagcatgggttcacgatactaaaatatttaatgccatttttttttagcaccgagctgttcaaaacgacaagcacttgagaagagttctccctgcatttatgaatacttgtgaaactctgaccatgaatgtaaccttagatattaaatatacatgatggaatgttcaaacttttgtcttctccaaaaatttgagtagacgtttcatttgtggaacctattggtaaaaattcgagttttgaaggccaagctttcgagagcagggttcccaatttcgggcagaaatctccgaaattttcttgagttttggtgggtccgaaatatatatatttccgaaattggcattttaatatgaa

SEQ ID NO: 151724 - DNA, 983 bp, Zea Mays
gtccgctaagatcagacggccaacagccttgcccccaatctccggccgacccgacggcctcaccgccagaccccacggcggaggccattgccggcgatagcgttcccgtgacccaagaccctcactcgccgaccgactagcgcaaatcgaatcggggaacatagcgaatctaaagaagtaattctcaccgagatcggagcagtgggattccctgcccacggtgagccgcggccgcgcggcggagttcacaccacggcgacgaaattcgagggctccggccgccaatcctccgcagggagctccccggtccaatccctgacgcacgacgagaacggctccgcgtaacggcaggactcctcggctataagctaaggccacggcgcgagcaggtcctctgcgcccaaccagcggaggaagaagggggtcggggacgccgagaccggccgtgtggcataggcaggaagttctccacgcagacgaacggcgcccaaacaccacgacctatcgcagagaccccgacgggggcgaatccgcggaatccccatggcagctttggattttcacccaaggttcatggcggtttgagctgttcaaagaagaacaccgaggtatgcttatatatcctgggcgcaaccaaatcccaacaaacccagccgatcccgcagagtccgaccccgggacttccggctgaggatgccccagtctggcggcggatatcgcgcggcggcgaacagccaacggacttctgtgccatgggaaggagaaagatggctgacaaagcggacccacatgtaagcgccacaaacgaaaaagaaaaggggagagcgtggagtgggctggtgcgggtgagaactaagtgggccggcgcgaggattgggcccaacacagatttgttttctttcttttttttctgctttctattttccaaattcatttgaaattaccatttcgaatttgaattcttcaaatttatttaaaatgca

SEQ ID NO: 151725 - DNA, 1336 bp, Zea Mays
tgtcaagtcttcatggaaacatttaaaatgtatatgaatgtatgtaaaatttgaatatggtacaaatttaattccaagcaagagcaagttgtgtggctagtgcatcacgaaacatgtccatagttggtgcattaggcatagtcgtaaagccatcgaagcctgttgcaaatttgttatatctttctgggatcgttggaacataatccggatcacgatcaaattgagcgaagccaagtcttctatcatatgctctcgtatgaaattatgaaggaccatcgtagcaacaacaatcattttttgcttgtacatggagtacggaggcatgttgtataaaatttgccacttcatttttagtactctgaatgatctctcaatgacattacgtatggacgaatgaacacgattgaatttttctttaggagttcttggttccatacctctatgccattcaggcatgtgatatctttcacctttgtatggtgctaagtaaccaggacggttaggatatcctgcattgacaacatagtactttcctacaagcgaaaaggaaacaagttcttataattgtatattgatattgcaaattaaggaaaacatttaagacacattacctcttagtgggtgtggaaagaatttttcatcaacttttattgcactgtataagacacttgtgtcatgcatagatcctggctgccccgtcgacacataagtaaagtgcatgtcgaagtcacatacatccaaaacattttgcgtgggttttcctgattttccaatatatcttacttggtcatctggtggaagacatacccgaatatgcgtaccatcaagtgcaccaatagaatccttaaagtgtgggtaagcctttctgtcgtctcttattctcctgtgaacttctagaaaatttgcattttttggcattaggaaatcttttcccatagccattatagcattgaggacctcttcaaattttctactaattggttcacctgaatgcttgaaccgattttgacttcttctattagactcattgccaccacagatgaataagaaaatggctatgctctcatatgtgctcacatgcaacgaagcttgtaagccatacctttgcaccaatatatcatggaggtcgataaatatctgtgtgcacatacgaagctgtgaatgacattcactcggagtgtttagtgtctcgttcaaccatcccattccactcaatgttgatgttctagttggattcttgtcgacgtacatgtcaatataagttgtaggaatctgtgttcctgccaaacaaatatgcataaaaacctcggtatcctcgtcagtatccgtagagctg

SEQ ID NO: 151726 - DNA, 563 bp, Zea Mays
tcgcaacatcctgaggttggcagggtaacttggctcatggtggggcattcatttagttgtgattgtgacaagtgactggcgtgtgctcaggcgggtgcacgaggtcttgctggagtgactttcttcactgaggtatcacttcaaggtctgcaacccgacactttaatatagcagctcggcgtgcacgacaaggctgtctaagggcagagggtgtaggtgtggcttgctaggatgcacaaatgccaaggcggctagaggcaggattacaatttatttacgcatgtgttttgccacaggtggttgtgggctccctctgtctagtgtgggtgggcattagacattttcaagaatttaccacggtgaaagaaaagcttagtctataatttagaagaatatcgaggaataacccatagaggcattggtttgcatagtttggattaggctaacatagctatcaataattttgaacaagttttattccatagttgaaaattgggatgttacaccaagccaggatccaccaccactacgatatgtctctatatcccctctgttctacatgt

SEQ ID NO: 151727 - DNA, 1694 bp, Zea Mays
ttccatattttcattaatcgctaaatgtctatttagcctatttaaaggctacacgatggccaaccatgtccattttaacttccatgcattatgtttaattgttgtttattgcattttatgattttttattattatttaaattgctaaatgatggttgatatattatatactatttagatgaacattggtaagtgtgaatttaaagttattaaaacagtttattgtaaaatttaatataatggagagataaaggccaagaatacattgctagccctaattttaggttgattctaactctgcttttgacctgattgaacttatgtggatgtgcatctattcatagtactttgcattttagttggacacatctaagtaaaaagaatgtgcaaaggttatgctttgttaatgaaagattgagcaatttaattaattaaacatgatagatcatgagttccttagtaataaaaaatatacatgacataaataaatgtaatatacattggcttattcaattgatgcagtcatttaaatatgtttaatattggctacaaaagtttttttctgaattagagtagtgtatttggagcttatgtggctatcatgcttccaatccgacctctagttacactaattaataaatgtatcaacgttatagaaggactaataatacatattcggctaacttagctcgatagaacaactattgcaaaggaacactatacatggataagacaaagacagagaaactactaatatagatgaggtgaaataacttgttaacacttgaggaaaaaacctaggtgatgcactcattgtagttgtaggttaagtgcatgttggacaacactgtttttaaaaccacagtttgtcgaatgccatgacacaactatgatatattttacatcagtctaatccagcactctttggagacacggtattttggttgcagcgtaggaggggaggagaaatggcaagattatggccgagcaccagcaagaaactttggtccagatcaaagttttttagatccaaaaatatcgtggtattaataaaattatggtttgaaatacatagttttagatgtgctcccaaacaccttttggcctagaacaccatgatatgctcaaatatcataatattatattgagactaggaaaatactatattcccaaacaggccctaaaggtacattcaattgagctgtggcttttaatgtgagttgtggattataaataagtttatatgagatatgcttagtgagaaggtgaaagtcatttgattcaacaaccgtggttttcgaataaactatgctcagtgtaactcacttgcgaatgaacccaacatgtgatccacttccttcctctcgcttatgagaagacattgtttgttagactcacacattcatcttcttcctctcatcgtactaaggcagatacctcaccaaaactgaggccaccactagtcatgctcgcgtcagccatcggataacacccacacatcggtcatgtgccattgtggtggccaaggttgtgcctgaatgttggccgcgcatcgccatcgtatctaggagtgatggagtgggaaggggagacatgtcctcatatgaggcgcgtcatcactggagtcgcgcccgcacagggccaactagaaagaaaaactttaagcctgcggtgaggtctaatttttacaggcgg

SEQ ID NO: 151728 - DNA, 1301 bp, Zea Mays
ctctggactgggcacatgaaaacagggaagtgcagggttatcggtgtaaagtttcccaagactcagtttacccacgtagtggactgcgggttcattacttgattctgcaggggttcatatgctaaactgtcatggcgaaggggtatgggcggctctggtccgccagatcgagaaccgacggtggtgattagatttagatcttattgaatcgatatgcactgagagctattggatctatatccaacggccaacatcctacgatcccaagatccaaccctccgatcacgatcctactaccgaggtggatctagcgaagggatacatgagttttaatccgtgtcgtcgattactgaatccatgaccagcacgccttcttctccccgaggtaggatgcggcggcgcccagcgtcccgtctgcggtggtcgccatgactggcgcatgtcgagcgacgatccaagcgccaaagcttaattcggagtagcgcgaaacgaaacgggcatgaacaggaacatactggaaagcaacttaccgatggaggagcaatggaggtctcggcccacggtgagagcgccgatcccagcggaagagggacaccggcaagcaattcactgctccccgcccgatgtacgagcctgatgaccccacagatagaaccgagcacccccgcgcacataatcgtcctcaatccaccacaaatcactcagctaacccgattctggcgtggcggcaattcttggactccccctcgctagctaccgacggtgtcgagggaagaagcttcgatccgagctgattaaataccccgaggaggtgcgccgaaccatcccctgcccgacgcccacggcgagatctgtggaatctgtttccgttggccaagtcgttgagccgcgcagattccgcgccaccggtagtggggtagaggaaagatctgtacacccgggcccacacgacagaggcaggtgagcacaaatgcacgggcggggtggaaatgaggctgacactgtgggtccccgagggcagagataggaagggaagctaggtacgcactgggtgactgattgggcgggtccacgcggaagtgaccgttgcggagagccagggcagaattcgctgggccgcgcagagggaaatcagaaatgggccgaaagcggcatctcggcccaaactgtgctttcacctttttctttttattttctattctccttctctaatctttttgattcaaattttgaattcaaatttaaatgtgaacttgcactcagatgaaaattacaaaataaacatactagtatgggtagat

SEQ ID NO: 151729 - DNA, 396 bp, Zea Mays
ctaagttgtaattgttggtattttcttttttcttgttagtatctgtactaccggtaagagtgggtacatatataaattctgaagtttgtgagtaactacatagctaatttgttgagtctctatgcttcaataatgcctggctacattacagatgagttctctccagtttctactataacatgtttaatgctggatacttataatcccataccgaatcatgcgttagattgtactttattctactataaggaaataattatagagcacagtagcacagtaaacattgttgtttctttgtttcatttttttacgaatctcttagttactcttttgtgtgtgtaagcttcctttcttttcttttactaggtttcaaaattcatggcatgctaatgtctg

SEQ ID NO: 151730 - DNA, 444 bp, Zea Mays
gaacgaccaagtcctcgccgagcaaggaaggaattcaggctgacgctgttgggccacaacgactgtgacaggacacatcatcaccaaaccatgtacgggccatgtatgcagtaccaaggggaaccacgacaacagagtctccatggtaacgagtcacgtaccagaaaaggataggacagcatgcccatgacatactcacccacactagagggtgatgcaagggcattgaccgaagatgaagccatactgaacatgaaccccaaccttaccatgaacacgttctgcgggacccatcaggtacgactacgttggcatcgagcaaactacagggactcgtacgccggacggacgagacagaacgccataccaaagtagagcagtgcacgacccatcagaaggagttgtgttgtatgcaatcacgccccaagactaacccaaggggcc

SEQ ID NO: 151731 - DNA, 321 bp, Zea Mays
aaattcttaaaacaagctaaaatagccagtaacaacccactgtaatatttatagaatttttggaaattattaaaaccctgttgtagttcaaatctaccctagaaaacctaaatgggaattaagggaagagaaataaaagatatgaataaaggttgtccctaaaaaaactttatttgctgtccacaaaaatatatcaaagcaataccaaaccaatattgttgtcctaaaggaaaacctaagtccaaagagtaataagtctatctatgcaccactagaagccccgcacaactaagaaaaaccttaagttacttctcaacttag

SEQ ID NO: 151732 - DNA, 908 bp, Zea Mays
gcaagaaccttgggtcgccgagccgtgcacctggatagagggtgaggtagccgctgagaaagagaacattagtcgtcatcatcattgtacgtctataccgccgaccgagccctgatcgatagctccaagcattcaccaaagaggggtcacaagaatgccaatgctaatgcctcaccctaaatcctaatccacagaaggatccatctcctaggtgtcggagtgaccggaagagtgacatcctaatggtggtactggatctgcccccttttctacaggacagcggtgggaggcgacgtcagtaaggaccagatccatctccactactgcagggagaaggtatgaactcctattcccctctgcggtcgtgttttatgtgcactgatccaagatggattagttccctgttatcttctaaagtaatctcggagttctaagtatacacagttagatccctaatttctatcagatatatgttgctctgtttatctttatacactttcctccttgatagcctcttttcgggcaaaccatgtgaagcaacttggcttttattcagtcttgtagcatcaacttttgatgttcacactttttggtcatgcagtttctctttctacctggttgattacccgcaccattccatcctgaatcatcgcgtgcgttgacttttctgtacacgaggaacgattactgcatgagtggatgcaaaataagtcgttttgaggccatccacctgcatctgtatatacgccagatatggtcgtacctggccggccaggctcgcgtgggactggctgtgcgggcgcagtaaaccaatcaggcactttgtgttcggggtcacttggctaatgtagctaaaaactgcagattttacggcaaacttcatgaggtgtcagtgcttaactgcttaa

SEQ ID NO: 151733 - DNA, 621 bp, Zea Mays
caaaaacggcgtttgaacgagaaatagtgccataggaggtttgaaattcgaattgaggtatgaaatgatggggaattgagccgatacttcacgaataggtttatatgggtaatattagtgaagtgtgcgcttggtttgattttaggcgaagaaaacagaatttgggcacttggctcggaaacgatcgctcgaaatagggaaatgtgtgaaattgaagcctggtatatcggattggtgtgaaatttggtgaatatgttactgaaggtgttgtgaaggtgcctgaaaagtttgggttcaatcagagcaattttgagtggtttgggcatttcgctgagcatgtgatgtgcagggaattagggtttcggggaaatgatcaattaaggctgtgaaaccctccctaaggagctaggaacctgtaggggatacaatggagcactagggcacacaaccatgcataggattcacaagatttacacaagaatttgaatcgagcacaagaggtgggcaggagctccattcaactgagagacagaggaaagagaagggagagggaagatgaagagctcaccagagaggagtgaagagctcagccgagggagatcactagaggatcgccggagg

SEQ ID NO: 151734 - DNA, 411 bp, Zea Mays
attagttccaatagccggatctttggagatgtttaggtaggccgacacaaggacctcatcctcagcctgactgtagtttgcaagtcttcttgttactgtcttcttaacaattttgtttcgttgagttggaggagtagtattgttttcagatgcctgcaagttcacatcaatgttgcaagcgttctggaaggttgcatcatcatcaaattgagttaaatcaattccttcggtgtaaacaaaaggttggtggccatgagaaggttctccctcagtgtactggtccattttacgactgcgttaaaacaaacagcaaacatataccaatttagtactgaagtgtactgaagtgatagtaataagaggcaatgcagcagcactggaatactagtggagggagttcagacatcgttc

SEQ ID NO: 151735 - DNA, 383 bp, Zea Mays
aggcagcggcggaggaagcgcagcgggcgcgaggacaggcggtgcgcggcgaggtgcgggcagggcggtggtatggacggggtggaagcgagcggaagtggaagcgcgtcccgtagcttctccgtgctagctgtaacggacgcgcgctgttgtctgtgcatgggcgccgccctccccgctggatctgcagccaccccactccccgtcgcgccgattccatgagaggtctctcgctcgatctctttctcactgctttgagttgctcggatttatctcgtgttttctgggttgagttgcccgctggatcttgagttgcccggatttatcctcgcccaggggtgcgtctccgagcagcacccagacacgccgtaccagcagatggc

SEQ ID NO: 151736 - DNA, 522 bp, Zea Mays
cggcggtgttctataggataggcgtgcgttccggtgatgggcttcggccaaactccaattgccgcatcaagggcaataggagatcaaggattaactaaaacagggaacaatttgagagttactgaccagaggaatgctggctacaaagaagttcttcacggcggagcaagaacgaagaagagagggaattgggactgcgcaagttctctggcgaaatggagttgattgcttaagcactggggtgcgcaatggagagaagaagcggagtccgagctcaatttataggccgtcgaccggagttggagaagaagcgcggactacggatgcgctggcaagctttccgcgcggcggattccggtgagggcacgggggtcgccgtttaaccggagttctccacctcggtaaccttttgccacgacgccgaggatatttaccgcagccaccgacgaccagtccgagccacggcggcatccttatcgccggcgagactgatccttatccacggcgtgatttttctgaaac

SEQ ID NO: 151737 - DNA, 577 bp, Zea Mays
tgcaagggcaagtgcaagtacacctccatcaagcacaagtccaagggaaggttctacaaggaggcgctcaagaagaagtacctctggaaggccaaagttaaggagtgtgacttccttgccttccttagcaaccttgatcatgactccgatgactcaacttcttccttgagtgatgaggagcttgagaggcgggtcaaggacaagctgaacagactctacttcaacgtgacaccgtgggaagcctctgcaccatggcacttggtgaggacacggtgggcaacggcgacaaggacatcgacgatgactccaccttcgaggtgtcactttccaccgatgatctcgctggaggtagatgagctgaaggctgctttggctagtcaagacaagttgcttaggcttgctaatcgagagagaaaataatacaagggcaagtacgagagcacccttctagatgagtgcgacaagactaatgtgatgtccgatgagactaatgtgatgagcgcgctcttcacatgtcaaacaacaccacattgcagactaagtacaccacccttctagatgagtgcgatgagtttca

SEQ ID NO: 151738 - DNA, 634 bp, Zea Mays
aaagtgtaattgttttaagcaatgtgatgggattcgtaattttagaggagatatttattgatgtgacgagtagtttagagaatgctagtttgtggggaggatgtatcgttaagacataagtgtcgaagttcatttatattagtggtcgcgccacattgattgaagtgtctcgagtgcacgccaccatatggttgtatacgagacaaggttatgcacatgatgagtttagtaaaaaaatccatcggtgtctctagtgttaagttgagatttatttgcgcatggaaagtaacattgtgtttaatacttagaactcttagtcgttagtagaaattgtttgggcttatgtagagatgtgatgacatgccgtaagtagtcatcacttcctctataattataagtcgagtctatacgcgttaggcgttcctaaagttgtgcttcgctaataagtgtatgattgtgtttatgacttgaatagatgtcttcgagtgaactgataggttcctaaggcaaatatgtgtaaggtgtttatagtaacactttatcccgaaaggtgttaagcctgcgcaaaaataagagataagtgtacttgttttatgcatgtgatcgatgattgggatagtcgaggcgaatgagg

SEQ ID NO: 151739 - DNA, 657 bp, Zea Mays
ccccccttaaaaataatctcgtcctcgagatttaggaaggactagggaaaagatggggaaaatctatgcgaagctcttcttctctttcccaagtagcttcatcttcaccatggtgactccattgtaccttgcacatctttatcaccttatttcttgtaactcgagtcaaagtgtccaaaatcttgatgggatactctgcataagtcaggtcatcttgaacactcagatcttccattggcagttgctcctcaggtaccctgaggcacttcttcagctgagacacatggaacacatcatgtacatctgacaggtgatcgggtaactccagttgatatgcaacttctcccactcgctttaagatcaagaaaggtccaatgaagcgaggggacaactttcctttaactttaaatctcctcataccccggatcggtgacaccttcagatacacgtgatcaccctccttaaactccagtagtcttctcctattatcagcatagctcttttgtcttgattgtgcaattctcaaattctcccttatcattcgaacttgttcctctgcctcttgaataagttcaggcccaaagaactgtctttctccagtttgatcccaatacagtggtgtcctgcattttctaccatatagagcttcaaatggtg

SEQ ID NO: 151740 - DNA, 313 bp, Zea Mays
tgaagatcgcactgaagaggttaaagtgttaacttatattgattgtcaaacttccacggaatgatgtcctactaactgcaacatgggttattaaggtctgtagtttcaaagtatgatatggcgtcataattacttgaactgtgataactgcagttgactggacattgtttggttattatggtctgtaggatcataggtatgttttcacttggcatctgtgataactgcagttgacctgtcaatattttgttagaaagaactgtagggtcttatgtgataatttctcacctttaagctttgggttcgccttgat

SEQ ID NO: 151741 - DNA, 740 bp, Zea Mays
attccactgccttagttgaagtcagagaagcgatgggtttgtactctatccatttagtgaatttgtcaatagcaaccagtacgtgagtgtatcctccctgagctttcttaaagggtccaatcatgtccagcccccaacacgcgaatggccaggttacgggtatggtttgtagttgctgtgctggtaaatgctgctgctttgataagtattggcaagcttcacacctctggactaactcggctgcatcactttttgttgtcagccagtagaaaccagatctgaagactttcccaaccagagtcctggatgctgcgtgtatctcacactgtccagcgtggatctcatctagcagttgcttcccagtagccgaaagaatgcacttcatgaggactcctgctgcgccccttctgtatagtgcctccccaatgagggtgtagtgagctgactgcattgcgatgcgttctgctgcagctttgtcatccagttcctcttcattctttatatatcggatgattggttccctccagtcattagagtcttaccctggctggctcagaacattgcattcttctgcccgatctaaggaaatactcgggtgtggtacttcttggacgaaaactccaggtgggacctgagtccgactggatcctagttttgacaacgtgtctgctgccgcgttgcgatctctctccacatgatgaaattccagcccttcaaatttgtcttctagcttttggacg

SEQ ID NO: 151742 - DNA, 930 bp, Zea Mays
gctgcacgggaggggagcttggctgcgcaggagggagaggtgccgcgccggtggaggaagggttggccgccattggggatgggagcgcccgcgaggctgcggcggctgttgctcccctacatcccgcggcggctgctgcacgcgtgcccacgtggccacgccaccgatgaggaaggggaaggggcagggtctggaatggcaaagcccttaatgtattgtatagaagaaggttacatatatatagagacttaaccttgtgtgtttgatgggataagacctagtgttttgatggtgatccgagaaattgaggagtgcagcttgtggtgtcttgctggaaattcagagctttgcacgctgcacgccaagatggggaacacttaagttgtctttcttagtattttggtcatatacctagagtgtgcgtggcatgtttaattggaagtgttgggttctggtccctagggcctttgtttgtttatatttttcttctcccttaatgaaatgacacactgttctcctgcgtcgttctaaaaaaacatgtaagtatttttaaatgtggatttaataaaaacagatagatatagtagtattaatgtaataagcatgtgttcactttctgttgaatacagttcagacagaaaaattggttgtttagaaaattttcttataagtgcaagggttattggcagatgtatagaacataaaaggcatacaccgttattggcagatgtatagaacataaaaggcatacacctgatagcttgtaaagttggaaggactggtaatcacgttgtacaaccataaggctgtcaatgactcaaatcactcaagggcttactcttgcaagtgaacgtcgacgatattgccaagtttttttccaaaaccaggtactggaccagattggacagcactctccacatccaaccattc

SEQ ID NO: 151743 - DNA, 1399 bp, Zea Mays
aaagtgctagagctacatttggagaatatttttggttaaggaagaagggtcagttgccatatggaattgtgagttaacagggactgcacatggagttgtggaatgggcaacaaaactaatgcagtggttctagagtttgataaatagatgaaaaagatctttctctccctgctaggttcacttatgagtatagatgaagttgtggatgaaggatacaactaaggttctaaaggtcccacttcctactgaaaaaatccccaagtgtggactgttttgttgagtgaaaccttatctcatggctctttgatccagtgaactgcacaacaaagatggtagtggtctcacccctgccaaatatcaaactagggaccctttagtgcttatccaccagtgagttctcagttgccttctcctgtctgcaatttgagacaaaactgatattttggtggtgtgaggcagaccaaaattcattgtatctgggctgtgctgtgaacctgcgtggttgtagtgcatgggagccacctctttgagtccctgttgtgttggcaccccaggagatactctcccactgcatggttgccagatcaaggacacttgcctatgtttaaatgcctcaagtacttggttccagtgaagttcatcccagccctcgagttctagccctgggtcactgctagtacgtggtgatcctcgagtctgcaagcctatgttagctcccctcttcagttccaggtgtgcctagccttgtgttcgcgcaccaacctctaccagtggtgaccatagccactagattactcacctcaccatggccaggacattccagggagttgcacggccgcgtggtccacgttccaccttcttcaaaggtcagtgaagctcttctagttggtagttccagttctactatcgtgtgttgcttggaacatagcggcgccgtcatgggttggcgccgtaggcagtctccacatcgaactgttaagccgcaccgtcccctgttggtttcacgcacgcatcgtagagttgagaggtctctgaagctccccatctcatttgtttgaacactaccgtgcggtggtcggggaattgagttcgtcggatccagtgttccgccgccgccgtcggtagctagtggtagagtcctctcgggtcgattgagcataggcctaagttcaccatgggttggggatcatgctggggtcgtcgccgttgtctgtactgcaccacgatggccggaccggcgctaggtcgccggagtttcgcgtggcagcgtcggtgccgagaaattgtaaaagggagatagacgtggggtgtctgcgcgattgtcagtggcacaaacaaatagtggcaggagctcgggttggttaagttggagcacgagggctttagcgcaaaatggcca

SEQ ID NO: 151744 - DNA, 390 bp, Zea Mays
gggtggcgccgcgcgcctcttcggctcggtgttccgcaagcgcctcgccccgccgccggccccttctccgccgctgtcgtcgcctcctggtgagcatgagattcatctgtgctcccctccgctacctgagatcggcgtccgcaacaaccgtccgtgatttttattgggactagggtttcggacttcccgagcatgctagggtttacctgcacctacgtaaggttttgggtgattttggctgtggatgatttattggcgatacatagagttgagctcgtgatgaagctgatgtgttttgccgtggtaactcacatgaactttcctgcagaaacggaaagctttaaaaccgtggtttgcagttatgtataaaaggaaacatatcacaatgat

SEQ ID NO: 151745 - DNA, 510 bp, Zea Mays
ttggggaaacaacgaataccagatttctccatcacaatctgcatatccagcaggacacacagcgcaaatcctttagaaggtgaccatagattgttattatcaaaataacgaaatatagcttccagaactcgtcgcgttgttgttgtttccctggatattctagcaaggttatgtagacaaatccctgaccaaaaatttgggcttgttgattcttctctgtgggaaaatagtttagaagagataatatattagataaattcataaagtacaaaactttcaagtattccatatgcccgaagtttatttacattgtcaaacttaattcaccatgaacagctctaataactttccatgaaggaaccctggtcaaaatggtaacagcaggaggttcatgaccttcggctttgagcacttcatccacccactgagttcgaatatcctcaacagcagcatcattatcagcatttgcatatgggctctcataattttccagaactgcagaaacaacct

SEQ ID NO: 151746 - DNA, 444 bp, Zea Mays
gtcaagaggagccttggagcaatatcagatacacttctggcattaatccacttgtcactccaaaagtaagtgttagcaccatcaccaatttcggtgacaagcacagaagagaagaaggctttagctttgcttgggacatgaaccggaagattattccagggacgggtagggtcggtcctttgcagccatagccatctcatcctaagtgcccagcagagctcaaggaggctggaaattcccaaacctccaaagttcaagggtctacacacttttccccaagccaccatgcaatgccctcctttaacctctcttctgcctctccataagaaacctttccttatcttgtcaatttccttaatgacccacatagggaaatcaatagccatagcagtataaacacacatcccagtgagaacatgttgcactagaattcttctccctgcc

SEQ ID NO: 151747 - DNA, 281 bp, Zea Mays
ggtatatggatgatgatcaggcagggcaatcatgggtggcagcacaaggcaggcatacatgcaacgggacgagacggttgcgcatcggttagcagttatcagcaaccagctgtgtccaccatgtgcctattataatataatgcatgctcatcgtccaacagtcgtgatcaaatccaaagattccacatcttgagaaagaaaacaaaacctgatactatacttgcaatgtgacctgcacaatgatgcacatggtgggcttagatgtacgtacgtactctgat

SEQ ID NO: 151748 - DNA, 845 bp, Zea Mays
gtcggcgcgggcgggaaggccacggcgaggtgcaggcgggcgggctgctggtgaggacgacattgccggtgaggatgacttcgagctgctttgaattatggtttttaattgttgtgcaatctttgttgttgatgggtagtggcgggggtactcggttcgccataccttggctctgccgcagatctctaccaaaatcattctctggcacaaactaatcaatagccatggacatttgatgcaagttcgtttcagtagccataggtgctagatgcaagaaagaagatggacacctaattaaattgttcgttacctggacgaggccctgttcttgtgcgctactagtaacatgaattgttgaaatcaatgaacaacccatggataaagtaaaccaataatgcatatgcccatgtgatcacgacgattaggcgacttgagcaagattaggaaacaaacgatttgactcttttgtcagtgcttctattcccaaacagttagggggttgtggtgagggcgatgagatcacgacattatgctgtaggctactgcttgctcgtgctatgtgccttaggcattagccgcctgcaggctactgcttgctcgccttctggctcctgcaattctccgctcgtcagcttgtagttttctagttttcaacccaaggcgtcagcctacaactcgccatttcagcagttcttgacttcctaattctatatatcatggccccacgatatgactctactaggaaacctgaaagtctttttttcgttgttgattttttaatttattggttatcatttatttgagatgagtttttaaagcacaatggatttctgaagattattaat

SEQ ID NO: 151749 - DNA, 889 bp, Zea Mays
tacgtggtagtcgaggctggccacggtcagggcgggtatccggctgagcgccaactccggcgacgaattgcaagcgctccgccccacaaattcttgattctagcacaccaactccatccacacggcccagcgaacaaccgaggcaactcatcgagttccaagctgccgtggtccggtgatcccccaagttctccccgaggccgcacacgaccggagcagctcgcggcagtctaggggcatcgggaacctggagatttggcgaggcagcagagatgccgcggacgcgaggagggaccagagagggggtgcgccgagcagaagggatggtggcggcatctagcggtcctgatggccaagcactagtcacaggagaggcgagcgcgcttattcttataccccgcgaccaggtccgattaagggccatcgttggcgaggatttcgggcgttcggtatgatccacactggccaacgaaccgcgcgtagctactatgacccggccaattcgtggaggtttgttacggacagaatccagtttgcggcagagtaggagctccagtcgcgttggttggcgacgagggagatagagctgacctggtggccccacctggcagtgacatagtgaaaaagaaaaagaaaagggggcgcaagtgggccggcggggtgcttttcagcccagcaggcgcagtgaaggcgcgaaaaggggaagatgggccagataggatggctgtcggcccaaccagggttttgatctttctcctttttattttctagtttcttttctcttcttcttatttccaaactctaacttccatttagggtttgatccaacctttagaattattatctcattgttattatccttattattttatttaatgtgcaaacatat

SEQ ID NO: 151750 - DNA, 349 bp, Zea Mays
atgtcgtctcatggcaaatcttctggtcagagaactgacttgggagttagtaatgaggatttaaatccaatctctgaagatcctacaaatgaggatgaaaaattccatgaaagtgaagatgatcttttaagctctcaagatctggaggaatttgccaaagatgatgagggaatcatcccttcctctcaagggaaaaacaacaagtctcctttgggtaaccaaactgaaggttctggtaaaatggagtctgaaaaacaagctgtgggtatggaagtggatcatgctgaaggtataagaaggagcagcagacttgaagctaacgatgacatgaagattgtagataaagcga

SEQ ID NO: 151751 - DNA, 1078 bp, Zea Mays
ccgcgcttctagtgtcgtacaacttctacggcgaggccctgctggacgccggctgggtcggggaccatctcaggggtctccggcttctggtgatggagaactgcgagctgacgggtcagataccaacgtggctgtcgaagctgcaggacctcagtatcttgaatctcggcgataaccgcctcaccggcccgatcccgcgctggatcggcggcatgaagaagctctactacctggacgtgtccggcaatctgctgtccggtgggattccgccgtcgctggcggagttgccgcttctcacgtcggagcaggccatggcaaacttcagcacaggccacatgccactcaccttcaccctgacgcccaacaacggagcggcgagcaggcaaggccgcgggtactaccagatgtccggcgtcgccacgacgctcaacttcagcaacaactacctcaccggcacgataccgcgcgagatcgggcggctggtgactctgcaggtgcttaacgtcggcaacaacaacctctccggcggaatcccgccggagctctgcagccttaccaagctgcagtttctgatcctgcgccggaaccgtctgacggggccaatcccgccggcgctcaaccggctcaacttcctcgccgtcttcagcgtctcgtacaacgatctggaggggccgattccgacgggcggccagttcgacgcgttcccgccggggagctttcgggagaaccccaagctctgcggcaaggtgatcgccgtcccgtgtacgaagcccaatgccggaggcgtgtcggcttcgtccaaactagttagcaaaaggactctcgtgaccatcgtccttgcagtttgctctggagtggtcgccatcgtcgtcttggcaggatgcatggtgatcgccgtcaggagggtgaaaccgaaggggtcagtcgacgacgccggcaagtttgcggaggcgtccatgttcgactcgacgacagacttatacggcgacgactccaaggacacggtcctgttcatgtcggaggccggcggcgacgcggcgaggcatgtcacgttctcggacatcctcatggcgaccaa

SEQ ID NO: 151752 - DNA, 287 bp, Zea Mays
atgggtccccacggacagtcccgtcagctgtccccgacgtggacgagcccacttcgaaggacctcatcgatggagaccgcgtcttcgccctacaggctctaaacaaataccaagcctaaacaaaagcatgacgcgaccacacagtcatcccgagggaattcagcgaaggagacctcgtactcgtccggacagctcggacagagtcccggggcaagctggagcccaagtgggagggccctttcatcgtcaagacaaaggcgtcccccagcgcgtacaggctcgcaacg

SEQ ID NO: 151753 - DNA, 419 bp, Zea Mays
ctggtctcttgatgcatgagaagggtgggatatagaaagaaccttgtggttctatgacaggccagcacagatgtccatcattcctggaaagcaatcctgattaccagagtacaattgcactgtaaccttctgcatttctactccagtagccttgaaatataatggattctatgttgtcctaagtccaaccattctgagtttcaccaagtttctggactaaactaaaaacatgtaccacattagaggtaaattataaaaatacatttcataatttatctaacgaagatcatttgatatcgtaaatgtgattgctctttactataagatttgttaaacttagaatggaaaatccactgtggttttgtacaggatatgcactagacattctcagcttgctaggtatgtaacccttatgtttc

SEQ ID NO: 151754 - DNA, 391 bp, Zea Mays
atgaaaggcaccgacgaagacaccagacgcgattcccgatgaggtgtcggtgaaaatgcaggcaaagacgccagacgcgactcgtgacgacgtggtaagatgtcctaaggcatggcgcaatcgcggtgaatgtcgtacatcccggtgacagccgctcaaccatgtcgccggcgcaagtggatgagcgacagagcgcaacagtgcccctaagttcatccacgacaagatcttttcaccccgcgaagttatccgtgtgctactaggcgtgaatcgtagcgccggcgcgaattcgagcgtggggtttccagcagcgaggtgcactgcacctgagatcttattcagttcactgttgaaagtgcattaatcccttttgtgagttttggtgatttgg

SEQ ID NO: 151755 - DNA, 442 bp, Zea Mays
cctccgtacgttgggtccaatcttatgggactttgacgacctttgtatggcattctggcgtgggggtcggcgggtcttttggaagggacttgggtcaccacgcaatgacatccatgaaccagccactcgttcactacagatggcagaccctcagatgatggagcaactattgcagtcatttgaatcagtgtttcaagaaccacaaggacttcctccagcccgccactgtgatcacaggattcacctaaaaacagggacacagtcagtggctgttagaccatacaggtatccacaactgcagaaagatgaattggaacgacagtgcacaactatgctcacacaagggattattcgacccagcacatctgcattttctgctcctgtccttttggtaagaaaagcagacaattcttggcgcttttgtatagattatagagctttg

SEQ ID NO: 151756 - DNA, 463 bp, Zea Mays
caacccaaatgaggctcttttgagcccatcttcttcaaacatttttgttgttctttggagcttccctacgacttagacaaacatagttaatacataatataattgattaagtgtgagaaactcacctctttcatagattttcaccagggttctgaattggtccaaaccaagtccaaaatgcactctttactacaaaagagattagagatcaagtgtaagtgctagaaacattataatggacctatgcaacatgtctaagagtgcaaacctcataattttaccattttgctccaaattgcattttcaggctcctatttcaactctttaggacttgaaaccttcaaattgccttcatgtggacttgtgctcatactcatatgaaactagttatttcatgatgatgtgttggacacttaatcatcaaaataggtagaaatgcccttatagcacatttcccttccaa

SEQ ID NO: 151757 - DNA, 446 bp, Zea Mays
actaagtttgttacattctttcgactccagtcatgaattcgtgtagaagatgacacgcggatggttccaacttgtactgtacaggatgttttgccaacaggggcagaaattaagatgctacagcttgcgatctgaatcgaaggggaaggtgcaggaatgaaagtgcgatctcaatggaactggctgagcatctcagtcggtacaagtacaacatctgaagctgttttggattttggaactcggaaagggtgattttcttcccggttcttaccggacatcgatgaggcggccggtttgccagagcaattgcagcatcgttgcatacgctcagatcgcagttcgtcggctcctattcctccgttcgtgctttcagccaagccgttactgagaacaactcaggggacctgcgtcctctttccgagcaccctctgcgtcctggcggctat

SEQ ID NO: 151758 - DNA, 530 bp, Zea Mays
ataaaaccgaatgcagtaatagcagtaagtaatgtgccagtggaactgttgcatctccgcaagcaaggatgggaacgggcatgaatgttgtcgtcgccaagaagatagtaacaatgtggttaaagaagaactgagtcatccataccatactcatgttagggcgggggaggggcacgaagaagacaacggtggatgtgcgcacgaagaagaaagcaacggaataaccctaacgaaggaaaatcaactgatctaactaagcgtgatgaatgagattggttacctgtgagaagcgacgacgcggtgcagagagggaggccgtggagcgaggactgtagtcgccgtcgttgtcgccgaccagcgccgcctcgtccccacgaagacgacacaatactgggtggaggtacaggccaatcagggggcgaagccacgggagggagagtgggagcatgccggcgagtctcctccgccgcatctggatgttggcgattgaacccctcctacgccgccgacatggaggggcagactcttcg

SEQ ID NO: 151759 - DNA, 379 bp, Zea Mays
gctgataggtcaatgctcacggcatattttgaggcgaataggctacacgaggaggctcgtggcatcctatatcgtgacttccctgagtggtacacttggcagagtggtaagggcaaagtatggcaacggaggaaacgagatacaggtggacaagttggtagaatagtctctgctcatccggccgagggggagcgctactatcttcgtgttctcctaaaccacgtgaccggcgccacctcctatgtggatcttaggacagtagatggtctcacgctaccgacttttcacgaggcagcagagagaaggggactgcttgagtcggacaacacactggatgagtgtctaactgaacgtgctcttttccagatgccatcggcgc

SEQ ID NO: 151760 - DNA, 391 bp, Zea Mays
accaaaggttacagaaaacccgaaagaaacagccaggttttaggcaactaagaagcctaaaaacctagcctaaaactacctatttacaccactagaaacagagggatacacgaccttaacccacacatagcattcatctgctccgacccaggagccatagcaagcaggtaggatatcccttttgctccaaccatactccacctctgtaattcctcatccaccactgccgaaacaacatttaaatttggggacactccatcaaacacacttatttcggtgagtccaaattgaccaagcacagaggatgatgacagagttcaactcttttctaatctgaccctccactcggctatttactgtttcccaccagtcatcaaaggaaagcctgccc

SEQ ID NO: 151761 - DNA, 381 bp, Zea Mays
ggtggtttcagtactggtggtgttgtcaagaatctttttagtgcatctagagcttcttgtgcttctgaggtccattgaaacttatccaccttcttgagcagtttctaaaacggcaaacctttctctcccagcctggatatgaatctgcttagagctgccatacagccagtgagtcgctgaaccttcttttgtgatcggggggcttccatcttcatgatagcttcaatcttatctggattagcctcaattccccggtggctgacgataaacccgagcaactttcctgttggtaccctgaaaacacatttttcaggattaagcttccatctatatcgtctcaggctgttaaaaaccagctgtaagtcttcgatgaagttttct

SEQ ID NO: 151762 - DNA, 407 bp, Zea Mays
caagaatagacaacatgtcaaagtccgagatagcacacaatttggtttcctgtagacaaacaatggaaggcttgatatcaaggaccagagatttaaccgagtccctcctggcacgatcatttagacccctcacattccaaataagaaaacagctattctccattggaaacaaatcagatcgcccccacctgagggacctcccaaccaaacaaagctgccaaagcagccacatgtgcactcgaaagcccggaatcaaataactttgcataagtgcaggcatcttcgagagagatattctccatgtcatcacaaaaacctagatgcctacagacttgtgcagccgcattggatccaagttctggagggaatttggccaccctcctacttctccgtggccgaaaatcact

SEQ ID NO: 151763 - DNA, 391 bp, Zea Mays
atttggttgggtttagggaagatttgagaaagcaacaaagaacagaaaggaagcaaaatgggatgaagaaatgtcctggttcaaggtggagatcagtaagtgccagactcaaaagtttaataccagcaatgatgccaaagatccataaacacagcggcgggttgaacaagttcaaaatgaaagtttatgtgctgccaggctgcttcgttaaaggtaggagcagtggagggagctcataattctataaatagaaaataaggataataaaacagttctaacagacatatgttgtaaactagacaaagaacaactttgatggtattaaaaagtagtgcattgttctattggtatataactcaattgtttttcagtaactggaaaccaaattttc

SEQ ID NO: 151764 - DNA, 581 bp, Zea Mays
gcgctttacaaatcctaccctcttaaaagaaatcgcgtccccgagattagtaagaaaatgtacatagaaggttttgtttgtatttcacttctagctttcaattggtaccaaaccataaagtttttgtttgactaactagtaggtgactaggatagcatgggtaccttataattatgttttagctattggtaagaaagttggggtaagaaagatcaaaataagtataagaaagaaagattctggcaagggaagactccatcatggatagttgatcatgactgatctggtgatccagctttgctctttgaagacttgagttggcgcttatccttccttgacgaggtcggtctctcttccagtcttggtgcttgtcatccaagttagggacaagtggttgagttaaaccaaatagcttagtatgtagagcatatggctttgtatgtggtttaagctaaatgtgaataggtagaatcatgtttagttgttttgcttctaggttgtgatttaggaacctatcaggtgggtcaggtagttatgcatggccgagttggtctaacacaacaatttaggttacaacatgt

SEQ ID NO: 151765 - DNA, 271 bp, Zea Mays
aaaactttgtgcgtggtgatgctgaaggggccataaaatggatagaaggcgaaattgaggcctttgacgaagttctaactggccgaggagatttttgcgcctgcgtgggagttcgaggagcagtttctttgcttcaaaaggttggttgcgatcatgctaaggttgtaattcaaccagacttcatagtttcaatcgatgatgtgaaagaattatctgccgaagccattgccttgggaggaaagttctattctgaagtttggctcaatgatgg

SEQ ID NO: 151766 - DNA, 477 bp, Zea Mays
ttctggtagatctggatctttatgcctagatcatctttgcagaacaaatggatctagaccaccctctgtggattgtctgagaattgggggtgtacctgtgatcatttttacactaacaccaaggttcaatgcccttcgtattgtttctgcactgtcatgccttggaggatcaaagagtggcataagagcaacaaaatgccatggcccaccgggactctctttccttccatctggcactacctgcatgaataagagaaccaccatcatcaaaacgataaaatgattattaattactacctaatctacagttagcttataatctgcaatgtttaagcatactctgaatgactatccttctaagttcacccacctgatacgctacagcaagtgatctaagtccacgctcagcaaacttgtcaattacagcatgaactcttcgttctatctccaacttattgtagacgaggttgagaatct

SEQ ID NO: 151767 - DNA, 560 bp, Zea Mays
atcatcagcctggcggcggcggcggcgcgggcaccagctggtggtctcgtattgcgagcggcgtcttcgcgtggggtggccgcgggcgtcaccgtggcgcggcgccgtcggacgaagcagcagcagcggtcgccggacgacgatcggggtgcgagctgcaggtggtggtgccatcgtcggcgccagcggccgtggctgcggaggacgccgccggcgacggcgacccccgggcgttcctgacgtgggaggacgtgcgcgtgacggtggccggcggcccgcgcggggcgccggacgtgaggatcctggacgggatcaccgggcacgcgcgccccggtgaggtgctggccatcatgggcccgtccggcggcggcaagacgacgctgctggacaccctcgcaggtccgtgtccgtcacgtcacctccttcacgtatcatgcgtggtgcatatgcattatgcaactcattcatactagctacacgcatgcgaagaaaccatattgcctgtccgcgaaagtacacaggttgcttgctaaaacagacagtagctagcactactctcc

SEQ ID NO: 151768 - DNA, 422 bp, Zea Mays
cgaaaatacttttatgttttggctgatgaaaagcttggcatggggaatatacaagtcccctgcctacgaaattgcattactatgtttaatcttgggaatgtcatgaacagtgctcctaatcctatgaaaggaaataaattataggcttgtttgcttgggtcgttaatccggctgtggctgcggctgcggtttatatagtatattgtctttatagattgcagctgcagcagtccgaactagcggctgctgccggagagcagcctgaacaagctgtaagactctgtaatgctgctgtcagtaggtgtctttcggcaaagctatagcagtaggaaaattgggggccgatgtcatgctctgatcctcaagatcttcatgctcactggatcagacgtttttaattcttcggagcaggttatatctga

SEQ ID NO: 151769 - DNA, 391 bp, Zea Mays
ggccccgatttgttcagaatgattggtgtgatttggaactgtcagggcctcggcaaagatgtgaaaagtgaattcctgcgtgatattatcatgaaagagaaggttaactttattggtttacaagaaaccaacaagaaagattttgaagaatcatggttgaatttcattagtggtaatagaaacttcgtctgggtttggtctccccctaatggtaggtcgggaggtttgctggtaggatttgattcggacatgtttgatgttagagaaaaagagttgggtgaatttatgattcggacgctggtgattcaaaaagaatcaggttttatttggaattttattaatgtttacggtgctgctcaaaatgagcaaaaacagaaattcttgagtgagt

SEQ ID NO: 151770 - DNA, 332 bp, Zea Mays
attaaggaaatggtcaagcaaaaggcagagaaatacaagtgtttctgacaggacagcaagggaattctatggtttggagaccgattagttgttcccaaggaccctgaactcagaaagaagatcctagacgaagctcatctttccaaattttccatgcaccctggtagcaacaagatgtaccatgatctcaggtctttatattggtggaccagaatgaaaagggaaattgccaagtacatatccgagtgtgacacttgccagagaataaaagctaatcacttgaaggcagtaggccctttgcaaccccttcccataccatcttggaaatggga

SEQ ID NO: 151771 - DNA, 419 bp, Zea Mays
ctcaaaactggagaggtccagacatcacaatgaacgagttcaaaaggtgtagatgtattagaaacagaactagtaaaaggcagcctagcgtgttttcctagctggcaggcatggcaaatgcggcgagctgctttattacactgtatagctgaaagcttatttagggtttgaacggcggctggtgctggatgaccgaggcgagcatgccacaactctggagcaacgacagcaacatggcagtgaggcagcagacgatgtggaatggtgtagagatccccgttgctattgcaccgaaggaggaccgttttggtttggagatcctcaacagaaaaaccagaagcgtcaaactcaatggaacagttattgtcgcgagtaagctgtcgaacagataacaaattacgagcaagctgaggaatgac

SEQ ID NO: 151772 - DNA, 428 bp, Zea Mays
ggtttattgggtgtctgtatctcatgtagctgagcctgacttgattcttctgtttgggtatccatatgtttcgtggctttcgcttgaggtggactgatcatgtacccaaacatttttctattccttttgttgttcttcattccattcatcagatatctctgtgactcatttttctcgttcatagttgttaaggtaggaatattgtcgttggcatcatttacttcatttccattagggttcatcatctgattagagagtaaaagagatagtgagacaagattacataagaggcttgtacgatatgaagataaagggcgaacacaactttttgatttccaaaataagattcgtcaaggaacaaggatggtttcagatttctactagcttcatcatactttgagagtttacaggtgttatattccttaaca

SEQ ID NO: 151773 - DNA, 580 bp, Zea Mays
caatgtatccaatttgtagaatccttattagattttgtaaagagagaaaagaggtccttgtgagatgataatggctattactgcaccaggttttgttagatggtatgcactggaccaagtttgacaccatcattccttggttcataattagtctttggccattccatgctacaatggttgcatggtgtgattgcaaactgtcagatgtctcttgactctctgttctgaaattcttgtaccaatggagggcggtcgctttttcctggttctcataccaacaggtcaaatttcatataggtgtatcttctggctccacaaacagggtttatctataagtggataaacatgagataaatatcatggtctaaagatgaagcctgcaaagttcatcttatgtccatcatctcgccatgtcatgatctgccccttgtcaagtctggtcattgaattgccagtgctttgggctcttagatttggattttgcctatttagcagtaacattaccttcatcaatgctgccattggccagcaagctcagacctgtaagacccaccagctaactccaaaagaatgataaaaa

SEQ ID NO: 151774 - DNA, 435 bp, Zea Mays
aagtaaagtgcggccttttggagagacatgaacaaacaatgcagatcatgttcactcgaagaaaaaccagcagatgtgatgacagagatgaatctctcaaaccaagcacgacgagcttgtttcagaccatacaatacacgacgaaggcgacaaacgtgccctgaggtggtaacaggacataacatagagatccaaacacacgaagatgatcatatcgtagagatgtccttaaaagaacttcacccggtgttttgccagaaagtttagatgatggttgtctattaatgagatacacggcagtggaaacagcttcactccaaaaatgtgaaggaacaaaagaagatatcaaaagagtactagcactctcaataatatgacggtgtttgcgttcagcaacaccattttgggcatgagcaccagggcaagaaagttgag

SEQ ID NO: 151775 - DNA, 500 bp, Zea Mays
caacacatcaaaagtctagagatataataggagaacaagtttgcttaagtaactaagcttcgatcacatacaaagtttggagaaaaataagctcaaagttgtgctgtcagtcactctactggctgaatttaggtcaccagtgacattggccagacttttgggtcgaattagggtaagatctattgctcgattgagggtagttgctatagcagaattgtagctgatatgaagggctacaagtttgctacagatgtatgggcaagttgttgcacaaaaatttgagatttaggcattgcaattcggcctgtcagttactctgaatcgggttttcaatggtacagggaatagatcagaaccacagctcagagaactcactaccggcgactgtgtgcccggattcgcgcccgccgtggtgattcgtgctcggcgcagttggataacgccaagggggtaagaaatatcacctagtggatgaactccgaccactattctactccggc

SEQ ID NO: 151776 - DNA, 569 bp, Zea Mays
caatgatcgttgctaatcctatgacttcaggccttgcatgaattcgccatggacaatcacctcctttatagtaacctctataccggaaaggggcacttgattcaatgcctaactcgaattcgttgtttattgcatactgcctcatagcaatctgaaattctttcatatccttatacagactgccaatcttcattataggatttctcctatcagaaactagaattctctgatctgggaacaggtcttcacaaggcattgcggcatccacattgatgttttgactcccatcattaacggaagaccttcctgcaaatgcttcttccctttctcttggctccctatcatcctcatctgttaaacctaatctaccaaccataccaatctctaaaggaacttcttgttgtcgttcctcgtcccatcttggctcgatttctattgcatcccaatcaatttgaaactcctgtgtcacaaaattttttaaccaacttcgtctcagggacattgacagctacgaatgacacaaaatccatatgcctatactataaaccagagatgtactgcaaaccata

SEQ ID NO: 151777 - DNA, 413 bp, Zea Mays
gccgcggggaagagagaagcagggaggattgccgacgaacaaaagctggaggaagcgctgcggaggatagagataaggaggagtcacgcgacgataaggctgagcggaagaaatatcagagcatacagcggctgagcggtcaggcggcaagatcttcttctccaagcacggcggcgcggcgtggaagaataacaggggaggctgcgagagggataagaacgatgacacaggaagagataggaacgattcaagagaagaaaaatctatgaagatattttcatttcttccccttttttaaataaaattgcagatattttgaattggtatttttagcgatgattaaagggtcgaataattaggattgacagcaacaattgggtaggatttgatttggcgaattttccggaatcaat

SEQ ID NO: 151778 - DNA, 301 bp, Zea Mays
tacgggtaccagcagaagcctgtgttagagaaattagggagtaagccacaggatctcgaacgcgttagtggattgatgactaatcgtgatcttcagggtagtccgccatcggtagtcggaagtagaggtcatctaggactcaggtggggaagaagttgatgactctttggcgcatacctattccatgggcctgagatcactatcacttatccaacagactgtactcttgttttgaagatgcagaaaagctccataaattttcttggaagaaatagcaggtccttgcatatctgaaattgga

SEQ ID NO: 151779 - DNA, 313 bp, Zea Mays
cgaggatcacggcgtgggatcaccagcggcagtacactaaaccattgtgaactcccatcagggcgcgtgatagagcaagtttgagagcgtttaactccaaaatcgttcagcgctaggtcaagcttggtataacaaagttgtttactaatgttagagcttcaactttgccacagtgaccctgaccttatctccattgaattaaccatgaactgcttccaaagttaaccaaatgtcactgaacttaggttttcagagctaaggttgtctgacaggccagcttcaagtctccttttctcccattttcatgtagtac

SEQ ID NO: 151780 - DNA, 705 bp, Zea Mays
ggatggcagtccacgacggagcacagatttaggcggatttccatggcgacaataaattccaggcccccccccgaggcgggctgctcccacaaccgcccggattcgggaccaacatgacagcgcagctcgcgccatacgattttcgaggactagggcgacctacttgcgaatttgggtggtggtgacggaagcttctctctcctttcctggcacgtcgctggcggcttcgaccgtgccgagtacctggtgggcgcgagccaggcgtttggggtagggccacatgggcaggcttatatgagcagggagtcctggcggccagtgcggatttccgttgaaccggactttgctggtagcagagaaaccggccggatctcaacgaaccccgcgatttctccggctgaggtgctcacacgaggaagaagatcccggtcggggcggctgggagatccatgcttagcgcgcgagtctgttacagccgtggagtagaagattctgttgaatccagacccataagcagcgacccaagaggcttaaagcaggttcgtgaggacttctgggggcttgcatgctgacctcattatgatgatagggtgacgcaggctccggcaaggagaataaagaattgataaaaattacatgtgatcgtggactgctacgtggagtgggctgcgcggtaaatggagggctgggccgactacagtggct

SEQ ID NO: 151781 - DNA, 1005 bp, Zea Mays
cgaggggacaactttcctttgactttaaatcttctcataccccggagtggtgacacattgaggtacacatgatttctttcctcaaattccagtggtcttcttctattatcagcgtagctctttgtctggtccgagctaccctcaaattctctcgaattatacgaacttgttcttctgcttcttgaatcaattcaggcccaaagaactgtctctctccagtctgatcccaatacaaaggagtcctgcactttctgccatacaaagcctcaaacggtgacatcttcaagctggcctggtagctattattatatgagaactcagcataagatagactcttgttccaactactaccatgctgaagggcacaagctctcaacatgtcctccaacacttgattagtccttccagtctgtccatcagtctaaggatggtaggccaaactaaaattcaacttcgtatccatattcttatgaaaacttttccaaaatctggaggtaaattgtgatcctttatccaaaacgaccttcttcggtacaccatgtagagacataatccgagccatatatactctaccaattgagatctcttatgagtagtcttgagcaagatgaaatgagccactttggtcagtctatccacaatcacccatatagcaccatatcctttctgggtgcgaagcaatccagtaatgaagtccatatcaatctcctcttacttccactcgagtatctttaatgagtacaatagtccagctggcctctggtgttcacccttaactctttgacacacatcgcacatagccacatgtgcagccacatctctcttcaatccataccactagaacttctacttcaaatcctgatacatcttcgtactctcaatatgaatagaataatccgaatcatgggcctcctttttaatagtttcacgaaggctttcaatctcatgaacacatatccgatccttgaaccatatggcaccttgctcatcttccgtaaattctgg

SEQ ID NO: 151782 - DNA, 508 bp, Zea Mays
ccatggcgaccagccaaccacctcgccgggcgtcggcaactctggctcctcaacggtgcgcgacagccgatagggatctaagaaacaaagacaaagaacaaatggattaagcacaagaaaagtgattggggatagccggatagggcgttaggccaccattgtttacctgcgctgtgcaccggagcaccagagtcgtccacgacacaccgacgagagagaaccgagggcagccgggcagggaggaatgaggaagagagaccagatctggattagggttaggttttcgggccgggagagaccacgagagagagacccggaagagcaccgccggaagctaggaaccacaccggcggcgggggaagagagctagggtggaccggaggagaataccacgccggagtccggatgcaccgctgtgggatgggggaggcgggaggcccagaggggaatcgtcgctgcgccgctgcagagggaggggaagaccaccggtcaccggagtccgtactca

SEQ ID NO: 151783 - DNA, 355 bp, Zea Mays
tttggcccatgtctttcgtggggaggaataataagtagtaagtgggcttaccaggaccggacagagaagatttgggcttttcttgtcttggtccaggaaggtcccctactacctgctacggtctttgggcggagaggcttcggctactacgaccatgccatgcacttgttgtctctgcaaagtgcaaacaaacgacattttctggcccgctgggcatggtgcgtagtgtagaacatccgtcggcgtttggccccgtgttgatttccctgcaatcagcctgaacatggaaatcaagtcccaaatgtcttggaaacagtaggaatagtaccttggcacgttccgatttcactgctcc

SEQ ID NO: 151784 - DNA, 317 bp, Zea Mays
ctcgatttgcgtgctggagtaaacagtcggctcagtcaagcctggccgagcgcgtgcaaccgcgccgggcctgactcgcggtgttttgaggttcgtgctggcctgtctcttgcaatacagcgaaccaaacaaacactgcattttgtatatgcagatacaattgcatccacagggaagggaaccaaacacatggagaatgaaggtctggtgccggtcacctgagctgctcccggcagtagtggatctccatgttgaagagccggttgtctttggagaggatgggagttggactcctcgcacgttggcgttccctgttt

SEQ ID NO: 151785 - DNA, 399 bp, Zea Mays
caatttcacattttcatactttatttgtatcaaggttcaaattgtagaacttaatcccctggcctcacaagtccaagttcataaggtaaaacaagtattcatcacttgtatgcacacatttagggggagaatggtctataatttgaatctttgagactaacctcattttaaagtctattatgtgtgtagtctcaaattagaaaggaatcttcaagcaaagacaatcgcttccactgaaaattttgatgggtatcaaagattctttgctccaataaatgtatcttctatacatttcataagagaatgagtttctcttgtatatgctactccaaaatcatctaaaactggtaaacatgtatcatattcttttggattgcaaatgtctaaagtagcatagct

SEQ ID NO: 151786 - DNA, 897 bp, Zea Mays
tgtggaacctacctatcagatcataatttatttatttattttcctttctctctctaacgcaacgctagaaagtactcttgcgagttgcgacgcgcgccagtccttgttgagcggggacaagggttagggtgcatgccaagttgtagccatggcctttggcctccgttgtgggtagttagcagagagtattgggtgggttccatgctagtgggggagatgtaatttctcgtttatttaaagagagccgaagagttttttatcaccaaaacaaaaagtgagagcaagaaacagagtccatctcccctaatatgacaggtttatggggataatgaatgagagtggacaaaagatgctctattaattgcactttagaaaatggagagtagtaaaacctaccaaaacaaggcggtccatgatctgaaatacttattctagaataaattttaaatgttaaaagtgtacttatttgtaatctgccttctagccaatttctgtccacagaaggaatcaaagctcaggaaagttgaaatcaaactaacaaaatggaggtcgcaatcagcttttacccccatgagagagaagataatccatagaaagccatgctcatttctttaagaacttctggtggaacagcaagcccaatctttatttttaggctacttgttgtccatgggactgaattttaggtgggtgtgtccttttcctgaccactatgcatggattgaaccttaacttttgcaagacatggaacaccatgagtaaggcctctagtattctacttctttagttttaaaataaaaacatcattctagcttcatgtgtttgtcttaagaacaagtgtcattctcacttttgaatacatacttatttttttattaatacatctctacatttctt

SEQ ID NO: 151787 - DNA, 517 bp, Zea Mays
cgcgcgcagtcatctgcgcgtcgttcgcgcgtccgccgccgtctgcgcctgcctcgtctgtgcgctgtctgcgctcttcctcgtccatcgcgcgtcgtctgcgcgtctgccgcccgccgtcggtgtcacgaccatcttctacgtcgactcagcccctccagtgctgttcgcaacgccgtccgtccggctcaccagagacttgagcaccgtcgtggccttcttctccgtcgccgtccacgaagtctgtcacatctgcgaccttctatgccgaatcgctgtccgggcagccatctgcgtccacttcttcgcgcccaggatctcgccgtggtctgtcgccatccacgctgtctaccctattcgctagcgtcgcggccattccagatctgctgtgttcgactacgcatccagctcacgccggccagatctgctggcatttgtttttcggctaagctgcagcggcgtatccactgttcatcagctacaaccaggggttttgataccatcaagccagtctttc

SEQ ID NO: 151788 - DNA, 287 bp, Zea Mays
ggaggaccaggagatgaggttgtctccaaggaaaacagtgtaccctgaagtagacctgcgaggatccaggcatccggcccaatcaacatctgtgtagacgagcacaacagaggtcgtggatgggcgaaggagaccatgactaagtgtcccacgaaggtagcgcaggatacgcttgagtgccgagaggtgaacatctcgaggatcatgcatatgaagacacacttgctgaacaacataggagatatcaggctgggtgaaagtcaagtactgcaaagcgccgaccaggc

SEQ ID NO: 151789 - DNA, 424 bp, Zea Mays
atatctagttatatattacatgtttatatatactatgtgttgtgctggttttgcacggcatgtcagtgcatgcccggcataccccgtggatccgccactgatttgtgatatacatcttgtattcaatgacaccaactagttttacgaagaaactctcatgccagaggagagagggaaatgagatttttataaaatttatgctactgttggatatatgagacggatgttctaaattaaaatgtgcatgtgagcatcgtataagtatatgatatgttgcattgcaacagatcatgtttatctattgttcatagagtatagtttaaaagagtttgctagcaccgctttgggtgatatttttcattctcatgctttgaaggttaattacgattttatttcctttaacttgattccattcttgctaagg

SEQ ID NO: 151790 - DNA, 380 bp, Zea Mays
catcctggcagaaggctggccactctatcaacaatggcctgaacctggtcccttgtgagtttcttgggagacaaaggcaaaccgaggtacttacagggaaaatctgaaatattacatggcagcaagtcctgtaagcaattcacctcttcttccccacagtagattgggaacacactactcttctggatattagtccttagacttgaagctgaaccaaaaagatgaaggatatccataaccacaccgatgtccggggcagtagggcttagaaataacactgcgtcatccgcgtacagcgagatactgtgctgcatattccttgtagagagaggttgaagaaacccttcttcagaggctcgctgcacgagcagattcaagac

SEQ ID NO: 151791 - DNA, 464 bp, Zea Mays
atgacgcccgggcaggagacgcgttccccatttgccaccattgccgtgaggcgggggcggggctggatgggcagcccagtttggcgagctgcggcttcggcgatgaagttgtgcgtggagcccgtatcaaggagcgcgacgacagtagcagcgcccagcgatgcctgcacctgcagcgacttgtaaatgggcaccccggcaatggcttgaagagagaacacaggggcgtcctccccctgattaggagatgtttggtcgtcgtcggcgccctcaatttcaatgccgtccatgaagaagatgcggcagcagacccggttgtgtccccggttgtagggctcattgcaattgaagcaaaggccgaggcgtctccgctcagcttgttcctcttgggacagacgtttcaagggctggcggtccggtggcggcggtgtggcacccgccggtggggcaggcagcggtggccg

SEQ ID NO: 151792 - DNA, 614 bp, Zea Mays
gtgccggtagcgagagtcgttgaagactagatgtagggatgttctgcccaaaccagtataaaccttgctcccaccgagcacactgtctggagcccagaacgcgcacatagaaatttacttatcggagcgaaggttcgaaacatcgatagttggcgcgcgaggtaggggccttgtgcgttctcgacgaactctctaggctacggatggctaataacgatagtggcgtagtttggacccatggaatgaccatccgttttgagagtattgacttcatcatcaacgatggagggacaatgatcagggccatagaggccccagttccccaatgagtaactcgctcaacattatcggaagcctcagcagcctccggctcatacaactgcttgaggccccatgcccaaaccatcgctactcggtccgacacgcctacaaggactgcgggttgcttaggaagttcctaagcaaagaggcgtcgcccgaaaaatggcctaaatcctagagggacgaagagcaggagagaagggcccccattctctgacaaaaccgggtgcctactggtctttggcgggtacgactactacgcttcgaaaagacaccagaagctcgaatgacat

SEQ ID NO: 151793 - DNA, 508 bp, Zea Mays
ccaggaagcccttcttgatctggggcgaggtatggtacaggtcctggctcttctccttggccagtgccgtggacgacaggacgctgtcgccgacgacgcagatgaggttcgtgatgatggccgcggcaacgaggagccggccattctccgtcactgtgaggttgagctcgccggcgattcgcgagatggtgatggatgaggtgttggtgagcgccagcatgagagtggcggcgagcagctcgggcgtcttcactggggagtgcatcatgctgccgtacatcccgctggacacgatggcggccacgagcaggctggcggccacggtcgcgtaggccagggcgacgcaccggcgcgtggagttccgcagcgcggcgaggtccaggtcgaggccgacgaggaacatgtacacgacgcgcgccacggtgatgtagccgccgtacatgtcctcgacgtcgtccacgtccacgtgcaggatggcgttgcgcaggcccatgccgcccaccgcaac

SEQ ID NO: 151794 - DNA, 1130 bp, Zea Mays
gtctcggtcaaaggtgatggcgcggctataccagtctagatagactagcgctgctacctcgatggagaagacttctcgccattcctgcttccactgttgtgtggagaggttcaccgtatgcctgccaaagatcatatatcagttgtggacattcgggaactcttcaccctagtcgtctttcttgtcactggaacatttcttcttgccatcctctattgagggtctaggcttattatagaagcgtcggagcatgtcgcactcctcgagggtgtgcttgatgaggcccttgtgataagggcaagaatcctttagcatcttgtcttgtcgaaagcattgggacctccttgaggacctcggggttctgtcgttcccgctatggcaacaagatctatgttgagagccttgcgctggccctacgatgccttcttatttttcttggggttgcgttgggaggtcgccttgggggcatcctccttctgcttcccactatccttgtccttgtgtaagatggcttcgatgccttcctgccccgaagcgaacttggtggtgatgtccatcagttggcgtgcgttggtgggggtcttgcgagtcatcttgctgaccaaatcgtggtaggacttgccagtgaggaatgcactgatgacgttggagttagtgatgttggggagctcggtgtgttgtttgaagaatcggtggatgtactcccatagagtctcgtcctgcttctgtcgatagctccgaaggtcccaagaattctcgaggtcctcccaatcatggatttgggaaggtgggaggtggtcgagcagaatcggatagaaagaagggtaagttgtgaatgatgaggttgtcatcactcgtccctctgagctgatagaccaggcggtagtcagcgagccatagctctggtttggtttgccctgagtacttggtgatagtcgttggggctcagaactaggttaggaacggcgccctgtggatggctcggctgaagacttgtggacctaatggctcgagcgaggggcttcgatcttccccactgtcgtaccaaccaccccgccaagggtggtagccatgtgtggcatgtcgtcggtcgtcgtggtgtagtcgtccgttgaggcggtcgtgaacac

SEQ ID NO: 151795 - DNA, 409 bp, Zea Mays
ggagtgacaacgtggcaccgagcaggtcagagcgccgagcagctaacaagagcaggtcagtaaagtacaacaccaaggccatctccaaccattttcccacatatttcccacatatgtattcttttctatactttctactctctctatcctaaacaaatatttgtttcagacttttaataggttcatataataattagtatgtgttttgtatgtgtctagaattctagactcatcgtgatccatttaaatatatacataaaaatcaagatctaaaatgaatgggacgaagagaacattatattttactatatctccctaaaagaaactccccacataaaggacatctccaaccattcactctatcagctccccctatacgctaaaaatcgtatatcattatatgaattat

SEQ ID NO: 151796 - DNA, 288 bp, Zea Mays
tcttatttcttccgacaagcatctttccaataaaccaatttagctgtcatgcaatttcgtgaaattgtttgcagattggtcacaccgtagcttaactagtacattgcgcttgcaatgtggcaaaacaattttctgcacccatctgaacgagaaagcaacctttggtcagtccttggtcgttatcaacaaagattttgtcagaatatttccttgatgatacttaagctgtcagacagcccactgctgaacgggagcttccagtgtactcaagttgttgattaatcatta

SEQ ID NO: 151797 - DNA, 279 bp, Zea Mays
gtgttagagctgccaccaccacactgaaggcaatgtttcttcttgcttatttgaatatgaatgatttttgtttggtcgcttggagccttgaatgatctggttcttgatattgggtgagctgagaaaagcacaaaggtggcatgctgcaatactgttgtagtgttgtgtcacatctgtttagtttaagtgcattctcggtatcaactaccaacttgaaatacccttcaactttatttttccccttttcttgactctcaaaaacattttcttgcaatagac

SEQ ID NO: 151798 - DNA, 596 bp, Zea Mays
tgatgaggttgtcatcactcatttcttatagctgataggccaggcattagtcagcgagccatagctctagctttgtttccctagagtacttggtgatggtagtcggggctcagaactaggctaggaatggtgccctacgtgtggctctgctgaagacatgaggacctgggggctcgggcgaggggctttgatcttccccactgtcatagcgtccacctcgtagagggtgctagctgtgcgtggcgtgacgtcggttgttgtggtgcagctattcgccaagacggtcaaggacaacacagttttgataattgtcgagtaggcggtctcagaccgcagggctttgtcctttatgggctcgagatggacgagatctccctttcatggcaagagatccctggtcagtgttcgaagatgggctctcgaaaccgagaggcagagctttagaactgctggactggagcgccctctaggagcccccctaattttggagtggatttggtgcccttcagtagttgatggttccggcattgtccggagcaagattgctgccgcagcgagattttggctggccctgtgaaaggctggagggggtcggc

SEQ ID NO: 151799 - DNA, 551 bp, Zea Mays
gtgtcttcatccgcaacgctcatggcagcccgcgagcggcgtcagtggtggtgatgtggacgacaacgacggagagcatgggcatgcctttcacatagggatggcaaccgatcggattcaggttggattttgcaaatatccacccacaaccatatccgcctgtgactatacatgcggtctacggataaaaacttatatccatgtccgtgtctatcaggtttcggatagtttttggatatctgtgggatataatagggacaatcattttcaacaattcaatagcataatcaatcaatttttccccaaatcaccaccatatacaattaaaatcttaataaaataatcatacaagtacacatgtcttttaacaaacaatattctcaacatgacaacgtgtaagggtgcatggggcacaatgtagtgagtctgcaaggctagaaggggcggacaacggtgggaaattgggagcgttagacgtggggttcagtgagttagggtttgctctttgttgtgtaatatgggttaggccaaaaaataaactatgagtcgat

SEQ ID NO: 151800 - DNA, 678 bp, Zea Mays
ctaatttggtgggagccatgcggtatggtctctttgcgatgggtgcagtgccgggaattagatcaatgtagaactctacttctctttctggcggcattcctagcaattcttctgagaatacatccatgaattcttctactatagatatgctttctgctgctaggttaaacaccattggatcctaggcgggtggctgagcctgacatgaaactgactttccttggtggtcagtgagaagaacagtcttatttgcacaacttatgatgcccttgtgtttggttaaccaatccattcctaagatcacatcaatcccttgggatagcaagacggtaagtctgcaaagaacactaccccacttaaaagaattctgacttgggagcatttgagctagcatagaaggtctgaccctagggtttgggtgaccaagggaatttctaggtgtgtagagggaatgccatgcttttccacaaaactaatggctatgaaagaatgagatgctcctaaatcaaaaagtacattagcgggagtaaattcaactaggaactcaccgagcactactcccggagcttgctgagcctcttgagcgtcgacgtggtttactcgtgccctgccatgatactgggtcttgctctgctagctgttggaggagggtgccttggaggcgggtgctggggcatt

SEQ ID NO: 151801 - DNA, 337 bp, Zea Mays
ttgatgctttaggtgtcaaaaataaattatatttctcctcagcttcacaatgagcactatcaacaacaccaacatgcttaagcaatctagctttaacattccaatttctaaacctttcattaacgaaagcatctccaccacggaatttgttgttatctttgaacagatagcaaacaaaacaatatgcaacatctttatccacactatactcaagccaactaaactcagaaaaccactttggtaggaagcgacgcatacctccacattcatgttggggaaaatcatccttcttcatctttggtcgacatggccctaatacaatataggcccttctagc

SEQ ID NO: 151802 - DNA, 408 bp, Zea Mays
ggaatgacttataatttgggatggatggagtatctaattctgtacatgtacaatgcacacaccttacacgcaatatctaaattgttttatgtgtttcttatttacttgatctttgtatttctaacttgggtagtctgaactgtatgacatgctgagtctatctactatgacactcgtgatgcacatgctgtttgtgttgaagttaaatgatactgaaatacctgaccatttaatatgcctaacctttgaggcctagaatattgtggacatgtgtcttataagttagaactgtagtgctattacttgtagtgtcaaatgaacaatatgttacacgttgtttactactgttgtttccacaaattatgaaaactgaactgtagcattgtataaaaaaccatcgtttattgg

SEQ ID NO: 151803 - DNA, 472 bp, Zea Mays
aaattgccatctttgaagtttgatgaagtgccggccagcccttgctgccccttggtaggagagaatctttactgtttggtaaagcagggcgagatgatgatgaaaaaggcggtgggttttagctttgcaaattgggcccaagtttttttttgttttgttcctgtaattattaccgcatctttatcaatctactaccatggccccccttaggccgggtgaaatgatgctagtagtacctgggtagctagcgcggaatattattattactctcggtatctctctacatattttttccctccttcatgtgtcagggccatgattgagatttccaatcgtcgctgtacttttaacagccggctaaaatagccgtagtaagtaggagtactgcgtacccgggttcaattcgtcctgaaataattgacgttatagaatttgtttttattatacaattcaaattctattctaaaatacg

SEQ ID NO: 151804 - DNA, 495 bp, Zea Mays
gttgcgcaggatgctggatcccgggaagccatccttcacccccagcaaagggaagcccaatgtggtcatgttcgtcggcttgcagggtcagtatcgttcatctgcctaattgttcgttacatcttattcttacatataatgtcgaattgcttgtctccattgattgtgcaaagtaccatacacacagtagaagatgcatgtcttcgttcagtgtttatttccacacacctggaatgaaacaatagaaggtgtttgtttgataaatcattagcaacaaattatgtagttatttctttttcatgtttaaattgggcgtatttgtcactgatgattatatgtttgaggcctttatttcaaaggtttggggctgcctattttttcgggggtgtttgaatctcgaaatggtatagagaagcattctcttttgctttcgactgtccattcaaacagcttgtctcttccaatcgcgtcgctctgccatccaatgtaccttgg

SEQ ID NO: 151805 - DNA, 298 bp, Zea Mays
attttttttaggcttttggtgaaatctgtattttcacaatatgcatctaaggctgacaataggtcgctatgctgtctctcctcaaaggggattatttgtagatagtaagaatgctaaatgctgggtaattaagaaagctgaatgtgtgcttcataacataatcgttggactgttttatctccaaataaatgatctgttcttgtgttatgtatttattttctacagtaactctggttgacaagtgccagccaatgccttcctgttctctgattagtgcacactgggatttctaatgaga

SEQ ID NO: 151806 - DNA, 418 bp, Zea Mays
tcatggccaccggcttcttgccctcctagatagtggcttgacccacaacttcatcaatatcagggtcatgcgtcgcatcagactagtgccggcgaacaacaccaacatgcgggtcacggtgtccaacagtgaccatgttccctgcaagggcgtggcacacacgtggccatgtgcatcgatcgggagaactttaccattgatcgcttcaacattgacgtagttgggttcgacctcatcgattaccttcaaaccttggggcccatcctgtgggacttaggccctctgcatgacattctggcggagcgatcgccacatcctctggaagggcgtgggatcccccatgatgatacaccacaaccagcattgcgctccatcgcggacaacccccaacaaccgttgttggaccgcctcctccaac

SEQ ID NO: 151807 - DNA, 277 bp, Zea Mays
acaagcaaatcaattgtatcttgactgcgctataataacaaccaaatgcagacaagaaacaggggggccaagccgctcgttgtcctgatgtaacaagcaagagtactgtatcttgactggatataataagacctcctaaagttgttaattacttttagtccttaaactgctaaacagtatgactcaataaagccttccaaatagaaattctaggaaaagtttagtacctaaaatttagtaaggacgtgcttgttttcttcagaattatataatccag

SEQ ID NO: 151808 - DNA, 536 bp, Zea Mays
ccgtaatgatgccggcgtcgaacgccgcctgcgcgcagtagaggtggaagtagcccttgacgttgagcagcatccccagcgccagcgcctccagccaccccaggcctcggaggagccctgccgccgcgcaccccgtgagcttcccgagcgttcccatgacagtgacgaagaagaccttccaccacgggaaaggcagctccatgacgtaggcccggaaaccttcgtcccgcgtgagccccgccacctcgatgtcgtccgtggtctggcgcagcgagaggcagacgtgggcgacgtagagcggcagcacgaaggagctgagcacgaagttggtcttgctcaccagcagcctcgacaccctgccctcgctggggaacgccagccccaccaggaacgccgccatgttgacgttcaggcgcagcgcggagctgagccagcagagcgcggcggcggcgagcgccacgagggagaggtcgaagcctcgcatgcggcggccctccgggtttcgcgcacccacccactcggccatggccctggac

SEQ ID NO: 151809 - DNA, 561 bp, Zea Mays
agtcgtcaagcattcattaaatagcactctttcgagaatcaattcatttaaatccccaggtctgctaagcctgtgctgggtctccttcagttttaatagttcaacccatggctcacttcgcttctcgaaagtctttagtaactgaaacatcattttttgctatcagaattgtagaactccttttgactatttaaaaaagaacaataatgtatattaatgtgcaaaaataatgctattgtgctagcacacaggggggatgtaattctctaaaacaagaaatactaatgtaatatttaacttacaggaaaagtctagctagtctggcttgcccgatggtaagacaaggaagcaacccgctgctaaagagttatgatgttctacaaaaagttggtggtgtagtggcccgaggtgaagtactagactttgggaatatgatgagccaagttggaaggatgtgcctaaactggtagtttgttattaaagttccacactttcatcttttaggagaaacttgacataggaagcacaacaatatcataaagtttgtttctgggagatgct

SEQ ID NO: 151810 - DNA, 830 bp, Zea Mays
tcttttaggactatgacagttatcaaatttgtggagttcctaaacctgtgatacatctcgactgttgtttgatagagatcgtgtgaagataatttttaaaatcagtgttcacataaaggtaccattggattcatatttgaaagcacttccatatgctatgagctttgttgtcatgataaacatcataatatatgatatattggtggtcaaagtgtggtgttggcaggtcaaaccgcactttacatttcgaaaaggatggagtaatattttagccttgattttgacatccttttttgcagagcagtggatcaacattattcaaaattttgctcctgacgtctgatatgtggacagttgccattcaagttttactctatcatcaacaggtgaagattcctgatccagaatacttgtgtaagattattaacatgttacccaataataatcttacataatttggcccaacccaaagatatgttaatttaaactccctagattattttgtggaatcccaacagagtttattcatttgcttgtactctatgaagtggaagttcttgagatgccaaaaaagcagggaagtgcggacacaacagtcaagatgagctacttaaaagtgaggataattcaaaggagcgtggtatcccgagaatatgaacactccagagatgcaatatttgaggttagtatgcagtagtcgagcctattcatagattattgttcctgttttctaatcttggtcttatgactaataatttttaatgagtggttctaactggactgcttccaaatgtagtcattggctaagccaaaatttgaatttcataaag

SEQ ID NO: 151811 - DNA, 495 bp, Zea Mays
agtgccaagcatggggaggcactgggagaggtgcgagcagacctggataacgagatcgatccggtttggcctgttgacaagtgctgcacgactgaacatacacacgcactgcctgtttcattcccttccaatagaacagttgcttaatgcggctgtaggttactggaaaaccagagtgtccgccaataggtgaatcatgaagggccgaaatgacttggcgttgtatagcctccgaactccccagccacactcgtcctttgtgtcgaatgactccctgagatagagtgtatggggcagcagcatccggggagacgaccagtttggtcaacaggtcctgtgcctgtggatcgtcgctgtagctggcgacaatttcttgaatccacattggagtaccttgagaaatatgcatggcttgcccttctgccggcatccgagaaagagcgtcagcagccatattgtcacaaccctttttataaataatgcggtactgcaaac

SEQ ID NO: 151812 - DNA, 856 bp, Zea Mays
gaacaccgacatggtcactggcattaacccgacgttccggacactacctcgtgttagagttcaaacaacttgtgcgatgaataacatggcccataaaggaacaacgaacgagcacaaactaagcagtaatcaccttgagcagttctgaccgcgagggagagggaaatgtgagcaggcgtggcgacgacaatcgtaacagcggcagtcagcggacaaggaggtgggcgatagggtgtgctgctagtgtaaagcgccggcttgtgacgggcgagcaggtgggggactcgaacacgaggacccaggaagcttttcactgggcgtaggggaatatcgaaatggcaagaggaggaaaaatcatgcagttgcgtttgagcttatcacggtaggaaaaagccttgacgcatagtgccagctcctggtttacaaaagacacgcggctgccataggatggtgctcggccaggcgggattatggataggcggtaattcctccttttttttaccgacatcgatcaatctggaaacagcaaagaggctcggccgacgtacacagcctgagtatgccaccctcactgcccaaatagatcatagctagccagcacatttacaccagaagatttattcattcgtgcgatgtcccttgtttttattaaataggccaaactgaatggcgtaaatggagcacagcagagacatggatctctctgcaccccaaacctgaattttaaattgcattcaaagtgcttgtataaaatctgaacctgagacttccaatcagattttctctcattttcttacgctagtttgatacagttctttactaggagttgttctcctataatcactctcccactttg

SEQ ID NO: 151813 - DNA, 329 bp, Zea Mays
gagataaatcgatctgattatctagtttaccctacccggcgttccatcggttaggaccggctaatcgactccatttaccgattaaccaagccgagttgccgattaatcggctagaaacaccgattaaccgacaagccgagtaggagctaggttatggggatttccccttttcgtttgcaaccttttaaaatagcagctgcacttacaatatatggtaattacagttcatgttgttgttatttttagggatgtcggaccagctcgatctgatttgggaacacggggacaacatatatcccggattcaaatgcaagtattgcaagaaacaa

SEQ ID NO: 151814 - DNA, 300 bp, Zea Mays
cctaagtgctggaagagtaagtgtttttgttctttcatttcaaattttggctaagaactaaattgttgtcatccagtaaggtaggtgtgtacatatcactgatgttcatacagctgtgttattaactgcaatcttccacaatttcctttcataaagtaaattggagttctccattttgtcttcatccctactaacgccaactactgctgctcccagctcccatttctattttatattctatggatttcatgattgttgcttatcatcattttgcttttctgcttcctttttcgttttcca

SEQ ID NO: 151815 - DNA, 429 bp, Zea Mays
tcctattatcacctttgacccttgacctctctccatatttaccatgatgtttacctatttttcttagcctcacttattccatttcaatccgagagtgttgttttccctatcccgctcttgtttgtttcctttacctttgtcgctttgcaatcttgtctcactttaacttcatccttggttgagcttttgtttgataccatcctcacctttgtaatttgtagatgttgccttgatacttatcttaggtctgcttgttgaaatcccctcttttagatctcaattcgagagctatgttttacttatctcacccttggctatatcctcttctttaccgcgtaagccttgacatacctccattctttgttgcacttataccactggctcttctgtgctttcgtcttttcccttatacccttgtctactatcgcc

SEQ ID NO: 151816 - DNA, 343 bp, Zea Mays
ccgggggtcagtaaatatcacaccgtggatatgctcctgccactaaattactccgaccaccgtacctgagctagtcacggttgcttcggatgagttcaccggagatagccgcttcacggccttgcgccacatgccttggcacatccaccgcatcgtcgtgactcgtattagccgtccgttcatcgccggggagcttgccacggtaataggccacgaatcaccgcgccagtgacttcctatttctccggtcgccgcgcgtcttcatccaattccccgaccaccgctcatgactgctgtaaattaagcccgccgtgagctccgtagggtaattacccatccatag

SEQ ID NO: 151817 - DNA, 415 bp, Zea Mays
aacgaatagatcatggaataggatgatcctcttgcttcttacctgcaaaccaattaacccattcgaatgaaaccatccatttctgatttctggtgtgatgatcggtgacttgatgacctcttgagtcggtttggacacccgactcgtcaaaaaggagccacattggccgattggcgcatagggaggggtccaatccaaacaacaagctccaaagtccaaacaggctagctgccgtgtgtttgacccgttcgctgcctccagctgctattaaccttgcgctagcgctaacaactagactagtagcttcaccagactgcttttgacgtactgcagccagctgtgttcggcaaattccgcgagaggcgaagtttctgacaacgatgcgctgaatcgtacagtattatggaacgggaag

SEQ ID NO: 151818 - DNA, 379 bp, Zea Mays
catctcgatggttactggtgagctaagcgctcccgacaatgaccgacactgcgtgatgttacatctggttggtgggtgacgagtttgttcttaaagttgaaggtattcagcgaattgatgattatataacggcatgtgtggaagttttgaaaatttggtgtcttgtgtttgatgagaggggaattcagacttcgcatctttgctctgaatagtgaatactgccatactgcttaggcgtttactaccttgcattgtaggctgctctggctctgcagttctactcctattaggattgtattgcttatttgtctgtcttttccttatgtcttgcgcctttagtactccctccttcccaaattataaggtgttttgacttttt

SEQ ID NO: 151819 - DNA, 917 bp, Zea Mays
gctcagactgattagtccataagaccttgacatacttaattgatctcttcctcaaaacacgctccgaggattccaagatacacaccggacgacacaccaaggtcagatcctgctgcaccgcaattggttccatctcaatctgatggtctggatcccacaagaacttcctctccatagagacatgaaaaactgggtgtacccctgccatggaatccggcaattgcaagcgataagccaagctgcccacccgggccaagatagtgaacgatccaatatatctcaggctaagctttccggagacaacaaactgaacaactccttaagtgggtgataccctgagaaggacttggtcacccactgcaaattccaaatcccgcctcctcacatcagcataactcttctgacggctctgagcggccaaaatattctgacgaatttcccgaaccttttcagaagtctgttgtacccaatcaggaccaaccagggatctctctcccaaggtctcccagcacagaggggagacacaccgcctgccatacaaagcctcaaatggtgccatcttgatgctagcctagtagctattgttataagcaaactctgccaatgcaagatgaacttcccagctacccttccaagacagaacacaagcacgcaacatatcttccaaggtttggatcattcgctccgactgaccatcagtctgaggatgaaaagcgacactaagagaaagcttggtgcctaatgcactgtgaagactctcccagaatttggatacaaatttggagtcttgatcagaaacaatggacttatgtaccccatgaagcctgattacttccttcatatacaaggggaccaaatctgaagctgaatttgtggtcctcatgggaataaaatgcgtagacttagtcatgcgatcc

SEQ ID NO: 151820 - DNA, 449 bp, Zea Mays
cctgtttacacgatatgctcgaatcacattctctatttcaaactctactctataaatagtacaatctacaatataaaataataatttgtatgacctgtttacacggtatgctcgagatggacaaatagttcagaacacgccttatttggaatgggggaattcgaaaggctcaatctcaatggaaagctgaacctccatttttgctgacgtcactacctgtttggtattgaagaactggcggaaaagaattccataggaacggtgaagaagcatgtacttttggaggcaaacaaaaataagctccaagcaaagagaagagtttcctgtagccattctctcagctcgttcgctgtctaaacatacatccttattgtgaatggagctttctcgcagcaactcacatctatggacagaacaggcctgttgtagaaaatgaagcgacgagagag

SEQ ID NO: 151821 - DNA, 889 bp, Zea Mays
gatcccgtcgacgtattcctcgtcgccgctcctgcacccgacgatgacgccgacgacgccgccgccgccgccgcatgttgtcttcctcctcacaggtgcatacattcatcgtccatggcatcccactacgcatgcatgatccatggagacgtggcaggtgcacgatctttctcgatggacgggcggccggttctcgcctggcctgatgctagacttctggcctgatgctagacgtgtcgtcaggcgctctctagagtgagtgattgggcccttttgccctttctactgctagcactagccagtgccaacggcgtacatgtcccaatcaagatgccaccaccagtaggaagccacgtacgccacacgcacacggcaagtggagagcaccaacacccgtatagattttctggtactccctcccaaagttaagtgacgaaaaagccatccattcataacagctttgatttgatgtgtgcctgctgccatggagactggggaacggtcgagacagaatttcagcttgcttacacctgtgggcttcccctaaagagaaggcgatctagcctcgctttttttttttgctttgctgcctagtgctagtgcaaacgactcgcaaaagaggaggggaggtgggagaaaacagcaatctgctagtgtgttcatttactttttcacttgcggtctccttcacttaatcatgatgtgcagaattatttgaccgttgttttatctgcctctttgtgttgttaaaaaaacaatgatgaaagcgaaaagacatttttaaaaatatctaggaaagaggagggaattgttttaacaagattttttttaaaaaaaaattcgtttgtgtgctagtgtgtatctgatatactccctccattttaaaaat

SEQ ID NO: 151822 - DNA, 585 bp, Zea Mays
attcatgccagtcagattcgtcagttgtttggattcaacgagtcatcgactcatcttcacagcatgtgctatggcacctctgaccctcctcgtcgccctcacagcggagtcgctcctggtacagctcacatcgcggctttgttcctaccgcccttcttagatgggtcgcgacgttctccggcagacttcaccacagcggccaggtttctatatcagctcatgagacagacgcttctgccacagatgggttatagggaggctaccactcatatttagctttggctccttggtgccctagtttctcactcagagtttgatgttgtggattttcttatttgtgagatcgaggacaccgtactggatggtctacatgctcgtcgacaactgccttatgctcactatctgtgtcacatctttgctcagctgattcggcccccacagttctagggtactcttgaggcctctcgcctcatctttgggtcgtaccgtccagctccagaggatcctgtgccggcacctgctccagtgattgatactcaggccgaggataccaccttccatcagtttgagactcagggcgtagca

SEQ ID NO: 151823 - DNA, 697 bp, Zea Mays
ccttccgatccagcgtgcggtggacaatccggtagcctataggtgagagaactgacttacaggtacacgagcttctcagtatatagcctctcagtatttcatcaaattacatacaaaaaggcaggacaaagcaagaagggaaacaaaaatacccgttcttcttcattggacatgtgttgggatacaaacgtctagattgctctagtataggatgcaagttccctccgaatagcatcatcattctgcacatccctgaaaagtgcatatgcctctgagaaccggccatccctgcagaggccatcaacaagagcactaagcgtgaccacatcaggcagcacaccagacctgaccataccctcgtacagagtgaacgcctcctcgatctgcttcatcttacaacactccccaatgagtgcagtgtgtgtgaccacactcggctccactccatccgccttcatcctctctgctacctcccatgcagcatcagcatcaccggagtggcaaaacctggcaaccagggtattgtaccccaccacatcaagcgccagcccttgtgtagtcatcctctccaccatcaccaatgttgcggccatgtcctagactttacagtagccgtcaatgagagcattccatcccaccacacccaagccatcaattcctcggcctcggaccagcgtctccgccaatgccgcggcct

SEQ ID NO: 151824 - DNA, 986 bp, Zea Mays
ggcccatcccggcgagccttcccgagtgcaggggcatggccgcgctcaacctgggccggaacaaactcaccggcgagataccggcgtcgttcgccaacttctccgcgctgtccttcctctcgctcaccggcaacagcttctccaacgtctcgtcggcgctgcagacgctgcagggcctccctaacctgaccagcctggtgctcaccaggaacttccacggcggcgaggagatgccgtcggacgacgccggcatcgcgggtttcccaagcatccaggttctggtcattgctaactgcgagcttcacgggacaattccgtcgtggatcgccggcctccggaaactgagagtgctggacctgtcatggaaccggctcgccggcccgatcccaccatggctggggcaattcgaccgcctcttctacctcgacatatcgaacaattccctgcagggggagataccgggtagcttggcgcagatgccagggctggtcgccgccggtgctcatggtgacggcggcgacgacgaggcgcaggtgcaggacttcccgttcttcatgcgccggaacacgtcggtgcaggggcggcagtataatcaggtggacagcttcccgccttcgctggtcctgggacacaacaacctcaccggcggcgtgccggccgcgctgggggcattgaccagggtgcacatcgttgacctgagctggaacaggctgtcgggacccatcccaccggacctgtcggggatgacgagcctcgagtcgctggacatgtccaacaacgcgctctccggcgtgatcccggcgtcgctgacgcagctcagcttcctctcccacttcgacgtctcgttcaacaacctctccggcgaggtccccgtgggcgggcagttctccacgttctcgcggggggacttccaggggaacccgctgctgtgcggcatccacgtggcgcggtgcacgcggaaggacgagccgccgcgcacggtcgac

SEQ ID NO: 151825 - DNA, 400 bp, Zea Mays
ggagtattggcacttttgtcagtaagggattagtggatcgtttgatgttaccaacacagagttgtgcccagacacagtttcgggctgctgatggaggaattatgagctgtactgaatgggtgccaaggctgcaatggtttattcagggctattcgtttgtttctcaggccaaggtgttaccattacaatgttatgacatgatattaggcgaagattggcttgaggaagtaagtccattgtgggtggattacaagtcaaagcaactcaggtttacctatcaaggtactagagtgtccttgcaaggggttcaagataacatcacgagctgtcagagtatctcaggacataagttccagggattacttaatcatggagctgtctatcattgcatacagttgct

SEQ ID NO: 151826 - DNA, 279 bp, Zea Mays
ctccgaataagtcaaatcctcattaacatccagttcttccatgggtaactgttccttcggtactctcaagcacttcttgagttgtgacacgtgaaatacgtcatgcacatccgacaaactatcgggtagctctaactggtacgctacttcacattttctctccaaaatcttgaatgggccaatgtagcgaggagataattttcctttaaccttaaatcttttcattcctctcatcggtgaaactttaaggtatacgaagtctcctacttcaaatatcag

SEQ ID NO: 151827 - DNA, 676 bp, Zea Mays
ggctgatcaaggtgggatatggtactgttaaccaagtgtgttgacgtgctaagagatatgaaattgttgctagaaagattctcaccaaatcaatgtaaactgaaattttcagcaacacactacaacacaatcccctttcacaaattttttcacttcttcttttttttgacttctttctcttctttttttataacactgatggggtgctgagatcaaatgcaatgacacaatatgaatacgatggtggtaactagcaacttgaggaattttaaacaacacaaggtaacagtaccgccaaagggttataggtttttttgtggctttgggctataggaaaaaaatataagatggatgaagactgtgataaataaatggatgacagtaagacctaccgtgacaacgaaagctttgataccaaatgatatgtaccaagttatattcggtactggggtggcccaatcttgacgacagtaggttgataaataggatggttgggtataaaagtaactgaataacaaggtaatattgctgaagaacagtagataactgactttatacctgatcaaggttggaggtgaccaagcgacggggagagagacactgaaaccgtgtagacttcgactcgatctccgaacagccgcagaaccacaaccggagctaatccacacaatgcgag

SEQ ID NO: 151828 - DNA, 308 bp, Zea Mays
ctttatggaagcaatgaataggatgctgcatgaattcctggatgattttgtggtcgtgttcctggatgatattttgatttattcaaagatcgaggccgagcatgaacaacatctccgtctcgttctgggtgccctaaggaagaatcaattctatggcaagttgaagaagtgtgccttttggctatccgaagtggctttcctggggcacgtgattaatcagcagggtattgtggttgatcccaagaatgttgcggctgtggtggagtggaagagaccctctagtgcctctgaaatccgaagtttcttgg

SEQ ID NO: 151829 - DNA, 328 bp, Zea Mays
tgctgatctgattcagctctttgtctgattgcctgagatcctcttcccatgcaagacgatcctcatcacgtaccatcaacgtgttcttgcgttcttccacatcctggaatttggcgttagccaaatcaaacatttcctttagtctttggagctctatggtgagctcctctacttatttctctgcacctttggacattgtgaaggctgcttgagctttgttaatggaaatatcagttccgatcaacaaagaatcataatcctcctgcacttttcccaacacatatttcactgaaatcactttggcaaccaatgctttgtgtcgttcttg

SEQ ID NO: 151830 - DNA, 855 bp, Zea Mays
gtcggcgtcggaggccaccgcccaccgtcctataccctccactccatccaaggaggagaaaacgaacccagcctcacccaggctcgttcagacgccgaccaacgcgatcgcttcctccgacgcctcccgcgctctccacgaacaactggtatgagcttcgttcgcctcggccgctcgactcgccgtcgtccagccgcggttctctttctcctcaaaggcaatgtatctcctccggtccccacccctgtgattcaatcgtttcgtattaggtatcgctgcagtgccaaacggtgatcggccggggccgcctggttcaaacttcaaagcaaacttcgattcgcatctcgccggttgagtttcataggcgcgttgcctgatgtatcctagttggaatggacgctggctgctgggtgtgtgaggcccttagcaggtaacttggagggatgggcgtgggccggccaatctgctagttgtagatggcgcgttatctgaagacgcagaatggccacgtccatgtggtatggtctcctttctatttggagaatccaccaagcagattttatactttattaagattttgtgatacttgaacttaaacaccaacgatttgttgtaaatgagcacttattctcataatgaaactcagtaatctttattgaggtgggtaacataggaagatgaccttcaaatgctagtttgttccatatgatatgagtcaattactctagaacctaactgtcaactaacatctcatatgttttcaactattttaggtggactaatttctgaattgtgaatggtactgcctccatgtagatgtttctctgaatcttttcttcagcttgatcccagaaa

SEQ ID NO: 151831 - DNA, 454 bp, Zea Mays
agagaccagggcaccaaggagccaaagctgaatatgtgtggtagcctccctgtatcccatcctcggtagaagagtccatctgataagctcatataaatacttggctgctgtagtaaaatctgccggtgaacgtcgcgacccatctgtgaagggcgggcggaacagagccgcgacgtgagctgtacccggagccacaccgccgtgagggcgacgaggagggtcagaagtgccgtagcagaggctgtgaagacgagtcgtcgactcgggaaatccaaaaagctggcggatctgactggcagtaatggtgacatcctcgcgctcaaaacgaaacctcatccagtgatgatccgggtctatccatacagaggcgtagaagactcgtacccactcctcaacatacctgccgctggtagtcaaaagggtctgaagaccaggcagataggtgaggtgcgcc

SEQ ID NO: 151832 - DNA, 382 bp, Zea Mays
acaaatcagtttcgccattgctaaatttctagcgaattcaaacgaacaaattgctggatatatattaatcagaccgtcaccaaaaccatgccatgccgattggcaattaagcggaaatcagtccagtgtcatttgcgtacgcgtacaaagcacggcagccgcagtcgcagctgccgctacgaacagcgacgacacgacggcgacgatgatccaaacctccgtcgtcttcgcctttcgctgctgccgagagcttggcttcccctcacggcggccgtctcgccgcggctggcgttgccggcgggcgacgcgcgtcccggcgtccctcatcctcacgacgaccttgctgccgaccagcacggagttggtgacaccttgcacgttg

SEQ ID NO: 151833 - DNA, 1689 bp, Zea Mays
ttgcgatggcacgaaaagagtaaaaaatagtacttacttcgtctcgtctcagaacagtagtcatttcatctctcggtttttatatctatatctaaatagatgacgatgaatctataattgtatataaaacacatacatcaagactttgatgaatctactattacctaaaacgaattttattttggtacagaggaagtatatatacgagaattatgatactccatccgttccaaaatataatttgttttagacaaataatcatgcattcattattcattaacatatgaatgtcatccacatgtatgtctatatttctacttattaagccgatgcaacttcctccccatatagaccgtccacgtcggctacaaaatcctagacacacctgcagatactacttcgcattgtagccgtacacgtggccgaaagctgttccgactgctccaccagtatgcgtgggcgcgtggctgctggcctgctgcttctgttatgaaaggaaataaaaaaaaaatgggaaacaacatcgcctagaaggatcccgtggccttcagctgcttcaccagcacgtgtggccgatctatcttgctgtaaaaaaggaaataaaaaatgaacaacatcgactattagaagggtcccattctacctaccgtgtcgcaccaggacgaccctaccgaggcagcagcgacggtgcagctgcctacgccggtggatatctcccgtgtctgtcgtttttaggtaaatagatcattttcatgcttcccttcgatttttccatgttcattactcactgtacctttctcttgtatttggtttgaaacatttgtaatgtgctctcggatctacaccgaaaatcacatgcttttttgttccctttttctctccatctacaccgaaaggcacaaattatttttggtctcttttttatgtcacattagaaaccctaaatgtgttttcccctggaaaaaatcttgcaaaaactaaaatcgcgtagtgtggagcttcctttgtattttactggtcgccgcgcatccactcacgcgttcgtgcgcttcaaatgctacctaaaagccatgcttcttcgttcttttacctgctttacaaacgagtttacggtgttgtatttccctaaaagaaggggtgattcgctctgagctaacaaaaggcatgtttagaggtgcaatattatcccattagaaaccctaaatgtgttttcccctagaaaaaatattgcaaaaactaaaatcgcgtagtgtggagcttcctttgtatattcgctctgagctaacaaaaggcattttagaggtgcaatattatcccaaaaatgtagacttctctctatcatttcttatttttaccttttgcagatgtcatttcttcttattgtattgccttctaaaaaaatatttaagtttcagatgatatgaataattaccttttattaagtttttaatacgtactttcgatgtcactaacttactttaacatacatgttaaaagggatatcacatagaattcagaattatgccttcgatacaccaacaattaacaaatgtatatagattatgccttatttgtaagaaaatatctaattatcttttgtttatgcatcctaatatagatgtgatccaaggtgatattaaagacgtattgtttgtaatttggcatatatcctataatgatcatgtgtta

SEQ ID NO: 151834 - DNA, 891 bp, Zea Mays
aaagaagaggatatagccaagggtgaggtaagtaaaacactgctctcacattgagataggagattggagattttagagaacggacatagtgcaattaccaaggtaagatcaagaggtgagaaaggtaaaggtaatacccaactggagcacgacaagggatggagttaaaaactcgcaagcgacaaggaagagaatacgaccaagggaaaataggtaaaatacaactataaaattgagatggaagagagaaggttttaaaggacgggtataatataaaaatcaagttaagatatagaggcgacaagggtaaagatgatgatcgtgaaatcataaccaaggatagagttaaggcaagactctcgaagtggcaaagttgataagacaatcaagggtgagataggtaaggtcccaacataatggttgaagtaacagaaattattaccgagggaagttatgaggaaacggtgagatcaccaaggatgtgcgaaatagaatggtcgctcatggaccatcaagaagcaagggtgatcaagggcatattaactgaaaggttttgaacagtcattgggatatgaaggtaagaatatataaaaatattagtatgcaagattccagtagtacgagtgtaccaagaccaagggaatagaataggctaaaaaataacggcttcacaacggaataggaaggggtctcagaagacaagaagttcacgggcatataaactgaaatgtctaagttggcagtagaaattcagatgtaagtatttgaaacaagagtattaaagaattcagggatatgagtatgtcaataacaaaggaataaggattgccaaatggtagaaatttaatgatggaagaagaataaatccaaaaggaaagaaggttatggtca

SEQ ID NO: 151835 - DNA, 805 bp, Zea Mays
ggcggaaggcctttaggtaattcaaacactgaagagtactggtccaataatgcttgtaagccggctggaagtgattggatcatgtcttgttcctttgttgagaagtcactgagactgcacagttggataaacgagccttgactgtctgatgtcttcaccccatagagcttgatgtaagaatttcccaccggaatagagacccacttgtccagccaatgcaccatcattgggctatttgttgccaaccaatccatgccaagcactacgtcgtactgagttaaatccaatacccggaatgtagcggtgaactggtaaccttgaagggaccacactgtgtcaaccaatgcagattcacaagtcatttgggcgccatttgccacacggaccagcaatggttgtggcaaggaagtaagattggaacattgatttgcaatggtggagctaataaatgaaattgagctgccggaatcaagcaggatgagcaccgagagaccacaaacttcgcccacaaaacgcattgttttcatttgaggcacctgagcaattgctgaatacgataactgaaagctgttgagctgaatgtcctcgagcttttcagaaagggcctcttcagacggttctggaaattgatcccaaagttcttccacgaggtgcagctggactgaatctgggcattgatgaccgcgggtataaggtgacccacacttgtagcataacccttgagccttccgatacacatagactgaagcaagacgatcaccactcccaggtggctgaacagagtgcagagacttgtgttcttgtg

SEQ ID NO: 151836 - DNA, 1538 bp, Zea Mays
acagatttgaaacaagagctgctaaaatttgtcagtacagttgagaaatgacttataagcattatttcagataccaaaatcacaagctaaatcagtcaatgaactgcacttcctgaagtcctcagaagctacaggctctgaggctgcccccttagcattacacatgtatagtttgcttctgtttgcattaatccagcttgttccaggttctttctttacctttcttgatttcatcagcttccttacctttacagcgtcttcccaatgcccaatcgtcctatacacattttcaagaagaacatagctcaggtggtattgaggctccaattccatcatcttctttgcaacccttactgctacatctgggttagtatgtgtggcacaggcaccaagtattgctgcccacagtgatgaatcatctctaaattgtgacttgtttacaagatcttcagcctcttctagaagctccactctactgaggaggtcaacaatgcaattgtaatgttcaataccagggggaataccatagtccttgctcattgagttgaagtagttccttccctcttcaaccatcccagtatggctacaagcaaaaagaacaccaatgaaactgatgtagtctggcttgacccctcctctaaccatctcattgaacaggctgatggctcgctcaccatggccattctgagcacaaccacaaatcatggcattccaagtaatcatgttgcggacactgctcattttgaatactctgtaggcatagtctactgcaccacattttgcgtacaggtccacgagtgcggattcaacaatgacatctccgcatcctctcatcctcatagaacggcagtggatttcttttcctagcttcactgcagacagaccagcacaagatcgcagaagagtccctaagctataccagtcatcgtcctgctcctgcatatgcatctgtcgaaacaacgagagaaccttctcatgcttcccagtttgacaataccccccaagcagggcacaccatgaaactgcattcggagccttcatcctgtcgaataccttgcgtgcatccaccatcataccacacttggcatacatgtcaagtgtgctgctctccacgatgacgttcccacacaggccacgtgtcacaacctgcgcgtgtgcctccctaccctgcctcgctctcttcatgttcccaagcgccgacatcatagagccaaatgtgcagccgtccggccaaaccccatctgtcctgagcatagcctgaaaccaccgcagggcctcgtcgaaccagtcgttccgcacgaatgctgatatcaacgacgtgtagcatatcccatccggtgcgcgcatttcctcgaacgccttccgcgcgtcgcccggcgcacccgagtggccgtacatgtccacgagcgcgctcagcacgacgccatcgtcgccgtaccctcgcacaacggtggtcccgtgcacgcaggctcccgcgcggaggtcgtgcagcacggcgcacgccttggcggaggcggaaagcgcgtgcgcgctggggg

SEQ ID NO: 151837 - DNA, 414 bp, Zea Mays
ttccgacacagcaagcaaaatgccccctctggtttggtttgctggccgagcaacatagttagtaaggaattttgaccctaaagtgcgtgcgatgacatggtggtctaccatcgacagctttgtttcttggagacatacaattgtgctacctgtatcacgaacaagatcctgcacagtgtcccttctcgccccttcattgaggcctctcacattccagctcaggatttggcagtggcgttgagtcattcctgtaccagagaaaacccaactgcaacgcccatcatacggactggcgtgcaggttctggaactgaaggtaaacatcacaaacacagcgagcgctgacggcatagaagtagtggagcaacccgctggatatattgaagtagggtacatgcagaccgcaatggacgac

SEQ ID NO: 151838 - DNA, 654 bp, Zea Mays
cctccctttaattcgtctatgcttacctcttttctctctctacccttttcctcttgtacctgctcagttggcagagtctgagtcgaatcgaagaatccatgtgccaaccttgttttcttgctagtcttcccttgaaacacaataccatcaacctatccctgtcaaaatacaacaccatccttgtttcacgctagttgtcacttcttttctattataaatgtctaaatgtccttgtttcatatttgcgctttgtatatatcatgaaccttgtgaaaccttgtctcactctccctttttcccctacttagatgatgaatcctaataaagataaagtggagaatgtcaacgacaagattccaaccccaacagtggtgaaaaggaaagatgagtctcatagatatctgctgaatggaatgaagaacaacaagaggaccagaaagatgtttgggtacaagattaaaccacctcaaccgcaagcagaagcgccaaagctcgtgaatacctaaacaggaaaaacaaatcaagctcaactgttcaacatgcaggcaaccgatcaaccatcatctgctagcaatcaagcaaagttgactcgcagagaggtcaaagcaagaggtgcctatttctactgcaaggaagaagggcacttcatttgcc

SEQ ID NO: 151839 - DNA, 286 bp, Zea Mays
aaaattgcaccgaaaaggggacagattccattgcacacctaagcaaggtagccccttggatctccctataaatgcgcaggcagcaatcccattagagtgtggaagcagcacgcaacactgtctcctcccctcttctacctcgacccatcacctttgcatagcatatatagcgcagcagctcactgcaggcagacgaaacaccatctcttcacatcacatcagagcagagcagagcagagcatcacccgatcccgatcccgctattcccagcctgcagtagcagcag

SEQ ID NO: 151840 - DNA, 432 bp, Zea Mays
ctttctatattttcctctgctctgtttccttgaatgtgtggatctctttcctttccaactttctccattgatggaaggtggaaatcggcagtgtcctcaccggctataaatgtagccacaccctaagtttctatctcctctctttttttgcgcctccagatcgatgtgagttctcttcttcctcacaccaacgccggccagtttctgccaacagcagcggcaccttcttcctcacgccaacaccaacgccgaccagtttccggcaacagcagcggcacctcaggtttgtctttccttcttactctctctctctctccctgcatggagtcttgctctgccatgcatgttcgttgtcgaccttatcatattagtttgtggtcgaccttatcgtattttactaatccttaagggtggaaacaatgtcgttggggt

SEQ ID NO: 151841 - DNA, 325 bp, Zea Mays
ggagggagggctcaccggagcggaggaatagggcagtgtgctggctcgattgagctcggggaagaggaagagaggtggacgaagctggtgtgaagaaaactggagcttgggcggtcccttttataggcggccggggaggggggagaggtggcgagcaccggcgacgcttgccgcagtggcgatgatggagcatagtggtggcgacgggatggctcgggaagacggtggtgacgggatagctcggggcaggcgcaaagtgccaattcgggtggtgggcgagtaatggcgaggggatgtggtggagcggtgaccagcggtgatcgcg

SEQ ID NO: 151842 - DNA, 501 bp, Zea Mays
tctcttgtaagtatggatctttatgtgcaacttgattattctgtgaacagggtgccagaatacaccactggtactggcaaataagatgttctctttttctggagtatttttaatcttagctggttgttctgctattagggtatagtggtcaccctaaacaatgcgaatgcaagtataccacgctggcttaaggcgttttccgacttaagccgatcgccttgctggtagggcgcagtggtcaccctaagtgaagtaagtcgaagtatattgcaccgacttaagtcgtcaccgacttaagtcgatcgcacctttagcagggtatagtggtcaccctaagtcaggtaagcgtgagcatgtcacaccgacttaagtcgttgccgtcttaagccgattgctccgttagcagggtatagtggtcacccatagtcaagtaagcgtgagcatgtcacaaagacttaagttgtcgctgacttaagccgattgctccattagcagggtata

SEQ ID NO: 151843 - DNA, 845 bp, Zea Mays
cggggacttgataccgaccttgctggggttgctgaggttgacgagggaggactggggtgtggttagtttgctgggggtggttccacatcacttttttagtgatgttctggctgctcgatgaatatagaggatggtagcgatccatgtatcaatctgctccaaaagaacatggagttgccctgtttagggttgtcaatgagccaagttcaagcgagcctaggatttccttcgaggttggagtcaagctcaagcttggctcaaatgaagctaaaaaaggctcgagcttggcttggctaagcacaactgatgacatcctctgctaaaggaatacacaacactcaaaagttgctgcataggaaatcaaatttggagctgtttggttcttttatttccctcttttggttccaatggtttctgctgggtttgacactttattttgttgtgtgatgagcctcgctaggggggtgggggtgttggcgtatgagcaagaggtggcagaagctagaggagggtgcagcgcagggagagaggcacacatagatggatagaggggtggggtggggagagagatagagtgagactgtgagagcaattgctctactcttgcttaagatccaaatggttacatgacccctgtatttgtagtccctatcggacttactgccaagcaaattagagatgagtgcttatagatttggaccctcctttcctaagcaagccaatccttatttcctaacaaattcttcctttttattctcaaccttactaaatctatctctaatttccatatgtttcagtctcttccgggtgggagggggctagtggcaccgtgggccaggtacgac

SEQ ID NO: 151844 - DNA, 870 bp, Zea Mays
gtaatcctctcctatcgtgcatgcttgactcgtgagcctacttagccagcgacacgcgatgggagactacgatcgcgtccttgcttcgcttacatgagggaccagcgcgccaggtacgtcatcctcatcgaagtccatcgctgggcgattacagcaaacccaggatccgcgcggccggttgtgatcggctggttattatccgattcgcctcgcagggtgtatatataagccctgaaccacctcctcatccatcaaatcgaaccatcgcgacgacccaattggagagcaccttcggtgaggatcagagagggagaaagggagaaggatagccgtcgtcgacatcattcgcctccgccaccatccagaatccccaatgtgactgaaggcgttctgtcaggtgtatggtgcgtgctcggggaagcagtggagtgtgcgggaccacagagccatggcaattcgtcgccggtgacgggagcgccactgcggaacgcacttctcgatgggcggaggacgacgcgatgtaatcctcggtaagagcacccatatcgatttcgccttagcacctgcatcatttatcacctagttgactttgggaatcgggcaccacagccccgaagcgtgggagctgtgtggagtgttgatccgagcacatgtgactgttattagacgtagaatcacccttcgcacgtttcaatccgggtcactggatcagatcgggtggttctgatcgaatcccacttcattaaatcgtggttgttcatcctcgatcctagggcggtcatcgcgtaccggttcaagctgagaaacgtttaatcgatgttgtcgattcagatcgaatgacgctgatatacctataccccttcgaccgca

SEQ ID NO: 151845 - DNA, 322 bp, Zea Mays
attagagtaatgggcatagactagaatataaccggtgttagcgctacgatctctgagagggaagagaaggggtagacacaggagaggaggggtaggcgatgaccatagcagcaacgcgagttagggggaggaggcagcgagatgatgggatggggaggctggggtcgcactaaggaagatgaataatctaaataatattgtccattgaaattgaaaaaaaggagataaagttattcagcgatttaaaacgttgattttgatgatgtgttaagcatgcatgtaatttgtttggtggatttagtggatgctataggtgtgagag

SEQ ID NO: 151846 - DNA, 653 bp, Zea Mays
ctgatttcactgacgccgaccccaatgggtgtgctccatctgctgctgatcccaatgggtgtgccccatccgatgctgatcccaatgggtgtgccccatccgatgctgatcccaatgggtgtgctgcttatgttgttgatgaaaacgacagggaggaagaagatgaggtccctctgacccggaagaacagtcggcagtatattgccagtggggagagtagcggagttccttctcctactttgtcagccctcgttggcctacaggagttatctctggcaaactttgatcagaccctggacgatatggttccagaggaccttttgttagagccagcggatgatggtgtgatggaggtttgtgctgatgtgcttgatgctgggttgaggtcatcccgcgcctcatcgaccttagagcgcggtcttgaaggccaggagactgatttggatcgtctcggtcccatggaagcaactgaggggccttcagccttagaggtggccactgcagagaactcagctctcaaggatggtgttgacgcttacccagcccccgagggtgttgccgagggtgactcggcccgggtgggaagtgcaagccactgtccagcccccgagggtactgccggagatgatccggctcgcgtgggtagcgcaaac

SEQ ID NO: 151847 - DNA, 445 bp, Zea Mays
gtttgggttcaattggagcatttttggctggtttaggcatttcaccgaacacgtggagggcgaagttttagggtttcggagaaatggccatttgaggtgtgaaaaccctcctgaaggagctaagaacctgcaggaatgctcaaggcacacagaggaacacattgcacaacaaggattcactggaattcacaggatttgaatttgagcacaaagggtggaaatggtctcactgagttgaacagagggaagagagaggagaagacaaggctgctcaccgagcgaggacaggagagcagcactggtcgaggacgtcggagagcagtggacgccggtgaggggtggtcactggcggggttgagatcaccagagacagagagagaggctggccagaggggagaggaaatgagcttgggctcgggctcgggcagagaaggatttttaaaaa

SEQ ID NO: 151848 - DNA, 495 bp, Zea Mays
aaactcaaatggtccaatggacaagtttgcgcctaatcacctcagacatgtcctcgaggaagttgacacgaaacccagcccgtttgacatgcttggcacacgcttttgtcgcgacccgaggggctgtgacagacacgacttggcactgccaaagctcctagcccgacgtgtatctcaccttggaactcacatagaaaagcaagatcttggtgcaaggacgagatcctacatggaaccctcactgagataggcactctagggcagctaaacagacgcttgaacttgggcagacgcaatcctccacttgttcgacctatcctaggcgcgctctgaccgcacagcgcatgccacaagcgtcgaacgacttggccgcgtgctccaccccgcgcccatgcccgaaacctcccctataagaagcccgacccttggcctttcccttctgcacgtccaaatccttccaccgacgaccgagcgccggtaatcgcttgaaaaccg

SEQ ID NO: 151849 - DNA, 448 bp, Zea Mays
tctggctcggcccatagcggctgtcgtgactcgccgccgcgcggatcgggggagaaaagaggtatggttctagggtttccttcagatttcattggtgctcattctttcccacatttcgcgtcgttcctctcctgtctctggtctcttccgttcacgacacgttccaacttcagaggaggttggtttgcgtcctgattcgtcctcccgtggtcgaagaagagtggcccctcccgggtcgcgcttttgctgtgtcgcggatggatccgaagggcaggaaccctagctgggatcgttgggggcagaaggaggtcctgcaaggctctcagacgtggggaaagaatcggaatctcagctggagattgaaatcggctcctggaaaagcagagaacaaggaagatataatgacatcttcttctggtgatggcggtcaatcaggtattctcaagtc

SEQ ID NO: 151850 - DNA, 275 bp, Zea Mays
accccctgctcagatggagacaccgagattggagaccgaagatgatcgaccccatcaagaaaggataagcaccaactcaaggcttcaaggatcaagcgggttcaccagatgaatcaagatccacagttctggataaagtctttccttattatactcttccttgccacaacctatacttgccataaccatgcctcatctgacataataaatggctagacatacttgccgtaaccatgcctcatctgacataataaatggctagacatacatatcca

SEQ ID NO: 151851 - DNA, 606 bp, Zea Mays
gatggggaaaatctatgcgaagctcttattctctctcccaggtagcttcatcctctccatggtgactccattgcattttacacatctttatcaccttattccttgtaactccagtcaatgtgtcaagaatcttgatcgggtactccgtgtaagtcaaatcaccctgaacactaagctcttccattggtaactgttcctcagggacacggagacacttcttaagttgagacacatggaatacattatgcacatcagttagattatcaggtagctcgagttgataggccatctctccaagtcgcctaaaaactcaaaagggtccaatatagcgaggggacaatttgcccttgactttgaatctcctcattccacgaagtggtgacaccttgaggtacacataatctccttcttcaaattccagtggtcttcttctattatctgcgtagctcttttgcctggtttgagccaccctcaaattctctcgaattatacggacttgttcttctgcttcttgaatcaattcaggcccaaagaattgtctttctccagtctgatcccaatacaaaggagtcctgcacttcctcccatataaagcttcaaaaggtg

SEQ ID NO: 151852 - DNA, 372 bp, Zea Mays
cttagaagttccctcacaagtttgggcagacatagcgatggacttcgtggaaggcctcccaaaggtgcacggcaaatcagtcatactaactgtggtggatcggttctccaaatatgcccatttcattgccctgggacatccttatactgcagcctcagtggcacgagccttctttgacaacatagtccgtcttcatggatttccactttccattgccagcgatcgtgatccagtctttacaggcagcttctggcgcgatcttttcaaggtggctggggtcaaactccacatgagcacgactttccacccccagacagatggacagtccgaggttgtcaataaaactatagccatgtacctgcgatgcctaat

SEQ ID NO: 151853 - DNA, 543 bp, Zea Mays
gctagttcaaatgctggcccacttaaacttcataactggctaacttcatacctgtccatggtagttatttttgcttccagggcaacatttgcgtaggttaaagctaaaggaaaagaaaaacagaaccaattaacacatagcattggggttaacgaactagagcaacgaccatcatagaagaacatattcagttcatcgatatggtttcaattagattaaattacacggcagaacctcaaaacaacatattttagtgaaagaaggatgaatcatgcaaacaagtcagagacctgcttttcaaataccactagatggaagttccaaaggaaaaaaatgaaaccttggccaggagaagaggacaggctttgtcttattagacagaaaagtactactaaaccatattgggttggtgccttggtgggcagcctgtcaactggagccagccgagttcggactatcaatgctattgcaaatagaaagggagtgacacagtattttcggttgaatgggtgtgtttgtttgctttgtttaccaaagtgtgcc

SEQ ID NO: 151854 - DNA, 272 bp, Zea Mays
tctgtgctcgaatccccagcgcttcgtcgaatgcagattacgtttgacgagtgacactgttgtccatatctatggccaccgctcgaactagctagtttcggacaggtcaacgtgatggacgtacggggatagattagatgcatagccactgagcaacactagaaagcatgcttttgactagtgaagttgggggcatttcctatagtgcaatcgattaccgtagatagcactatccgcactagtgttcggtaaaactcacgctacgagccctg

SEQ ID NO: 151855 - DNA, 617 bp, Zea Mays
gtagctacaagacaggcttagcttagagagctactagccagggtaactaataaattgacgaagaagaccgtgccagagcttcttccatcccgcgcgccaccgccgcgcgccatgggaggaggcaagtcgttcttctgccccagcatcttcagctttctgcgcaagtggaggcgctacgacgacgacatggccgactgggacggcgggtacgcgcgcaaggtgcgctccagcgacgaggactacggcggctggtgggtcggcgagcccgacgtcgaccgcaaggcctccgacttcatcaacaacttccaccagaagaattgaagggtcgcgttctctgctagctgcgactgctaccgcttccccacgccagcatagcatgcaatatgcatatatatggtcgacgacgacgatggcacacggccggcagcaccaccgcccgccgccgcgccggtccacgctatgcatgcatgcagctacgtttcatttattaccaggttctttgatattcttatatatatgttgacgactatacatattagctgatctcgtttgtcatgttattatgtcgtgctcatttaatcagagagtgagagagaggatgaataattcaatctgct

SEQ ID NO: 151856 - DNA, 639 bp, Zea Mays
gctcgatcagcgaagttgacttgtactgcagcatgggcacttcatcatttgtgtaggtccacatctccattttcaggtgagcgaccgacccatcgagcgggaggacaatgagcccaacccccatcggcaacgtaaggaggctttggctgttctagtattcactctaatatatatgggttaagaagaattagagttgtcctctgtgtgatcaggaacctgaaacaattgatcatttgctaggcagctgtaacacatttagtaaatttggcctgcaagcattggcccctcaagtgggcaggctttcctttgatgactggtaggaaacagtaaatagccgagtggagggtcagattagaaaagagttgaactctgtcatcatcctctgtgcttggtcaatttggactcaccgaaataggtgtgtttgatggagtgtccccaaatttaaatgttgtttcggcagtggtggatgatgaattgcagaggtggagtatggctggagcaaaagggatatcctacctgcttgctatggctcctgggtcggagcagatgaatgctatgtgtgggttaaggtcgtgtatccctctgtttctagtggtgtaaataagtagttttaggctaggttttttggcttcttagttg

SEQ ID NO: 151857 - DNA, 1035 bp, Zea Mays
tacacactaaacatgcattcaagttatgtcgactttcatcccacatgaagacctatgatccacatcaagaacctaaataaaaactaaaacacaaaaccatgcattcaaattcctgaacttcatcccacatgaagacccatgaaccacgtcaagaaccaaaattaaaattaaaacccacaccctcaagtaattataaggttagaaaagaaagtgggtgagcatgtcctgtaagaacatagaattcaagcaactgaatacctaatgggctataaatattgtcaccccaaggttctgacaaggaaaagaactcacaggcatacacgttactgtaaccaatgcccattatgcataaacaccagtagagcttttacctgtgaaattgcctcaaaaatttaggcagaaaatcaccctctccagtaaaagttcactatgaaccctagatgaatcacgcgggatactccagttccctacaccagctatagagagctgttctaattcaagcctagataagctacagaccaaaagctcaccactctgctactctactcctaatgcaaccctagacacttcaaaaaaaacgacagaagactactgaatcgaactaaacaacggaggtgagccccgcgctcaaatcactgccacacgcctgatccgacccccagatgtaccattcccacgcgcaatacaccgaatcgagacgtactagcctcgttaaggaacatggataaaagggggctacctcggaggggaactgtgcgcagaggcgctcgcagaggaatatggcgttgcggtacatgaagaggcggaggctactgtggacgcggtctaccattagggtttccatcgccgcccagcggcggcggcgagcgcgggtgggcgatatcaaggggattggggaagtagtgcggtggccgaaacgcaggcggcaggcgcagcaggggagtgtgagtgtccggactctggtcgtttgaatcagccgtttgaatccagcaggctcttgatttttgggtgcgatgcgatctgatagggcattcc

SEQ ID NO: 151858 - DNA, 446 bp, Zea Mays
tcgtgttactccacgctccatggagcgagaatctaacgatggtagaactctacttttttctagagtaacatggatttacccccggcaaaaacgactgctagtcccactgagcttttgcttctgaatctgaagctctgagttcatcacacctgcctatgtgagcataaagccaaacgcgcataaaacaagctttcaggagaagaacagcatgcgaatcaactcaagggtgctgagatgtccacagctgtgcagttctgggtctatgtcaaaactgtaaagtcattgctggtgctgagaactagacgattttttttggcatctttacgaaaatcactcaaagtccattcttgtgcccatattaagaatgatgctcaaacaacttccatatatgaaaaatgctttaggaacctgtagcacctagcagtaagccagcgacagtgcaaaat

SEQ ID NO: 151859 - DNA, 411 bp, Zea Mays
atcaattatagaaatttgtctaactgtagttttgaggaatataaaacatcctttatatttgagacactcatgccaccaacctcaaagctagtaaacattcggtttgatcaaatatggtgggtgtaagggacaagtcagatgagtaaggtacatatcatttctcgggcgatgtcaaaaagacagttaccatggcagacaaccaggcaacgtttgtcacttatggggtaagatttgcatattttaatggtcgcacaacgaagataggatgtatcagtaacacacatgcaaaagtatcaaagggctagaaattgttagcaagcactatgtgattgctcaatcaaaagattccacggtccgtagttttcttaatgaaatggagtgaatcagaaatcaataaatttgacattcaca

SEQ ID NO: 151860 - DNA, 291 bp, Zea Mays
tcggcgctctttgatagctaaatgatcatggctggaaatgcgcggattaacttatttgatgccatttgttggtgttcgggttcacgtatgcttgccacatctgcattcggatggttgctaggttgagtagagtgccatccagttcggttggtgacatttgcagctgcgtgtccagacaacttctgtggggggttttactgcaattgtttctgatttttggtgctctttgatgcctgctgattaggataggatgcaaataggttttgttaggcatgtggattagcttttcca

SEQ ID NO: 151861 - DNA, 327 bp, Zea Mays
tgagtgtgtacccctttagatttatgatgatataatcatggccgtcggttcagatctagcggctgagactccaagataccccttcggcctcaacaattcgctaaagagaccctgtgttttactaaaatcaacccgccgtcccatactgttgtgcgctgtgtcttaaggtttcttgcgctgagccccctggatttccatttattagtgtgcgcggaccagagacagataaattcgttttagaaatgatttaatacaaaattaactacagaaacttatttaatcattagaaagttcatttgaagtccaaattgacccattccagttcct

SEQ ID NO: 151862 - DNA, 395 bp, Zea Mays
gtcaaattcacatgatgggcagaatttgaacgacaatatagatgtttagagtctggacacaaaaaacaaactgattcctttatgtatctagacaagcatcgtaaagaccaaacagatgcatagcatggtgctatgatgtttttttcatgttcagtttgtcatgtgacctaatatgggctaataagttcagttttcttgaggatagctaactgttttacagttttgcaacttcaacgttcaaccattttatttctgtcaggctgcattggacttgatggtcttaacttttccaggtatttgtgtaggcactagattactgattactgatagcgcaagaacaactcggtatgggagtgtaaaggttgggaggaggcatggacataggctggaaatgc

SEQ ID NO: 151863 - DNA, 421 bp, Zea Mays
gtcaggacagacaaataaaaatttgctaataaatcaaataggcccaaatataaatcattttctttgaaaattcagggtcagacttgcagagaactaatcgaaaacatggatggcttctgatttttttttctggtaggtgtacatgggcagaccaagactcagtgagtattcacctaggaagctatcaggaaagctacaaccagcgaccttgttcccttcgttgtagacgcagctcttccgggattcatcacgtcaccgtcgggatggcgcagcagcaagcgatgggaatctcagatggacgccacagctcgcgcgcgatgcgatttggaggtgcgaaggcaggagaaaggcgcaggaaaaggaaatcgcgagagatttggagcgtcggcgtctgcggaaacatgtgtatgctggaggtctc

SEQ ID NO: 151864 - DNA, 542 bp, Zea Mays
ttcgaccaccactgcccctgggtcggccagtgcatcggccggcggaattaccgcttcttcttcatgttcatctcatccaccacgttcctgtgcctctacgtgttcggcttctgctgggtgaacctgctgctcatctcccggcgctacggcgtcagcttcggcagcgccgtcgcggagtcccccgtgtcgggctgcctcatcgtctacaccttcgtcacggcgtggttcgtcggcgggctcacggcgttccactcctacctcgtgtgcaccaaccagaccacgtacgagaacttccggtaccggtacgagcgcaaggccaaccccttcaaccgcggcgccggccacaacatcgctgagatcttcttctcgccgatcccgccgtccaggaacgacttccgggccaaggtctcgcccgccgacccggacgccgccgcgctctactacctcggcccgctgtcgtccgagtcccgcatcagcttctacaccagggccagcctcagcttcgacatggccaaggccagcttcgacctcaactactccgc

SEQ ID NO: 151865 - DNA, 633 bp, Zea Mays
ctgggagacttgaagaggaaggctatctcacaggggcagggtagcagcagtgttcgtcctcgctatgttccgccacagggtacacctactcgtccaggaggaggaccattcctagctcaatacgctccacaggggtctccacggacacctcccactcgtcaggctactcccactggcaccccaacgaggtttgcaggatagaagacaggccctacatgcttcaagtgcagtcagattgggaactatgctaatgcttgtccggtggggaattctggcacatcagctcagaacaagcaacagactcctggcaagggatactctatagccagggttaatcaagtcagcgcagatgctactcctgatggtgctaacatcgcacttggtatgttttatattaatgcaattcctgcaaccatattatttgattctggtgctacacattcttttatgtctgctcgttatgccaacacaaatgagataccactgcaaaatatgagaaaaccaatgatagtaattacacctaaagggcctgttgaggcaaatcacatgacacataggttgacattaactattatgggaagagaattctgggctaccactgtaatattagaggcaagcagtatagatctgatc

SEQ ID NO: 151866 - DNA, 285 bp, Zea Mays
ctcaagtctcaactagctgtgttaccaatcaaaagcggcatatcaaaagcggcatcattttcctaagaaagaagagaaatggcatgtggcctgagaaaggcgtactctacgagtgacgacatctatacacagctagtatactatacggtctctcctttccgtggctctctattccaatccaattgcatttctgccatcatctctacgcaaaagcatgcatgtcacttgcatcgaacttcgctcgcatttcctccctaggaattttccaattgcattgtacaaaac

SEQ ID NO: 151867 - DNA, 275 bp, Zea Mays
cggtgtgaatgaccttggatgagtttgtcggggtccaactagatctacttggtgagcgaggactcgtcctgcagagttactggcaaggaattatttgggggagactcaagatttccctcctttccttctctatggtgactatatctcaaggcttcctttaggctgtcgcatttggtctacatcacctaggactcgatgaggttgcacccttctctatcacaaacataggactacttcaaattgtccttgatggtgattacccactaggatcgaac

SEQ ID NO: 151868 - DNA, 310 bp, Zea Mays
aaagatggaggtctgcttagtgacgtagactctgggcccgtgctggactcgatgtgtaaagccggcctgctatcctccccacagttggcagcgaggcagtgatcactgctctgttgagccagcctcatcgtcaatgaggtgccgagctttcgctagagctcccgtcagccaccaagtacccaacttgagacgggcagcaagccggcggccaaggcacttgcccatacaccgagtcccaggcccagaagagtcgtaactaaagcgcatccgcaccacccttaatgcccccgcacgggttacaagccctcgc

SEQ ID NO: 151869 - DNA, 479 bp, Zea Mays
gcgcaaggcaacaggccaatagccatcgcttgctgattggggttgcggtccttggggagacgaaacggaaggtgacggcgaagaatccgggattggcattggcaattttggaaagaggaagacgaggagtcggggagacgaatgggtgttgactgctgaccactgaagtgctgagtctaggaccctgggtatgacctgtgtcgtgcggtgcgcttcgtgggttcgagagttcgggtacagtaggtcagtacccgaattatcttgattaactttggtaggggtgtaatctgaataaatattatcggacattcgaaccgtccaaaatggtcgaatagagattcgaatgcattttttcggatatccggacttattttcgaataacaaatacaaataaggatatttatatcgaaatcaaatataatataataaacatccgacggataccaaatatccaatacatttttcgaatacatctgaac

SEQ ID NO: 151870 - DNA, 886 bp, Zea Mays
atatgaccatccaggctgtttccttagtacattggagctacaagaaagttatcttctaacacagctaaataccaacagtattatagggcccataagactgacttcagtagttcacccaaagtttacccataagcattattttgcattgttctgcactgttcgcagagtgcagtttgaatatgggtatgggtaagctgctaaagatagtctaagggtaacaagactaccaatacaacgtagtgatccataatacaagtgtttttgagcatagcaatggcaggtgggcctatggcagtattagccatgttatgcgtcagcagccagccagcccttcctcattagctagagatatagggtaaattagggatatgattaaatacaatttgttagagcacttccaggattccacctaaattagatctattttgtcagagtgtatcctgaatataatccaccctaaattgttttctctcacaacagtccccctcaatttcaaccgctatcttttaaacatatctggtcccagtttctgtatttatctagtcttcatttttctgtcagacgccgatcgcctcttgttgagtcctacacaacggtggctgatcgataaggatcccacaggtcctgacaacattttaacaccagccggcagccaccaggggaagatgtctgtgccaggacaaacagtaacaggtgaatagaaattgccgtgagcatggcctggtggcatcgggtggtcagcgtgcgagggaagggcagcgccgcatggcaggcacaaaagggagagcggtgcaggcacttggcacatgacgaggtggtatgacaaggaaaagggcacgtgcagaaaaaaggtgctaagcatgcaaccaagaatcgagggacaaat

SEQ ID NO: 151871 - DNA, 429 bp, Zea Mays
aaagcaagtgtgtctctatcgtgcttgctggtacaaaccttactgactcttgattataatagaagttcgttatggcgtgtaaacaggtcataacggtggaagcactgagttctggtcactagcattgtggagcaactttgcaagtggatggagccatgcatgctaaaagggcatcctctgtcacagttcgcctagcaaatgatttcctttcagttgtgttgacatcaaatcacaggggatgcacgcactcccatccaggttagtgccttgagcttatttggcgttgaaaacttgcatgcttccttatcgtggagagccatgctgctaaaataaatcgaggttgcttttgctgtgcggttggtaagttggtttgtgggtgctcttctagagcccctacctgttggcttggccatatatgtgttacggggg

SEQ ID NO: 151872 - DNA, 589 bp, Zea Mays
acctatggctgtcaaattttaacaccagcaagataataaggttatctaccacttttctatagcacatatctacagaaaacacaatttagttcatcaaatatacagcacaactaaaacagcgcgtgcagcccaaaacagcaatcaacacatttcagctcctatataattcaagaatctccgcgttgtagagactcgaattattctaacgctttaccatttgttagagttaaattactcaaattaggaccaacaagtagacttactaattgttatacaagttattttacgcgctagaactatcatacaccattaaccaaggcatccatcacaatcatcaaatccggcatatatgtacatcaaaacgcgtttcatccactagttcgcgtttgagcttagacacaacatgagcactactaatttttacccacgaccataaccatgcgcatctagactacaacaagcaaatcaccgtgtttacagacttaacccaaaccatctaacaagttggttaaccagtataacacttagcaaagtgttttagatttcgcaactcaaaaacataggtgggagcaggttaattagtttttct

SEQ ID NO: 151873 - DNA, 831 bp, Zea Mays
tttctctgcagcagaggaggattagaatttggataaccaaaatcgagaacttagtaggtaggcaactctttgtttttagttaactgtctttttgctttcctcggggaattggattaagaatcggctagaagaaacagaagtgaaagcaactgcgctcaatgttgcctgataaaaaaataaaaaatgtatgaggtaggcaacccagattttcatcacacaaggtcttttctatagaaatccaggtttacatgcatgcaacagccataatgagcatctctatgaggtcaatatgtgcagtcaaccaataatttgattttctcctattttaggttcagctaaaagcttttatatgctacaacacataatgaacactacatggatgtagtgcaagacatcctcatctgtcacttgcacggttgggtgggacttgaggctgacagtcgctttgctgacctgaaatcacagagccgaaatctccaaagggtaataagatatcccaatggaatctcgctttttcgcaaagccacctttttttaaagaataaggaaggatgctttgtctgtgactcatgggcaatacaacaaacatgtggcatgacgacaaattagcatgatcttgggttcccctaataagatatcccaacggagtctcgctttttcgcaaagctaccattttttaaagaataaggaaggatgctttggctgtgactcttgagcaatacaacaaacatgtggtatgccaacaaattaacatgatctcgggttcccctgaaaattccctgtgagagcccttcaggaatcagcagaaaagaagttgtacagagcagcgacc

SEQ ID NO: 151874 - DNA, 404 bp, Zea Mays
taggttccaaacccggcggtcatacctaatctgcggtagccctatcaccagtgttcaggcgatccgaagaccgagcactatactcgcgatttcttcgtaaaattgtggagaggatggctaggcgaaccgattaggtaactacttacccggggtggtgtcgagacgagccacagccacggggcggtgtggcccgcggcggatgtgattctccggtgagcaattggtgaagttccagggctcccccaggcttgccgatgcctcgactaggttgcccaccatcaagagcaacccctcgatctaccgcggccaccagaatattagcgcagacgcggaacaacagcggtgtcgtcgagtttccctacctacgcacctcacgccaatggcgtttcgaccctggcagcttt

SEQ ID NO: 151875 - DNA, 541 bp, Zea Mays
gaaggatgaggcagtcgtggagctccaaactgggatggtacaggagtggttggtgcaggagtaggcgcggccaagtactgagggaaacctggcataggcaggaactgaggagtcccgggcatatagaactgctgctgaggggtggtatagaattgatgcttagcgattgacatcacgttgacagtgccctgcgaagaggaaggagtcactggctcccatttgagcttcccattgggattcctcctacacaccacatccttgtgatcctggctgcagataaagcacctgccactccactaacactcggcacggcgatgcgcttcaccacaacggaaacacaccaaacccagcccgggcttaggaacagccccatacctctgagtactcccttctgaagtactcgaatcagaggattttctatgataggggtgatggcgctggtgttgcgactttcccctcttatgggctggacccctagtgttggccctcctcgcgtcctggccatgagactgatcaaaacccgaagacttctgagattcca

SEQ ID NO: 151876 - DNA, 1214 bp, Zea Mays
gcctttaatttccagcctgacgacgacagtatcgatctgtctctcatctctgtacgtgtagctatgccgataatccagacctttgcaccaacgccggggattcatgtcagacggcgccgcaaggaaagagcaagctagtcatctactacgtcgctgttcctatggctctgatcgtggtggcgttggcagtactgctgtgttgtcttctgcggcggcgaaagacgcgaggtgagtagtaaagcatcgactgaccgcgctctctagctagttagctagccagccatcggccatcctgaacgagcgagaaccactggtccgccggtgcattcagggctagcggacgtctctgtgaagccccgggacaagactccgacgagccttgcttcaatggcggccgacgaacacagacttagctcgctgcggcttgagaaccgccggttcacatacgaggacctagagatgatcaccgacagcttcaagcgtgtcattggccggggcggctttggatacgtctacgagggcttcttggaggatggcactcaggtggcggtgaagatgaggtctcagtcgtccaatcagggtgccaaggagttcctcacggaggtacggacggtatagccgtctctttcacaatcacacgcacgcatggaaattaattgactagtcgccatgcatgcatgacctctctggcgggccggccggccacctctccaagtccaggcacagatcttgacacggatccatcacaagaaccttgtctccatggtcggctactgcaaagatggggtgtacatggcgcttgtctacgagtacatgtcagaaggatccctgcaggagcacattgcaggtgtgtacgtgtatactgtttagctgtttacaacttctgttgatctgaattaatttctcatgcatgctaaatatatgtcgttcttctgtatataggaaaacgcttgacttgggggcagaggcttcgaatcgcattggaatcagcgcaaggtatacaaaatcatacacactagattgcatctacagtaacaagtcatcttaactcgtgttgttaaaggtgttatttggcttgagtgatggcatgtagggctagagtatctgcacaggggctgcaacccgcctctgattcacagggacgtgaagaccagcaacatcctactgaacgcgaaactggaggccaaggttgctgatttcggcatgtcaaaggc

SEQ ID NO: 151877 - DNA, 625 bp, Zea Mays
aaccagccataaaacggtcatatgctgattttgtggtataatctctagatgcagttggtaaccatcgatgcacatcaggagtccctggatgtaactgaaaaccttgtactaggtcccaaatcacaaagaaatcgatgataatctgcgctgacaggctgccagatatgtcatttacccatctattgtttaccagtgcttcctgcacagatctgcttttcttgattcttcctgtaatacggctgaccagcgaaggggcaagggcagatattgattgtccatgaatccaacgatcagaccaaaacagggttctagagccatcacctactgtagtgtgaaccgaggcagagaagagagcttcgacattgggatgtaccttgaacataaaatctgtccagggcctttctggttgagtttttctgagccaaagccatcttagatttaaagcccatccaagaagttctgcaactggtcgtcagaatcggcttctggctgccaaatgctttgcttctcagtccgcttctgtgaaaatcgattctgtgaaaatcgctcaaatcaatgtgaatgtagaatccgccgagtcgtcgcgatgggaggaatctggtgcttcctaaaccctaaatcgtgc

SEQ ID NO: 151878 - DNA, 688 bp, Zea Mays
gtgagcatgttgcaccgtcttaagtcgtcgccgacttaagcagattgctccgttagtagggtatagtggtcaccccaagccgagcaagcgtgagcatgttgcaccgtcttaagtcgtcgccgacttaaggcgattgctctgttagtagggtatagtggtcaccctaagccgagttagcatgagcatgttgcaccatcttaattcgtcgccgacttaagcagattgctccgttagtagggtatagtggtcaccctaagccgagttagcatgttgattttcaagtccaatcaaatcgaagtcagccgatagtcaagagtctgaatgcctttgaaaatgaaaactttattgatgatgaagtccccaattacagagtacaatgttgcttcgagagcttttgaggtcttgctaagggtaaaactttctaagatgctctatgttccatgagttcctcacttctgtgccatccatttgagtaagtcggtatgatcccggccgagtgacttctgatacaatgaatggcccttcccatagtggtgacaacttgtgccgtccttcccccgttagaattcggcgaagaaccaagtctcccactacaaaggatcggtgtcgtacgactttatcatgatagcgcctcaaggtctgctggtatctagccaactgaattactgtgttcaatcgctcttcctcc

SEQ ID NO: 151879 - DNA, 698 bp, Zea Mays
gtttttgcttgtttccttgcccaagcatgatggggcaaatcattgagcaccgcgccgagacttcggtagatttcgcggtggagggagaagctgcttcctccacaccgcaggttcccaaccgcccagtgccaggcactgctgcagtgcacgccgcacggcagcacacggctgcgcaaacctcccggactccatcgagggcttctccgggagcattatcggcggccagggagttgttgtgacaccctccaagctccacggcctcaccggggaccatgaagcaatggcgggacgacgtcgaccgactactcggtatggcacattctacctcgaccaggtcgaggacgcggtcatcccgacgccaacacgaggcgtcagcatctgtgtgctcgccctcagtaaggggtgcacagaccaacgacctccggacagaactcaaccgcaggcgtgcgggagaggatgcccgggtctctttggaaagggcgcgcgagcgccgccaaaacatcgatggtcgcaacctcgatcaagacttcgctgcagttgcactgcagacaccaatgggcacccggtcccaaacgggtgtccccttggccggtgtgggctacgctgctcttgcggatcatctccgcgcggcgtcatggccacccaagttccggccgcacctgccggaaaagtacgacggaacatcgaacccgtcggag

SEQ ID NO: 151880 - DNA, 1925 bp, Zea Mays
aactccctcatcctcctacccaatgactaaaggaactccaaggacagatgcttcatagccataaagggcctggaaaggtgaacaacctaatgatgagtggaaagaggtgttataccataatccggctaatgatagccaagacttccatatctgagggttggagtgtacagcacatctgagatacatctccaaacactgattaactctctcactctgaccatctgtctgaggttgataggctatgcttaaagcaagcctgatatccaagagtttgaacaaatgtttccaaaaaacacttgtaaaaatcttgtccctatcagacaccactgttttgggcactccatgcagcttgactactgagtctaccatgatttgggccactccctgagcagtgaaagggtgctttaagggaaagaagtgggcatacttggtgaatcgatctaccaccaccaagatagtatcatatccttctgacttgggtaacttctcaatgaagtccatagttaggtcttgccaagctcctgcaggcacatgcaatgggtgaagtaacccagaaggatactgcttgggacttttggcctgctgacaaactccacattgtttcacaaacaattccacgtcaattttcaggcctgaccaatagaacaactttttaactctgtggtaagtagcagtgattccagaatgaccacccaatgatgaatcatgtaaagctacaatgattttggttctgagggctgaattctcccctacccaaatttggtggtctttcctgatcactccctgatgtagagagtagccatcttcatcaggactctgtactaccaacttctgtaatagctgttgggcctgtacatctatggcataagagttcaaaatttcttgaagccaaactggttgtacttcagaaactagtgctaaagtcatggctgctcccaccctagacaaagcatctgccaccacattctctttacccttcttgtaaactattttgaactggagacccatgagcttagccatagcttttctttgtaattcagactgaagttgctgttctcccaaaaaagaaagagactgatgatctgtcataatagtgaaaggagacctttgcagataaggcatccacctgtctactgccataattaaggctagaaattccttctcataaatggatagttgcttattattcatacccagggccttactcaagaaagccaatggtttgtgctcctgcataaggacagctcctatgccttcatcacatgcatcagtctcaaccacaaaaggtatctcaaaccttggtaaggccaggtgtttgagtcatggcctgcttcagattttcaaaagccatttgagcttcaactgtccaaagccataccttcttgccttgaagtaatactgtcaagggctttgccaaagtgccataatgccttacaaacttcctgtaatatccagtcaaaccttggaagcctcttaactcagtgacagaagtaggcacagaccacctgaccatggcgtcagttttggatggatcagtagcaaccccttccttagaaataatatggcccaaatattgcaactctgcctgagcaaacacacatttcttccttttgagataaaactggtggtgccttaacacattgaaaacttgcttcaaatgttgaacatgatcttgcagtgtagggctgtaaatgagaatgtcatcaataaaaaccagcacaaacttctaagaaagtgttctagaatagagttcatggcacactgaaaggtggtaggagcatttgttaacccaaatggcattactctgaattgataatgcccatgatgggttttaaaagctgtcttgtgctcatcttcctctcccatcctaatttgatggtacccagctgtcatatccaaactggaaaaatattgtgcctgctaat

SEQ ID NO: 151881 - DNA, 351 bp, Zea Mays
gcgaccagcgagacggcgagcagcgacctgagcgcgcagcactgaccacgacgagcagcgagcccgacctgagcacgccgccccgacctaagcccccggccccacctcagcgcctcagcctcgccgtcggccgcctcgggactcgggtgctttccgcgctaccgcgcctccacgcctctgcagactgcaggttagtggttagtctgttagccgcgcaggttattctgtcagccttgcaagttagtctgttgtctgttagtgattttgccctttgttagccttgcaggttactcaatttcaacctctctgtttatacagatcgtgatatcaactcccaacgaaaatagcaac

SEQ ID NO: 151882 - DNA, 456 bp, Zea Mays
caacagtagcactgtactggaagtatggaacttctattggagttgcctatcaatgattcacattgtttgtttccatgcagaatctaagataaatattattgagacataatggtgacagcttgtcaattatcctgcctttggaattattttctactacttgcttcctatatgtttagagtgatctgtttgaatgatcacttgggtttacgacgcgtgtccaccagacatttaaattcctgagtttagttgacgtagtgattttaatccattcttcacggactagtactgtctgtttattgtatgacttacagttagtgcaggcatgaatgtttgcatgactcaaatcttattttgattcagctgtattttgtcttttatgacagtgagaatatctgctattctgttttaatataattttgtttgctccatacaatcgttggagtcaaacaatttcta

SEQ ID NO: 151883 - DNA, 372 bp, Zea Mays
actacttccaccgctggcgatgaactgccgtctgtttttccgagttaaaggagcttcattttcttcctcttcatcttccacagtgacaacataagtagcacccccattgggatcagcaacagacggagcacccacattgggatcagtagcagtttgggtacacccattggggtcggcgtcagtaagtccagtcgtaggcactccttcagtagcaggaactgaggtaccagcgtcctcatcaaaactggatacccgccggaggcgtcttcttttcttcttttgctcatcagcagaaggctcaggctgattggttcggctaggacgcctcgggcgagtactgacaggttttgggacatccaaagttgtatcaac

SEQ ID NO: 151884 - DNA, 517 bp, Zea Mays
aatgtggagaaaatctcaacccaagttggactgtcagactgctaaaggactgaaatcaggctaacagtgagctaacagcaacttcaagcccaatttcgagtatgatctaatggcttttagtggcaacaccatattgcaacatggtatatggtacattgctctacaatttttctgcagagattgacacgggttgtcattagaaattgagagaggattgggctccaaaattgactgtcaggcgtctgaaccgaacttcaccatggtacagtaacccaattggggatcagaccgccgcgacagaaaaatcccgccgacggcgacctccctgcgcgaacagtcacgacgcctccgtgattcgtgttcactggcggttggataactacggcggggaggggataggatcgcgtcgtggatattttcgggtcgccgtggcctcgcggtattccgaccacgtgcatcgacaacgtggccgtgcggccgtcgccggagtttgcgtcctccgccgcgattgtgccac

SEQ ID NO: 151885 - DNA, 975 bp, Zea Mays
acaatttgcaactgaaggagtaacttacaaagcatctgtgtaaatattgatttatcagacaatgtcgatattgctcactttatttggacccattctctcattttatgaaaaaaattgttagcccaagaatatgactgaaaacttggaccattcaaccagataagtaaacttataatataatctctgttggaattgctgtatttttttatccaatttcatcatcttatcgaacaattgaaaatggcattcttttcttctctgtgccggcgacataaatttcagatactatccatccagtcttgctgtgtatctgggtagaattgcccccaaagcatgttggacttatgggcctctctcatatactgtactccagcatgcgttgcagttgttgctggatagagctaccaggctggatatctggatctatcataagttttatgactaggcccatgaactttagcaaaaagctgcaactttgctcgttttcaatatccttattagcttaagatggtagatgatagaggggctggcttgttgttccttgtcagggaaacatcattagggtttctatccctaccttacatttcaagctccactctgcgaatagtgcagaacattgttttgtctgtctatatagctggtctagtgacctcagccatactctttgtactgggtgtagtcagcactagtactgtgactggagtctcagaccttgattatttaagatgcctccatggttccattcaagtattttatgaaaagttccatgtcatggcatttcagtaacgatgtgatagtattgaattccttgggtagatgagaaatggagtctgtttttttaagtagtcggactaagtttgtccttgtatgatgcagtattagaaacaagttacaattaatgatagacatatatgaaataaccattgtcaatgacttctatgtcctgttagtgagaagttcatttttgaccatcca

SEQ ID NO: 151886 - DNA, 729 bp, Zea Mays
agggtcaaaagcgatgatggacgagcgtgtaagagagaagataaaggcatagaagagccagtggtataagtacaacaaagaatgtagtaacgtcaaggcttgcacatggtaaggaagaggatattgcaaagggtaagataggtaaaacatcgctctcaaattgagttagaaaagaggagatttcaaatagccgacctagaataagcatcgaggcaggacccacctattgcaaaggtaaggatgatatcgaacaaaagctcatgaaggatggagttaaggtaagacaagacttgcaacgtgacaaaggaaaaaaaacgaacaagagcgggatagggaaaacaacactcggattgaaatggaacaagtgaggctttaaaaatgtgggtgagtgttagggtaaatatggagagatgtcaagggtcaaggttgataacagacaaggctataagtgaagaggtaaatgtgcatcagaaccaaggatctaagtacaaccaagaatagagttaagctaagtcttgcaagtggtaaggaatgggatataaccacgggtgagataagcaagacgccactcttgaacggagatggaagattggagattttagataacgggcatggagtaattaccaaggtaagatcaagagagaaaggtggaggcaataacaaacaaaagcacaacaaaggacgaagttacaaactcgcaagccaaagaagaggatacgaggtaaagat

SEQ ID NO: 151887 - DNA, 582 bp, Zea Mays
ttcttctctacaaacaatactggagcggcccaaggcgaggtacttggtctgatgtaacccttctctaacatctcatctatttgcttcttgagttccaccaattctggtccagacactcgataggctcttttggaaatgggggcgctaccagggataagctctatggcaaattcgacttttctctcgggtggcatgcccgttagctcctcgggaaacacatctagaaagtccgacacaaccctgatagcctcaagcgggttggcctccttactatcaaccgaaatctggtgacaatctcctttcattgtcttaggcatccttagctcagccactacctcctctccaagcggggacttcaatgttacggtcctcttgtcacaactaacattcgcttcatacttcattaaccaattcatccctaggatgacatctaccccaggggtgtctattactattaggtcgctggggaaccctatcccccttatttccacccttatatttgagcatattttatctgcttgcactttaccaccgaccgaattaatcctcatgggcggcatcattgcctctactgagatgtta

SEQ ID NO: 151888 - DNA, 491 bp, Zea Mays
gcggtgttagcaatacgattgcacagccttccaaacagataaagaacaactgattcgttacaatctgaggagtttgggcgagataggaagcacaaggttgaggaactgggctatacgtagtacattgaagtgaagttgggagtcttgagaagaagaaactgaagaaacatagtagctaggactaggtcactaggagatgggttgccaacttgccattctctgaataaaattctcgatgcccctcctcgtcttttgtaccatcggagttcctagtttctatttgcaattctttgttcttggtgctgctgctgctctcaacaagtccaccgggaggtgaaagcttgtggttgtggccgtgcggaggcttgcaaagttccggcgccaggttgggtgccaatgtatttgtaggatgtttttagattaaaacgcggatccatcgctattctagcagtctgcagtatatatgcagtctgaatgtctaattgtttgtt

SEQ ID NO: 151889 - DNA, 351 bp, Zea Mays
ttctcattctcacacaccgctgctcaattcggttaacagactggcaggtgggcacacgtggtcagctcgttcttctcccctcaacagaccgcgcggcgcccgcggcaacagcgcaacaagcgcgcgatttttgcgcggattccctcgtcgtaaaactcgctgctggccgaattccgttggtcggactccatcttctctgtgttcacgagcgtcggcaggaatcccaacaaattcccgctagcatcttccctgaaattcaccgaagatctcgctggatcgttcctggctccgctcggatttgtgctcaatcctaggatatataatccttggccgagcgccccatcatccttc

SEQ ID NO: 151890 - DNA, 489 bp, Zea Mays
cctccactgcacctccctaacctcccgggtggaaagcctggagcagaaagtcagggagctttcagaagaaaaagcgtccctccaagagagcctctcgttagctgaaggcgaagagaccaacacccgtgaagcttaccgcaccctcaaaatggactacgacaaggtactaaagaagctcgcccccgcaaggaaaatccgcaagaagaccaaaagccaaggatgtcagactgagcagcaggaagaaaacccacccaggaaccagtccgacgccgaggacatgtccctggccagccttgatgaccttctcaaggagtttggggacactttagagaaagagttcgggggtaccttaggtagcactcgtgtgtaataagcttgtggtagtggtatgctatgtaatgtaatggcttgatgtaatgaataaaataactagttaaaaaaaatggcatgtgcataatagtgactctcttcccatggcagatggcttcg

SEQ ID NO: 151891 - DNA, 343 bp, Zea Mays
cactgacactttgcaagaaagtccctcgagttctattcctttacgtttcacggtccccgacggcgtggagcacggccgagctccggcgagctgtctgtgccagccgattggggcaaggactgacgtccttcttcggtcgaaaccaaattcacaccccggccaacgattcccctaagttaattgcacaattggtggattactttggtctggccatggagagcgcacggatggaccaaagatccatgcgttcccgacggtcaggggacttctagcccaattggacggttcagtaagcatcacagacacaaggagaagcttaaacgaagcagagggagggttggac

SEQ ID NO: 151892 - DNA, 346 bp, Zea Mays
tgaaatgtgttagctcaactagaagccatctagatgaagtgagaagaaatggatgggaaaaggtattaggggaagcatatgaattttgtgacaagcatgatgttgtaaaggaagaaatggaagatgcatatattgatcctaaaaggcataggaaaaaatctggcattacaaagaagcatcactatcaagttgattgttttaatgaagtttttgattggatacttcgggagcttgatggacgtttcaatgagactagctctcaattgtttgtgtttggggctgctttcaatcctagagactcatttcatgatttcaatgtggaaaatttaatgagcctcgcaaagct

SEQ ID NO: 151893 - DNA, 324 bp, Zea Mays
tatacctggttttctaaatcaaaatatgagctggtcctcaagattgcccatctcatcttcaatagcccaaaagttctctctatcacattcctagttgttgcatggcataggttgaataactctctcgcagtagatggattgttgccttgaatagcccattcattcaagtggtaccgtgtagatcggtacagggcaagaaatctcggaccatttgtatatccagcatccactagatagtatttaccactaggaacaacaaatgagtcctcccgttacatggcatcacgtagtatgcgtgaatccgaagccgacccttcccatcca

SEQ ID NO: 151894 - DNA, 327 bp, Zea Mays
tggacatcatcctcacaacaagaaaagcggggagagaaactagactgcaaggtgcctggcaataaaaaaggaaatgcctttggccccagccatcacccatctcaatctttcctgcccagctgaactcagaaccagagataaattaggagtgcagccgtcaaaaaaacaacggtttctatgattctaaagagtccaagctcccagggcaatcagatagttgaggcccttcaaagcaaggccgttcacggcttcagttttgtcctcccaccagctcataaaggatatgcgtccaggctgtcgcgccaaattctggaagctaaattgccg

SEQ ID NO: 151895 - DNA, 447 bp, Zea Mays
tatggtctgaagcaggcaccccgctttgcttccttggtctccctaggctttgttgaggcctagtcggacacgtcgctcttcatttattgttgttgtggtggcactgtatacctacttatgtatgttgacgacattgttctcatggtcttcggtcctgctatcttgcagcgaaccatctctgccttgcagcgggagtttgctatgaaggatctgggacaacttcattacttgtcattgccgttgagccccccaccctagccgcctcatgtttcttcaacaacgggcgtacactggggatctttctgattgagctagcatgacagttgcatgctttgctccaccccagtggatacacaggctaaggtctcctccgttgttggtgtccctgttagtgattccactgcatactggaccctcttcttgcgctatccagtatctcactttcac

SEQ ID NO: 151896 - DNA, 383 bp, Zea Mays
cattacagagatactctccacaaagccgcccatgtacgcagctggaacaacacaagtgtacgaatacggccaacaagccacatcaccattacaattacatacacacggcgagggcatcacctattacacacacacggcgagggcatcgcctgttacatcggctcaaccttcggaatgatacccatctccctgtaattaaacaacaatatcctcaattcctcaccctcaaaaagctcccgaagatccccctcgcctatgcccgccccaatcggcgaggacaacaattctcgtttaccaaccccgtttacccgaagtcggccacgctccatccccatgcgacgacgcctgccgcttcgtgaaaattcacccacactctgttttcc

SEQ ID NO: 151897 - DNA, 364 bp, Zea Mays
attgtatctccatcaactatatgttaagaaaacatctattagagacatcatatccaccacaccacatcttattttgatgttatagtagaagatatgagagttattaaaagtaagatatggctgatgccacactaagccataatggctcctccaccgctgttgtccggcaaaccatcacattctgtgacgcgggacgtcgagcaactcctgacttggggcactctggtcccatatgacaaaatccaccattcccattcagccattcctatcgtgcaagccatcacacactccggacgttgggcccacattgcagactacggacgcccacatgacagccaccattagttttgcacacaccggaccc

SEQ ID NO: 151898 - DNA, 660 bp, Zea Mays
ccacgggtcagggtcgtcttcccagagaaatcgcgcgcaccggcgccaccacctccgcaatccgcggttgactcgcccgactctcatgattctcggcctagatcttcggcatgaacctcccccagctccgtgaataaaagtcatgcaccgttacttcctcccctcttccatcttctcgtgcggacccagacaccataggctgtcgccgcagccgcgcgccattagctgggaatcgagaatcctgccgccgagacctaatccgcattgctgccgcgctgggtattgtgcgcttgtgtgagaagtgtggtgctgcgctcgggcgagagaaaactccactgcatcgacgccaatttctcgccggtgtagacacatcaccgtcaaccgcaccgcgccgtggtcaaggtgtctccgcgggcgaactctcggtgagtatttcgtcaactaatttgcacttacccccacatcgattaccgcgtaccgacgataggtttagggcatcagtttgaccacgggcgtgaaccacctatggcgccgccgtggagctcgggcgcgccaccgcgctccggtgagcagtgcgcatgccagggtgatccaccgtcggatctagagtgtgcggcccagattagaaaatgggatactggttcatggttgatgcgcgtc

SEQ ID NO: 151899 - DNA, 346 bp, Zea Mays
tgagaagttaccacattattcattgctattgcattgttgtgctgttgaaattttttactgaagctgaagctttctgttttctatgcacttgctgtgtaagcttcagaaaaccgtcacgttagttgaatttagcttcgtcttaaggactgaaatggctgggattaggtctactgctagactaatagacgaaggtgagaatattgaagcaactgagacggcctcgatctcagaagtaatgaaatgttttgggttggttgttcaagagggagaagaggttatactgaagaatgatgatgctattgctgaagctagtagtgatgatgtagaagatgatgggattttgagc

SEQ ID NO: 151900 - DNA, 366 bp, Zea Mays
tgatcagctagctgttctttatcctcgtagtcgaggttgacttttgattctttatttgttggagcctcgattcttgtctaaatcggggcggcggcatgcactctgcgcggctcaacgtgtcgtgatcgtgacgtcctcttctcacatccatcatccctacttgatgccgctcagctacaatcctaaaagaacaggagaggaggaccgcaggagccaatcgttgagatggctcaagcatgactgaaactccacttgaaaccaactgcaagtgcagggacaacatacactgcagtgcaagagctaatccattttcttttagtttgtgctgtgttcaagttgctgcaattggattaaggcaacctcaag

SEQ ID NO: 151901 - DNA, 342 bp, Zea Mays
cgatcgagctctaccatttatacccaccactcctcgtcgatcggatgaacgccggggaagaaacagctcgatccgtagcttagctgcaacacatcggtgatcgttccatgtgtgtgtgattattgatcagggagcaatacaatacaatgccttgcttggcgcaagagttccaccccaagctgccggcggccagtcactactgcaagtccttgtcgtcgctcatccgggagacctacgcgcactgccatgtcccctgcgtcaggacccccgccggcgccgggtggagctccggcgaggacagcgacgacgacaacgtcctcgacgaagcgcaagacaccaaac

SEQ ID NO: 151902 - DNA, 592 bp, Zea Mays
gtggtcttgggtgtggtcagctttcaaccaatagaatcgcgccacgtagcataaatccaagaaacgttggttattcaatatatagttattcaatatatacgttgcgttgcgagtccgtctcgactcgtttcagtcgtagcggcttcataataacctcgactacatgttagtaatattgtttggtcgcaacacatgttttcgttaattaggtagttaatctgaggtttatttgaatggcatactaaatattattaaggtatagttttaaatggtgattttatagatgcaaattaatgtggttagtgcctactcagatatttttaactaatattcgtttaatgtaaacgtgacgtatgtttagcttttctcgcgtgtcgcgcgtgaggatcgtaggcgtagccgcgtgtggtctacgcactaagtcgggatgtccgcgtgttgttcgcgctgatgtgctcatggtggcgtgctgctccgcgtgtcgttcacacgtgtcgcacgtgctgttttggcgcgtcattctcgtgtttcacgcgtgaaaattcacatgttgtccgcgtgcgtcgtcgttcgcgtaaattgctatttgcac

SEQ ID NO: 151903 - DNA, 783 bp, Zea Mays
cgagtgcgatactcggtaaaacgtttaccgagtgttttaaaggttttgccgagtgcttcagacactcgacaaagcctgtatgccgagctctctttgtcgagtgcgatactcggtaaaacgtttaccgagtgttttaaaggttttgccgagtgcttcagacactcgacaaagccgtcggttctggtagtggcgtacatacagctgctgccctaatgccgcaatgcatctcctcctttacacagcaactagtgctagcccaatactgtttcccaatgcaaatgtgtagcggcctgcgcggctaagcatcagtattatatatattattgttctgcatgcgagtgtatgtgtgaagcaagtaatcgccactagattgtattcccaggcttattagtgtggcaacaaaacaaagtagctggtgaaggttgctgttttcatgccaagcagatgcttttctgctgcatacatatctgtctgtgcatgcatgctagctgatgaactagctaccatatatatataggccggccagatcgatcgagccagttcatcaagcagtacatgctatctatcaaatattctctccatttaaaaaagagattttgtttttacaataatcagtgatgactgagagtgctgcaaaactttaaaagctatcaaatcataaatattctcttcgttcttagacgaaccttgattttagcataaattctcgtggtcaaactgtgacggccccttaaacagaaaatgtgttaagattatgtcctcatatggcatcggtaagtttcc

SEQ ID NO: 151904 - DNA, 423 bp, Zea Mays
gctctttaaatagatgtttagcaagttggtatattaattttaggagtccaaaattgattggtctccaacggttcggcatacataggaaggtaaatttgatttgactttatttatggggcccatctgttttaatttaatcggaggactccgtactttgtgttgggcatataaactcccgtacaaacactgcgtcgtcggaggactccacagcaatgaagcctcgcgccatcgtttctttgttcgctacttgctgttgaaccactgctgcaggattattggatgcaacatcctgaaacctgtggaaggcgccctggcggcgagaatctacagggagtggcgaaggggaccggctgtggaagggtactcgcggcgtcgcgacgaagagaagcggcggcgcaaagcgcccactggcggcaccgggag

SEQ ID NO: 151905 - DNA, 308 bp, Zea Mays
gccgaacttgggtggcaattgccatgctgccctctgaagcacattgttgatgcagcagcattatcacattgattggaaacatgatgcaacatcagggactacaatagaaatgggttgttaagttttatggtttggatctggattacctgttgactgttgtatgccaatattgttgctttcatctgtagtcctgcaccagtaaagtacagtgtcagtatcaattgcaaatgttgttcaatgccttgtgccagacgtgccacgttagaggcttagagctctttttccccagtgtgccatcataagagctg

SEQ ID NO: 151906 - DNA, 429 bp, Zea Mays
gaaagaaagaaataagaaatcgaaatagatttgcaatgataaatagtttcatcatgaaaacatagtaaaatgtatttgcacctgctttgcaaggaccaaatatattaccaccttttatatcctgtaacaactcttccaatttcatatgaaatactcttacaggaatatcaggtgcatctgaagatttttggccagagtgttgaagaccatctacaatttcatgccactttgcattgcatgtaaatgttacaaaaaagtcgggtggaccatggactctgcagatggctatgctatcatggtaattttgtatcatatatcgttgtccaccaatgtgtgacgccggaagtacgattgtttttcccatttcgtcaccgtttatgcagcctttactaacagcatctgatatgccttgaaggttttctattcgta

SEQ ID NO: 151907 - DNA, 888 bp, Zea Mays
tgtctgcctcgatttcttcttcaatctccatgtctgcctcaataaggtcttctgtcgtgaccttgatcacgtttaagggatgaacttcagatttgtccggcgttgtcttcgctattttttcctccattgctccgactatgattggcgatgaggaggtcaatcactagcagtttgtcgccgtgaaacgattgcaaatcgttccccagcgaagtcgtcaaatctgttgctacctgaattttgttaatcgtcaaatctgttgctacctgaattttgttaagcaacagcgatgaaatctgttgctacaagccacaatcgagactagtcgagccacatatcagagctcgtaagacaatcgtctcgagccaagctcggctcgctcaccagccgagcgactcgttttcaactctagccctaggggtgaagatatacatgttgggtattggatatggatagtatacataccagtttttttatatggatttaaatatttttatactcgagcggatataggtagtaccttagctttagatcaaatatggagcgaggactacccgttaaataccaagatattcgggttagatatgggtactaaattttggttaccatttttcctttttgcgtaatattgttataaaatcgtaacttttacatataaattcggatgaagataaagtttatatgaaaatagtagagctcgaatagatctacaactttgtagtacatcacatttattatttgaacatatcttcacatcaaaatgtccaaatttatataacaggctatacatcgtatgtgttactccaatatttcatagcttaacaaatattcattaattgttaagccattcatgatttttactaagtcattcaatggtggatatatatacac

SEQ ID NO: 151908 - DNA, 533 bp, Zea Mays
attagtagccctgcaaaccagttggaaacagccatcagcaattcagcacatggtgatacgatcataacgacaaaagatgcaaacaagttatagctcaaacatcatgtagcaatattgaatacatgaacaattacaactgaatgggggctaacaccaaaaatccccaaaaaaagcaaaagcaaaattatatcacacgactgaactatggtagtgcagttaagatcaaggagagacagagaatggtgaactgtttcagagcatagctgatgcttcatgtttcttagcttctttttccttggtaccttaaataagtcctagtaatttgtaaattaatgtaactttgcaacaacctgagttactagcctatgtttctatgtaattcctatccacaaccgtattaatatgaagaagttcccctcccattttacccatttaaaaatatggtatggatatctttgatttttttaattataccaaaagcacaccaaaaatgaaattaccagaatctgagcgcaaattagatcctatttctg

SEQ ID NO: 151909 - DNA, 320 bp, Zea Mays
acaaagaagaggatacaaccaagggaaaagtaggtaaagtacaacactcagattgagatggaaaagaggagattttaaagggccgaaataagataaacatcaaagtaagatatagaggtgattagggcaaaggtgataatgatgaaaagcataatccatggacagagttaaggcaagactcgcaaagtgacgaagtggagaaaacagtcaatgatgagataagtgaggttctgacggaagagttgaagtaaaaaatcattaccaagtggagttacaaggaaacaaagagatcaccaaggatatgaaaggtaaaataaccg

SEQ ID NO: 151910 - DNA, 398 bp, Zea Mays
tccacattgatagcaagcttttcttgaagttatttcttgactttttccatgtttcccttttcgtttcttggacctgatgcgaccatgaggctgaaactgtgtgcaagtaatggtccatccatcaatgtaacactcatgtgtttcttcctggggctgggcatccttgtgatgtttcctttttggaatattttgtaattcatcaactgacagtgcattaggtatgagagactctgctattagttgttcttggggagacatctatctttttatgccagaaaataaaatatggttcttctgttttgtagtttcactttcgtttgtactgatctggcgacaaggaattccatagtacttacaacaacaacatgttccaaggtcacttgtctgttggtttggtt

SEQ ID NO: 151911 - DNA, 330 bp, Zea Mays
aattgttacctattcaataaaccatatgtcgtaaacccgttttgactcgctttaatcgcgttaacttcataacctcgtcgccatcgtgttgatgacattatttcatcgtgatgcgcgttttagctaattaatcgattatttatttatctgacagttactaaaagtagcaatctaatcaaactaacgtatactttgattcactttatagatacttgttaatatatctgcgcctgctcgtgatggtaaatttcttccgcttataatcacttaggttaaataacattaattcatcaggtcatatattttaaataatttatttaatatcgctcg

SEQ ID NO: 151912 - DNA, 489 bp, Zea Mays
tttaacagcaacataaaaaataaggcattgccatgcaatgtctacaacaaaaaccagatagcttgacttgttcatttgtttgcagcttgcaattaagtcaacaaaataacagaccagaccatgtagaacatgttctttgtaggttctgactatttaaagatgagtaaaacagtccataatttggactcttagcatccagacttcaagagtatcatgcgataaaggcatagtttatgaaatatggacatgtataaagcacagtatattgcttttcctcgggggcagtatatttagctggatcgattggggcattcttgctcgggattggtgatgaatgcataaacctaacatttaagatggcataatcacaaccaaaaggaataaagagggatgccaactgtccaagtattagaaagaaaattatgactactaggaatctggttacaattgcacagatgctagcatgcatatgacatacctggccagaac

SEQ ID NO: 151913 - DNA, 329 bp, Zea Mays
tgggacgaatgtaccctttctgttgaagttctgtgatctggagctttagttctgccaattatgtgggagccatgcggtatggtcttcttgcgattggtgcggtgcctaggattagatcaatgtagaattctacctccctttctggcggcattcctggcaattcttctaggaatacatccatgaattcttctaccacatatatgctttctgctgctatgctaaacaccattggatcttgggtgggtggctgagccttacacaaaactgactttccatggtggtcagtgagaagaacggtcttatctgcgcaacttatgacgccattatgc

SEQ ID NO: 151914 - DNA, 608 bp, Zea Mays
cgtggtgccagcttgtgtttggaggtggctgtgaggttgggatagcaaaggcaaccgaaaacacgaagaatggtgtagtcagggggctgctggtggagttgctcaaagggaactctatggtcaatggctgagcagggacgtctgtttaggagataggtggctgtagctagcgcctctgcccagtatttgggtggcatgtgagcatggatgagcagtgtgcggcacatatcgttcggagaacgaatgatgcgttcagctttgccattttgagaggaggtgtaagggcaggagagtcgtgagtgaatgtcgctggaggcaaagaatgtggtgagggcattattaacaaactcagtgcgattatcagcctgtacaaccttgatagggaggctgaactgtttgtggacataagcgcaaaaattaatgatgtgagtggctacctcggacttacggactagagggaaagtccagcaaaagtgagtgaagtcatcgaggatgactaggtagtactgcgcaccagagacactggcaacgggagaggtccaaacatcacagtgaataagctcaaatggtagagatgaaactgaactggaatttccaaagggcagccc

SEQ ID NO: 151915 - DNA, 620 bp, Zea Mays
tggtagtaaactttttgcttggttttttgcctcgcctaatggcagatctggcggtttattagtgggttttaatactgatgtgtttgatgtgagagaacacaaaactggtgaattcatgattcgcaccttgatttttcatagaaaaaaaatctcatttggaactttgttaacgtgtatggtgctgctcagaaggagaacaaaagcagatttttatgtgaactatcgtctttttgctcaagaagtcgtgttcctttgctcgttggaggcgattttaatattataagaaaagctgaagagaaaaataaacctggtggtgttaataagtggagctttctctttaacagtatcattgagcaaaatggtcttttggagtttgacttgaacaataggttgttcacttggtctaataatcggattgaccctacttttgaaaagttggatagatttctggctagtcctgagtgggatcttgcttataacaatattaatgttcatggcttgaataggtccttctctgatcatgttcctttatgcattcgaacggatgttatccctactggcagcagagttttcaaatatgagttatgttggaaggctagaccagattttcacaaaaaagt

SEQ ID NO: 151916 - DNA, 437 bp, Zea Mays
gcccagatttgatggttttctggaagcggtaactaatgcctggggttctgttcagtagtcttcttgtcccctcaagaccctttccctaaaattcaaggcgacaacaaaagggctgcaaagttggagtgacaaaaaggttggaaacttcaaactgcaacttgagcttgccagagaaatattgctgcagcttgaagtggcaaaagagagcagaattcttaatgttttggagacatggctgcttgggcgcttgaagaaatgctctctggctcttgcctccttaatccgctcggtggctaggactagatcaagaattgcctggctcaaagatggggatgctaatacaaagctcttccactcttggtctcgtcatcggaaaagaaaaaatttcatagccaaaattcaagacggggagcagctagtgaccagtcatagcgata

SEQ ID NO: 151917 - DNA, 376 bp, Zea Mays
ttgggtggaattaacttcttgactcactctatttaggttgtcgtcacggaagttcttggttatgggaagttttatgttagactgtgggtgcgatggtcgagtgattttaagggatgatgctttacagattggttcaaaaaaagcatatcctctttcaggttcttcagtccagtggggatgactgcaggggttgtgctattcggatttggcctttccaaaagggttttccctatggtaccgcttgctttgtccaaacctccattttatattatcaacttgtgtgcatgaccagacaagatgtgaatattgtccatccaattgatgtttgatgcgatgatacttcatcaggctgggttttccctatggtaccgtcggc

SEQ ID NO: 151918 - DNA, 889 bp, Zea Mays
ggtagccagacagtagtcggaacaactacatgcacacatcagtgacaacacacaagcgccagaacaaaaaaaacagcgcactacacagtacgcccacgaccaacgcgaggttagcagtagtccagcgtctaggccagcagcttcacttattagggtccctagctccatgaggcacatgcacactacagagtcacacaggaaacagagctacaatgtctcaaggcctcaagcacagatgcagtcgtccagccgagcagaggcagagctgctgcacacacacaggttgtatattcgtgcacttgaaactccctatgggaaacgacagtgaccaatgggccaagaattcatgggctttgatacatgcacacgatccgcaaaatgtaaaacggaataaaacaagaaattcctgatacaatacgggataccgtaaatacgggcgggaaacaccttcaaccgtttccggtcccgttcccggatatacctatctcggttcccgtaccgttttcacattttccagataaaacgaaaacggacggttttaaacgggaatacgggacgggacggtataattcctgtttgttttcatccctagtcccacgtccagaagattctggaaattttgcgccctgcctccgtgactctccacctccccactgacgctctcgctgtgctccgcctctcttccatgcatgcagcatgcttccctcgccttgtggccttgctgctcgtcgtggccccgcctccattgccttttcccctcgcctcctcctcgctcgacgaccgcgaccttgttgctcgacgtaagcccgcacctcggcccggcctccatcaactccctccccttcgcttcttgtctcctcctcgacacctgggaaggcgaacaaccgcc

SEQ ID NO: 151919 - DNA, 532 bp, Zea Mays
gccatgattccatgtttttcatggtctttttaccaatttccccttttttacttaaatggcttaattagggttattctagggtttgggcatttttctcactttgaggtgcatgatataattaaggcatgatccttaagataaaaagacttagttgagtttttgctcctaagtttttggtgtcttttgctcaattggattcacatgtgataatgatcttgagttagcactgagaagaaccctaggtaacactggggtgttacatcgaggcaccatccttcgatcatgtcgttgttggagccgtcgccgaggaaagcgcgtgctttcgactcatcaaggtggaggagtgctgctgcggccggtgccgctggaggtagctcgatgttggcgtgtgctaggagcagagcttcctcctccgtctccgcctatgcgacattggcctagccgcgccgtggttgccgacattccctggcccagtggccaagcttgccacagttgtgacagccgtcatctcgtgccggcttcttgttgccga

SEQ ID NO: 151920 - DNA, 606 bp, Zea Mays
gttcatacaagacataatattcaggtttgggataccaaatagcattataatcgacctaggatctaacttcactagctctgaattctttgatttctgcaaacaacagagtatccagatcaagtatgcatcagttgcacacccaagagctaatggtcaggtggaaaggactaatggtatgatactggaagcccttaggaagaaagtgttcgacaaaaggaaagtggatcagagagttaccttatgtggtttggagcttaagaactcaacccagtcgagctttgcatggaaacacccccttcttcatggtatatgattcggaggcagtgctacctaccgacctcatgtttggggcaccaaggctggtatttgaaagcatagctaaagctgaagctactaggctagaagatattgacgtgctagaggaagaacgattgaacacagtaattcagtcggccagataccagcagaccttgaggcgctatcacgataaagccatacgacaccgatcctttgtggtgggagacctagtccttcgccgaattctaacgggggaaggacagcacaagttgtcaccactatgggaagggccattcattgtatcagagg

SEQ ID NO: 151921 - DNA, 956 bp, Zea Mays
gcgtcttcccacgtggttgatgtggcgggctctcctttccagtgaaccagaagctggcggacaccccgggccaagcgggagcgtacaacgtgatccggttctggaacagcatcaccattgtggatctgcggtagggccggtgggttggccggcggcgtgcccacgaatttcttcaagagtcggacgtggaatacgtcgtggaggtgggcgcagggtggaagcccctccctcgatgagcagttcgtcctcgagctggaagctggggtagcgctcgataaaactgtcggcgtcttcccacgtggttgatgcggcaggctctcctttccagtgaaccagaagctggcggacaccccgggccaagcgggagcgtacaacgtgatccggttctggaacaacatcaccattgtggatctgcggtagggccggtgggttggccggcggcgtgcccacgaatttcttcaagagtcggacgtggaatacgtcgtggaggtgggcgcggggtggaagctccaggcggtaggtgacgtcgttgatgatggcggtgacgcggtacggtccgtagaaccgtggcttgagcttccctgacgtgggcatgtgtagtgaagaggcaacacagtggcacagacgaagccacacccaattgcccaccgcatagcggacgtctcggtgatggttgtcgtagaagcgcttgtagacggtctgggcctgctccaggcggtgacgtacgtccgccaggaactcgtcacgttccgccatgtgtttggcgactgtcgccactctcgtttcgccgggctcatacgagcggatggagggtggatcttggccataaaccacccggaacggagtgtcgcggagcgccgactggtaggcggtgttgtagatgtactcagcccagggaagccagcgcaaccactatcgaggtcgatccccttgaagccgcgcaagtacatggtgat

SEQ ID NO: 151922 - DNA, 1285 bp, Zea Mays
acgcattctgatccgccagattcgtgcgtgttgtcaatgccacaatcaacaacaatcgtgttgtcgtcctcataatcataccatgtttcacttgcattaactacgatgctagcataaggagcaaggtactcatatccgagagataggtgtgggtgtggcgatttgaatcgatttgcatctagctgggtacacccaaacacgtgatgcatcaacccaaagggatcacacacaccaaccttccccacactcgctgactccacatgccacgtcccagacaattactcaactgttagtatttgcaacatccacggctgccataatatcaggagctgctggtgtttaagacgactagacgagtctctttagctagtagattagacaatgccttggacatagtgagagtataagaactgttgagcaatcgtgcatgaagtgagtcatattcaatccgaacactcataacaaatatatatttgaagaatttctcaataaacctatgagatggacatggattagttgtataggccggtaccatgtgtcagcagtaccaaaggcaatgacgatgggcaagaagtactgaaagaaaagatgaaggctgaagcaggaagaaaaagggaacgcatgccaaatcccaagtacataggcgagcagtggagaaattaggccagtcggaccaggcccatcggatgatatatatatactatgtgctgtaataagacatgtgaacttggctgaacctaggcggcggcagacactatcacaatacgaaataccacccagcggcggatttgctgcggaggcgcacctgtgtgttcgtcttgaggagtgaaagtaatagcgatcgtaacagttggtattcggagccgtgctggagcaccaccacgactaccggacgaggctgcaattgaaggccgaagctatggcaccggcgaagagtgatgatctggtgacgtagttgttggcgaaaattgaggaagggaacaaagagacacatccgagaatggaggtgacgcagacggcgattggcaacatggaatccacggtgaagagcgtgatgggggaacaagtggagttccagaggtggcgacccgaagtggagaccagggtgacagagatcgccgaggcgctccaagccatccagccaaggtgaatgaagtggcgcagagatctgtatctgcttcatcgaaggcagaaattaaggcgacgaatggtgcgtcgggtttcgcacatctggaaccaccttctacggagacgatgcacgggcataatcgccaccactcgtcag

SEQ ID NO: 151923 - DNA, 306 bp, Zea Mays
ttcctcttcggcattccccagccacttgacgtcggatatgttctgtttgctaagtattcttgcaccaagtctctagaactgatctgcttagctaccactctaaattctacttcagccaactgacagggtgaccccagttgcatattacacaagggcctagtcattccaaagctcaaagatagtggatgcataaccatggtcatcaacttctccctctttttctcatcagccttcatatagaaccactcactcttccaaccagttggccacttcatgcggtagctaagaactggtgcctttgtatcc

SEQ ID NO: 151924 - DNA, 402 bp, Zea Mays
gggagaagcaacaggaactgcaagtttgttggctgaaaccatggtttcacccctgatcacgatcacacacgaaaacttttgaaaatgaacatgcggtagcctagttatcacttcacaaccagagcacactccgcgtttcaatccttttgtggcagacgccatccacacaaaatttcgcctgcttgttctgttcagtggtcgatgcaggcgttttcatccacctcctcgagaggaagcctcttcccttcggtgacctcctcctttacataatgaacaaagagtaaagaaagattcactaacgacaatcttaaatgagtgcacacgagatgagtcaattaatttcatacctttgcagcaatgagatatttcttgtgtgtggctttaagcttcctgaggctcatg

SEQ ID NO: 151925 - DNA, 278 bp, Zea Mays
gtcagtttgggtggttagaccacgactcgttgtaagccttaggctgtctaattagaaccccatgtccagcacccaagccctagctactcctgtaggatacttcaatttctatcaagggagtcatagtagaaatggcacacttggcaagcataatgctagtggaaagcagccatatgtattgttgtctgacatgtttcgacaatttagaatcatgctagtaatagtttattcctaccctgtttaattaggaagctagctacatgtcctttctttttctt

SEQ ID NO: 151926 - DNA, 2215 bp, Zea Mays
gaatcttcaggaagaccactccactgtaccaaaacttggggcactgcccgatgacccttcttcaccaatcgacgatccaacactgccacaggaagcaaattgcgagtagcaaaatccacagagcaaggcaagtcggaaaagacaggcgtatgatttggaataaacggtttcagctgggacacgtgaaaaactggatgaacttgagtagcagcaggtagatccagcttataggcaacctcacccactttctcaagcacccgatagggaccatagaatttcagagctagcttggggcaaggacggttgacaacagaacgctgtgcatagggttgtagtttcagcaagaccatctcacccacttgaaaatgtctttcagttcgaccccgatcagcttgcatcttcatacgattttgtgcagcagccaactgttccttgagcatttctgtaaaaacaacacgatcagccaacacctgagccacatcagcagcagttgcatctggaatcagaggagcagctgcaaatggagggtcataaccataaagcaccctaaacggggaacagcccaaagtagtgtgataagatgtgttgtaccaaaattctgctaaagccagccactgcttccactgatgaggagaattatgaacggcacagcgcaagtacatctccaagcactgattcacgcgctcgctctgaccatccgtttgaggatggtaagcagtaatgagactgagtttagtgcccaaaagcctgaataattgactccaaaatatgctcgtaaagattttatccctatcgctgacaatagatctcggaagaccatgcaagcggaccacctgatccaacacaacctgagccacttgtgctgtagtgaaaggatgtttcagagcaataaaatgggcatacttcgagaagcggtccaccacaaccaagatagtatcatagccactggacttgggcagtttttcgatgaaatccattgcaatatcctgccaggcgccttgaggaaccggaagtggttgcaataaaccagctgggtgaactctctctcctttggccttttgacaaatttgacactgtttgacaaaatcttccacatcggtcttcatgcccttccaaacaaacaatttcttcaatcgatgataagtggcgtgcacccccgaatgaccacccatggcactgtcatgcaatgctgccaccaacttcgtccggagagctgaattgtggccaacccaaattaaattgcccttcctgatgactccctgagaaagagaatatccatactcatccgggctgtggacacacaaccgagtcagcagtgactgcgcatcagaatcagtcacataagaattggtaacttcttgaatccagcgaggttgaacttcactgactgctgtcaacgccatcacacagcccacccgagaaagagcatcagcgactttgttctccttgcccggcttgtagaccactttaaactgcatccccataagctttgccatggctttacgctgcaactccgaatgaagctcctgactgcccaagaaactgagagccttgtgatccgtccggatttcaaactcgctccgttggagataatgacgccaacgatccacagccataatcagagcgatgaactccttctcatagatggaaagcttctgattggaaactcccaacgccttgctcaagaaagcgataggtctaccctgctgcatcaacaccgctccgaccccgtcatcacaggcgtcagtttcaacagcaaagggtatgttaaaatcaggtaatgctaataccggcgtggaaaccatggcctgcttcagacgctgaaaagcaacctcagcttctggtgtccacttgaaggcccctttctgcagtaacctcgttagtggtcgagcaattatcccgtacccttgcacaaagcgcctgtaatacccggtcaacccaagaaaacctcgcaaatcagtgacagtcagtggtgtcggccacttgagcatagcttcggttttctgaggatcagtagccacaccctcaccagatataacatggcacaaataaatcagctcctttttaccaaagacacatttcctctctttgagatagaacttgtggtcccttaaagcagcaaagaccaaccgcaggtgctccaaatgagagtgccaagtgggactataaatcaatatatcatcaataaagaccataacaaatttgcggagaaaag

SEQ ID NO: 151927 - DNA, 414 bp, Zea Mays
tccgcttcagggtaaaggcgtcgccttggcgccttaatcccaattggggcaacactttgtggataccttaccggttgtaggaatcaaagacaccagtttacccaaacacagcttcgacgccgacgcttttgaaatcccgacgcaccagatcaatttgctgctctagcggtggggatctcccagcggcgacgcaggcgacctcccccagcccctccgcgagctcttcaaggcggcggcgcatgggacctctccaagccggccagtccccctccacgagcggcgttgtccagggctccaggcagaaggccgtgccgacgagttccgccgaagcgctgactccctcagtccctcctcttcgagacgagcccctcctggattcccctccgcttccggtgagcacctcccctcccagcc

SEQ ID NO: 151928 - DNA, 642 bp, Zea Mays
atggctgtcaaattttagtacaagcaagataatcatgttatctacaactcttctatatgacttttctacagaaaacatgatttggtttatcaaacaaacagagcttctatataattcaagaattgccgcattctagagacttgaatcattctagcactttaccatttcttagagttaaattaattaaatgaggactaacaagtagacttacaaattttatccaaatcatttagtgcactaaaattactacaaccaattaacaacgcattcttcacgataatcacccaacaatttgcgttttaaattagacatcacatgagcactactactttttacccgcgatcataaccatacgcatttagactataacaagtaatccatcataactacgagcttaaccaaagccatctaacaagttaattaaccaaaggaatggcatagcccgccatacgacatacacatcggcttgcctattattaacgcagtccgagacaccacatgtatatatatcacaatcacttacgccatcgactcttacttaacatcagttggctaacgccgtataagacttagcaaaccattttagacattgtaactcgaaacatgggttgaagcaggttaattagtttttcttaaccattt

SEQ ID NO: 151929 - DNA, 667 bp, Zea Mays
gactaacttggccatgaacaacttgacctacataataggtacataacctatctaaccaatctagaaacaaaactagactctgcctaagttcatttagcctaaaagccacctgctaagccatctgtcctaactaccaagccattctacctacaagtctatcttaccttatgtccctaactcagatggtcaatactaggacaggaggaggtgttgatctgcctgcacgcatacgtcgaaggagggcagtaatcaattcagaatcacagatgaatcccccaaatcctccacctgccgggatggaagcattcctcgctgcccaaactcagttactgcagcaaatggccaatacaatggccaatatgcaggctcagctcaacaataatcaacatcaaccacaccagccacctcccagggacaagcacagagaatttatgagccacaagcctcccacattctccagctccccagatccacttcaagctgatgactggcttaaatctgtggaaaagatgcttaatatcacacagtgcactgatcgagaaaaagtcctttatgcatcgggtcgccttactggccccgctgctgattggtgggacgcttattgcgcagcacatgctgccgccgacaccatctcttgggcagaattctcaaccaacttccggaatta

SEQ ID NO: 151930 - DNA, 323 bp, Zea Mays
caatcttgttatgtttcttctttggagttttctttgcatcctaattattccatgaatcctttggtgacacagttttacacacgccgcaccatgatcccttctaatgtgccatcttcgtctgatgagccatctcctgctacttcatcttctcttgatgtgtcggcatctccttgtgagtaatctattattgttgacttgtcctgttccgctgagccatttttccctgctgcttttacgcctgagccatctcttaggcgtagtctccgcctttgttagcctattgattagtattctccttcaacttttgtgactactgctcttcc

SEQ ID NO: 151931 - DNA, 623 bp, Zea Mays
gtcctctgtttctccgctgcatctaatcactgtcgccgagagagagagatagagggtggcggtgtgtgccgccgggggcctccacggttgtggttagaaacgagtcgatgatggggcctcggggcatgtccgagatgtcgcgaagccatgtggcgtgtgggcgatgtggtggctgtgcgcgggagccctagttcaggctgaattcctcaccggaatcatgttggccgtagatcagcttcgattggaaacagcgttgtcgacaccacggatccaaggtaatgcaacttgcttaggttctccaccatacctacattgtgaagtcgttcaatttacaaattggagcaccagggaaccccggcaccggtcgtcggtgggcactccgccgtgttggccgcgcggctctgtcgtggctgggaagaagaagggctcccagccgtcgttcaattgatagatggcctagattggtaggcgtattctctcagctagagttgatctgtgccgtaggagggagatcgggcggatccaggttggtctcgggcaattaaatccaaatcgttgatgtcagatcgaaggggcggggctggataccggttcagctaaaaccgtgatttaatctgagccgt

SEQ ID NO: 151932 - DNA, 486 bp, Zea Mays
gatggatagaggacacacaggaaatcggtaaatgtagcgggcgaaggacgagcgctatattttagcggagagggtagcagacgttgctggacggtttccggacgattggaagcgctatatttagcgtaccgaatcgtttacagtctcctgctggagacagcctaaggagtaccgagtgttccttttttacctcctctctcattttcctcctgtccgcctgacgtttcgtggcgtccgtctacggtttacctttcttcgtcttcctcggtcctacagatccgattttctcactcatgtcgtgtgtcgtccgcaggagatcaaatttggtttactcacgccaggtgccgtctacaggagattgtctagctttgttctcatgccattcgtgaactagatcgtgtggaggcattcatgggtgcatgtttgtttaccattcagtttgcaggtatggcctctttagagaactctagaatcttcatattttta

SEQ ID NO: 151933 - DNA, 311 bp, Zea Mays
actattgctccaccttggcgcaacctctgtccatgaatgagcactgaaaacacgtttggctcacagtgtttgcccactattggtcaagtgtaaggaccaacccgactccgtgttgtcggaagacttggagctcttccggaggaagtacccctcttatctcgatgatgagctgtcgctcgaggaaagtggtgattctatgtggggccacacgtacaactggcaaaagaaagagcaggagaatcataaagaataaggaaggcacacttggagctcttttggaggaagtagccctcatatctcgacgatgagtt

SEQ ID NO: 151934 - DNA, 451 bp, Zea Mays
ccgccatgtccgcgtcggcctccgcgtgctcctgcaagaggactgcggcgctcgtgtgcctcaccaagaaggtgccggaggaggagaaggagacggcggcgctcgtggagaggctggaggagctggaggagtgcatcgacggcctggaggccggcagcgacaaagtgttcaggagcctcgtgcagaccagggttgcgctgctcaacatacacacccacatcgtctagctccagagtccagactccaatctactaattagtagttaagcatatgcatgctgtttacttgttgattagcagtcgtcgaaaaatgaagatgcatgagtgtaactgtaattctgtaaatacgtgagcttttttgtacagttacgcttgtgtatgtttactgctgaatcattatacgtgctttgcttatgttgttgggttgatctcattccagcgatcgagtcggt

SEQ ID NO: 151935 - DNA, 492 bp, Zea Mays
attagaagacaatcatatcgagagcacactgccactgcaagtaggaaagctagcgcatcacaatggcggccagaaccagcgtggttgtgctttgcttcgttgtcgcctccgcccttctcgtggcctcgtcatttgctgcccgtactccaacctttggtacgttacctatgtgtatatacacacagctctcatctagcacatgcaaatctaaagacgacgctctgaaaatattatccagttctcgccatcaattacaccatcaccatgcatgcatgctgcgtgcttccatattttgtgtcgtagaatcgagaagggagacgagggagacggttgcaggacgaaccgtgaggaatatgccagtgatcatccaccacccggagataccaagcaactcacgagccgcggtgccggtgaaagtgaccgtcggcgtcgacccagtgaccgcccacctgcatccgcagcatcctcagccttacgttccgtcgccgccat

SEQ ID NO: 151936 - DNA, 804 bp, Zea Mays
gtgaaattcgccaacggcgccgctcaatcggacttcggcgcagggtataagaaaggcatcgggaacccttcggccctcggccacctcacctcatggactgtagccgtcgttggggagagtagaaaggagggagtggaggccctatgcgccgccaccgcgtgaatcgtgggtcgccgtgaccgctcctcgcctgcgcaccttcgggcggcgcatagtacttggagtgcgtggaatcgtcctcgctctgcgccggtgtcgcgctcacggagccggagatttgccgcggaaccacgcagcaggtcaagctgggagcgacattaacctcggtgagtatctcgcctcgttactagggtatttcggctatcaataccactcggcgaggtggagtacgagcgcaagaattggataccgagggtagattggagaggatcgcgctgggtttgggtttgcgcagcaccgggttgcgcacggtcggcgtcgtggctgacgaacaggacgaagaagacgactcgccgtccgttgattaggggaccaacggctgtgattcatccggtgcgcccttctccgccgtggtagaggtagatagcgtcgtggaccgttagattgagatcgggttgaccagggcacctaggggtctcgtgcgattttggaccgtggatccgtgatccaaggaccacgtctgtgtaccgcttcactcaagtgatggtctaatccgagccatcgggatgtggatcaacggccagatccatcccgtaccccttcgtctgcatcatttgcataagagcccccgacaaactagaaaat

SEQ ID NO: 151937 - DNA, 288 bp, Zea Mays
aatggtgctcctctgtctgatactatagtcctgggtatcccatgcaaacgaactatctggtcaatgtagatttccgcatacttctccgtcctgtgggtggtgtgtactggcaagaaatgagctgacttggtcaatctgtccacaatgacccaaatagaatcatggtgcctggaggtattgggcaatcccacgataaagtccatgcaaatgtcgtcccatttccaagagggtatgtgaaggggttgcaaagggcctgctgccttcaaatgactggctttgaccctctag

SEQ ID NO: 151938 - DNA, 323 bp, Zea Mays
tgggagagggtcgctggaccgtcaatcagtggctaggattaagattctattataccgtttcgacttgggatagggttgaaccgctgaaggttagtctgtttggcagaattgattaagttagttgctcggtttattagattgattgagttagttgcttggttgttgagaaaatcaggaaggctttatcccttgttagttcgttgagaaaataaaggagcctctaactttaaagaggaacggacaaccgaaactcatcgtcccaaactcccctacatatccctttgctatactctcctctgcgatcagccaggaaccctcgccgg

SEQ ID NO: 151939 - DNA, 381 bp, Zea Mays
ctagctttgcctctagatcgacaagcaagcaactaaaacaaattaaaggacctcgttacgttgtgcagatcacacacatgccgattcttctattgctgctttgccttagaatacgattgtcagtcagaaaaggggaatcctaccaccgtagtccgtagcagtgtgtgtgtcctcaacctgcaacacgtgttgaaatataaagcgtctctgaaacaggtgacaatgcagtgccgtcagaatagatatagaaatcaagtttccatttgactctctgttctgatccatttaactcaattactcatgttactagctacggcctacggcagaatagatatagaaagcgcgtgattacctatcatgaactagtcatgtaggggcgtg

SEQ ID NO: 151940 - DNA, 340 bp, Zea Mays
gtttgaaaaaaatatggcatgtgcatagtagtaatcctttccccctggcagatggcttcggataaaaccatgcctaccgcctcaggtattggagcaaggtctcccctagatgctaaaggagaagtcagtggagaagggagtgaaacccacctccccggacctccgaagctgccattagacttagcccaagttctggccaaccaaacccgactcattgaggtcctcaccagaagccttgagaaccagcgcccgaatggtggaaggcctcaggacaggatgggagattttctaaggctcaagcccccccacattcgctagatccagcaacccgctcgacgct

SEQ ID NO: 151941 - DNA, 1004 bp, Zea Mays
ggcggccggaggggaaaagaggtactggcgctcaggatgagtggctttcaccgtggcagccctccggcaatcaccggacatgcataccgtgattcgccgtgacgtgggctagcgtttaaaacacgtggcgtacaacagcgagcgatcgacgacggcgaaatctatccggccgcacgacgagcaagtgggtacggtgaacctcatccgcgcccgagcccgagctgatccagtgccaagatctttactccgtcgtggttatcccctctccagcgaacacgaatcgcggcaacaacgtgaatcacggcgtaaagaccatcggtggcgagggggatacatccgggatctgattcagctactgtaccatgggaacccctattcagttaacctgacagtcgatgtttagggcaggttttctccaaatttgtcatggcaacataaccaatgctttgcagcaaagttgtagccctacaaaccatcttcacctttgctatagcatccctagccaaattccccttggatcatgattgaattcgagccctaagttcatgcaattcctctgtcagtctgaattcagactccaagcagtctgacagcccatctttaggtctagttatatccaaattttacacaacatcagtgcttggtcacttaataagaattgttctcctttcatagctctataggtttgatgtgttgatctagggcaaactcctcctaatttggaagttacaaagcttcaaagttgagccaattctctgaatttcagacttagccaatagagttcaaataggactttttgcaaataagtccaaatctcaaggttcatcttacaaatccacatacttgtgaaccatatgacttaaggtgccttactttcatggtttttgcactttagtccaaaagtgcactaattttgcacttagccccctagggtttaattagtaacatgtcaccttaatacaacttgtttgaaatttttgcctagtggatgcactctaggtgtg

SEQ ID NO: 151942 - DNA, 1089 bp, Zea Mays
gcatccctaggattcagtttgctgccaggaagactgtataaagcctgaccataactggtacacctgatttgcctaccagattcatcggggaaggaattgctggccaggactgggaagttggggatacaccgttgaaaatacaaatgagcccacagctgaatgaaccaccatgggccatcagtcctaagtttcttgccactgagaaggttcgagatggtcaagtgtaggaatcggtaaacctctcccaagaacagttttccaagaccaacagggctacctccggctagtcgatgagccagggaaatataattcttagtgggagcaagggaagggccacagaacataaagcgctcaagccaaagattaagaaaagttgtatgctcttttttagttactagaccttgttttggcatgctaggacatgtaagctcccttggatgagagtttgaaacgaacttcaagcatgctgaaggctaaagggctagcaaactcgatatctagaccggtgatcattactacatccataagggtaggagtcatgggcccatgaccgaaaaggaagcagtttatagcatcagaccagaagtagccaatggttttaagaaggttttcatccttctcaagaggggatagcgacagagagagcgcatcggctatgccagtggcttgccattgagattgataggtctgagccactcttctgagccatccttctcaagaactatcatgtttgtatacctaccggcgacggaggggggagaagccgatgtgctgccgtcggctctcaaaatccaaaaagggcacacacacgaacggagattagctaagcaaatagtaattaaataggttaaaagtacgattgttctttacacgatcgatttatcggccaggacggacgaacaccaccaaaagaaccattgttccagaaatgctactactaccgaagggaaatcctactaactacacgaccttgtggcgattcgggggaggagacacatcggcttcgggatcatcgccgctgccgccggtatcatcgctctcctcgtcgtcgacgtcgccgctggagctgttggtgtcgctagacccgtg

SEQ ID NO: 151943 - DNA, 349 bp, Zea Mays
taggctccccctaaagatatgcatcaagaatgaaagaaatgggtgaatgcactcatttacaaaggcaaatagggagaagcactatttatctttgattaaggctaaaaggatttgcaatacacaatttatgcctgatattcttacaatgaaaaagatttagaatactcacaaccacaccattgatgttttgaaaaaattcattgtccaaataggtgttgttgcacttgatgtctttctctttcatgtaagtgtcctccctttgtagctgtttctttttccttcctcacttattgaaaatactcaagaaagatgttaatagtacaagggagtaaatgatgaatgatggttt

SEQ ID NO: 151944 - DNA, 377 bp, Zea Mays
gccgcggcgagcgtgttcaagcgtggggtctgtagggggtggaaccctagccgttgatcggccgaagtttggtcgtgattatgttataatacccttttggctggtgggatcttggccgtgcgttattgatcgaacagagccttggcgatctcagttatttaaatccatgcccttgatattagatctaagggctactgatgcgtaccgattcagatgggtactgatttagtcatgggcgcacgattttgatcctacggctcatgtgcatagatttccctttggcttggccaaaattgcaaaagaacacccgagatagttcctaaccaacccgtcgtcctgtttttgcacccgagcccccaaaattaacttttaaaaat

SEQ ID NO: 151945 - DNA, 1286 bp, Zea Mays
gtatgatgatcagtagcacagtaatagtttgataggaatatatgctgtgctcactgagccttcgtgctcacatgagtactttaaatccggtatatcatgatcaatccaacgaggccgacaatgtttcacttatcccctcccgcctcagctctgatggcataggaggtaagtgaaattggattgctcacggatacagaacatttaaagtggtcatatgagcccggaggctccatgagctcataatatgtttcctagtttgatcgtagatgcctccttgttgtactaaaaggttttatgaaacttgattacctacagggtcgcggttatatgatttcaaaatctttatctttgcaattgtagtctaggtgatgtggacaacttatgataaagttctgtacgaaattgtcctgtcttgcagaagtggcggactttgttgaaggagctgaacgtggacgtctggaggattattagacaatagacacgccaagtgaaagtggctttaagattttgtcaaggagaggaagctacataacatggaggacttgctttgatgttctgcttaggttctatttgggactgatctaactttaaaaaattaatttggtggagctggcatagcaggttattaggtttattaggtgatccagaaaatcctagacctgcagaacctttagaaaatatcttgataagtcattttatttatattttagattaaaaatatatttaaatttatattataaactacaaccccaagctaaagttggaacatggagcaatcataaacacccctttaattcttgagggttggattttttttggatgtttgtctctagctttcttgccactgtgttgtgcttccctgataccgaggaggaacacacgttcatttaatcattttctacactaatctatatgtggatttggagggaagccttaagttggaacttcagcaatgtacctgcacgtggggtcgttgctggtaatactgggctcacacgacaccgttgctgctcatgacctttctgaaacgccaaaaagtttgtggcggtctccagaatcttgtaaactcaaaacaggattatgcatcaggtataccagttcttcaaactacgacgacactctttgctgtcaaatttagagagaatatttgtatctgcaaacatttttgagagattttttgggtatcaacagacatcaactttgaactgaatgcgtgtgagagtatctggaaaacccatggcaatgtcccaggacccccgaagctaggcgagcgaaccacctcggcc

SEQ ID NO: 151946 - DNA, 388 bp, Zea Mays
aacaaatcatatcactctcaacttgctagaaaacagactgactaaatatagaaacttatctgctgtctcttttattccttatttgctgactgactaaatatagaaacttatctgttgtctcttttattccttatctcatgtttcctttattcctggagattccttctctggtatacctttcctacaaatgcatcggtatcatttccccctcccccaaaaacaggtcgtccgcgacctggagaccaggaaaacggcgacgaaagtcctccagctgaacccaggttgcatcagctgctgattgtcctagccattgcacgagcagtttccacatacctcggttcttgcgtgccttagtaaccttctcaggctgaggcaggactgccatgta

SEQ ID NO: 151947 - DNA, 406 bp, Zea Mays
ttacaaggcaattcagcataaacatgctagtcgaactgtgtcccatcttcagccagagccttgaacccctgagtagcaaaaatggcacgcccgttgttccttgtataccagctcgtaagcctctgcctaaggcttaccaatctatgctccggcgacgaccagcagttcgtatactctggcttcaccggcacaaacctctcgacggatggcgttgcagcgatcacgtcggatggcatgctcgagctgacgaacgggacgctccagcgcaagggccacgcgttctacccggagccggtgcgcctccgcgagcctgccaacggcacggcgcggtccttctccacctccttcgtgttcggcatcctgtccgaccatgtcgagctaagcgcgcacggcatggcgttcgtgg

SEQ ID NO: 151948 - DNA, 371 bp, Zea Mays
tgggtgagggggagttgcgaaggctttttgagggtgaggagctgaggataatgctatttaactatagggagatggggatcattccgaaggttgaaccaatgtaaggtgtgatgccctcgctgtacgcgtgtaactgtagtttgtgtgataaggttgactgccttcgcgcatctggctatgttcgtaaggcgttgcgcacctggtctagcacgtttattatgtcggtccggctgtgcctgtagactttcggactgatgtaatgcgcctacgattttttgcactcgttatgctagtccggctgcacccttaggcgacttttgcgcggatagtctttttgagaagactttgaatttacgcacttgttgtgctag

SEQ ID NO: 151949 - DNA, 424 bp, Zea Mays
cactgaaccaagtttgtagtcactgaacatatacgcacagcaaacgggaggaaaccatcgagcttagctacaactagatgaagaagggtcccaggggtgccagcgcagcaggaagtcacaaacgtggctcccaagcagcagccctacacaggttcacatgcaaggtcccaagacacataatttggtctacctctcatggccaaaatatcatctttgtctcatactacagacaggagaaggacaactgcgaacaccactggtggataaacactaaagggtccaaggtttgatattttgcagggggtagccaccagaacctttgtcgtgtagcttacttcaccaaggaaccagtagataagactttaatgctcccacaatagttcaaacttggatattttcagtagagttgagacctttagtacct

SEQ ID NO: 151950 - DNA, 461 bp, Zea Mays
gcccggatcttattacacgaagaggagcatattacaacctaatcagagccgtccaaggggatatcaacaactcagatagtgcgctttctacttccactctggtctgctcaatctccattgctcgcccccaggttcgtttacctccaaagctgatcgagcactacggcgcgactcatcaatggcagtcgcccagccggaacgacgaccagcgcaccaatagcccaaacaccatccacaccccacaaccaccatgattaataggacagtttgattaagttaacttactggcaatcgatggtgcctgagagcagacgagtgcccgcggccgcttggtcgtgaccacggcgtcgttgagcccctctcgcccaaggcgaggaataaggttctgttactttcgacggtgacgatttctcctgtttgcaccatggcgaatcaatcgatcctcacccgtttatgcccta

SEQ ID NO: 151951 - DNA, 674 bp, Zea Mays
cggtccgatggggaaggttctgacgggttggccccatgcgtcagaggaggctgccggctgaggttaaatggatgagggggcatgaggtctagtctttatatcctgcgcaaagcccgactctggtgcacagcccaacccatgaacgcgctaatggcggttatggcttcctaacaaactttgacttggctgcgatcatcgtggtttcgtcgagaggacgaggcgtttgtggcacaggggccgatgcatgcgggttcagcgacatgcacaggtggttgcatgtgtgcaacactgaaatctgtttgatgcatgcggccaggtgaataaacaaatggaaaacacgcgtatggataatggatcggccaggagaaattggccaaaaggctattatgttccttttttctttccttttcctttctattttcgatttcattttcaatttaagtctaggtttgaaatgcaacttcccatttagatgcaacaatcaaaatagtcccaacatgatgcaataatattttattattttcaataatactaatgcttacttcatgaaagagaaaaagaaaataattcatgcatgtcaatattggaaattctttatgtttattaattgattttcactttctagttttgagtccaacttctaactttaacaactccaaatataatcttgtcat

SEQ ID NO: 151952 - DNA, 1052 bp, Zea Mays
tctcttctgcctctttgatgaaggcaggtccttctagggtcttttcccctacgtttgaccacatcagaggggtttggcatctccttccatacaaggcttcaaaaggtgacatcttgatgctggcctggtaaatgttgttatacgaaaattttgcatacggcaaactggacgcccaatctctgtcaaaggtcaacacacaggctctcaacaaatctttgaggacttttttgactctttccgtctgtccatctgactgggggtagtaggcggtgctgaaatccaacttggtgcccatagcttgctgaagactcaaccaaaacattgacgtgaattgtgttccctgtctaacactatttttcgcggaatgccatgaagtctgactatttccttgaggtatatccgggcgagggtggctcctctgaaggtagtatttactggaatgaagtgagctaccttggtaagacggtcaattataacccagatagaatcgttccctttttgggtttgggcagttcgattacgaagtccatgcctatttcttcccacttccatttgggcactgggaggggttgcagtaggcctgcgggcctctgatgttctgccttagttcattgacaagtatcacactgggccgcatactgagctatctcctttttcattcctctccaccagtatctggtcttgaggtctaggtacatcttggtagaccctgggtggatagaataggctgagttatggcttcatctagtaggatttctcgtgcctctcccttcggtacacacaaacagtttctgaaccaaagggtttcttcttcatctgtcctgagatccgggagttgttctttgctagccttttctgcaagtcctgccatctcggcgtccaaacgctgagctttgcgaatgaggtcttccagcatcggtttaacttctatactgccattttctcccaaacaagcattcaggtgagctgattctctctcctagtcttccaggaagtttgttgctttcttcccgaaaggtttccggttgagggcgtcagccactatgtttgcc

SEQ ID NO: 151953 - DNA, 749 bp, Zea Mays
cagcgatccgtcgatctatcggacactagccgaaggcacgacgcatcacttcacttgccatctttctgatgagtctgcttccttgctccaccttccttttttccttctttgtctgacgaatagcccaagaatccaaccaagagcagcacatgaaaatcacattagaaggatcataaaaagtcttattatcaaagcaccagtcatttcgagccctccatatagaccataaaacagctccacaaccaaacaggataagctttgtatcctttttgaaatttcgcagccacacaccaaagagctcatcaatgtttatagtggctgtttagcttagtagcatccatctttcaattctatagtggctgctaatcttttcagcagcaacaacaataataatgaatatatcttccttattcagattgttattagatataacatttctttaccacgtgtccttctgatttacagaactgaatgtttcagatggttgtggagtgaccccacctgtagtctttctgtctttcctgagatttacatccaatccacacttaggcctagtttgggagtgacctctccggttttgtgactcctaaactagcctttaaagtttacaatattaaccaattatggcgtgtctgtatctgatatatactggatcactggttctcctgcattgccctagataagccaatgcggcaatgtcaacactacaagctagtactcccttcgttctaaaatagtagtcgttttag

SEQ ID NO: 151954 - DNA, 691 bp, Zea Mays
atccagaatagaattttggagtgttatagctagcagatgagtaagaaaaagaacacacggaaacaagtgaggtcttggagggccaactaaaaacgagactgttctatcccacgcacagagttaaaactatccaattcctagaagcaagattaaagtaggattataggggagtaactttagtacagacaccttctctagttgttgtacaaaaattaaagaaacaacaacccgaagttgctctgtcagaaccatgtcgagctattgaagtattactgaagactgaattcaagaacatgaatggtaacagtgtaatgggaccgaattggaagcaccatatctttgattccattcggttttggtccaaggatcctatagtaagtttgaagactgttgttcagtaaagaatctttattaatggagatcaccttgttcttaacacaaatcaagagaaaaggagggtgaaagggggtcggttcatagaagcgctgaagatcagaacaccgaaatatctaaaaagcgaggacaaagatcaggggcattgttgaatcggatgtgttcgagtgatttggggtaaggatcgaccacggggagatagcttcggacgtgtcgcgattccgcggacctagccagaacctagccagagataattcaccggcggtcaccgtgtctcggacatttccgccaccgtgtc

SEQ ID NO: 151955 - DNA, 442 bp, Zea Mays
tggcgaaactagagcaaatatattgggggtgcaactcccttgcgggtgcataaggatgagatatgtgtgatgcatatatggtgaaaatttaactattataactaaattctggattttagggggggtgcatgtgcatccacgagctaacatgtagcttcgcccctgagtgtaagatatgggtatctagtgggtacccgatccgaagtgtattctgtgctgtgcggttcggtctgcgggtatggccacgagcctgctgcggcctgcggtaggcggtcctgccctgcctggtgcctgctagagtgctagtgctccctggcccctgctagccagttggcccaggcccattactccattgcgccattatctcccgggtcgccagcaaaagccacaggaccaaagcccaaaagcttctaggcactgagagaggcaggttgcgaccagg

SEQ ID NO: 151956 - DNA, 283 bp, Zea Mays
agtttctcccaggaagggtgaacaagagttgggtcatctggagagagaatttgacgaatccactgtcggatcgatgcacaatcggttggttcctctcacaattgacgatcagattctagaggatgtgtcaaatggtactgaattccatggtaaggatgccttcactgcttacatgttcatttgattgtagctgtaacttcatcttacaacacaacacccccgacatgtattctggttctattgggaatgctaaaacgaatatcccagcatgtgagagtgtcgc

SEQ ID NO: 151957 - DNA, 999 bp, Zea Mays
tagtgcggccctcgacagcctgcaagtgtactgtaatactttacatgaagaagtacatgtactgtatgctcgattgcacccgaacgtgccttccgacgttgctgcaatgggagccagaccatcgggaacagcaaatgaaggacctgatggggagttggacctttttaggcccactccttccatgaaccttgctgacgaacggtctcctgcagcaggaaatgaagcaacaaaggatgacgaagactagaataatatagtttagatgttatacttatgtaaaataagtaatgaagtcaagttgtacgctggagtctgtataattattactttttggtaatgtaatatgatggtgtatgctggcatgttatattttttccaaatgtttctttacctcagatgccatcacggactcgtgcacatgatggtgcagggacttcccgtggtagggaggatactcccaacctgccaccagtaccaccgactttggctgaggctatcactgccctagtcaatgctactgcggataatacatgcttcttgcgcgaaatggcgggcaatcagttccaacagcatggaggcagagctcctccccaaggactgcgtgatactacatattcggaattctctgagactcgacccccgctcttcatcaaagcagaagaacctctagaagccgatgagtgggtaagagttatggaacagaagtttggattaatttggtgcacggagatacaaaagccactgtttgccgcacaacagctgagtgggcctgctagtacttggtgggcaaattttgtagcaattcaatcggctggacatcagatcacctgggaggaattcaagctagcattccgagagcattatgttctagagggagtgctccatatgaaacaagaagagttcatccggttaaagcaagggggagatactgtaatgcagtatctcaataagttcaaccatctatcccagtatgccatcgaccaagtgaatacagatcta

SEQ ID NO: 151958 - DNA, 1398 bp, Zea Mays
taccatttcaaacttgcggattgtataacattgctactgcatatttacagtgcaaactaacaacaggttaggaaattttaacaggtgtgagtattgataagagggttctaacaaactatcagtaccatctaaagaaaaaagaataaaaagaaagacctaaccatcaggagcttccgatgtcttgcaacgctttctgctagcattaggctccttcagtattgcatcttgctttctacctttacgttgctttttctgagggctttcatctaaatttcaacagggcaacattgatacgcagaattctgtcagcacgactattgcttctcatacataagtggcaaataacaagcaaaatttgatgaacagaccggtcaagcattgtagaaatgacaataattctgcaaaaagatatcaggacgacgtaccaaccaaaatgactccatctttgttcgattgatcctgccattgtttctgtttgcttgaagagccctacaaaagtttggtaaagaaaaaaactattttaactagcgacacaaggaaaaaagtgaactacatagcaaacaggtatgtatttgttggaatgaaaggatacatatttcttaacttaaaagataaacgtaagggccaaaagggggtattccaaattgtaagtcgttttggcttttctagataattagcttctctatagacctagataggcttgcaagtgggtcagttcatggatgtccgccaagtgtccagataagtcgctagcattattgcagactttgcggtagatcgtggacccgcatggaaacactactattttgcaggctttgcagcaacctgcatgtggtcaccaggatccgtatcacattaggcattgctcattccaacagtagtagatgcagtagagcagagtgcagatgaccgttgccagcatacccataatgatccacatctgtcagggctcaagttctgaatctcatctcatatacctaattgacaactaatcagtgaatagttaatagctcaatgcaatgcaacatgcccggtgagcggtggctaaatactactccaaaaagcatcgcagatcagattcattccttctgaattcaatcaacaatccatccagtcaactggactcaacgaagcagcagcaaaggaataaacggtccaccatcctcagctattcgtaaaagtaccacatgcgcttcacaagcaagttccaatctctgatgaccagccgctgccagatgtccatgccggcctgcgcttccatcttccatgccctccaccacttcctctccaatagacaggtagagctactgccaacatcaactgcatccttgccatgctcacggacacttcaggaggccatggcgtcacttgcctcatcaccaggtccctgcaccggca

SEQ ID NO: 151959 - DNA, 524 bp, Zea Mays
agcagaggggaacctagagaggtggaggcgccgtcgggagacgcttgttgtcgttcgccccgtcccgcgcagacgccgccgccgtggaccagaacctggaggtgtcgtcgagagggaaccaccatatcacccgtgggagcgccttcgagtcagtctggtcactatttatcttcattgttgcgccctcaagcggtagaggtggaggtcgtggactgggatcgtgctgcacgccgaagggagagcaaggcggtccgcggttgcgccgagatgcccgagcttgacgaggaacaggagagcacggggtgagaccaggagagcaggaccgctgggctgggaaggaggtggtacaagaggatttggtatgggccgcaacaagcagatgggccttcgaggacgcatgcactttctatttgcaagctaaacttagtaccacatcgaccactgaattgtgcagacacatgtttataagtttttgtgcggaacatcttgtgtattcttacctgaccattgctgtcaccccaaat

SEQ ID NO: 151960 - DNA, 1841 bp, Zea Mays
acaactcatcagaacctcacttgactagagcgagttctcatcacctgtccttgatctctcacacatagagtatgcatcaagcttcattagcaagcaaaaaaacaatcaaagtggtgtatgtgtgagaacgctagattaatagcgtgagcgtcgtgcgtgtcattttcgtgcatggattagtttgtcgtctcggacccgtgctttcttcgtttcccgccggacctgccggctcaggatccttcacaggtcatccttgtgggagagtgcgtggacctgaatggtcacaagttaaaagctaattattcccactcgagttcagcaagggctgaatgcagtctccggcagcttatttattctcatacttatatttaaattccactctacgaacactctgaaaacagtgtacactacaaaataatgttttaactaactgcctcctcaacaaaacaccactcctcaaagccattgctccagcaaacggcaaccggcatcacccactgctctcaacgctaccacgcacaaaagagctggtcgcccaccaagaaacaatgttcccaagccaatccagcgcaagagcagtcggctggcggcaaaagctaacggaaatttcgtggatatgactaataaggcggtcaggttgaaggaactgagggataccctacaaggctgctctacagcggtgaagggggaagtccagaaaaaaggtttgctcagtcgttcaatggcgccgatctccataccagctcttcgcaggcttgttcgcgcggcaggattggggtgctcagctgcgaatgctgttggggtggtgccgctcgccaaggaatgatagtctgcacctttgttgctcatggtgcagtgggcacgtcagtctgcacctctctgtgtgtcccgtgggggtctgtattcggttcttttgtgttcagcctgctctgtgcgttcaccgggctttgcttctcagttgtcccagtgtctgtgtgctttagcatgatggtgtctgtgtgttctaaaaatgagtagcgtcaagagtctgtctgtgttgtcgtggaatgttcgtggtcttggcgactcggaaaaatgtgaacttgttcgtgcagctattgcctctttgtctcccactgtagcgtgcctacaggaaaccaaaacccaagaaatttctaagttcaaagctcgatcctttcttccaccaaaacttgctgatacattcctagacatcccttctactggcactaggggaggcttaatcacggcttgggacactgacgtcctggagctcagttcttttgttactcgccaatatgctttaacctgtcactttcttttagccaacacaaactctgaaatcaccataacaaatgtttatgcgccgtctgaccatagggatacaacaacttttcttgacatcctgggggaaatccactcaaacattgtgggaccttggtttatcattggagacttcaatcttatcagggatgcctcagaaaaaaataggggcagaaccaatcgacatctctgtaacctgtttaatgacactatccatgaccttgggcttctcgagctgcctctgctagactgcctcttcacctggacaaacaaacgccgcaccccaaccctggcacgcctggatcgtgccttcacaaatgagaacttcaccacttgctatccatcggcctctcttagctcttcagtcagaactacgtccgaccataaaccaattatagcaaaaatagctactacaattccaaaatctacaacctttagatttgaaaaagcttggctaaaaaacccgaatttcctaccggacattctaaacgcctggcagcctatcacccattcgactgatg

SEQ ID NO: 151961 - DNA, 408 bp, Zea Mays
cgcacacgggtgacagtgctgggcaagcaaaactgcccataacgatctcaaatttgacacacattttgtgtggggtgtaagaagttctctagcgaagtattaacccaaacaaacaagagatcaagtcacagatcggaaatccagagaaggacagggttttgatggggttttctcaaaacgaactcacacgagaatcaattcagatcacgaccaagaactgctccgtgagggcgtatgcagtgatgcaaagagtctatctccacccaaatcaaaccccaatagtacccatgcacaagaactcaaagtttctccacaaatccacaagagaaagggaagggagaaaccaagaacacaaacttcagaatttcaacaagtattcaaaactgagattgagaagtgacaaaaacc

SEQ ID NO: 151962 - DNA, 577 bp, Zea Mays
attataaagatagcttgactccccataaagttagcagtaatatatttttgggatgtgagtttgcacaaaactaagtcaaagattgtgggattccattgtaatcttgcatttttttccttatgaaatttctatataaattctgtaagattcctaagctgatactaccaattctttttgttctgttatgctaacagtttttattaggtatgagatatctacctagatatacacagtaatatgtttaaatatatacagtactatgtttagatgtacaatatgtaagtaaaaacaatgtatctggagaaatcaaaatgcgtttaactgacggagtatgtacttgcggcttagctgaccagaattgaagctttacggcgacacaaactgcttccaaagaacgtttagaaagtcgattagaatcactggcaacaacgattagaaattagataagaatcgctgccaattgaaacacaaaagcatcgacacaacattccaatcaggttgtcagtcaggcggacgtacctggtgaaacgcccggacgtgcacctactgaaacacccatatatatgtaatgaaagta

SEQ ID NO: 151963 - DNA, 444 bp, Zea Mays
atacattttaaatgaaatacctagcattgtatatttcatggtttcttttgcactcaaactaagtgtactatttgtccatgagattatattttgagaatagcattaaaaaatgtaactctcgtggatcttaaatttggaagcatttctgcatgttgatgtgccacaacaaccagatgcatacataattaggcaaatggagacttctctgctcatttattacattattaaagcataaggcagagacacctttgactctttgagacttagtttatgttggattatttaattaaagcaaaagtgagttgagttgctacatggatttcagaaatactccgtcccaaaatataagtgcacatctcacatttcgaggagtcaatcaatctcatggttgataaaatatattaaaaaacactaatattcatgataccaaataagcatcattag

SEQ ID NO: 151964 - DNA, 1649 bp, Zea Mays
gcttgggatgcggtgaaattgatgcgtctgggagccgatcgcgtgaaggaggtgaacgcacagaagcttctccaggagtttgagaatatcaagttcaaggacggcgagtctgttgaagatttcggcatgcggatcacaaatctcgtcggcaaccttcgcgccctcggcgaaattgttgaagacatccgcgtcgtcaagaagttcctacgtgttgtaccagcgcggttcacccaggtagtagtcacaattgaaatgttttgtgatcttaaggcattgtcggtcgacgagctggtggggcgtctacgtgcggcggaggagcgcattgaggacaaggtcgaacaggtggtcgacaagacggggcgtcttcttctcgccgaggaggagtggttcaagaaaaacaagcatcgcttccgctccaactacaaggagggaggtggtggctccggtgccagtgctcccaagcacaaggcgcagccacgatcagaaggtgggacctcaggttcagtcaagctgacctccgaggggacaccacggagaaaaggtcggtgtcgcaaatgcggcatctatggccattgggcggttgactgcaaacgttcaaggaaggagaaagcgaaagaaccacagaagtcggaggccaatctggccgtcggcagtgttgaggatcatggtgccctgatgttgtccatgtgcgatgttgcgcataactcatcttatgatgttcatttgacagagaagataataccaatgactgtccctgatggtgtgtgggtgctcgacactggagcaagcaaccacatgactggaaacatgtcgatgctgacacaacttgatcaaaaggttcaaggaacagtgaagtttggggacggatctcgcgtcaagatcagaggtatgggctctgttgtgatccaagaccgtaagagtggtcataaggttttgactgatgtttattacattcctgagttgaagtgtaatatagtaagtttgggtcaactggaagaaaaaggttttctttttgagggcaaaaatgggaagctgtgcatttatgatctggaacacaacctgttgatttctgctcctagaactggaaataggctgtatactgtcagatttggtttatcttcacctatatgtctgttagcaaattcagatcaaaaggcatggcagtggcatgctaggtatggacatttgaatttcagagctttacaggaattgggtgagaaaaatctggtagtggggatgccaaatgtgaagaaagtagagcaagtatgcgatgggtgtgtcttaggaaaacaacacagaaagcctttcccacaggtatctggttttagagcagaagaaaaccttgatttgtttcatgcagatttatgtggtcaaataactcctaagagtgtggggggtgcctcatattttctgctagtggtagatgatcatagtagatatatgtgggtggagatgctcaaaacaaaagatcaagcatttgaattgttcaaaggcataaaaatgagggctgaagttgaatctggtagaaggctgaaagccatgaggacagacaggggtggggaattcatttcaaatttattctcaaatttctgcagccaagaaggaattaaacactacactactactccatactctccacagcaaaatgg

SEQ ID NO: 151965 - DNA, 850 bp, Zea Mays
atctagaaacaatacccgaaaacagtctcaatgtactgtaggcccgataattcgggtacccgaatttttcgggttcgggtttgggtagcccgttctacccagttttagaccactaactcaggttcactgtagtccattccattagcaaacaacgcaatatttaatataaataattaaatatacaacaaaaacatgcatcacaactgtacaataaacatttaggggttcaaaaattttcacatagcaaaagaccaaaagtgtagcacatcagtttctgtattttcgagaaagaccaaacatcacagtctcagactctcatgcagtcgtacaaattacaatcatactcgttatcagtttaccgtaaagcacaaaggcacaaaccagaatcaacaactagccaagcagcaagcacgcgtccacaatccacacaaagtcacacgcgtcctataatcttgtcctcaacagtccacaactccacaggcgccagccagtgaggcaacccaacaaggcggcatgtcaggtgaacaacaaggtagcagcacagcgcacatggccacacagcaaggcagcacctagcaacacacgatcacatgtccagtcctccactcagtccactatccggaccaccaccagcaaccaaatgaactaatgaaggataaggaatactataccagcagcaatagcaagtcagcaacaaaataaagaaatgatctgcagtaaaaaaattcgggcctaacgggtatttcgggtaccatggagtgttacccgattaggcccaaattaaaatcgggttttgagttttgttacccgcaagaatcattcgggtaccgggcttcgggctaaacgggta

SEQ ID NO: 151966 - DNA, 457 bp, Zea Mays
tggatttaggcaatgcatagatgatatacacaattgagagatgatacgtaaataaataaaaaaaataagggagccaatgagaaaaaataagggagccaatgagaaatcaatgtgagtcactttatgggacaaggggtagggacctttatggggctgcatctgtttacaacgctatcagctatgggctaggctaattaaacacaaaacaatgtgaaaactgtaaactatttgtgggcaaaaactgtgaatcaaacagctcatgggagaagagcataaccctgtttcgtgcatgcaagaaattataaatccagcaatggtcgattatccagtcatgtaagtggaagttcacagaagcacaaaaattatcattgcgagtcactaaatcagcacttaatacttttgagtcataggccataaaggaaaattttagatgacataaagtttagtagaattgagc

SEQ ID NO: 151967 - DNA, 1119 bp, Zea Mays
gtgaagcccagctctgagcccgaacatggtgacgagattccgcctccatcatttgaagggaagcgagtgatcctaaacctcaatgcacatgtgtaccccatctgcaagtctgcattctccaaccttgccgaatgcttggttgtgctgcagctcggccggtggaacaatcttgacgacaagacatacatggaggtggatggactggagtcacgggatgccatcggctcgctcaagaaccttcggtacctgagcctccgtggtctatcacggctaacagagctcccaaaagggatcgagagccttaagaaacttgaaatcctggacatgcgaggctgccaaaacctagccagagtgtcggcaggtgtcatcaaacagttgaagcagcttacccatctggacctcaccgagtgctacatgttagagcacattggccgaggaatcacgtccctcacagagctgcaggtgttcaagggcttcgtgttcgcaaccgggactcgggggaaggaggcgtgccgaatacaagacctcagaaggctgaagaagctccagaagctcaccatttgcatcaccacggatgctaatgtaggcaagcgtgagatggcggatcttaagtacctcgctagccttcggaaactcacgattacatggagtgagataccaagcatactggagggtggcacgaagaaagcgagagagaagcgacgtggacttgttaagacgtggaccagctttcagttgccaccagacctcatgaaattggacatccggtgctaccccaaggaagagctagaactcgaatgcaacgagaagctcgagaggctctacttgagaggtggagacatgagaaggtgttccacgaaggaaccatcctccatcaagacactgcgtttgaggtatctcaggcactttgagatggggtggagtgatatccgttcaaaattcgagaaacttgaatatgtggaaatcgtagttaatgataagaatccgatggagataccagattttacattggattgggatggggtatggaccaaggatgagaaggaagagcataataaccaccagaggttgcaggcggcgcctaataaaaaagacgttgggatggataaggatgttcag

SEQ ID NO: 151968 - DNA, 1143 bp, Zea Mays
catgggaataaagtgcgcagacttagttaggcgatccactacaacccatatagcatccctgcctcgaggagaacagggtaagccaaccacgaattccatggtgatatgctcccacttccattctggaattcccaacggcttcaataaacatgcaggcctcttatgtttagctttcatgcgctggcacacctcacaggctgccacatacttagaaacatcaacctttatcctcttccaacataagttttgcttcaaatcactgtacattttggtttcgctagggtgaacggtgtaaggcattttatgagcttctctcaagatatccatcttcacctctgatttctgtggcacacaaagacggcctttgaaacaaaccaaatcattctcatcaatggtgaactgctgctgtgccacacacactctatccagaagggaggattgaatgagcatttgagtctccttgctagcggttacaacatagcacaaagcaactcccatatgatctagatccgcaatcaaaggcttggccaccttcgggacacaggtcctactgagtgcatcagccaccacatttgcctttgctaggtgatattgaattggcagatcataatcctttatcaactcaagccaccgacgctgcctcaaatttagctctttctgagtgaaaatgtacttgagactcttatgattggtgtaaatgtcacaatattcaccatagagataatgcctccacgatttcagggcaaacacaacaacggccaactcgaggtcatgggtaggataatttctctcatgtttcttcaactgcctagagccataagcaatcaccctgccttcctgcatcaacacacaaccaaggccaatacgagaagtatctgtataaactgtgaaacgcttaccactctcaggcaaggctaagataggagcattcactaacttgttcttcaatgcctgataactgacctcgcaatcattggtccagacaaaaggaacacctttctccaagagtttagtcaatgacttagtaatgctggaaaagtttggcacaaaacaccgataatatccagcaagccccaagaaactttggatttttgagacactagaaggtatcttccactccaccacaatagcgacattcttggg

SEQ ID NO: 151969 - DNA, 493 bp, Zea Mays
tgattgattgattggtcttgctgtcgtttctgctttttgttatactgtgctggctgcgcccttaggcggctcctgcgatagacttcggattttttgcgcgcttgtgcttggtccggctgcaccttttaggcggcttctgcgcggatagtcttcgcaatggacttcggattttgcgcacttgttgtgctaagtccggctgcacccttaggcgacttctgcgcggatagtcttcgcgatggacttcggattttgcgcacttgttgtgctaagtccggctgcaccttttaggcggcttctgcgcggatagtcttcgcgatggacttcggattttgcgcacttgttgtgctaagtccggctgcacccttaggcgacttctgcgcggatagtcttcgcgatggacttcggattttgcgcacttgttgtgctaagtccggctgcacccttaggcgacttctgcgcggatagtcttcgcgatggacttcggattttgcgc

SEQ ID NO: 151970 - DNA, 462 bp, Zea Mays
atcaaaatccgttatggacaattcttgaaggctgacaagagcagacagagctggagaaggaatatcactatccccctactacctctgtaatgccggttattcttacgaaccagcggaactttttcttcctctttttcgtcctcatcaaaaatacggacaatggccgatgcacggtcgcacccattgggataagcttcaacacgattacacccattgggatcagctggtgcacggtcacacccattggggaggggacatccaagaattttcaatagattttcccaagcagtcacatccatacagtatacgcaatgaatgtatcaagacagaagaaagatatcgatggagatcagaggaaagccaaatatagctactgaagtacaagtctaatcaacagaagcattgaagcacaaagcgaaatgaagaccagccaagagccatctaccagacgtccaatctgtc

SEQ ID NO: 151971 - DNA, 271 bp, Zea Mays
caagtctgttttaagcattaatgaggttgctattcgcaagatcaaaacacttctctaatctcttcacagcataaagggtcttctttacaaggttgcttcggctattagcagggggtatgacaccttgtggagttgaagggtataaatagccccaaaggaccaaactagccattgaaacccacccagattttttgtgtgcacagaacatgtctagtacaacttttcacactgcaccatatatgtcggtgcctctctaacgactagttctgaa

SEQ ID NO: 151972 - DNA, 475 bp, Zea Mays
ccggagctggccgccgccgtagtggcttttggttgggcgtgttggggaagaaggccgtggggccctccctcactggagcggctcagctcatgatgtgcagctccggcatggtggccgagagcctctctcccatggcacaatggaggtccaccgcgggagggcctgcgcgcagctgcgttccggctgataggaggaagatgatctttggcgcgatggatgggttatacacggtggggattagatgtgggttgtccaccgctggatctttggcgaacgggtcggattggaggttgtcgtgggcagattctggcccttgatcggtaatccaagggttcgcgtagaattacaggttctgacgtctatggatctaatccataccgcccaccattgatcgaacagccacgattggcccataccccttcgacctgggcattttgcgtaaacgaccccgtgaattatctgaatcaacccgccg

SEQ ID NO: 151973 - DNA, 1651 bp, Zea Mays
tgcgaataatcggttagtgcttcacttgtctcgtcaataaacattgtcataaataattgtgcaaaaattggtcctgagaatgcaatggggacacgtatgcgtgagtgtgtcgaagtgggttacatcaagtgttgcgttaggtggcatggttgcgtagaaaaatttgagggtcgccgagttgtgtttgtctgaggtgtcgacaagaattaaaaatgtctgtcaagtttatacgaatggcgagtctgtggatgattgtgtgtgctgagatgcattgtagtagtgatggcgttaaaattaacggaaatgtctcgagtgcacgccgccccatggctgtatgcgagacaaggtaatataaggtgtgctcgacacgaatgttcagtcgttgtaggtggaaattgtctttgcttaaatagagaggtggtgacatgccgaagtagtcatcgcttcctctatgtttatatgtcgagtcaaaatgcggggtactagtggtacgctaggcggtgtccaaataaattaaccggtcgatgtggtagtggtcatgcgtgatttattgttagtgagtagttggaattccgagctatatgaggattatgttaaaaactagtaggcggcgtgtaactgcgttcgtatggtgaataataggtcggtaggtattgttgattccagtagcaaatgtagtcttatggagttttacgccttgtgtaaatgcctccatgatagaccccaaaaatgtgctatttaggtgacttgtgtgttaactaattcaagttgagcaatggttgagaaacactgatcaatcggctccaacccatgttcttgagttacgatgtctaaaatggttcgctaggtcttctactgtgattagccaactcatgttaaataggagtcgatttcgttaagtgtttgttatatatgtgttgtttcggattgcgatgataagaggcaagccgacgtgtaggatgtatagcggcctatgttgttgcgctagttagccgaattaatagatgacttggttaagctcgtagtcacgatgaattgcttgttgtggtctaaatgcgtatgattgtggtcgtggatgaaaaagtagtagtgctcatgtgatgtctaagttaaaatgcaaattattgggtgaaaagcgcttcgatgttgattatcgtggggaaacgcgtggttaattgagtatggtaaatctagagcacgaaatgacttggataaaatttatgaatcaacttaatggtcctaatttgactaatttaactctaatcaacggtgaagtgttagaataattcaagtctctagaacacaactaattcttgaattatataggagctgaaatttattgattgctgttttggactgcacgcactgttttcggtgtgctgtatgtttgatgaactaaattgtgttttctgtagatatgtgctatagaaaagtggtagataacttgattatcttgctggtgttaaaatttcataaccacaggcctgatagtctaagagttatgaattttacaaactgcttgttgtgttctgtccactgacagaacagatttcgaaaactgaattgtttgattcagttcaacatggaatcaccccttggtgattataaaagttgtgtagtactttttctaagctttccaaaaagtcttgga

SEQ ID NO: 151974 - DNA, 483 bp, Zea Mays
gttacatggtactgttgttcaggcagacagtgttaattctaaactctctaaagcattagcagtcaatttaggttacaaattggattgtcataggtgagaacacatggttttgtagccttgtgatttgtgaacaacatatagcacctcctcagatctaagttcaacttccaatgcttagctaaatggtactcatgctgcatcacaatttgttacttactatagttttgtgatatgaccaaatcgttcaaatttgcataacaaatcactgtcaagtgtacagttattaggaacacccattagataacttaagttgtctatactattgactgcaaagatgtaaagctaatttgcaaataccaagtataatgttaccaacagaagttctgaataaatcggtgactgctagtatccattcagctaatacagaaggtgcaacattgacctttctttttccactgattagcaaatattaggaaatatttc

SEQ ID NO: 151975 - DNA, 339 bp, Zea Mays
gccaatgatcgctggtctgatccacctcataaactcaagtggtgaagagcgtgaaactttctctcaagtggtgaaggagatggcgtctcgtggtagaggaaatagggggttcaggcctcgtccttcatatggagattggagtagctggggttcgtggaatcactaccaattccaaacgccacaaaatttgtttcatcatcctcccccacctcctcctccatatggattttaccctcaacctcttccaaatatttttcacccaagaccacatcaacagcagtatccaagagacttcagatctgatctgcgacctcgtgagcagaactctgggagttcgag

SEQ ID NO: 151976 - DNA, 477 bp, Zea Mays
agggactgtatttttggcaagttgtattacagactatccgaggtttgagctcacacagtactaactcctaggttacggactgacctgccatgattggtggatcgtctgcctgtattaaagtcaggtgggcagagctcgggtagttaatgttgccaagtcgcaggccatctgcacctgccttttctgacaactttgacatgttttcaaaccacaaaactagttattacttgtacgatggaccgtacggccctagggcacaaaccgtccgtgaatgcgcagaaagacgacaccttgcccataatggctagtattggttggtaaggtataaatagaagtggtgctcatgtgtgggagctctcttagccattactatcgtacattgagcacattggagctttcaaacactcttactcacccgcatcgcttgagattacattctagtgaatgattgagtgaatctagtgccttgcatcatcg

SEQ ID NO: 151977 - DNA, 491 bp, Zea Mays
cccttattagggacagacggttggtcgctaaaagttatgtaccgacagttggtcgctaaatgcatttgtagcgacgggccaccggtcgttaaaaatctagaaatttaactactcaaggttggtcgctatagagacaggtggacatccgacagttggtcgctattgattgacatgtgactgttggtctaagaggcagcttcgtccattaataggaacatcttgcacaccatatagaactgcgcgtgtttgtgtcccgctttgacgctttgtaagtagtaactccttacactctacggagtggtggacccaaatgtcatggacacagttatctcctagacctatccaaagtccaaacatcgtgctcgtgtgggccctgagtgccagtggcatatcctgttattctcgcaccctactcctccagtcctcctctctgcagatctgtgtgtgttcttctcaatccaatcaagattccacgctgcagaagccaaggg

SEQ ID NO: 151978 - DNA, 1455 bp, Zea Mays
gttgatgtcaatattgcctttgtcgacacattgtctcacaaaatagtaccttatatatatgtgcatacttcgttcatggtaaattggacttttacttagggctatacgtctataccagacttattgtcaactaggagattgacctttggagcctgaataacaagcagttcactcaacaaatgactaagagaaattcctgacaagttgcatttgcacttgcaatgtactcatcctcacatgatgatagagcaactaccctttgtttctataacacccaatgaacaaattcatatcaataaataagatcaagccactagtacttttcatgacatctatgttatgagccaagtcgctgacattgaagccatgtaatatgggtcaagaggttcttgatctcatgtatcggcaaccatagtttagagtcccaggaatatatcgaagtttctgcttaactgttgtccagtggcttgcccttggtgtctccatgtatctactcacgacacctactaaaaagcaatatatggccttgtgttgactagatatctcaagctccaatcacactcatgttctttgttgcatcgataaggggagacttatcttccttgctcagtttcaacttgttctccattggaacatgatagggattgcaccctttcattctagcttgcttacaaatctttagagcataagaattctgacataaggttgtctctctccttctgatctacctaaattactagataatatgtgagtagaactaggtcactcatgctaaaacttttaatcattttctttttaaatgcatcaatatttccttgacttggtcatgtgataattagatcatcaacatacacgcccaccaatagaatgttgtcattattatctgatcgcttatacactacatgctcaagtaggtttctgacaaaaccaagtttcaacggctccttatctagtcctgcattccaagccctaggtggttgacacaacccatacaaagctttcttcagtctgatcacttttccattcccttgttctacaacaaatctaggaggttgttggacatatacatcctcaaccaagtctccgttgagaaaatgttgatttaacatccatgtgatgcaccttccaaccacttctagctacaaatgctattatcaaccttatcatctcaatacgggctacgaggtgcaaacacctctttaaagtccacccatcatggtgaacatagccttttgttactaacctggccttgtgcttgatcatgttgccttttggatctttcttcacattgaagacccacttgaggcctatagcacgatgactaccaaacaacactactagctcctaggttttattggactgaattgactccatttcaactatcattgtctcatttcagcactgttcccttaaggcatcctccacactgttaggttcttatgctgctagataaca

SEQ ID NO: 151979 - DNA, 577 bp, Zea Mays
gtctgttactaaaagaaattgggtgatcaatgcagctaaacaatgaaatgtgcaagggggcagtgttggctgattcagtaaattcagaggactgaaactgtgttttagtgatgtgtggccaacttcagagccacataacttgtgatctacatattttgggtcgtggatttttatagtaaacctgaagagccatggttggggaacaaatctgttcaggaatgcttgagctatccttgtttggaatagagagaaaaaggtgttcgaactatgtctatcaggcatgggaatgcaaacctgaataagtcactgtggatttggttcagtatttttctcctgactttggagctgtttagtatctgatctaaggattataaggcttaagtctgtatggaagattgatagtgggttagttggtcaacaaggttccttaaggtcggttcccctgttgttgcttggagctgggaaaaataaaaaggtgaagctgtgaactcagtcaaacagcagcagttcagtgtactccaaaaatatctgaagatctttttatccctgctggctgcactagcgtgtagaaatgaag

SEQ ID NO: 151980 - DNA, 535 bp, Zea Mays
ggtttgtccatgcccttatgaggctacaagatccttataaccagctgccagctgtattattaaatttgcgctaagccgtatcagatttcagtcaacgtattaagctgtatcagtgttaagtggaaaataatcctgttgtttggcacaatgattaaaggtaaaagtgataatgcagctgttggtgtgcgattgaggagcgagtctgtgagtgtacactaggaaaataacactagaacaatgcagtcgacacctgccacctggtaggatcggcgtgacgaaaccattttggtttcgccaaaaccagttcctggattagagcaaaacaaagccgagaaggagcaaatgagcgaggagagaccgccgaaacagcggcatacccatcctcctacttggcagatgctctccacctctagatatggtttacaacttacaacaaaatcggcaaatcgcagaggagagggggaaagaaaaagagcagaagacgacggtgacaaaaagaaaaatgtcagtaactgactaaactggcgctacctcc

SEQ ID NO: 151981 - DNA, 484 bp, Zea Mays
cccggatgagtatggctactctctttctcagggagtcatcaggaagggcaatttaatttgggttggccacaattcagctctccggacgaagttggtggcagcattgcatgacagtaccatgggtggtcactcgggggtgcacgccacttatcatcgattgaagaaattgtttgtttggaagggcatgaagaccgatgtggaagattttgtcaaacagtgtcaaatttgtcaaaaggccaaaggagagagagttcacccggctggtttattgcaaccactttcggttcctcaaggcgcctggcaggatattgcaatggatttcatcgaaaaactgcccaagtccagtggctatgatacaatcttggttgtggtggaccgcttctcgaagtacgcccattttattgctctgaaacatcctttcactgcagcacaagtggctcaggttgtgttggatcaggtggtccgcttgcatggtcttccgaga

SEQ ID NO: 151982 - DNA, 1229 bp, Zea Mays
tcgaatggggaggtcttgaaaaaggaggggatccctgctgcacgtgaccagaaccatccccgcccgaagtaatagcatgaagcttaggatcggatccatccctccgtggtgcagacgagaatgtgatgcggattggatacatcagcgttctcctgccagaagacatcccatcaacggcaaagggaggttcgacgatccaaagctcccttgaagcaggcaccaaggacgggtctaaacaccaagcagaacatcggtaaacagccacatccttaagctccagggtgtcaggatgaacctgatgaacactagcaaagggattaagcaattgttccacagttatggtttcccatgcatggatggggataccctgaagctcgaagtccaacaagacaggtaacacagcacccctggagttcagaaaccgggaccatttcctgcaggtgattgtgaacgtggctgccctgagaaaaggccaattgcccaccagcatctccaccatgtcacagccaggtagaaagagaatgaaacttgactgggaataatgccgaattatcagtgtcccctcttccagctccagcctaggagcaattaactcagcaatctcttcaaccggtactttctcacgatcgctgataacagtaatcaccactgccttctgaagatcatcctcagctctggtcatctgctgactccatctcaagatgcagggtttatcatcttcagcaggcgacaccggtccagcggggcgcttatccaaatcagaaatcggtttggttctacgccgtctcttgcgagtccgctgtctttttgattggacaccgacagcatcaagtgaaatcaagcctccgccgtcgccctccattgttgatggttcctggtgtcgaacagcaatacctgaatctctaggaggatgctgattgtctttccttctccacaccagtctcttcttcttcaccttgatcacagaggttgctgaagacgaagagagcctcctccagaccgagagccgtgtctcaggtcgaggttgctcccttagtctgtctccactggtcgtacttggctccggaagattgatcctcctccaaaccgagatctcagtctcaggtcgagaggcagcactgttgttcaccgccaccttcacagcctcaagcctcaccggccttttaagtagattgcaatcaaaggagcgatgcccctgcttccggcaccgaaaacacctcgtcttctgc

SEQ ID NO: 151983 - DNA, 309 bp, Zea Mays
aaaattggagagctggctggctgggttacattgcccacagcccattcattttccacgccgctagtctatgtctccatgccatacgtgttttttcctatttgtttattcaccttgccgcgtatgacatcagcatgacatcaagcaagcaacttcagcggtcgttctgttcgtgcgtgaatctcgcgcgggatctcgccagcaaaccatacgggtcgccatagtcattgatcgagctcctccgccacaacaaatcggacaccgttcgtaataaatcctcacgaatttagcggtccgttgtaactccgcgcg

SEQ ID NO: 151984 - DNA, 451 bp, Zea Mays
ctctagatgaggacttggattattttgcggcgttggatgtggctgcagcggagccttcgccgcgcgcggagggttccgaggaactccagggcgcgagtactgggtataggcggcgaagggcggtggcgaagcggagagtgagtgaattgtcgcgaagtggtaggcgttatcgtagcgaggtggagagaggtcgtcttctcgtggacgggactggtaagcgagaattgttgtcctcgccgattggggtgagtgtaggtgagggggagctgcaaaatttgtttgagggtgaggaactaaggataatgctgttcaactacaaggagatgggtatcatcccaaaggttgagccaatgtaatatatgatgccctcgctgtgtgtaagtaaccgctatttgtatgataaggttgcgcgccttcgttgatccggccgcgcccatgggcgacttctgca

SEQ ID NO: 151985 - DNA, 1241 bp, Zea Mays
tcactaaaactgaaattcagtaaaaaggtactgattttggggctcaattgtgcctaatccatgaggttttgggctgtagaatatatagaggaattaaagaccatatgatggcgaataagtctccttaagtgacttttgtttgatcctacacaaaagttggacagaaagcttgctcaaggttggactgacaggttttatttcagacttagtctatggctgattgagacctgaatttcagataaaagtgtcaagtttggagctccttggtggtcaatccctttgtttttaggctataatttctatagcaaacttggagaccaatgttgggggagtaatccctagtgagggacatacccttgaaactgcttagaaatgagagaaaacactgcacaaagttgtgctgtcagataaaagagtattgactgttgtgcagtagcctaagtctgaaatatgtgtgtctggttaaactttggagctttgtggtgcttgatctatatggttttggactgaagttattgtgaaaagtttgaataccatatgttagtgaataagtttctttaagtgtgttaggcgtgaccctacacaaaaagtggtgtaaatactgcccaaagtgggactgtcagtcacacaaactgaatttcattcagtccaatgaaaactgaatttcagtgcaatttgttgaacttcagagctcttttgtggctaatccataaagtgttggaccatggtgtctatagtgaagtggtaaaccataaaaagatgaacaaatctcttaaagagagtttgtcctagtgctatacagaaattggagtaaagcgtgcccaaaaacctactgtcagatatatggtgaccagcttaatattcagttagctgcagctgaattcagtatttttgtcccactttggagcaccataatttttgatctgtgagccttcagccttgggttactgcagcaggtttgtagtgctttgtttggtgagcaagttttattaacgaaggtcggcatgtattacttggaatcgagagaaacagaggggttaaaagtagggtttcagtttggtgccaagtgctgtttcagaatctgaaacgagtttcagtgttgctgaaattttgaaaacagtgtattcctctccactttggacccatttaggttctaattcttaagctttcggtggataatcattatatcaaatttggagatctattgtaggggaacacttcttatgaacaaggatctctct

SEQ ID NO: 151986 - DNA, 727 bp, Zea Mays
aaatggaaacaatggctaactttggctgagctgtggtacaacacaagttttcacacatccctgggttgttctccatttaaggccctctatggatataatgctccttctggattttcccttcctgctgatctgacccaggattcagctgctgtggattgggttacagagcgcgatactcacttggctttgcttaaagaacacttggcgcgggctcaaaaccgtatgactcaacatgctaataggcagagaatggacagatcttttcagattggggacaaggtgcttctgaagcttcagccatatgctcaaacgacagtcgtcaatcgcccctgtcccaagctggcgtttaaattttttggccctttcgaggttcttcagaagattggagctgctgcctatcgtctgaaacttccagagggatgtttgattcatcctgttttccatgtcagccagcttaaacccttcacacccaattatacacctgtgtttgcagactttcaagaatttccagatctgagtacacaggcgctgcaacctgagagcattctggaccgtcgtttggtgaaaaagggctctaaagctgttccccaagtgcttgtgaagtggactaatctaccagcgtcttcggcaacctgggaggactggtacgtactcaaggcaaggtatccgtcggcgtcagcttgtggacaagcatcagctccaggggagggacttgtcgcgcccgttc

SEQ ID NO: 151987 - DNA, 635 bp, Zea Mays
caacactggcgatcgtatctttgaggtcgtcgcttcctcgttcacacttatcattacaatataaagttttttcttgaccaacaattgtccactatgacctaccaccagtggatcagcaacttgtttggcttcaattttgtgctggagtactgctcggggcacctcaactctatatatagttgatgtgttgtcctgctgtggctctaactctatggccacagtcatcaaccctgactcaaaatttgcaaccactgagctactcgccctgtcagtgccctcgtttcgtcttcttgaggacatacacgtcgccacagaagatgacgcagaaggcgatcacattcaacgacagctgctggaggcttcccttgctcctcgcatgttggggctagaacaccacacacatcgacccctagtgcacttttgacatcttttagagcacccagtatagcggcccttggacacctcttgccctagcgtagtccacaacttatggcctcatctacaacaagaacatcttcatgttagcacaactcaatatgtgccactaggtggttgcattggcccattctgctagccaagaagggaccaagaaagacccttcaacgcatgcacatgaacttttgtatctgcaatga

SEQ ID NO: 151988 - DNA, 418 bp, Zea Mays
ttcagccattgaaagacagagcatatccggcctatctgtaccgaggcttggctgattcaacccgggtgaccaacagaagaattcctactgtggacttggtgaaccggctcgagatgatactcagaggcaaggtgtcgaacatcgacactcctgttgcatactcggcctggaatttgcctccctcccaggcctttatcagtttcgtgtcaaatcctcctgctgatgatagcggtttgggccttagagtacgaccctctctcgaagaagaagttagtgctttggttgcctcactcggagagattcctgacgacgagaggcaggttcattctgaggtgcctttgaatccaagtgacgcggagataagtgccatgctggatatgttagctgaagattcttctgatgcagtccctactgaaac

SEQ ID NO: 151989 - DNA, 467 bp, Zea Mays
gtaccaattcaccataacaatcgaattcagtacaaacatcataaattgttcaaaggaatccatgacatacaaatgcatcaaataatcttgtaacatgtttgcacacctggccacaattattttctattacaacacgacacgacataaaatacagctattatgtcctgcacgacttatggttcgaactaagtagaatgttctcaacaaacatgtaacataataaactgtcgacggcatgcatgaggtccacggcatgtgacagaacgatttaaattactcaaacctaaaaataaactgctgcaacttctttttttgttcctccatcataatccaaacttctggatcaacatctgcttcattcgttgaacacaacatctgtaatcgtgattgggccgattcgagttcttgaagtttcaattccctttgtcgaattattaccttctctgcttccagttccaacctctttt
